United States Patent Application Publication US 2006/0134663 A1 - sequence listing, part 25

SEQ ID NO: 32158 - DNA, 2088 bp, Homo Sapiens
cggggagctgggccgctttttgtcagctccgagctcggcccctcctccctccctccgcccgccccaccagccggagcccggcccagtgctccagagaaaggccggcctgcagcacccgccaccgtcgcggccgcccgcaacgtccgtccgtggatgatgctggaaaaatagaacacgatggttcttctggaatgaccatggacacagagtcggaaattgatccttgtaaagtggatggcacttgccctgaggtcatcaaggtgtacatttttaaagctgaccctggagaagatgacttaggtggaactgtagacattgtggagagtgagcctgagaatgatcatggagttgaactgcttgatcagaacagcagtattcgtgttcccagggaaaagatggtttatatgactgtcaatgactctcagccagaagatgaagatttaaatgttgctgaaatcgctgacgaagtttatatggaagtgatcgtaggagaggaggatgctgcagcagcaggacacgcgccggtgcacgagcagcaaatggatgacaatgaaatcaaaaccttcatgccgattgcatgggcagcagcttatggtaataattctgatggaattgaaaaccggaatggcactgcaagtgccctcttgcacatagatgagtctgctggcctcggcagactggctaaacaaaaaccaaagaaaaggagaagacctgattccaggcagtaccaaacagcaataattattggccctgatggacatcctttgactgtctatccttgcatgatttgtgggaagaagtttaagtcgagaggttttttgaaaaggcacatgaaaaaccatcccgaacaccttgccaagaagaaataccgctgtactgactgtgattacactaccaacaagaagataagtttacacaaccacctggagagccacaagctgaccagcaaggcagagaaggccattgaatgcgatgagtgtgggaagcatttctctcatgcaggggctttgtttactcacaaaatggtgcataaggaaaaaggagccaacaaaatgcacaagtgtaaattctgtgaatacgagacagctgaacaagggttattgaatcgccacctcttggcagtccacagcaagaactttcctcatatttgtgtggagtgtggtaagggttttcgtcacccgtcagagctcaaaaagcacatgagaatccatactggggagaagccgtaccaatgccagtactgcgaatataggtctgcagactcttctaacttgaaaacgcatgtcaaaactaagcatagtaaagagatgccattcaagtgtgacatttgtcttctgactttctcggataccaaagaggtgcagcaacatgctcttatccaccaagaaagcaaaacacaccagtgtttgcattgcgaccacaagagttcgaactcaagtgatttgaaacgacacataatttcagttcacacgaaagactacccccataagtgtgacatgtgtgataaaggctttcacaggccttcagaactcaagaaacacgtggctgcccacaagggcaaaaaaatgcaccagtgtagacattgtgactttaagattgcagatccatttgttctaagtcgccatattctctcagttcacacaaaggatcttccatttaggtgcaagagatgtagaaagggatttaggcaacagagtgagcttaaaaagcatatgaagacacacagtggcaggaaagtgtatcagtgtgagtactgtgagtatagcactacagatgcctcaggctttaaacggcacgttatttccattcacacgaaagactatcctcaccggtgtgagtactgcaagaaaggcttccgaagaccttcagaaaagaaccagcacataatgcgacatcataaagaagttggcctgccctaacaatacttctacagaacgtttgtagagatattggccttgaagcagaaaattcattttaaagccaatcagtctcattcacatacaatactgtatattgatttatgctgtgtacaaatagaattattacttctagttgacttttttttaaatatacattttgctcagtagt

SEQ ID NO: 32159 - DNA, 5527 bp, Homo Sapiens
gccggcctgcagcacccgccaccgtcgcggccgcccgcaacgtccgtccggagctgtgactgatgagaattaaaggccatggatgaagatgggcttgaattacaacaagagccaaactcattttttgatgcaacaggagctgatggtacacacatggatggtgatcaaattgttgtggaagtacaagaaactgtttttgtttcagatgttgtggattcagacataactgtgcataactttgttcctgatgacccagattcagttgtaatccaagatgttattgaggacgttgttatagaagatgttcagtgcccagatatcatggaagaagcagatgtgtctgaaacggtcatcattcctgagcaagtgctggactcagatgtaactgaagaagtttctttagcacattgcacagtcccagatgatgttttagcttctgacattacttcagcctcaatgtctatgccagaacacgtcttgacgggtgattctatacatgtgtctgacgttggacatgttggacatgttggacatgttgaacatgtggttcatgatagtgtagtggaagcagaaattgtcactgatcctctgactaccgacgtagtttcagaagaagtattggtagcagactgtgcctctgaagcagtcatagatgccaatgggatccctgtggaccagcaggatgatgacaaaggcaactgtgaggactaccttatgatttccttggatgatgctggaaaaatagaacacgatggttcttctggaatgaccatggacacagagtcggaaattgatccttgtaaagtggatggcacttgccctgaggtcatcaaggtgtacatttttaaagctgaccctggagaagatgacttaggtggaactgtagacattgtggagagtgagcctgagaatgatcatggagttgaactgcttgatcagaacagcagtattcgtgttcccagggaaaagatggtttatatgactgtcaatgactctcagccagaagatgaagatttaaatgttgctgaaatcgctgacgaagtttatatggaagtgatcgtaggagaggaggatgctgcagcagcaggacacgcgccggtgcacgagcagcaaatggatgacaatgaaatcaaaaccttcatgccgattgcatgggcagcagcttatggtaataattctgatggaattgaaaaccggaatggcactgcaagtgccctcttgcacatagatgagtctgctggcctcggcagactggctaaacaaaaaccaaagaaaaggagaagacctgattccaggcagtaccaaacagcaataattattggccctgatggacatcctttgactgtctatccttgcatgatttgtgggaagaagtttaagtcgagaggttttttgaaaaggcacatgaaaaaccatcccgaacaccttgccaagaagaaataccgctgtactgactgtgattacactaccaacaagaagataagtttacacaaccacctggagagccacaagctgaccagcaaggcagagaaggccattgaatgcgatgagtgtgggaagcatttctctcatgcaggggctttgtttactcacaaaatggtgcataaggaaaaaggagccaacaaaatgcacaagtgtaaattctgtgaatacgagacagctgaacaagggttattgaatcgccacctcttggcagtccacagcaagaactttcctcatatttgtgtggagtgtggtaagggttttcgtcacccgtcagagctcaaaaagcacatgagaatccatactggggagaagccgtaccaatgccagtactgcgaatataggtctgcagactcttctaacttgaaaacgcatgtcaaaactaagcatagtaaagagatgccattcaagtgtgacatttgtcttctgactttctcggataccaaagaggtgcagcaacatgctcttatccaccaagaaagcaaaacacaccagtgtttgcattgcgaccacaagagttcgaactcaagtgatttgaaacgacacataatttcagttcacacgaaagactacccccataagtgtgacatgtgtgataaaggctttcacaggccttcagaactcaagaaacacgtggctgcccacaagggcaaaaaaatgcaccagtgtagacattgtgactttaagattgcagatccatttgttctaagtcgccatattctctcagttcacacaaaggatcttccatttaggtgcaagagatgtagaaagggatttaggcaacagagtgagcttaaaaagcatatgaagacacacagtggcaggaaagtgtatcagtgtgagtactgtgagtatagcactacagatgcctcaggctttaaacggcacgttatttccattcacacgaaagactatcctcaccggtgtgagtactgcaagaaaggcttccgaagaccttcagaaaagaaccagcacataatgcgacatcataaagaagttggcctgccctaacaatacttctacagaacgtttgtagagatattggccttgaagcagaaaattcattttaaagccaatcagtctcattcacatacaatactgtatattgatttatgctgtgtacaaatagaattattacttctagttgacttttttttaaatatacattttgctcagtagtgtgttctgaattctattcagtttgtttaataaatagggaaaactggcaacatgctagttacttttaataaagtaatccctgattctataccgaagttttatatcttagaattttatatttatttaaatatttaccttgcttaccttgatggtactcttctaagaccattaacttaaggtaactttatattggtaactctgaaagtattcatgttgactcatttttttccccatacatttctcacaataaaattgtcagagacatctactaatataaatgggagattttacagtcaggtctaattatcataacatggaagtcatttacttgtcttgcttaatattttcagaccacttgacagtgaaagtttccatttgagctgttgcgtccctggctttgctgagtaaagagcagtggctgggttcgtgtttacttttcaaatatacttccttttcggctttctttggattatttacatcttttgtccagcgtagcaaacttttagaaaaccttattgaaaaactgtgcttgctcatgttgtattttgattattctgtctgtgcggcttcatcttggaatggttgtgtgctacaaatgacacttactgaggactgcattttggaatctcctagaggtaactcatggcttataggatcttttgcaactttatgtatgtaaatgtaccctgaattatatatatacacatatatatcatgtacctgtgtgtattgcttattttacatatttatacacacaaccccaagtagtagttgtttaaaatctataatgaaaagtattaaatttacaataacatgaaagatccagggatgcatgagagagcattttgtaagtcatgctcttcagagagactactcaggtgaagaattagaaggaaaataaggacactagtatttttaaagagtaaagatattttcttttaaatatctttggtaattgaaacatagaggttaagatgtttctaggtagaatgttttcatacaatttcacctccatgtctttatgtttttctgaaaagcaaatgagtatccagacatgactcccacagttctctttgagaagcctgagagggaactctgtcttacctagtgagggggatggaaaagaagtgatggctctgtggaccagagaacgggtgctaattatgacttcacactcggcaagttcaggctgatctgttatttctcagttacagttagcaaactttaaaaacttaacactcaagttggctttgattaaaaggtaaagatgtgttttaagtggataaggaaagtctgaggccttatttggaacatcactaagtcttccacaaggttttttgtttgtttgttttttttttgttgttttttttttcttaagacggagtcttgctctgttgcccaggctggactgcagtggtgtgatcactgcaaacctctgcagctcactgcaacctctgcttcctgggttcaagcaattatctgcctcagcctctcgagtagctgggattacaggcgcccaccaccacgcccggctaattttttgtatttttaatagagatggggtttcaccatcttggccaggctggtcttgaaccctgacctcgtgatccacctgcctcggccttccatagtgctgggtttacaggcgtgagccaccgtgcccagacaccacataggtctgaatcagtgtcatacattcataaaacaaactcggttaattagaacttggttatgttaagacgaatctgggagaacagaaaacagtttttggggtcccttcagttggctattggtccgtatgcatctagcacattgtaggagatttagaaattgtcttcccacccgatagctgccttgtcacctcattatggtgctccatcccctgtgtgcttaggtttttacctttcatctttctctttgccattgatgtttgtattcaagagttatatttttagggttagaaatcaaaatatttggtgtttggcaaacctctgaagtgctagactgatttagtctagttttaaaccaagtgctttaggcaggtgtgaactccagcccaaatgccagtcaaagtcaaggcatgggttttcctagcctatcttataggaaattcctgtaccttcttggcccccataatgtgtttttttttttttttttttttaaaactaacttacaattttgtgatccgtgattcattgccctgcgattcttgaaagctctgtctgtttttttgtgagaacctttaaaatctcccttaatttttattttcccagaaataatgtaaaaacacttaaatgaaagtggaaatgtattaattttaaatcctataaaattaatacagaaaatataaatgattgggtcatttaactatatttttttaaataaactgaaagataaagaacacaacacttcacacattttatatttctcttacatactccggaatcatacacagttctttttaaagcacaacattaaaacctttaaaaggtatttaagggtttggtcaagtgaatatgataaaacatacttgtctgtataaagagaaaatgaaattgtagtcactgttatgtactgacattagttacaacctagttttaattcttaaaacattttgattagcaaagctaaaaaaaaatggatgtttcagttaaatgttttaaagaggtacagatttttacaaggacataatataagttattgttctgtagaaatatcctattaaatattgtatgtccctccctctgtacactttgtaaagaaagtaaaatacataaaaacaaaatcatatagggatgtgtgacattattgtaattgtgtacttgagaataacgtgcaaaaataaaaatcagaatattttcctgtt

SEQ ID NO: 32160 - DNA, 5527 bp, Homo Sapiens; identical to SEQ ID NO: 32159

SEQ ID NO: 32161 - DNA, 1650 bp, Homo Sapiens
actttcctgccccttccccggccaagcccaactccggatctcgctctccaccggatctcacccgccacacccggacaggcggctggaggaggcgggcgtctaaaattctgggaagcagaacctggccggagccactagacagagccgggcctagcccagagacatggagagttgctacaacccaggtctggatggtattattgaatatgatgatttcaaattgaactcctccattgtggaacccaaggagccagccccagaaacagctgatggcccctacctggtgatcgtggaacagcctaagcagagaggcttccgatttcgatatggctgtgaaggcccctcccatggaggactgcccggtgcctccagtgagaagggccgaaagacctatcccactgtcaagatctgtaactacgagggaccagccaagatcgaggtggacctggtaacacacagtgacccacctcgtgctcatgcccacagtctggtgggcaagcaatgctcggagctggggatctgcgccgtttctgtggggcccaaggacatgactgcccaatttaacaacctgggtgtcctgcatgtgactaagaagaacatgatggggactatgatacaaaaacttcagaggcagcggctccgctctaggccccagggccttacggaggccgagcagcgggagctggagcaagaggccaaagaactgaagaaggtgatggatctgagtatagtgcggctgcgcttctctgccttccttagagccagtgatggctccttctccctgcccctgaagccagtcacctcccagcccatccatgatagcaaatctccgggggcatcaaacctgaagatttctcgaatggacaagacagcaggctctgtgcggggtggagatgaagtttatctgctttgtgacaaggtgcagaaagatgacattgaggttcggttctatgaggatgatgagaatggatggcaggcctttggggacttctctcccacagatgtgcataaacagtatgccattgtgttccggacacccccctatcacaagatgaagattgagcggcctgtaacagtgtttctgcaactgaaacgcaagcgaggaggggacgtgtctgattccaaacagttcacctattaccctctggtggaagacaaggaagaggtgcagcggaagcggaggaaggccttgcccaccttctcccagcccttcgggggtggctcccacatgggtggaggctctgggggtgcagccgggggctacggaggagctggaggaggtgagggggtactgatggagggaggggtaaaggtaagagaagctgtggaggaaaaaaatctgggggaggccgggcgtggcttgcacgcctgtaatccagcctttgggaggccaaggcaggcagttacctgagatcaggagttcaagaccagcttggccaacagcgtgaaacctcgtctctactaaaaatacaaacattagctgggcatggtggcaggcgcctgtaatcccagctactcgggaggctgaggcaggagaatcgcttgaaccctgggagacaagaggttgcagtaagctgagatcacaccactgcactccaggctgggcaataagagcgaaactccgtctcaaaaaaaaaaaaaaaaaaaaaa

SEQ ID NO: 32162 - DNA, 4053 bp, Homo Sapiens
ctcgagatccattgtgctctaaaggcggaccacagctcagccaattggcttggagatgtggcgggttgccacttccctgtgggtctctgcggcactcttctgcctggtgactgacaccttggaaatgaagtttatgacgtcatcgttgcggctggccaatagaaaaagctcccgcggagaggtgttccttccccttcgactcagcttcttcacccgcgtgagcgagcgcgcgcgcgcggagggggtggggaaaatctcaagcagggtggcgcgcatgagcggcgaagctcctcctccccgcctatatataaagggctggcgcggggctcggcggcgccatttcgtgctggagtggagcagcctctagaacgagctggaggattctgcctaccgatacagagccttcgagtcgtccggggccgccattacaatccacctccatccgcttggaaatggccttcgtcccggcctatgactggtcccagcgggcagtacagaccccttagaagcccctggagctcccctttttcgggccccgcccaatcctcggagtctgtccaccccctctactccgccctcaagaggatttcaaagatggaggcggcggctccctaaaccacttttcgtgttcatccgcctccatccgagatcgaaacgggacctcgtcggccccgtaggagcccgacaagaagagggaatccctgcagaccaacagcgggctatattgacgacggtgtctgagatcggggaccgtcttttgaagagtcagtccctccttagttgcccgcctcagctgaggccgccgccattttcttgctgtccgccgtctgcagagcgcgccaagctgcccggagctctccgagaggccccaaagagactgctttcgtgccggccaggcagggggtttgtcgcctggaggcccaagaggaacggcctccccccaacttagcgggttatgctggaccgggcggtgaggggaaccgaggccacccggactttccgcggctgagggcagcgccggttccttgcggtcaagatgctgcaaaacgtgactccccacaataagctccctggggaagggaatgcagggttgctggggctgggcccagaagcagcagcaccagggaaaaggattcgaaaaccctctctcttgtatgagggctttgagagccccacaatggcttcggtgcctgctttgcaacttacccctgccaacccaccacccccggaggtgtccaatcccaaaaagccaggacgagttaccaaccagctgcaatacctacacaaggtagtgatgaaggctctgtggaaacatcagttcgcatggccattccggcagcctgtggatgctgtcaaactgggtctaccggattatcacaaaattataaaacagcctatggacatgggtactattaagaggagacttgaaaacaattattattgggctgcttcagagtgtatgcaagattttaataccatgttcaccaactgttacatttacaacaagcccactgatgatattgtcctaatggcacaaacgctggaaaagatattcctacagaaggttgcatcaatgccacaagaagaacaagagctggtagtgaccatccctaagaacagccacaagaagggggccaagttggcagcgctccagggcagtgttaccagtgcccatcaggtgcctgccgtctcttctgtgtcacacacagccctgtatactcctccacctgagatacctaccactgtcctcaacattccccacccatcagtcatttcctctccacttctcaagtccttgcactctgctggacccccgctccttgctgttactgcagctcctccagcccagccccttgccaagaaaaaaggcgtaaagcggaaagcagatactaccacccctacacctacagccatcttggctcctggttctccagctagccctcctgggagtcttgagcctaaggcagcacggcttccccctatgcgtagagagagtggtcgccccatcaagcccccacgcaaagacttgcctgactctcagcaacaacaccagagctctaagaaaggaaagctttcagaacagttaaaacattgcaatggcattttgaaggagttactctctaagaagcatgctgcctatgcttggcctttctataaaccagtggatgcttctgcacttggcctgcatgactaccatgacatcattaagcaccccatggacctcagcactgtcaagcggaagatggagaaccgtgattaccgggatgcacaggagtttgctgctgatgtacggcttatgttctccaactgctataagtacaatcccccagatcacgatgttgtggcaatggcacgaaagctacaggatgtatttgagttccgttatgccaagatgccagatgaaccactagaaccagggcctttaccagtctctactgccatgccccctggcttggccaaatcgtcttcagagtcctccagtgaggaaagtagcagtgagagctcctctgaggaagaggaggaggaagatgaggaggacgaggaggaagaagagagtgaaagctcagactcagaggaagaaagggctcatcgcttagcagaactacaggaacagcttcgggcagtacatgaacaactggctgctctgtcccagggtccaatatccaagcccaagaggaaaagagagaaaaaagagaaaaagaagaaacggaaggcagagaagcatcgaggccgagctggggccgacgaagatgacaaggggcctagggcaccccgcccacctcaacctaagaagtccaagaaagcaagtggcagtgggggtggcagtgctgctttaggcccttctggctttggaccttctggaggaagtggcaccaagctccccaaaaaggccacaaagacagccccacctgccctgcctacaggttatgattcagaggaggaggaagagagcaggcccatgagttacgatgagaagcggcagctgagcctggacatcaacaaattacctggggagaagctgggccgagttgtgcatataatccaagccagggagccctctttacgtgattcaaacccagaagagattgagattgattttgaaacactcaagccatccacacttagagagcttgagcgctatgtcctttcctgcctacgtaagaaaccccggaagccctacaccattaagaagcctgtgggaaagacaaaggaggaactggctttggagaaaaagcgggaattagaaaagcggttacaagatgtcagcggacagctcaattctactaaaaagccccccaagaaagcgaatgagaaaacagagtcatcctctgcacagcaagtagcagtgtcacgccttagcgcttccagctccagctcagattccagctcctcctcttcctcgtcgtcgtcttcagacaccagtgattcagactcaggctaaggggtcaggccagatggggcaggaaggctccgcaggaccggacccctagaccaccctgccccacctgccccttccccctttgctgtgacacttcttcatctcaccccccccctgcccccctctaggagagctggctctgcagtgggggagggatgcagggacatttactgaaggagggacatggacaaaacaacattgaattcccagccccattggggagtgatctcttggacacagagcccccattcaaaatggggcagggcaagggtgggagtgtgcaaagccctgatctggagttacctgaggccatagctgccctattcacttctaagggccctgttttgagattgtttgttctaatttattttaagctaggtaaggctggggggagggtggggccgtggtcccctcagcctccatggggagggaagaagggggagctctttttttacgttgatttttttttttctactctgttttccctttttccttccgctccatttggggccctgggggtttcagtcatctccccatttggtcccctggactgtctttgttgattctaacttgtaaataaagaaaatattctttagagcacaatggatctcgag

SEQ ID NO: 32163 - DNA, 2733 bp, Homo Sapiens
ggcggaattgcattttgtgaaaaaagaacaagaattttctgcaaggatcatatctaagtgcactttttgctgatacttcatttctaatcttgtagaaaatttcagctgtagcccttggactagaagctgaaataacagaagctgtgtacgatgcattagggtattgaagaaaattaacttttgaattaaatatttggaatataaggaaataaggaaagttgactgaaaatggggcggaagaaaatacaaatcacacgcataatggatgaaaggaaccgacaggtcacttttacaaagagaaagtttggattaatgaagaaagcctatgaacttagtgtgctctgtgactgtgaaatagcactcatcattttcaacagctctaacaaactgtttcaatatgctagcactgatatggacaaagttcttctcaagtatacagaatataatgaacctcatgaaagcagaaccaactcggatattgttgaggctctgaacaagaaggaacacagagggtgcgacagcccagaccctgatacttcatatgtgctaactccacatacagaagaaaaatataaaaaaattaatgaggaatttgataatatgatgcggaatcataaaatcgcacctggtctgccacctcagaacttttcaatgtctgtcacagttccagtgaccagccccaatgctttgtcctacactaacccagggagttcactggtgtccccatctttggcagccagctcaacgttaacagattcaagcatgctctctccacctcaaaccacattacatagaaatgtgtctcctggagctcctcagagaccaccaagtactggcaatgcaggtgggatgttgagcactacagacctcacagtgccaaatggagctggaagcagtccagtggggaatggatttgtaaactcaagagcttctccaaatttgattggagctactggtgcaaatagcttaggcaaagtcatgcctacaaagtctccccctccaccaggtggtggtaatcttggaatgaacagtaggaaaccagatcttcgagttgtcatccccccttcaagcaagggcatgatgcctccactaaacacccaaaggatcagtagttctcaagccactcaacctcttgctaccccagtcgtgtctgtgacaaccccaagcttgcctccgcaaggacttgtgtactcagcaatgccgactgcctacaacactgattattcactgaccagcgctgacctgtcagcccttcaaggcttcaactcgccaggaatgctgtcgctgggacaggtgtcggcctggcagcagcaccacctaggacaagcagccctcagctctcttgttgctggagggcagttatctcagggttccaatttatccattaataccaaccaaaacatcagcatcaagtccgaaccgatttcacctcctcgggatcgtatgaccccatcgggcttccagcagcagcagcagcagcagcagcagccgccgccaccaccgcagccccagccacaacccccgcagccccagccccgacaggaaatgggtcgctcccctgtggacagtctgagcagctctagtagctcctatgatggcagtgatcgggaggatccacggggcgacttccattctccaattgtgcttggccgacccccaaacactgaggacagagaaagcccttctgtaaagcgaatgaggatggacgcgtgggtgacctaaggcttccaagctgatgtttgtacttttgtgttactgcagtgacctgccctacatatctaaatcggtaaataaggacatgagttaaatatatttatatgtacatacatatatatatccctttacatatatatgtatgtgggtgtgagtgtgtatgtgtgggtgtgtgttacatacacagaatcaggcacttacctgcaaactccttgtaggtctgcagatgtgtgtcccatggcagacaaagcaccctgtaggcacagacaagtctggcacttccttggactacttgtttcgtaaagataaccagtttttgcagagaaacgtgtacccatatataattctcccacactagcttgcagaaacctagagggccccctacttgttttatttaactgtgcagtgactgtagttacttaagagaaaatgctttgtagaacagagcagtagaaaagcaggaaccaagaaagcaatactgtacataaaatgtcatttatattttccaacctggcatgggtgtctgttgcaaaggggtgcatgggaaagggctgttgatattaaaaacaaacaaaacaaaaaagccccacacataactgttttgcacgtgcaaaaatgtattgggtcaagaagtgatctttagctaataaagaaagagaatagaaaacacgcatgagatattcagaaaatactagcctagaaatatagagcattaacaaagtaaaattaatatattaagttataattggaatatgtcagaagtttctttttacattcatatcttaaaaattaaagaaactgattttagctcatgtatattttatatgaaagaaaacacccttatgaattgatgactatatataaaattatattcactacttttgaacacattctgctatgaattatttatataagccaaagctatatgttgtaacttttttttagagaatagctttatcttggtttaactctttagttttattttaagaggggaaaacaaaaatatcttgcaagcagaac

SEQ ID NO: 32164 - DNA, 691 bp, Homo Sapiens
gtcctcctcgccctccaggccgcccgcgccgcgccggagtccgctgtccgccagctacccgcttcctgccgcccgccgctgccatgctgcccgccgcgctgctccgccgcccgggacttggccgcctcgtccgccacgcccgtgcctatgccgaggccgccgccgccccggctgccgcctctggccccaaccagatgtccttcaccttcgcctctcccacgcaggtgttcttcaacggtgccaacgtccggcaggtggacgtgcccacgctgaccggagccttcggcatcctggcggcccacgtgcccacgctgcaggtcctgcggccggggctggtcgtggtgcatgcagaggacggcaccacctccaaatactttgtgagcagcggttccatcgcagtgaacgccgactcttcggtgcagttgttggccgaagaggccgtgacgctggacatgttggacctgggggcagccaaggcaaacttggagaaggcccaggcggagctggtggggacagctgacgaggccacgcgggcagagatccagatccgaatcgaggccaacgaggccctggtgaaggccctggagtaggcgagccagccgccaaggttgacctcagcttcggagccacctctggatgaactgcccccagcccccgccccattaaagacccggaagcctgaaaaaaaaaa

SEQ ID NO: 32165 - DNA, 6021 bp, Homo Sapiens
tattttggcagccttatccaagtctggtacaacatagcaaagagaacaggctatgaaataagatggcaagaaagaaatttagtggattggaaatctctctgattgtcctttttgtcatagttactataatagctattgccttaattgttgttttagcaactaagacacctgctgttgatgaaattagtgattctacttcaactccagctactactcgtgtgactacaaatccttctgattcaggaaaatgtccaaatgtgttaaatgatcctgtcaatgtgagaataaactgcattccagaacaattcccaacagagggaatttgtgcacagagaggctgctgctggaggccgtggaatgactctcttattccttggtgcttcttcgttgataatcatggttataacgttcaagacatgacaacaacaagtattggagttgaagccaaattaaacaggataccttcacctacactatttggaaatgacatcaacagtgttctcttcacaactcaaaatcagacacccaatcgtttccggttcaagattactgatccaaataatagaagatatgaagttcctcatcagtatgtaaaagagtttactggacccacagtttctgatacgttgtatgatgtgaaggttgcccaaaacccatttagcatccaagttattaggaaaagcaacggtaaaactttgtttgacaccagcattggtcccttagtgtactctgaccagtacttacagatctcagcccgtcttccaagtgattatatttatggtattggagaacaagttcataagagatttcgtcatgatttatcctggaaaacatggccaatttttactcgagaccaacttcctggtgataataataataatttatacggccatcaaacattctttatgtgtattgaagatacatctggaaagtcattcggtgtttttttaatgaatagcaatgcaatggagatttttatccagcctactccaatagtaacatatagagttaccggtggcattctggatttttacatccttctaggagatacaccagaacaagtagttcaacagtatcaacagcttgttggactaccagcaatgccagcatattggaatcttggattccaactaagtcgctggaattataagtcactagatgtagtgaaagaagtggtaaggagaaaccgggaagctggcataccatttgatacacaggtcactgatattgactacatggaagacaagaaagactttacttatgatcaagttgcgtttaacggactccctcaatttgtgcaagatttgcatgaccatggacagaaatatgtcatcatcttggaccctgcaatttccataggtcgacgtgccaatggaacaacatatgcaacctatgagaggggaaacacacaacatgtgtggataaatgagtcagatggaagtacaccaattattggagaggtatggccaggattaacagtataccctgatttcactaatccaaactgcattgattggtgggcaaatgaatgcagtattttccatcaagaagtgcaatatgatggactttggattgacatgaatgaagtttccagctttattcaaggttcaacaaaaggatgtaatgtaaacaaattgaattatccaccgtttactcctgatattcttgacaaactcatgtattccaaaacaatttgcatggatgctgtgcagaactggggtaaacagtatgatgttcatagcctctatggatacagcatggctatagccacagagcaagctgtacaaaaagtttttcctaataagagaagcttcattcttacccgctcaacatttgctggatctggaagacatgctgctcattggttaggagacaatactgcttcatgggaacaaatggaatggtctataactggaatgctggagttcagtttgtttggaatacctttggttggagcagacatctgtggatttgtggctgaaaccacagaagaactttgcagaagatggatgcaacttggggcattttatccattttccagaaaccataattctgacggatatgaacatcaggatcctgcattttttgggcagaattcacttttggttaaatcatcaaggcagtatttaactattcgctacaccttattacccttcctctacactctgttttataaagcccatgtgtttggagaaacagtagcaagaccagttcttcatgagttttatgaggatacgaacagctggattgaggacactgagtttttgtggggccctgcattacttattactcctgttctaaaacagggagcagatactgtgagtgcctacatccctgatgctatttggtatgattatgaatctggtgcaaaaaggccatggaggaaacaacgggttgatatgtatcttccagcagacaaaataggattacatcttagaggaggttatatcatccccattcaagaaccagatgtaacaacaacagcaagccgtaagaatcctctaggacttatagtcgcattaggtgaaaacaacacagccaaaggagactttttctgggatgatggagaaactaaagatacaatacaaaatggcaactacatattatatacattttcagtttctaataacacattagatattgtgtgcacacattcatcatatcaggaaggaactaccttagcatttcagactgtaaaaatccttgggttgacagacagtgttacagaagttagagtggcggaaaataatcaaccaatgaacgctcattccaatttcacttatgatgcttctaaccaggttctcctaattgcagatctcaaacttaatcttggaagaaactttagtgttcaatggaatcaaattttctcagaaaatgaaagatttaattgttatccagatgcagatttggcaactgaacaaaagtgcacacaacgtggctgtgtatggagaacgggttcttctctatccaaagcacctgagtgttactttcccagacaagataactcttattcagtcaactcagctcgctattcatccatgggtataacagctgacctccaactaaatactgcaaatgccagaataaagttaccttctgaccccatctcaactcttcgtgtggaggtgaaatatcacaaaaatgatatgttgcagtttaagatttatgatccccaaaagaagagatatgaagtaccagtaccgttaaacattccaaccaccccaataagtacttatgaagacagactttatgatgtggaaatcaaggaaaatccttttggcatccagattcgacggagaagcagtggaagagtcatttgggattcttggctgcctggatttgcttttaatgaccagttcattcaaatatcgactcgcctgccatcagaatatatatatggttttggggaagtggaacatacagcatttaagcgagatctgaactggaatacttggggaatgttcacaagagaccaaccccctggttacaaacttaattcctatggatttcatccctattacatggctctggaagaggagggcaatgctcatggtgttttcttactcaacagcaatgcaatggatgttacattccagccaactcctgctctaacttaccgtacagttggagggatcttggatttttatatgtttttgggcccaactccacaagttgcaacaaagcaataccatgaagtaattggccatccagtcatgccagcttattgggctttgggattccaattatgtcgttatggatatgcaaatacttcagaggttcgggaattatatgacgctatggtggctgctaacatcccctatgatgttcagtacacagacattgactacatggaaaggcagctagactttacaattggtgaagcattccaggaccttcctcagtttgttgacaaaataagaggagaaggaatgagatacattattatcctggatccagcaatttcaggaaatgaaacaaagacttaccctgcatttgaaagaggacagcagaatgatgtctttgtcaaatggccaaacaccaatgacatttgttgggcaaaggtttggccagatttgcccaacataacaatagataaaactctaacggaagatgaagctgttaatgcttccagagctcatgtagctttcccagatttcttcaggacttccacagcagagtggtgggccagagaaattgtggacttttacaatgaaaagatgaagtttgatggtttgtggattgatatgaatgagccatcaagttttgtaaatggaacaactactaatcaatgcagaaatgacgaactaaattatccaccttatttcccagaactcacaaaaagaactgatggattacatttcagaacaatttgcatggaagctgagcagattcttagtgatggaacatcagttttgcattacgatgttcacaatctctatggatggtcacagatgaaacctactcatgatgcattgcaaaagacaactggaaaaagagggattgtaatttctcgttccacgtatcctactagtggacgatggggaggacactggcttggagacaactatgcacgatgggacaacatggacaaatcaatcattggtatgatggaatttagtctgtttggaatatcatatactggagcagacatctgtggttttttcaacaactcagaatatcatctctgtacccgctggatgcaacttggagcattttatccatactcaaggaatcacaacattgcaaatactagaagacaagatcccgcttcctggaatgaaacttttgctgaaatgtcaaggaatattctaaatattagatacaccttattgccctatttttacacacaaatgcatgaaattcatgctaatggtggcactgttatccgaccccttttgcatgagttctttgatgaaaaaccaacctgggatatattcaagcagttcttatggggtccagcatttatggttaccccagtactggaaccttatgttcaaactgtaaatgcctacgtccccaatgctcggtggtttgactaccatacaggcaaagatattggcgtcagaggacaatttcaaacatttaatgcttcttatgacacaataaacctacatgtccgtggtggtcacatcctaccatgtcaagagccagctcaaaacacattttacagtcgacaaaaacacatgaagctcattgttgctgcagatgataatcagatggcacagggttctctgttttgggatgatggagagagtatagacacctatgaaagagacctatatttatctgtacaatttaatttaaaccagaccaccttaacaagcactatattgaagagaggttacataaataaaagtgaaacgaggcttggatcccttcatgtatgggggaaaggaactactcctgtcaatgcagttactctaacgtataacggaaataaaaattcgcttccttttaatgaagacactaccaacatgatattacgtattgatctgaccacacacaatgttactctagaagaaccaatagaaatcaactggtcatgaagatcaccatcaattttagttgtcaatgggaaaaaacaccaggatttaagtttcacagcacttacaattttccctcttcacttggttcttgtactctacaaaatatagctttcataacatcgaaaagttattttgtagcgtacatcaatgataatgctaattttattatagtaatgtgacttggattcaattttaaggcatatttaacaaaatttgaatagccctatttatccttgttaagtatcagctacaattgtaaactagttactaaacatgtatgtaaatagctaagatataatttaaacgtgatttttaaattaaataaaatttttatgtaattatatatactatatttttctcaatgtttagcagatttaagatatgtaacaacaattatttgaagatttaattacttcttagtatgtgcatttaattagaaaaagagaataaaaaatgtaagtgtaaaaaaaaaaaa

SEQ ID NO: 32166 - DNA, 6021 bp, Homo Sapiens; identical to SEQ ID NO: 32165

SEQ ID NO: 32167 - DNA, 6021 bp, Homo Sapiens; identical to SEQ ID NO: 32165

SEQ ID NO: 32168 - DNA, 4229 bp, Homo Sapiens
aatagaaagaactacttttatgttcttaagatattaatagttcacagctttgagaaatcaaagagtatctgacagtacaattactaattaacttagattcccagagagaaacatttatgtaaactactttcagggttaaggcttttaacaattgtatgttgagcagaagattattaaacactgataggctggtgagggtgcaataaaactttatgagtaggtcaatatatacctaagcagctttccttgatcattattttggcagccttatccaagtctggtacaacatagcaaagagaacaggctatgaaataaggtaagtctatggctcatatgttttttgttatttttatgttttcaactaattatattttttcttaatttgtgttagcagtattcccatctatctgcactaggctaaaatagcaatatcatatattttaagttgccatttgaaatatgtagtaccttgtattaaacaggaaaaaatatttctaatttttttttaaatacaggattttttttggcccaactcttcattataacttttgtaagacttaggtggaatcatagcaagttttgtttaatgactctatatgaaagaaaatgagtaccgattaagattttgaaaaatagatgaataataaagtatgcttaaatatattttaagaaaatctatataaaatagaatgctacatttataaaacattactgttttctagctgaccttttaaagatcattcatcaagttgttatacaataaagtattattcatcttcataataaatatgcagagaaagggtatcaatatatattttccaagaagagttgcttaaaattactgtaatccaaaattacagggatcatatttttttatcacagtaattttaagcaattgttttaaattttgttttgattttcctagacaaaggagagtttgtttcatgacaaaaatgcattttttaagacttcccttatcaaaaaggaaagcacaattctcattattgacttcttggtagcaaagtaggttatcacttcaaatgagatttacacttatttaaagttgtacactaaatgtaactttgtcatttctcaacataacatcacgcaactgggcttcatttttcgaacagctttgtatgttacctgttgctctgtttactttacattcattttctttgaaaattactgatgcaataaacagcttacatatctggaacagaaaattgtatactaagaataaatgctaatctgcagatattcatttataagctatactaaaaaattaagtttttgcttacttaatattattctctgactacttttataatttttgctaacaagaatgtaacgatctaattgaggaaattaacatatacataaataattgcaatggacatttaatatgctatgctaaatgaagaaaggctagattaactgtgcctcagagtggtaaggaactcaccatggcatttgaattcagcaaaatttagaattcacctagaagagtggatggggagggattgaaattgaacagcaggtatgaaggcaatatgttatctaaaaattatgctgtggtgctggggataaaatgaaggcataattctaaaaatactttgaagataaagtcagatggacttattgaatgattgaatgttgtaaaacatatggaagaaggaaaaaaaaggtgtttaggttgggacaactgggtacatgagttgacatagttacagaacagggaccattgtgagaccaaaaaaaaaaaaaaaaacaaaccgtgattttaaacccaataatttattaaagcacttactgtagtaattctaagttctactttggtatatgtctttgaattaagatttatactaaaatcatagaatacagataatccatggaaacttgagaactaagaaaaataagatatatgtggtcaaaattaaattaaacaaatatgctttcagataattattggagatgtgttctttcctgtctacatttgggtatcttccatatgctacctcaaaagtataatgtcttttaataataaatatgtatttttcgatataagagttttgtatatctcatttgctgctgtttgatgaaggaacttggtgaaaattcaaaagattttcgaaacatagctagcaactcccaaatatatactacgctatcaaatatatgtatttatgttccttttcgacaatattgtggaaagtagtgttggaattagagagaggagagttcaagaaaaaaactgaagtttttaactttgaactataacttattctttgttaagcttaaagttcctgatcagtaaaatgtgaataactatttccttcatagaattgttgtgagaattgagaaacagtgcaagtggaagcctttgccttgcaaaatgctctaaatgagaaggcaagacacacctacttgaagatctttttttccatctgtattttcatcttagtgtactactactactgtaatgtgcatcagtaattcattccttttactttaaattgcatgtgttgcttacattttatatcagtataagtttcaggttattaagtacatgcttaatatattattaagtaagtgcttaatttaggatattatgtaagtgctgtcttcaactctgcattatacatagtaaaaaaaagaatatgtaatttcatgagaattgttggtggtttattatagttatatattttacattttaaatatatattcttttctgtttttagatggcaagaaagaaatttagtggattggaaatctctctgattgtcctttttgtcatagttactataatagctattgccttaattgttgttttagcaactaagacacctgctgttgatggtaagtagtacattaaaagcatggctacattatcgtgaagttaggaggaagttactccacaatagttataggttttaaaaaataatctgtgtaagatgaaacacttatagaaaaatccagggtaagttacacaattacttcaactttttctattcattatattccatatttcaatgatgagctattgtaattaaggaatccatgtgctttgacattaattgccttccctagctacttgacaaagagcaaagaggcaaagggatcaaatcgttaatgtaaggtggaataatcgcctactggtgtgagcatcatctcattagtgggaaaacctgggtttttgctccagccttcacacacttgcaaaggaaataaggattttagcaaatattctttgttctggttagattttattttaaggagagagagaggttgtatgagaaaggcaggtagaggaaagttgaaaaaagacttggatagtttaattatctttttctgaatattttaattctaatttagagttggtacatacggaatgctgaatctctttcttcattattctctcttgagccaatcagtattgtaaaggatgttacacattatcttctagactacagttagcatttcctattcctgttaatcttttgttttacctacttccagaaactgagagcttactgtattatgaagcaatatattttaatgatatctcattgctggaatgttatttatatggcgttggtatctaccattcttcgctattccagctttctctactttacctatcaaattattcccttgcaagggataatttgaataactttcacctactttcctcttctctaatttcttctcaccttctctatatgtttttcataactcatattgctccatcttttcttcagctataaaatacaagttgtaaatacagtatgaatgtatactttgttaccttctgaatctacaccaagtccttttgtaaatatattttgtatttctgcagaaacagtcaataggattctacactgtcaattttaaaagtatgattggatctcttccttttgatgactagtgcttgaaattgtgggtctttttaaatgcaaaatttattttaaaattttcattttatatgaattcatgtattctttcaaaaagtacttattacttgataattctgagaaaattaatttaatgtcatgttttattttattgagttttcctcccccagaaattagtgattctacttcaactccagctactactcgtgtgactacaaatccttctgattcaggaaaatgtccaaatgtgttaaatgatcctgtcaatgtgagaataaactgcattccagaacaattcccaacagaggtctgcag

SEQ ID NO: 32169 - DNA, 5434 bp, Homo Sapiens
cgtccgcgtggggggggtgtgtgcccgccttgcgcatgcgtgttccctgggcatggccggctccgttccatccttctgcacagggtatcgcctctctccgtttggtacatcccctcctcccccacgcccggactggggtggtagacgcgcctccgctcatcgcccctccccatcggtttccgcgcgaaaagccggggcgcctgcgctgccgccgccgcgtctgctgaagcctccgagatgccggcgcgtaccgccccagcccgggtgcccacactggccgtcccggccatctcgctgcccgacgatgtccgcaggcggctcaaagatttggaaagagacagcttaacagaaaaggaatgtgtgaaggagaaattgaatctcttgcacgaatttctgcaaacagaaataaagaatcagttatgtgacttggaaaccaaattacgtaaagaagaattatccgaggagggctacctggctaaagtcaaatcccttttaaataaagatttgtccttggagaacggtgctcatgcttacaaccgggaagtgaatggacgtctagaaaacgggaaccaagcaagaagtgaagcccgtagagtgggaatggcagatgccaacagcccccccaaacccctttccaaacctcgcacgcccaggaggagcaagtccgatggagaggctaagcctgaaccttcacctagccccaggattacaaggaaaagcaccaggcaaaccaccatcacatctcattttgcaaagggccctgccaaacggaaacctcaggaagagtctgaaagagccaaatcggatgagtccatcaaggaagaagacaaagaccaggatgagaagagacgtagagttacatccagagaacgagttgctagaccgcttcctgcagaagaacctgaaagagcaaaatcaggaacgcgcactgaaaaggaagaagaaagagatgaaaaagaagaaaagagactccgaagtcaaaccaaagaaccaacacccaaacagaaactgaaggaggagccggacagagaagccagggcaggcgtgcaggctgacgaggacgaagatggagacgagaaagatgagaagaagcacagaagtcaacccaaagatctagctgccaaacggaggcccgaagaaaaagaacctgaaaaagtaaatccacagatttctgatgaaaaagacgaggatgaaaaggaggagaagagacgcaaaacgacccccaaagaaccaacggagaaaaaaatggctcgcgccaaaacagtcatgaactccaagacccaccctcccaagtgcattcagtgcgggcagtacctggacgaccctgacctcaaatatgggcagcacccaccagacgcggtggatgagccacagatgctgacaaatgagaagctgtccatctttgatgccaacgagtctggctttgagagttatgaggcgcttccccagcacaaactgacctgcttcagtgtgtactgtaagcacggtcacctgtgtcccatcgacaccggcctcatcgagaagaatatcgaactcttcttttctggttcagcaaaaccaatctatgatgatgacccgtctcttgaaggtggtgttaatggcaaaaatcttggccccataaatgaatggtggatcactggctttgatggaggtgaaaaggccctcatcggcttcagcacctcatttgccgaatacattctgatggatcccagtcccgagtatgcgcccatatttgggctgatgcaggagaagatctacatcagcaagattgtggtggagttcctgcagagcaattccgactcgacctatgaggacctgatcaacaagatcgagaccacggttcctccttctggcctcaacttgaaccgcttcacagaggactccctcctgcgacacgcgcagtttgtggtggagcaggtggagagttatgacgaggccggggacagtgatgagcagcccatcttcctgacgccctgcatgcgggacctgatcaagctggctggggtcacgctgggacagaggcgagcccaggcgaggcggcagaccatcaggcattctaccagggagaaggacaggggacccacgaaagccaccaccaccaagctggtctaccagatcttcgatactttcttcgcagagcaaattgaaaaggatgacagagaagacaaggagaacgcctttaagcgccggcgatgtggcgtctgtgaggtgtgtcagcagcctgagtgtgggaaatgtaaagcctgcaaggacatggttaaatttggtggcagtggacggagcaagcaggcttgccaagagcggaggtgtcccaatatggccatgaaggaggcagatgacgatgaggaagtcgatgataacatcccagagatgccgtcacccaaaaaaatgcaccaggggaagaagaagaaacagaacaagaatcgcatctcttgggtcggagaagccgtcaagactgatgggaagaagagttactataagaaggtgtgcattgatgcggaaaccctggaagtgggggactgtgtctctgttattccagatgattcctcaaaaccgctgtatctagcaagggtcacggcgctgtgggaggacagcagcaacgggcagatgtttcacgcccactggttctgcgctgggacagacacagtcctcggggccacgtcggaccctctggagctgttcttggtggatgaatgtgaggacatgcagctttcatatatccacagcaaagtgaaagtcatctacaaagccccctccgaaaactgggccatggagggaggcatggatcccgagtccctgctggagggggacgacgggaagacctacttctaccagctgtggtatgatcaagactacgcgagattcgagtcccctccaaaaacccagccaacagaggacaacaagttcaaattctgtgtgagctgtgcccgtctggctgagatgaggcaaaaagaaatccccagggtcctggagcagctcgaggacctggatagccgggtcctctactactcagccaccaagaacggcatcctgtaccgagttggtgatggtgtgtacctgccccctgaggccttcacgttcaacatcaagctgtccagtcccgtgaaacgcccacggaaggagcccgtggatgaggacctgtacccagagcactaccggaaatactccgactacatcaaaggcagcaacctggatgcccctgagccctaccgaattggccggatcaaagagatcttctgtcccaagaagagcaacggcaggcccaatgagactgacatcaaaatccgggtcaacaagttctacaggcctgagaacacccacaagtccactccagcgagctaccacgcagacatcaacctgctctactggagcgacgaggaggccgtggtggacttcaaggctgtgcagggccgctgcaccgtggagtatggggaggacctgcccgagtgcgtccaggtgtactccatgggcggccccaaccgcttctacttcctcgaggcctataatgcaaagagcaaaagctttgaagatcctcccaaccatgcccgtagccctggaaacaaagggaagggcaagggaaaagggaagggcaagcccaagtcccaagcctgtgagccgagcgagccagagatagagatcaagctgcccaagctgcggaccctggatgtgttttctggctgcggggggttgtcggagggattccaccaagcaggcatctctgacacgctgtgggccatcgagatgtgggaccctgcggcccaggcgttccggctgaacaaccccggctccacagtgttcacagaggactgcaacatcctgctgaagctggtcatggctggggagaccaccaactcccgcggccagcggctgccccagaagggagacgtggagatgctgtgcggcgggccgccctgccagggcttcagcggcatgaaccgcttcaattcgcgcacctactccaagttcaaaaactctctggtggtttccttcctcagctactgcgactactaccggccccggttcttcctcctggagaatgtcaggaactttgtctccttcaagcgctccatggtcctgaagctcaccctccgctgcctggtccgcatgggctatcagtgcaccttcggcgtgctgcaggccggtcagtacggcgtggcccagactaggaggcgggccatcatcctggccgcggcccctggagagaagctccctctgttcccggagccactgcacgtgtttgctccccgggcctgccagctgagcgtggtggtggatgacaagaagtttgtgagcaacataaccaggttgagctcgggtcctttccggaccatcacggtgcgagacacgatgtccgacctgccggaggtgcggaatggagcctcggcactggagatctcctacaacggggagcctcagtcctggttccagaggcagctccggggcgcacagtaccagcccatcctcagggaccacatctgtaaggacatgagtgcattggtggctgcccgcatgcggcacatccccttggccccagggtcagactggcgcgatctgcccaacatcgaggtgcggctctcagacggcaccatggccaggaagctgcggtatacccaccatgacaggaagaacggccgcagcagctctggggccctccgtggggtctgctcctgcgtggaagccggcaaagcctgcgaccccgcagccaggcagttcaacaccctcatcccctggtgcctgccccacaccgggaaccggcacaaccactgggctggcctctatggaaggctcgagtgggacggcttcttcagcacaaccgtcaccaaccccgagcccatgggcaagcagggccgcgtgctccacccagagcagcaccgtgtggtgagcgtgcgggagtgtgcccgctcccagggcttccctgacacctaccggctcttcggcaacatcctggacaagcaccggcaggtgggcaatgccgtgccaccgcccctggccaaagccattggcttggagatcaagctttgtatgttggccaaagcccgagagagtgcctcagctaaaataaaggaggaggaagctgctaaggactagttctgccctcccgtcacccctgtttctggcaccaggaatccccaacatgcactgatgttgtgtttttaacatgtcaatctgtccgttcacatgtgtggtacatggtgtttgtggccttggctgacatgaagctgttgtgtgaggttcgcttatcaactaatgatttagtgatcaaattgtgcagtactttgtgcattctggattttaaaagttttttattatgcattatatcaaatctaccactgtatgagtggaaattaagactttatgtagtttttatatgttgtaatatttcttcaaataaatctctcctataaaccaaaaaaaaaaaaaaaaaaaaaaaaaa

SEQ ID NO: 32170 - DNA, 2551 bp, Homo Sapiens
gcaagagtgacacacaggtgttcaaagacgcttctggggagtgagggaagcggtttacgagtgacttggctggagcctcaggggcgggcactggcacggaacacaccctgaggccagccctggctgcccaggcggagctgcctcttctcccgcgggttggtggacccgctcagtacggagttggggaagctctttcacttcggaggattgctcaacaaccatgctgggcatctggaccctcctacctctggttcttacgtctgttgctagattatcgtccaaaagtgttaatgcccaagtgactgacatcaactccaagggattggaattgaggaagactgttactacagttgagactcagaacttggaaggcctgcatcatgatggccaattctgccataagccctgtcctccaggtgaaaggaaagctagggactgcacagtcaatggggatgaaccagactgcgtgccctgccaagaagggaaggagtacacagacaaagcccatttttcttccaaatgcagaagatgtagattgtgtgatgaaggacatggcttagaagtggaaataaactgcacccggacccagaataccaagtgcagatgtaaaccaaactttttttgtaactctactgtatgtgaacactgtgacccttgcaccaaatgtgaacatggaatcatcaaggaatgcacactcaccagcaacaccaagtgcaaagaggaaggatccagatctaacttggggtggctttgtcttcttcttttgccaattccactaattgtttgggtgaagagaaaggaagtacagaaaacatgcagaaagcacagaaaggaaaaccaaggttctcatgaatctccaaccttaaatcctgaaacagtggcaataaatttatctgatgttgacttgagtaaatatatcaccactattgctggagtcatgacactaagtcaagttaaaggctttgttcgaaagaatggtgtcaatgaagccaaaatagatgagatcaagaatgacaatgtccaagacacagcagaacagaaagttcaactgcttcgtaattggcatcaacttcatggaaagaaagaagcgtatgacacattgattaaagatctcaaaaaagccaatctttgtactcttgcagagaaaattcagactatcatcctcaaggacattactagtgactcagaaaattcaaacttcagaaatgaaatccaaagcttggtctagagtgaaaaacaacaaattcagttctgagtatatgcaattagtgtttgaaaagattcttaatagctggctgtaaatactgcttggttttttactgggtacattttatcatttattagcgctgaagagccaacatatttgtagatttttaatatctcatgattctgcctccaaggatgtttaaaatctagttgggaaaacaaacttcatcaagagtaaatgcagtggcatgctaagtacccaaataggagtgtatgcagaggatgaaagattaagattatgctctggcatctaacatatgattctgtagtatgaatgtaatcagtgtatgttagtacaaatgtctatccacaggctaaccccactctatgaatcaatagaagaagctatgaccttttgctgaaatatcagttactgaacaggcaggccactttgcctctaaattacctctgataattctagagattttaccatatttctaaactttgtttataactctgagaagatcatatttatgtaaagtatatgtatttgagtgcagaatttaaataaggctctacctcaaagacctttgcacagtttattggtgtcatattatacaatatttcaattgtgaattcacatagaaaacattaaattataatgtttgactattatatatgtgtatgcattttactggctcaaaactacctacttctttctcaggcatcaaaagcattttgagcaggagagtattactagagctttgccacctctccatttttgccttggtgctcatcttaatggcctaatgcacccccaaacatggaaatatcaccaaaaaatacttaatagtccaccaaaaggcaagactgcccttagaaattctagcctggtttggagatactaactgctctcagagaaagtagctttgtgacatgtcatgaacccatgtttgcaatcaaagatgataaaatagattcttatttttcccccacccccgaaaatgttcaataatgtcccatgtaaaacctgctacaaatggcagcttatacatagcaatggtaaaatcatcatctggatttaggaattgctcttgtcatacccccaagtttctaagatttaagattctccttactactatcctacgtttaaatatctttgaaagtttgtattaaatgtgaattttaagaaataatatttatatttctgtaaatgtaaactgtgaagatagttataaactgaagcagatacctggaaccacctaaagaacttccatttatggaggatttttttgccccttgtgtttggaattataaaatataggtaaaagtacgtaattaaata

SEQ ID NO: 32171 - DNA, 2407 bp, Homo Sapiens
gccaagatggcggtgcaggtggtgcaggcggtgcaggcggttcatctcgagtctgacgctttcctcgtttgtctcaaccacgctctgagcacagagaaggaggaagtaatggggctgtgcataggggagttgaacgatgatacaaggagtgactccaaatttgcatatactggaactgaaatgcgcacagttgctgaaaaggttgatgccgtcagaattgttcacattcattctgtcatcatcttacgacgttctgataagaggaaggaccgagtagaaatttctccagagcagctgtctgcagcttcaacagaggcagagaggttggctgaactgacaggccgccccatgagagttgtgggctggtatcattcccatcctcatataactgtttggccttcacatgttgatgttcgcacacaagccatgtaccagatgatggatcaaggctttgtaggacttattttttcctgtttcatagaagataagaacacaaagactggccgggtactctacacttgcttccaatccatacaggcccaaaagagttcagagtatgagagaatcgaaatcccaatccatattgtacctcatgtcactatcgggaaagtgtgccttgaatcagcagtagagctgcccaagatcctgtgccaggaggagcaggatgcgtataggaggatccacagccttacacatctggactcagtaaccaagatccataatggctcagtgtttaccaagaatctgtgcagtcagatgtcggcagtcagcgggcctctcctacagtggttggaggacagactggagcaaaaccaacagcatttgcaggaattacaacaagaaaaggaagagcttatgcaagaactttcttctctagaataaatcaggagacaaaatggggaaagatgaaaatatccagtgtaaagttacttaagctaaatcaatttcaaagaagaaaaacttggaggactcattttacctgacttcaagacttactataaagctatagtaatcaagatagatggtattggcagaggaacagacacatacgtcaatggaacagatgagagaacccagaaataaacccatataaatatgctcagctgattttgaaaaagtgaaaaagcaattcaatggaggaagaatagcctttctgacaaattatgctagagcaattagacacccatggcgaggagaaaaaagaacctctacttaaacctcacatcttatataaaatttaactcaaaatgtataacggacttaaatgtgatacataaaactagataactttgaaaaaagccacaggagaaaaatcttcaggatcttgggctaggtgacaagttcttggactttgccccgaaagcacatccataaaagacaaaatctgatatattggacttcttcaaaatttaaaaacttgtgatttaagaagaggaaaagataagctacagattgagatgaatttgcaaaccatatatctgatcaatttggaatatataaagtgtactaaaaactcaactgaagtcaggcatggtagctcatgcttgtaatctcaccactttgggaggccaagatgggaggagtgcttgaggttaggcgttccagaccagcctgggcaacatagtgagactcttgtctctacaaaaagtttttttaaaaaattaactgggcaccatgacacacaccagtagtcccagctactagggaggcaggaggatcacttgagcccaggagtttgaggcctgcggtgagctgtgatcacaccaccacactccaacctgtgtaacagagtgaggcctcatctcaaaaaaaaaaaaaaggccacaaaactcaacaataaaaacaaacagtccaattagaaaatgggcaaaagacatgaatagatgtttcactgaagaggatctatagatggcaagtaagcatatgaaaagctgttaaactccataagtcatcagggaatgcaaattgaaaccacagcgaggctatgacttacttatctcaatggctaaagaaaaaatagtgaaaataccaaatactgatgaggatacaaactggatattttatacattgctgacaggaatgtaaaatggtacagccactctgggaaagagtttatgaatttcttatcaagttaaacataattttttaatcaagttaaacataagacccagcagttgtgctcctggacattcattccagagaaatgaaaacctatattgtacttgtactcaaatattcataggagctttatttgtaatagccccaaactggaaacaacccagatgtcctacaacaggtacatggttaaacaaaccatccataacttggaatactgctctggaatgaaaaggaactaactgttgatacaagaacttggttgtacctcaggggtattatggtgaacaaa

SEQ ID NO: 32172 - DNA, 720 bp, Homo Sapiens
ctggcaggagtagcagctgccccttggcgcgactgctggagccgcgaactagagaaacacagacacgcctcatagagcaacggcgtctctcggagcgtggagcccgccaagctcgagctgagctttcgcttgccgtccaccactgcccacactgtcgtttgctgccatcgcagacctgctgctgacttccatccctctggatccggcaagggcctgcgattttgacaatgtcaagatttaccgtatatccctgtttgtttggatacaccagtgacgtccacttctagaagacaaagttatattacttaaacaaccaaagatatgaaactatccatgaagaacaatattatcaatacacagcagtcttttgtaaccatgcccaatgtgattgtaccagatattgaaaaggaaatacgaaggatggaaaatggagcatgcagctccttttctgaggatgatgacagtgcctctacatctgaagaatcagagaatgaaaaccctcatgcaaggggttcctttagttataagtcactcagaaagggaggaccatcacagagggagcagtacctgcctggtgccattgccatttttaatgtgaacaacagcgacaataaggaccaggaaccagaagaaaaaaagaaaaagaaaaaagaaaagaagagcaagtcagatgataaaaacgaaaataaaaacgacccaaagaagaagatggaaaagcga

SEQ ID NO: 32173 - DNA, 12515 bp, Homo Sapiens; identical to SEQ ID NO: 29264

SEQ ID NO: 32174 - DNA, 1448 bp, Homo Sapiens
ccaccatgctcgccctggaggctgcacagctcgacgggccacacttcagctgtctgtacccagatggcgtcttctatgacctggacagctgcaagcattccagctaccctgattcagagggggctcctgactccctgtgggactggactgtggccccacctgtcccagccaccccctatgaagccttcgacccggcagcagccgcttttagccacccccaggctgcccagctctgctacgaaccccccacctacagccctgcagggaacctcgaactggcccccagcctggaggccccggggcctggcctccccgcataccccacggagaacttcgctagccagaccctggttcccccggcatatgccccgtaccccagccctgtgctatcagaggaggaagacttaccgttggacagccctgccctggaggtctcggacagcgagtcggatgaggccctcgtggctggccccgaggggaagggatccgaggcagggactcgcaagaagctgcgcctgtaccagttcctgctggggctactgacgcgcggggacatgcgtgagtgcgtgtggtgggtggagccaggcgccggcgtcttccagttctcctccaagcacaaggaactcctggcgcgccgctggggccagcagaaggggaaccgcaagcgcatgacctaccagaagctggcgcgcgccctccgaaactacgccaagaccggcgagatccgcaaggtcaagcgcaagctcacctaccagttcgacagcgcgctgctgcctgcagtccgccgggcctgagcacacccgaggctcccacctgcggagccgctgggggacctcacgtcccagccaggatccccctggaagaaaaagggcgtccccacactctaggtgataggacttacgcatccccaccttttggggtaaggggagtgctgccctgccataatccccaagcccagcccgggcctgtctgggattccccacttgtgcctggggtccctctgggatttctttgtcatgtacagactccctgggatcctcatgttttgggtgacaggacctatggaccactatactcggggaggcagggtagcagtgcttccagagtcccaagagcttctctgggattttcttgtgatatctgattccccagtgaggcctgggacctttttaagatcgctgtgtgtctgtaaaccctgaatctcatctggggtgggggccctgctggcaaccctgagccctgtccaaggttccctcttgtcagatctgagatttcctagttatgtctggggccctctgggagctgttatcatctcagatctcttcgcccatctatggctgtgttgtcacatctgtcccctcatttttgagatcccccaattctctggaactattctgctgcccctttttatgtgtctggagttccccaatcacatctagggctcctcc

SEQ ID NO: 32175 - DNA, 66109 bp, Homo Sapiens
  misc_feature (62338)..(62338): n is a, c, g, or t
tcgacgggatcacgaggtcaggagatcgagaccatcctgactaccacggtgaaaccccgtctctactaaaaaaaatacaaaaaactagccaggcatggtggcgggcgcctgtagttccagctactcgggaggctgaggagggagaatggcgtgaacccgggaggcggagcttgcagtgagccgagattgtgccactgcactccagcctgggcgacagagcgagactccgtctcaaaaaaaaaaaaaaaaaaaaaaaaaaaaaaaaaaaaaaagaaaaggattgtaagagttactgttacattttctggcctactacctttaaaattcctgttgcatttctttgtatttacaaggaaaagactgaactttttctcatcaaaactagcttttttctcacaggttaaacttgcaccaatgtctgctctttttttttaatgtttttggtactctgggcagacttcagttttttaaaaaataaagattctaatgcagctatcttggcattccctttaaatacctgtcttaacctcctacttttatttcctactcctttccacacacatgcatacaatcctttaccttttaaagaatcattaagactgtcacacattaggaactctttcgctcactcttctgtcatttgctgcaatattgaaattcttattttgaccatcaatgcctattaattcttctaatacatgaagaaaatgattgagtagcagcagtactataggtgggaaatacagtttaactgctgaatttttatacctctctgatttatagcttgctaattaaattgctattaatagtttgtttggcttaattagacttaagaaaacaacaggttttttttttttgaggtttttttttttttttttgcatgaggagagaattgtatgtaaccagtgatatgattattcctgaatgtacagacagaagtaagcctggacattgtttaatttaaaaactttagtccctgctttaagggaatatgataatgtatactatgacaaatgtactttattcttctaacacagtaagaattacttggaactttttcctgaaactaagtgcaggaaagccctgtgtgtcttggtttagtgatggtttcatttctagccatacaactgatggattgtatacaatttttgttagtgccaaaataatctgttatatgaacagacttctaaaataatttctgtatattatatatgtaagaaggcttttattgaacagcttattttccacttgcaagtttatggaaatatcaatatgtcaaaataaaaagtgggacaattctttgctgttagaagaatgtgcttattattttgatttcttaaatggtacataatcaaagtactgctgaactataggtgcagtattctactaaacatttcagctagtaataccactgatttagaaacaaaactgtttatttttgctttctgaatttagaatgctgggattacctgtttaaatatgttttagggaatatagagattaaatctgtacatacctgtgcacatatattcatgcaccctctgattttggttttctcgtttttgagttcttagaaagtatccacatactcttcttttagtagaagtagctgttttagagagaagaaaaggatgagactttaaatagttgattctttttgtgttttctacaaacttttttgaattttaaatcacaagcaaactaattttctggtttttagaaagtagatgatgatttcagaggagtaagacatgccaaacagcgtgctcggtaggattttaggtagtcaaatgcagctgagaaaaagtattttcaagtcataagttgctaattgatatgctatgaactagtcaaaataggaaccatatgattcatgttagattttcctctagagatggatctgaatgttcagttccagccaaggtagattttactttcaactttttaatcaatatcactttctgtgcttaatctctttggtgttaccttgtccattttcatttgtctaaaattctgcagggatgactacaatttggcataatggtataaatgaattgttaagggtaactttaagttgaagattaaagcaagatgccattttccccatgtctttcattttgtttacattttttccctttaagttagtatacactacacatactacaataaaatataataatatgaaaaaagaatattttagatattctagtccctttgcctttccatgtaaattttagagtaatcctacctataattaacaaatcttgcaaagattttgattggaattgtgttaaacttgtatattggtttggggagaattgacatatttactatattgaatcttccaatccatgaacagtatttctctccacatagatagagactgaatagatcttctttgatatcgttcaccagcattacatagtttttagcttgcaagtcttgcatgttttgttagatttacacataagtgtttcatgtatttgagtaattgtaaataatatatttatatttttgggccaggcgcggtggctcacgcctgtaatcccagcactttgggaggccaaggtgggcggatcacaaggtcaggagatcgagaccatcctggctaacacggtgaaaccccgtctctactaaaaatacaaaaaattagccgggcatggtggtaggcgtctgtagtcccagctactccggaggcaggagaatggcgtgaaccccggaggcggagcttgtggtgagccgagatcgtgccactgcactccagcctgggcgacagagtgagactccgtctcaaaaaaaaaaaaaaaaaaagaaaaaaaaaaaatatatatatatgtatcatttgttcattgtgagtatgtagaaatacaattgatactggtttatcctgtattctgttaatttgctgaaatcacatatctagaagtttttctgtagcttccttgtgattttctacatagacaatcatgtcacttacaaatgggagctgtttatttcttacttcacaatctgtatgcctttaatctcctttttcatgcctattgcactgtctagaacttccaacactgtgaataagagtggtgagagtggacattcttgccttgttcctgattttaggtagaaactattcagtctttcagaatcaagtatgttcaccataggatttttgtagacgatctttatcaagtaaagaaagatctcctctactcctatatttctgagattaaaaaaaaataatgaatgggtgttaaagtgggttaaatactttttcttcatcaattgatatgaacaagtaaattttcctcttcagcctataatatgatggattacattaattaattgtgaatatccaaccagctttgcatccctgggataactctcacgtggtcattgtatataattctttttatatgttggtaaattccacttgctaatattttgttaaagattgctgcatcatgaggaatattagtctacagttttcttttcttcccattgtcattgtttggttttggtattgaggtaattctagctttataaaataaactgggaaatgcttcctctgcttctattttctggaagagattaattggtgttaattcttctttaaatctttggtagaattcttcattgaaactatttgttcctaaatatttccttttgtgagtttttaaattatgaattcaatttcctcaataggtgtagacatttttgaattattttatatttagtgagttgtggcactttatattttttgagaaaatgatccatttaatttaagtgtcaaatttatgtgtgtagaattgttcatagtattcttttgttatccttttgatgtctgtagaatctttgatgatatcccatttcatttctgatgttggtagcttctatcttctgtcgtctttttttctgagtcttgctagtggtttgccaattttattaatctttcaaagagccagctctttgcttcattgatttttttttgcttttgtttttctgttttcagtttcattgttctgcttgctttttattttgttattcttttactagattcttgaggtgagagtttagattattggtttgagacttttcctcttttccaatgtatgcagttagtgctttaaatttacttctcaaatgcaaatcaaaaccacaatgaaatgccatctcacgccagtcagaatggtgattattaaaactcaagaaacaacagatgctgacaaggttgtggagaaatagaaatgcttttacattgttgatggaatgtaaattagttcaaccattgtggaagacagtgtggcaattcctcaaagatctagaaccagaaataccatttgacccagcaatcccattactgagtatatacccaaaggaatacaaatcattctattataaagatacatgcacttgtatgttcattgcagtactattcacaatagcaaagacatggaatcaacccaactgcccatcaatgacagactggataaggaaaatgtacatatgcaccatggaatactatacagccataaaaaggaatgagatcctgttatttgcagagacatggatgaagctggaagccattatcctcatcaaactaatgcaggaacagaaaaccaaacaccacatgttctcacttataagtgggagctgaacaatgagaacacaaggacacagggaggggaaaaacacacactggggtctgtctggggcgaggttggagggagggagagcatcaggaaaaatagctaatgcatgcttgtcttaatacctaggtgatgggttgatatgtgcagcaaaccaccatggcacatgtttacctatgtaacaaacctgcacatcctgtacatgtatcctggaacttaaatttacctcttataactactataactgtatcccacaaattctgatatggcatattttcatttttgtttagttgtgtttattgtgtgtatttttaaaaaatttccttgagacttcctccttgacccatgtatttctaagtgtgttgttttgtctccaaatgtttagatattttcctgttgttgatttctggtttggttccattgtggtaggagaacactttctttatgattttatttaaaaaatttgttggtcttttattgtcttagatatggtctatcttggcatatattctgtgggcacttaaaaaaatgttattctggctgggtgcagtggctcatgcctgcaatcccagcactttgggaggctgaggtgggtggatcacctgaggtcaggagtttgagaccagcctgatcaacatggtgaaacctcatctatacaaaaaataaataaataaataaataaataaataaataaataaaaaattagccaggcatggtggtgtgtgcctgtaatctcagctactcaggaggctgaggcaggagaattgcttgaacctgggaggcagaggttgcaatgagccgagattgtgccattgtactccagtgtgggcaataagagtgaaactccatctcaaaaaaaaaaaaaaaaaaagtgtattctgccatggaatactatgcagccataaaaataatgagatcacgtcttttgcagggacatggatggagctggaggccattatccttagcaaactattgcaggtacagaaaaccaaatactgcatgttctcataagtgggggctaaatgatggacacatggacacaaagaggaaaaacacatactggggcctattggagggtggaggttgggaggaggcagagggtcaggaaaaataactaatgggtactagacttaattcctggatgatgaaataatctgtacaacaaacctccatgacactgtttacctatgtaacagacctgcacatgtacccctgaacttaaaataaaaggaaaaaaaagaaaaaagaaaaaggaaaatctcgtggaatctactaaaagcaacgaaaaagaaaataatgtatcttctgttgttgggtggtgtgttctataaatgttgattagatcttatggtttgatgttgtttattcttctatgttttttctcaatttttgtctatttgtttaatcaattgttgagagaaaactattgaagtcttcaactatcattgttgacttgcctattttcttttcagttctatcagtttttgctttacataatttgcagccctgttgtttggtgcatacatatttaagattgctatgtctttttggtagatttacccttttattattacatagtgttcctatccatttctagtaattttctttgttctaagtttatttgatattaatatagcctccctttattattttttgtctgatatatgtttttctatcctttaacttataaaccgcctatatcattatatttgaagtgagtttatcataaacagcaaataattgagtctttttttttttttttttgagacggagtctcgctctgttgcccaggctggagtgcagcggtgtgaagtggtgtgatctcagctcactgcaacctccacctcccgggttcaagagattctcctgcttcagcctcccgagtagctggggctacaggcttgtgccaccacagctggctaatttttgtacctttagtaaagatggagtttcaccatgttagccaggatggtcatctcctgaccttgtgatccacctgccttggcctcccaaagtgttgggattacaggcgtgagccaccgcacctgacagagtcatatttttaaatctattctgccaagctctgtctcttaaaattgatgtatttaggcgatttatatttcctataatattgttatgtccaggcttaagtctgacattttattttctgttttctgtttgttctctctgtttttcatttctttgttttctttttcattgcttcctaaataattttaaaattccattttaatttatctatagctgtgtgtgtgtatgtgtgtgtacctctttggatagctcttttagtggttgttctaggtattacattatatttatgtaacttatttattgtcattaattaccagtctgagtgatgtgtagaaatttcttctctctttgtttaccctccctcatttataattgcctgtaatattttctctatatacatttataaccatatgatacagtattatacgtttttcttcaatcctataatttaaataactcaagagaagaagtaaagtccattttttaacccatattttttcttgccatgttctttcttccttcctgatgttccaactgtcctcaatttaactttttgtttttttagggtagacctgttagtgacaaattctgttagttttccctcatctctgtatgtcttaatttccctggatatttttgctgatatagtgttctaagttgatatttttttttcctttcagcactggaaaaaggtggtgacctccttcgggcttacacagtttctgatgaaaattttgctctgtcatttttttcacctgttagatgtcatttatctcactgctttcaagattctttttatctttaatttttagttaattactatgattttggtgtggctttctttgggtttgtcctatttggggttcactcaccttcttaaatcactaggtttatgtcttctgccaaatttgggaagttttcaaccatatttatttgataatttttttcagcttcactctctttttcctctcattttgggactctgagtacatgaacattaaatcttttgttatagccccatgggtccctgaggctttgtccattttttccagtgtattttctttctttcttttgttcagattaagtgattgctattgctgtgtcttcaaggtagctaattctttcctctgttctctccttctgctgctgagcttatttactgggctttttattttggctattgcacttttcagttctaaaatttccacgttttcttccgtatatatcctatttttatgctgaaacatcctatttttttcttttctgctcttttcttcttctttctttttttaaaccactgaactggacatcctatttttttcattcttttaagtgttaattgctcatcaaagcattttaataatggtggctttaaaatcttcatcaggcttttctttccgttttggcatctattttattgtcttttaaaaattcaatttgagatattcctggttcctgatatgacaaataatttccaattgaaacttggacatttcaggcattatgttataaggctattggtcttatttaaactgttttagctggcttcttttaacacctctccagcaggtaggcaggtgagcttcatgacgccaggtaggggtaggagtccaggcttctcactctgccttcattgacacctcagataggtccccattattactgagtggggacagaaattctggctccctattaggtgcccactaatacctccctggttggttgggagaggagtgccacttactatccctcacatgacctttattgacaccaagatgggacagtggagtggaggagtgagtggtaggtatcagggagtggttgctggattaactctgggtggtgatgaaaatcctgactctccattaggcattgtctgacatcaccctagaggagaggggaagagatgcttcattactgttgggtgaggaatggaagtctaggtttccattgacatttcaggggcttggggaaaggagtacattttcaccaagagggcatgaccatcctgactccctattcactttctctgacaccatcctggtgtgtgtgcatgtgtgtgttgaagtgttgggttccttatgacagcctggtgagggtgaaagtctaggctcctcatttgaccttagctggtgggggtggagtcgcagttttttctgtggtgtttggctggccccattacccaagatggagtgtagtggtgcgatcatagctcactgtaacctcgaactcctgggctcaagtgatcctcctgcctcagccttcagagtatctaggactatgacacatcgaactatgcctgactaattttattattattattcatagagacagggtctcattatgttgcccagggctggtcttgaactcctggcctcaagcgatcctcctgcctggcctccttcccaaaattactttaaatgatataatagctgacagcttgaataggtcctctttattttgttggaggcagagtgttagaagtgacctaacaaaaaggatttgtttcttgtcactagactcattcactgtgtcaatgagtgtgtcagtggtttgtgggaagcaaacttaaatgaaaatgtatatttttaattaaatgttatgagatgctttttttaaactattggctcttgtgaatttcagaaaaatattgcaagtcatttgacttagctacttagcttgcactctatgtaaaaattttagaattttacctctttgaaaaactcctaatatcaatagtgatattgttgttttgcagcctcaaatgattttgttactttggactaattttcactgagctagttaataagtgactttttattgtctaaaaaattcttaagtgtatcatagagagaaagattattgggtcactaagtggctttctatatatatacctttgtccatatttaatttttgcaaaactcaaattaaggtggtaaacttagtgtggatatacattcatgtattgtattgataagattaactacgttttaaaactaaagtggaaagttttaaacaaaattgtcattcaactatatatgtatttctgtaaaacacacacgtaatgatgaattcgaattaataagcaaaaaaggagaggatttgtaatttaaaattgatcttggaatatacactctacacttaagacagagaaaaaactttttctttccctttagcataatctgcccagctagcggtggtttcttatcagaatgctctcacttaataccttgataacttttagtgctttgtgctgatagcatcaagtttttaaattattttaaaaacaaacaacaacaaaaaaccatttgcttctgaaacacctaaagtttcttataattgttaccttctttatgtttattttcaaatgttttattgtcactctggttattgagatatcaaagttataacaattgctcactctcaggtacctatgcacttaagtgaccagtttctctgaaaattcttttttgttgttgccttcttccaacctcataccctgaattcagaatactaacactgtcaagctatttttcacgcccccaaatctttgttttttctcactagacagccactacccatttggccactaggtggcgcaaaaggcttaatttttcaccttcctccgcctactgtgaaggaagctaaaagtaattagatgtgtttggcatgatttttatattttaaattaacgctgtactatcaaaagaactacctgtgtctcaaacccacaatgtggtaaaagctgacaaataaaaaacagtagctcaattttctagattaattttgtccaggttaaaaatattattgatatatgttttagtgaccacataggtttcagtaagggtaaaaggatgctcttgttcgtactccaagtctggcatggtgactgtcaatacattcattttgaagaagattttgcttctgggtttagccctaaaacaggccaaatagagacgataaaatgagtggaactgaattagagcatttctgaaaagttttatttggttaattctgccccttaaggtcagaaattgtgtaggaaaagtgtttcaaaattataaataaggcaaaattgtacgtgcttgattattttatatcacacttgaacctttgctcataattctgcctgatcaaaaccagagtgtttcagggattgtaatttgcctaagacgaacccggccagccctgtgcgattagaggttaatcagcagagagctgataagggatgctggctttctctttttctccggtaaagaagataacaccaaggttatgattttattgccctctagcacgttagccattttgaatctctagcctagaaattatttcctcacagagagatacagctctgtttttcaaatactctttggatcaaggctcttgtattcttgctggttccctctttgagtttgataaaactttgaaaagtctaccaaagaaatttctctcagaactagactttagagaggaaatgctggaactacggatgagaggcacatgtatgtacagggtcagaccacgcagagagcaggtctgatgagccacaccactgctgctgccccatggcttctagacgctgctgttggttctgttgttaggacctggaggttgctgcagccaccactgaagacacctcctaaaccacttctgtttcaggaacttcacttaaaaaaaaaaaaaaaaaaggaaaaaacccaccgcttccccaaaagacagttgcttcttctgtcacctttgccagagaaataaatacagtaaaaggtgctctgcaacccccacaccctggttcctcctgtggcccctttgtaactgaagtcttaggtggatgaatttaattggtggaacttaggtgctctagcttcaaagaaggctaggggaagtgagctttctggtttccactttagggaggcaggactcaaaaggtaggggaaatttcacagtactctaaaggtgttcaaatcccatgggcagccagtaaacatcacaggtgtgaggtgctgggtggagtggctgccgtgaatatgtgttttggttcatggactacatcagtggctcttaaagtccagtaattcacagattcatgagagataataaaatgattatttttgttttaagccattaagtttggagttggtgtgctgcccagcaatagataatggaaacatacagtatgtatttctgcaagtctggcttcttcacttaatattgtttctatgagattcgtccatgttgttacattttcagtagttgatgaagtttcattgtttacatagtactgtgttgcacgaatagactacgttttgtttatccatttactgttgaagaaccattttgttaaacaatttgagagtaatctgtggaaattatgccacttgacccctaaatattttgtcatgtataatttaagaataaggacatttctcctgcaaaaccctaatactgtcatcacccccaagatacttaaaattgataccatattatcaaacacacaatccatattaaaaaatcccctattgtcccagtaacaccttatagtaaatgtctgttattttaagcgggtgtcattcattacatggcaataggtaactaatacggtgagtctgcttcttccagcaaggaccctcagggggtgcggtgattcatagttctcactcagacttctctgtgtctgctcatatgtccctatttcatatctcagggtccggtctatcccaaccaggggtcttgccttatcacaacagctgctgttggatgatgcaacaaacatttctacaacttcataacctttatcataagcccccgggcttgaccctcagccatatctgtgctgggttgcaggagaaaagatagcctttaaaactgctatagaggcatttacagtttttcattcatgtcttgagtttggattaaaggcttttaatttgtctttttttcctttgtatgctcttgagggcagtctgacgcagccagtctctgaaggttggcacaaaagcctccatcgagtcacccagcttttgcctggtacctatcctaacctaaaaccttgccacatgttaccttggcgaaaggccagtgccacacttcagtgatgattcggctgtcctacttggttagaaccgagttcacttccttcctcaacactcctgccacattgatctggaagtttcaccttgagccaagtgatagttaattttatgtgttaacttggctaggctatggtttctagacatttgaataccagtctagatattgcagtgaaggtattttttagatgagatttacatttaaatcaatagattttgggtaaagcagattaccctccataatgtaagtggcccttccaatcagttgaaggtcttaggggcaaagactgaggtcctccaaggaagagggaattctgcctctggaccaccttcagactcaagccgcaacatcagctcttcctgggtctccagcctacctgcagatttcgaccgtgccagctcccacagtagtatgagccaattacttaaaataaatctctctctgccaacatcctattggttctgcttctctggagaatcccgactcatacaagccactttctatagaaggctgtttcttcgagaaatccaccctcttctatgtcaacagagtttagaatctccatactttatctcttcatttttgagaacataaattctgtattacacatacttatactatactatatatgaaactttcataaacattgctgggcaaagttgaatattgctgaaccaatttccgatgcttctgaataagttcaatggagttaaaacatttttcttcttacatggtatgtccagtgccccagagccagcagagttaagaacttggtaaggaagaccaaagataatccatatattctagtttgttatataatataaaacatgtttattagattctaaaagacataaaaagaaaataatacatatgtatcagtgagagaggtgcaaattaggaagagaactaaggattattcttaattcctgccttcctttctaaatcccaatcctcaattgaactctttaattatatttcctgtttattttattgaatggaaaaaatggaaaattatctaacatttgtcatggaaatataggagaaattactctcagagatatgatgttatttaagtcattgacatattgttaacctcagatgcaaatggtggaattaataatattcctcagttcatggtacatagtcactgttggtctagtgctagtttgtagttgtatttgtattttttattttttagaaatacggtcttcctttgtcacccaggctggagtgcagtggtgtgatcacagctcacagtaagctcaaactcctgggctcaagcaatcttcctgccttggcctcccaagtaggtaggactacaggtgcatgccaccatgccagctaattaaaatgttttaaatttatttttggtaaatggggtcttgttatgttgcccatagtttttagtgctatgataagctagtaattatagtgaacattcttgtcttggatacccaaggtttttccgttatgtatactagtggttacagattttttggattataacctttgccaaaataggaaagttttgattcctgcttccttaactgtttttcaaaaatcacaaatggatatactttaccaaatgtcttttattaatagactgagcaaaggaaatgacttttctatgaatatggtaaattatagcaacaatatgttttattatattgaaccaccctagtattccaaggattccctatttgatcttgatgtatcattattagcataatcattattattattgttattattatacatatttttagagacagggccttgctctgttgcacaggccgaaatgcagtggtgcaatcatagcttactgcagcctcaaactcctgggctcaaatgatcttcctgcctcagcctccctagtagctgagactacaggtgctcaccatcacacctggctaattttttaattttttgtagagacaggatctcacaggatctcagtatgttgacaatgctggtcttgaactcctggcctcaggcgatcctcccacctcggcctcccagtattattatttgtaatattgttgaattcggttcataaataattatttttttctcccatctgtgttcaaggtgaaatgggtctattatttttttttccttgagttttccacaactcaatttggagtcaagattacactcggctgataaaattagctaatcaggtttagtttttttctgttttctggaaaaagtatataatatagaagtttcatgttccttgaatgtttgatagaactcatctgtgaaaccatctgggcattttcaaaaatatatttttttattagatgccattgataactttaaaaattgctttaatactcattggtatagtcaagttttgtatttctttttgtgctaattttgatagattaaatgtttctaggaatttgcttatctcacctaggttttcaaatttattagcatatacttgttcataacactctatgctttatatctgtgtcatatctgtagctgttccccctttttcattatgtatttgtttattcattttttctccctttatccataatcggccttgttgtaactctgaatatcttacaaatatttttaagtaagcagcttttggaatcaaaagtatgttaattttcactacctagttttttgttctctatttctgtttcattgctttctattcttatctttataactccttttcttcgtatttctttaggtttgctcaacttctctttttccaaatttttgagtagaatttctaggtcctttattttaacttttcttgttctaataaatgtatttgaaattataatattattttatatgtatattttatgtgtaacatttttaacacctggttctaaaagagttaattttctttataactgctgtttatttatttgacacagggtcccactctattgctgaggctggagtgcagtgacgcaatcatgcctcactgcagcctccatcttctggactccagcgatgctcccatccacgactgccttttaaatccatgttactgataaatatatttgttcacttacaattttaagtatattttagttatcaagttctaattttattacagtatggttgcagaatatagtttctttctttctttttctttttttttttttttttttaagacagtgtcttactctgttgcccaggctggagggcagtggcacaatctcagctcactgcaacctctgcctcctgggttcaagcgatcctcccgtctagccttctgactagttgggattacaggtgcaccccatccagctaaattttttgtagagacggggttttgccatgttgcccaggctggtctcaaactcctgggctctagggatctgcccaccttgacctcccaaaatgttgggattacaggcatgagccactgctcctggcctagaatatagatagtttctaagataccgatactctggaatttattggcgttacctttatggaatgatgcatgtcctatttgagtaaatgttctgtgtggcttgaactattatatataatttttggttttctggcaacttttaaaaaatgaattttatgaatcttgtacctcattttatttccttctttgctttcactatcctatggcctggagccaattattttttatccatttatagttggctgataaatatgtgtcctgttaaaccggctctctgaagaaaaacaatgcttctgacttgtagcattgctgatttctatagtataaatacttccatagtggtcaatatcaagttaccaatagttaacaactgtcttcaaaaatcctgaatactttgcagtctgctcttgctagccagtataagacagcgcaccacttttttttttttttaagatattcacgttgtccattagtttccattagtttcactccttggcttcacttacttttcttaaccatattttctctctgacccagtgttgttttcttcttttaaaaattgttttaaattatctctgtaagctgctacaaaccttttattggaatgaagggcattagaacagttatttggccaatacagaaaaatgaagtcttctaattttttttttttttttttttttgagatggaatttctctcttgtcgtccaggtggagtgcaatggcgcaatcttggctcactgccacctttgcctcccgggttcaagcgattctccctgcctcagcctcccgagtagctgggattacaggcaccatgcccagctaatttttgtattttaagtagagatgaggtttcaccatgttggccagactggtcacgaactcctgacctcaggtgaaccacccgccttggcctcccaaagtgctggaattacaggcacgagccaccgcgcctggccgaagtcttccaattttaaaagatctaatcttcattcagttctcaaagtctttgctgtgcccttaaggcatgtcacacgcatgtgcagctcaggggtaacctggtactcctgagggttcagactcagaattagggaatttccgcctgtactctcagtttggagattcccctacacattcctgcccgcaggggccctttttcttcattcctctggccagaaagccggtatttctcttgttaactcagggcttgtgctaccacgcagtgcagctctgcacctgaggcctgacgtcagggcagagctgggaggaaaaaaggggaaaacattgaaaacccactccccaggaggggcccctctcccagttttgaccctcttcacaatccacctgcttttgtttactttttggagtccttgagtacttgctttttgtatactgcccagaatttctacttgtgatcagtgggaaaaatgggctatttaaaatctcaaataagttaaatatcatggctagaaacaactccaggcatttgtaattttagatttttttctttacactccagggggatgtgattgttttagagttttgaattcgtatgtttagcctgagatcctactagtatttctgttgaatatgcctgttgactgcccacttgttagcaaaatggcattgaatgttggaactgtaaactaccttagaaatcattcagcaccatcttttgacagaaaaggatatgagagttcactcctgtcactcaggaagtgcaaggcaaagatagaagcagaattaaatttgttttaatacagttactcagccatctggtaacagtttcctaagtgccaacgaatgtatggggctatttattgcagattttaagatgatatatggggattgagggaatgagaagttttagggagtggtagaggaagggcatataataagactgaatcccagatcccagcctcagaacttattttgtgaccttggtcaagtgatttaatctttccaaacctctatgtgtcctatagaagtaataataatacctatatagggttgggtgttttttttgtttgttttttctttttcttttcttttttttttcttaagatagggtctttctctgtcacccacgctagagtgcagtggcgcaatcacagctcactgtagcctcaaactcccaggcctaagcgatcctcccactcagcctcccaggcagctgggactacaggcatgcaccaccgcacccgactaatttttaaatttttttgtagagatggggttctcactatgttgcccaggctggtcactaactcctgggctcaagcaatcctcccgccttgacctcccaaagtgctgggattacaggtgtgaatacagggggttttttggtttgaattttaagagataaaatttataaaacatttagccaatgccacaaatgtagcttcttttggttattgtcattattctttgaaattcacaagtgccccaaaatatttaagcatttttcatgtattgccctttaatatgaatgaatgcattatgaaaggaattcttttacatgcgagtttgctgatagtcttagctaattctcatgtgtgtaggtgtcttgcctatctgtcagtcttagccttaaaggaaagagtcccatcacctcacttgcggcctcatcatcatggaccgcatgatgatgcggaatgagaatttttattgtttgtactacttcaaaatcattcagtacgtgatcacctgtcatgtatagggctctttatatttctagtttagtcccttttgttttctctaggaaagatgttttagacctgggacaaaagaagaaagagtgtatgctgacatctaggagggaagcacccacctcccctaagctccatctccctgagcactcatttcccaatgaccataccaggttttggccctagagagtttattacaaaataagaaagagaagtctggggaaggttcactcatcatagaattttggcagttcattgcccaagatgactcgatggtccacaccggcagctgtaatagtgaccaggtagatgacacccccgcttgagccatcccggctcatggccagagcaatagctgcagagggtttcaagttggagagagggagagagaggatggcttagcttcaaaaatctttttactccccctccatccatatgcctactaccactttcacctcaaaactcatcttccaggaaggcatatttagtggtgtgctggtaaatcagtttttttacaaaaaggcttccatatgtggcatctgctgatgtccgtggtgtaaatgctcccgctatgatgaattgcaagttacaaatagctaagcagttcacaaatccttgactatttaacagtccgctctcatgagtggtcccaagccagcctcagcacacctcagcacaccactggttctttttttttttttttttctccagacagggtctctctctgtcacctaggctgcagcgcagtggtgcaatcaccgctcactacagccttgatctccccggctcagatgatctttccacctcagcctcctgagtagctgggactacaggtgtgcaccactatgcccagttcatttttttttttacttttttttattgttttttgtggagacagggtttcaccatcttgcctaggctggcctcaaactcctgggctcaagtaatcctcctgcctcagcctcccaaattgttggcattacaggtgtgagccactgtgcttagcacaccactggttctcacagtgactgtgtatcctcatttgatttactcagaacagccctggtttatccgtattgcccaagaaccccattgagctttgcatttgtcctgccccttttcactcttaaaagtgtaccaggcccggcattaacttaaatggccacccctgtatttctcttcctgttcctcataatctacttccttcccatgtttcaaagccctccccaggtacccttccacttggctggttaccgtctgtggtgaagcgcctgcactcctcgggagacatgcctggcttatatgctgcatccacataaccatagataaaggtgctgccggagccaccaatggcaaaaggctgtcgagtcagcattcctcccagggttccatatacctgggaaagggatcctcaggttaaagaatcatcaagcccttccttcccactgagacattaagtggtctctgcaccctgcaatgaagccctggtatctcatatccccaaagtactatgctttcagaggtagtgtccttggaactcattgctagaatgacataggacttccatcttcctctgcaggagagtggggaagcccagaggagagagtgctttgggagaaactcacctgacctccttcacgttggtcccagccagctaccatgagatgtgcagacaagtcctctcgatatttatagctgatatttctcaccacatttgcagcagccaaaacaagtggaggttcctccagttctatcctgagggaaatattaggaataaaggttgatagaattttaagtctcattctcctatactgttaccatcatccctgctaaacgacccctgaaaactgtaactgcaatagctcaaactgcagcctccctcccacatgtacaggggaaccagagtcccacaccaccaactggtaagaagctttcaattgctcactcttttgctcagccccacccacataactttcttttggctgcaaggaccctgctcttatggggaaaagcagataaggttacttccgtcccaacgaccttgatttctcgtatggtaactgcctgatattatggtgggtcacaatatcaccttcttcctgattatttatatcaggatagtgatttacagcttttaaactgtgttcacatatagaatgtggttctcaaaataaccgtctcatgaggtactatattatctccactttacagatgcagaaactgacagattcaagtgccagcaagagccgaaacaagacttttccatttcccagtgtccagctcctggaacagcacactgtacagggattcatgcaggttgggggagctctagtgggtggggagtcagaactccagagcttcatacccatggagctccagctggtaggcggccatgtcggccacggcttgggcatcagcagctgaaccagagagtgcacagtagatgcgctcgtgcagcggggacagcttgtcaaacactcggttcaccaccgcctcgctgtcaggagggagtcaacagtcaccaagttaaaactcaggttttttttttttttttttttttttgagacagtctcactctgtcacccaggctggagtgcagtggatcaatcttgggctcactgcaaacttcgcctccctggttcaagtgattctcctgcctcagcctcccgaatagctgggattacaggcacccaccaccaagcccagctaatgtttgtattttcagtagagacaaggtcccaacatgttggccaggctggtctcaaactcctgacctcaaatatctgcccacctcggcatcccaaagtgctgagattatagatgtgagccactgcacccaaccagaactcaggaatttttgagggtgatcattcaatgtctctcaaatttctttgacaagagaatagcatgaagtttaatgcttggattaaagcaggaggcaaataatcatctcagatattattaatcactgcagatgttaatcaaaattaggcttatttttcaggcttagattttataacaaagcaaaaaatgctaaggtaagaaaaatatgcctcatcaattttctttgctattaacaatcttgagagagttatgttctatggaacataatgtcagtaatattgacctaaccccatatactcattttgcatgtgaggaaattggttaggagtgggagaagagacaaaatagttcaatatatggtaaatgagaaaccaggtatctgcttgacagaatcatctttttgatccctaagcacagatggaaagaagaccctcaaaaatctatctcctgtccccctctcagaccctattcctttactcatccctgtacactactgggacaggtcacatacacattcagaccccagatcctcctccacaaattcagagacccaagcacccaccaaatagcttatcatagtggcttttggggaaggtcaactccattcctccaaggctccagtttgccagtcttttcatgaatgggtaaggaaagtgtgtatttgaggccattagcttctttccaaatgcatacatcttcacttttactcaccctgcagacactcgggaatcagaacccatcacaacgcccccgtcaaactccactgccatgatggtggtctgcagagacacagaatatggaatgtcagggcaagaacagccttgatgccctcatgttagagaagaagaaacattcccagagaggcgaagtgactggctcaaagattacacagtaacaggccagagctgactgtcagtacaggctttttttcccttcatctttccactttctctattgcttcatccggctgcaggggaatgccacagcccagctgtgatacaacacagaaagaactgtgtccctaagttccaacttgcctagtggaatcctctccactgtagagaggtggagatgaggctcctacaggtagaagtgaagcagctccgcaagtgaaaattatctccaacggaagggctcatagtatgtgcagatgtggtgtagacccaacacagagtaattgactatgatcttgggaaacaaggtcagtctatttttttttttttggtccacaatcctccactctcaccccccatttcatcagaagtgagctcttccaatttactgaacattggaaaaaatcgaggagggcagtggttagcatggccaggggcaaggcaggagagaagcagcaaggaacacatacagatggttgaaaataaaagtttcagttatggaatttccgatcaagaggtaaatacatatctcagcagccagggaggtaaatttgtaccaagagataatttgactgagaagtttaagctgacttttccaggtcaagaaaagaatcaagaagaagtgagggaagataaagctacatttattctactattgagttggaaggagccttaaagatcctcggttcaaatgaggaaaccaagtcacagaaaatgcaaacgacttatgcaaagtcacacagagttaatagtagacctgggactaaaattcaggtctaactcttatcccttgtttccacttctacttcctacttgccactgctcatttggcagtgaggggagatttcccaaattataagtggtttcactgtgtctttcttaccaggccgtaagttactctggccccaaaggacgctcctctgagtatgctttccgacggaccgacttatcatgaatagagggtcaaagaacagggttaacttcaagttagaggctattcctctctaacaaagccgcccccaagccacgagtggtggcagtagtccagagcagaagccagccagccagtcttggggctgccatctgccccaggcgcccatcctaagcaaagtccccccagtgggcacatgggagtgggcagggaagacacagggaagggagtaaggcagcatctgggccaaggagaggccttcctgggtcaagctagggaagggcatcactagttaacacagaacgcccattatcagtgcttgggctaagagttgcccagtggcaagtttatcaaaagtctgtgtgatgagttggtccttctcaataagtgcctatatttccttctcccaagtgctgttctacttcacccagggcaccatttcctcatctctttgcaccatccccaaccccctttcttgatttaaccagcccccactgtccgggaccagagtgaaagcgaaagcgctttagagtagcttcccgttgacgcttccagctaagagtcaaagcacccgctttttccaccagcctcgcgtgcctgttcccttcacggacactctagacgacccccctcagaaaagaaatactctatgctcattgcgggttgcaagcgctggctgctacaggcgacctccctgcgctcccgttggtctctgcattcacttctccgcgcgcgcttccagggtcccctggccgctgcatctcctccacccctctgccaaccctcaagcccagacccattaccccggtgtggacttctcccgcccggggtaagtccccggttggtgctcccgcccgcagcatccctgcaaggcaccgctctcctcgccgcctggggcactggtttccaacctgggacagcgcacaacgcgcagccgacagccccgccccttcgcggcgccgccaggaggcgcctgggtgctgcggggctgctttgcgcgcggcgctaacgtgtgtagggcagatctgccccgagacaagtgacgaggcagccccgccctgaggctggggtgggaaaactggtgcaagtggaaaggcaggaggcagggagaggcgagaagggtgtgcgtgatggagaaaattgggcaccagggctgctcccgagattctcagatctgatttccacgcttgctaccaaaatagtctgggcaggccacttttggaagtaggcgttatctagtgagcaggcggccgctttcgatttcgctttcccctaaatggctgagcttctcgccagcgcaggatcagcctgttcctgggactttccgagagccccgccctcgttccctcccccagccgccagtaggggaggactcggcggtacccggagcttcaggccccaccggggcgcggagagtcccaggcccggccgggaccgggacggcgtccgagtgccaatggctagctctaggtgtcccgctccccgcgggtgccgctgcctccccggagcttctctcgcatggctggggacagtactgctacttctcgccgactgggtgctgctccggaccgcgctgccccgcatattctccctgctggtgcccaccgcgctgccactgctccgggtctgggcggtgggcctgagccgctgggccgtgctctggctgggggcctgcggggtcctcagggcaacggttggctccaagagcgaaaacgcaggtgcccagggctggctggctgctttgaagccattagctgcggcactgggcttggccctgccgggacttgccttgttccgagagctgatctcatggggagcccccgggtccgcggatagcaccaggctactgcactggggaagtcaccctaccgccttcgttgtcagttatgcagcggcactgcccgcagcagccctgtggcacaaactcgggagcctctgggtgcccggcggtcagggcggctctggaaaccctgtgcgtcggcttctaggctgcctgggctcggagacgcgccgcctctcgctgttcctggtcctggtggtcctctcctctcttggtaaggggaacgcagggcaagaggggaggacacaaggggactgggacaggaatcaaaggtaattgtcagtaaggtagagtagcgtgggttctgggaaatgtggagcgggagaaggactcctagcgtgggtcttggaacaccacttcggtgtagaagaaacggcactggactggcgggggccagaggttctgggctccattgctgaccgggtcttgattctttgggccacgccggaagcggggaaatcctttgctctggggccgaagggcggggcatcctcatctctaacaggaggcttttctacttcatgatctccagccttcctaataaaatcctgaaagttctggtagagcaaccacagggtagtgagttccagggcagcctatttaggttcgggattgagacgtcagtgtttcctttctgctgatgccctccaggataatggtgagggggaggaggcgtggtggggccagtctgactggaactgacctacttagacttaatatttgtgcgtgacctctcttctctttctccaggggagatggccattccattctttacgggccgcctcactgactggattctacaagatggctcagccgataccttcactcgaaacttaactctcatgtccattctcaccatagccaggtctgggggctgaaaatggggcaccctgcaaatgagggagttggaagttggggctgctgtccgaaatgcacttatatggggatacctgggaccttcagtctgttccctgaacacaccctgatcccctttttttccgggttctttatagtgcagtgctggagttcgtgggtgacgggatctataacaacaccatgggccacgtgcacagccacttgcagggagaggtgtttggggctgtcctgcgccaggagacggagtttttccaacagaaccagacaggtttctcctgaaactctttcattatacgccatgtactgttcatatcctcatacatctgctttgatctcccccctccccgctctctctctctcacacacacatacacacattgttccttctcattcttgatataccctctccctgtctctctctctctgtctctgtctctctctctctctctctcacacacacacacacacaattgtttttctcattcttgatatacctcaggagcaaaatattgtcctccttaccttaagaaaaacctagagttttcatctagcattttcttataaatctattcctatgtatccttagatagaaaccatagaatttcaaacctggaaattttgagctcatagagaccaactgcctcatctgacagagaaggaaactgaggccaagaccctaaatgctgaaactgcacagttacatatggctagagacacacttggggttagaaccctggtctcttgagtgctccacagacttcggcatgctttctagcagcactagaagctgtacagttacatatggctagagatagacctggggttagaaccctagtcccagtgagtgctccacagactttggcatgcttcctagcagcaccctcctcctccatctctgttatgtgaccagtttaagctcttcctgcctgtgtgtatagcatgggacatacaggttctctagggaacagaaagctttcaggaaaatggaaattcacatgtgcattaatgactttataattaaaatgaaggtcaggcctttcctctttaacactcatcttccctgcactgagatttgcagacctctggagaaccctaaccttgtttcctgcagcctccttagaaccccatgttgacacccctgaccctggcatcctggctcattgttagttcgtctcatcacttggaacctgtctgattcacctcactctcttctccccaaccctgcaggtaacatcatgtctcgggtaacagaggacacgtccaccctgagtgattctctgagtgagaatctgagcttatttctgtggtacctggtgcgaggcctatgtctcttggggatcatgctctggggatcagtgtccctcaccatggtcaccctgatcaccctgcctctgcttttccttctgcccaagaaggtgggaaaatggtaccaggtatgttcatggagttggcccgctctacacagaccctcatctcccagacttggcagactcagttcctctcacattgctttcagtccagctttcctggcacccttactgattctccatcttcatggaacaccctgtccctgtggtccatgttcccaggttgctcaacattaacctccatactctctgggtcttcttttctagcttctccccacaatctgtctttaagaatttgatccccaacccgttctgagtcattttcctcttcctcgtatttctttagcatccaaggggcatagctgtgtctctttctcttttctccttttcctctgtctcttctcacctttaatttccaaataggtaactcaggtattagtgtccctgatggtttgccaacccgtgtgacatctcttgtccatgtatccacagttgctggaagtgcaggtgcgggaatctctggcaaagtccagccaggtggccattgaggctctgtcggccatgcctacagttcgaagctttgccaacgaggagggcgaagcccagaagtttagggaaaagctgcaagaaataaagacactcaaccagaaggaggctgtggcctatgcagtcaactcctggaccactagtgtgagcacctgaagatgaatacccattcccttgtccttaagatgccgtgactccattcccattcctatgaccctgctcccactccttctttactgggaaatggttggttcagtattttcgtcctagcaacctgaggctcaatgactctactcagtgtccctagccccctccctctctttaaagatgctaggtggcttcctttcagtatggtacataaaatccacccaaccatgtggattggagagatgcgtgtcttccagtcctagggccttcctttgcctctcaggggaagtgcagggcgccataaattcttgcacctgggactgcttcatgctggtaccttgtagatttgttagtgagagtgatgggaatagtggaagccagggatgagggacatctgtgatgcactggaaagagagctacgccagtgatccgaagatcctggcttgatgatgcaatttacttgtcttgtgatcatgacaacaaatttaccttctctgagactgtttcctctttatttatttatttgtttgtttgtttgtttatttttacttattattattatttttgagctggagtctcgctttgtcgcccaggctggagtgcagtggcgcgatctgggctcactgcaagctccgcctcccgggttcacgccgttctcccgcctcagcctcctgagtagctgggactacaggcacccgccaccacgcccggctaattttttttttttttttgtatttttagtagagacgaggtttctccgtgttagccaggatggtctcaatctcctgaccttgtgatccgcccacttcggcctcccaaagtgctggaattgcaggcatgagccactgcgcccgactggttgtttcctcatttttcaaaaatggagtgatataaccttctttataaggctcttcatgtattagctgacatcacatgaatgaaagccttttgtgaagagtaaaatgctccccagacaaggtgatagtggtgatggtggtgaagataactgtgacttgcatgatgtgcattgagtcagactccatggggtctctggttcattctcctgtctgcctattgagcctgccgatgtcacttaggagacagggacttgatatttccttcaggttaatgactgtggttctttgtgtcccctccagatttctctacctcagtccctttttttgtggtctctttatagatttcaggtatgctgctgaaagtgggaatcctctacattggtgggcagctggtgaccagtggggctgtaagcagtgggaaccttgtcacatttgttctctaccagatgcagttcacccaggctgtggaggtgaggtccctccaccttcactccccagtgtgattccttcctctggcccagcaccatctgtgtgatgtccttccattctttacccttcttgcttcacataatgctggcaagcagactacctcactttcactattcttacctccctctaggtactgctctccatctaccccagagtacagaaggctgtgggctcctcagagaaaatatttgagtacctggaccgcacccctcgctgcccacccagtggtctgttgactcccttacacttggagggccttgtccagttccaagatgtctcctttgcctacccaaaccgcccagatgtcttagtgctacaggtacaacctaccactccctgtattccactggccccaactgcaattctgccatcctaaattttcttcctgccttcagcctgcttactgccaagcatatatcctccctaaccctttaaaggcaatggtaggcatcatctgttccataaatcttccccaaactcaagaacccagtttgggcttccaaagagaatgagagaagaggtttcgaagagagtgctctcacgttccaaggaattgctgcagcaaaatctgtgtcttcggtcttccatctttccttttcctttgtaatttggaatgtgatttttccctttcctggtggtatctgacatcaagtgtgtggcatagtggtgctgggtctctgcccttgtctttgccgcttcttctatctctactccttggggaggcatcacccagaaatctgtgcatgtgggagggtaggagtttctatatttccctgtttttcttctggggtaagacatcatgctatgtaacaaggcaatgacactctcaaggttagaggccttggtagcctcttatcgtgtgcttctctggcctctaggggctgacattcaccctacgccctggcgaggtgacggcgctggtgggacccaatgggtctgggaagagcacagtggctgccctgctgcagaatctgtaccagcccaccgggggacagctgctgttggatgggaagccccttccccaatatgagcaccgctacctgcacaggcaggtatggaagcaggtggcttgaaggagggcagggagcatcaaatacgaagagcattcttactgagcactctgaaagaggggttagggaatgataagagaccttgggtggagatggtggtgtagtcaggagggaggtagtatgattttgtgacatgttctcaataaagattttgagtcttcgatctctagataaccatactcccatgtgccttgttctatgactcttcatcatatttcatctcaggtggctgcagtgggacaagagccacaggtatttggaagaagtcttcaagaaaatattgcctatggcctgacccagaagccaactatggaggaaatcacagctgctgcagtaaagtctggggcccatagtttcatctctggactccctcagggctatgacacaggtactctctccactcatctcaccacccagccatctttacctttgctgaaaccccagtagtcttgcctttatccttcagttcctccttactcatggacatcaatttgaagttgtaagatcatgctcctatggcttcttcatcctgacatcctcaggattctgttcatcttcccagaatctcccctatccagctacaaccgtcagatcttggtgtgtgtgagtgcgtgaatgcatgagtgtgtctgtgtgcatgtacatgcgtgcacacatgtggctataccgttctcatcttggccctttgctctgcagaggtagacgaggctgggagccagctgtcagggggtcagcgacaggcagtggcgttggcccgagcattgatccggaaaccgtgtgtacttatcctggatgatgccaccagtgccctggatgcaaacagccagttacaggtgaggcagtcatcttcttaatggctatatcccacccaatcttgcttcttttatacatcttctgttagttttactaacatcataattatacaaaccagtccttgcagttctcagttcccaaatccagttccattggatgcctccccaaggagtagagatagaagacgaggcaaagacacctagaatcagttaaaagagactatctacaaactacagactgaatttctttctttctttccttttttttttttaagacagtgtctcactcagttgcccaggctggagcgcagtggcacaatcttggctcactgcagcttcaacctgctgggctcaagcgattctcccctcagcctcccgagtagctgggactacaggtgtacaccactatgcctggttgacttttatatttttagtagagatgggtttcaccatgttgcccaggctggccttgaattcctgagctcaggtaatctgcccccctcagcctcccaaagggctggggttataggtgtgagccactgcgcccagtcctatagactgaatttctaaagcgaaacataaggaaaagaccatcctcataatatcgtttatttaaaaaaattattttttgtacagacagcgtcccgctatgttgcccaggctggccttgaactcctgggcccaagtgatcctccctccttgacctcccaaagtgctaggattataggcatgagccaccgggcccagcccatcctaatcatattaatattaattaagctagtctgtttacatgcactgtcactcatttattcattaggaatccttctgagctaggcatttatcatcattctacagatgacaaaatggaggttaaaagaggttgaataagctgctcatatagaggtcatatagcttttgagtggcgcagccttgacccaaattcaggtctgcctgacttgaatgctcatctctttactactaagttatatttccttaaaatcgaatataaaaatgccaagtccatgggtagagaagaggactattcaatagtctttattcttctgtcacgtgtttcaccctagggttctcatttttatcctacttttgcacccttcatgtaaaacagtccttaatgaaacaaagggtttgcggagaagtactcagaatgggaaacgttggtgtccttggggttgttagcagagccagcagtgatcctgtgaggtcagtcccagccctggaaacacaggtgtctccctgggctgagggtagtccccggctctgacggtccgatgtctttcctcaggtggagcagctcctgtacgaaagccctgagcggtactcccgctcagtgcttctcatcacccagcacctcagcctggtggagcaggctgaccacatcctctttctggaaggaggcgctatccgggaggggggaacccaccagcagctcatggagaaaaaggggtgctactgggccatggtgcaggctcctgcagatgctccagaatgaaagccttctcagacctgcgcactccatctccctcccttttcttctctctgtggtggagaaccacagctgcagagtaggcagctgcctccaggatgagttacttgaaatttgccttgagtgtgttacctcctttccaagctcctcgtgataatgcagacttcctggagtacaaacacaggatttgtaattccttactgtaacggagtttagagccagggctgatgctttggtgtggccagcactctgaaactgagaaatgttcagaatgtacggaaagatgatcagctattttcaacataactgaaggcatatgctggcccataaacaccctgtaggttcttgatatttataataaaattggtgttttgtactgtggtttcttatgtttccggcacaccaaacggcccactgccttttgcagcgcacttttcagctgcggatgtctcctcttttatcatcctcaatgttttaccccctaactgcatcaccttttcccttaagctttttaattcctatgaggccccttccacttcccctatccccttaggcccacccccaagaatgtgcaagaccccagccacagggcccatcagggcactagcggccgcagctcagagccgtggcctctccgaagtggcagatggggcgggcgcggccagagcaagtgccaggcgggaacagagggactgggcgcgcctcacaactcaccacctcgcccgctggtccttcctggctcgcctggctctgaagctgcacctggaggggaaacctcagaacagtaggcgggattgcctagtaaatatctcccattcagggaggcccaggtcgtgtgacgtcgacagttgctgggtagatgaggccaacacaggttgcaagaagaggcggggtttagaggcgtgaaactccgcagtgctcagccaagcagggagcaacgctaggaagggcgggcagaaagggcacgctcttgtgggtgactacaggttaggagaccgttgaacctggaggggccctaggatggaccccgtggaaagattcagagactgcgccctctccctggcgccgccttcccctacacgcggcgggtatattctgttgcagttggcccaggacctgtttccaagactctgccccctcgcacttccgtccctcctggttttgtaaagtgatgctcataggaacccccaccccgcgtgacactactcccagctcctggctgacttctagtcttctggttgaagctgcgcctttagatgacacgaccctacccacccctgtttccagcggatgcccgggcctggaggtacctcttactgtaacccatcgccaagtgggcttttgaaggcgcctgttcctttctcgctttcttcggaagacccttgacccatcattcccccgacccccataacgggagagcagagaagccggtccccagtgtgatggtcctggtccaggcactaactgtccttttctcggaaaaggcagggggatgtggaaaagagtcttgttccctccccttcgatctgtggctttcgctttcacttcctcctccgagagcggacagatctctgggtgctgggcggtcatggcgctactagatgtatgcggagccccccgagggcagcggccggaatcggctctcccggttgcgggaagcgggcgtcgctcggacccaggacactacagtttctctatgcgatctccagagctcgctttaccccggggaatgcaggtcggggcagtagggaagcccctagggatgcagggaggcgggcgctgaggagtggagggtcgcctgagaggaggaggcgagagcgggagcgcggggtacagggtcgggggtagccttcagtcccggagagcgccagacccaaagaagaggccacatggggatggggcctgagaggaggaagtgcaagttaggacaaagagttacaggtgaggtgggggctcccaaaggaagacaagagaactttcctgcccttgtccacacacaaatggtggagcctttttcatggggttatcacatgatataggaggtgtgtggtgtcttgggaaacctatgaaatttgcctgctggcctcctctcagcaactcactgttgcgcgacttagaacaagtcacttagtctaggtcccaagcccctcttctgtaaagtgaggatactgttactaaacgtgttttgtgagggttgaatgctttatgcatggaagaaaccctttaagtcactctcaaaattttttagtaatggtaacatgtgcttgctttcatttctgttgtgctggaaaatggaaaaggttgatactggcatgcctcttcttttccttctcccaagccatttccttctagagattggttattaactgtttcatttattgatggttagatcatttctgcatatctcctcaccctcatactccctaaaaccttttcctggagcctcttactacagaatttttcattgcctttctcaacctcttttctcttatcagcccacagaattcttccagtccctgggtggggacggagaaaggaacgttcagattgagatggcccatggcaccaccacgctcgccttcaagttccagcatggagtgattgcagcagtggattctcgggcctcagctgggtcctacattagtgagtgtatacgctccagcaggcagaatctggggagctgggctctcctttccacaggaggccaactctgcaacaaagtggaagtggatattgatttaggacacactgggggatctatggggtcatcccttctctcccaaagctccatcttcttccaggtgccttacgggtgaacaaggtgattgagattaacccttacctgcttggcaccatgtctggctgtgcagcagactgtcagtactgggagcgcctgctggccaaggaatgcaggtaagcgaggcctctcatcttcctttcttagcctagtggttaatccctggatctctcagatcattgctccttactcttgtcctatgtggtccatcttagtgctaatagtatatttcacaaaacagctttttggtgataagacccttctcccaaatctcagcctgtgctccactcataagccagatagtacgtcaggtatttagcactgacacatccaccctggcgggacagtatcatttactaggctgcctttgtatgtttcagatactttaaattccaaatctttctctgatctttagatcctacaaaataattcctttccaatgcttatctctttaatcatttcctgccccatcaagttggaaagagctaacctctctttcctcactccaccttgtcctcacccaggctgtactatctgcgaaatggagaacgtatttcagtgtcggcagcctccaagctgctgtccaacatgatgtgccagtaccggggcatgggcctctctatgggcagtatgatctgtggctgggataagaaggtgggtgctctccattcttcatgttcccccaccatgttccctatggatgacagatctgtttcccatcatatactcctactccctccctgacaagatgcatggcatatagagtgcttggttatagaactgtttcagtatatccatggactatttattggcccagatatgaatcattgcatgtgttttgtaagcttgtcccttttgttaaacagttgatttcaagtttgtttttcctttttcatttctaaagttcgatgactttaccaaagtggtttcctaattccaatgttcttgtggtaatattaattcttttgttcactttttatgtctcatatttgaacccccatgttaccaacatcttcctctccaatttcagcctgaaatctttcatcttatagggtcctggactctactacgtggatgaacatgggactcggctctcaggaaatatgttctccacgggtagtgggaacacttatgcctacggggtcatggacagtggctatcggcctaatcttagccctgaagaggcctatgaccttggccgcagggctattgcttatgccactcacagagacagctattctggaggcgttgtcaatagtaagagaccaatgctcccaccaccatgcctgggaggagtcggcgggtggtggggggggtgatttaagattgagaaaccagcctggccaacatggcgaaaccccgtctctactaaaactacaaaaattagccggacgtggtgacgggtgcctgtagtcccagctacttgggaggctgaggcaggagaatcacttgaacctgggaggtggagcttgcagtgagccaagatggcgccactgcattccagtctgggccacagagtgagactccttctcaaaagaaaaaaaagaaaatgattgagagactcaaaggagggagagtagtagggaggaaattttcagagtcagaagaagggcattaaaggcccagtcatatggttttaagcttgcgcatgtgtcttgttgctgccttcaacataacatcagtgacaggaacttgctgaggtgaaaggtgactccatgttcttttctcatttgtccacagtgtaccacatgaaggaagatggttgggtgaaagtagaaagtacagatgtcagtgacctgctgcaccagtaccgggaagccaatcaataatggtggtggtggcagctgggcaggtctcctctgggaggtcttggccgactcagggacctaagccacgttaagtccaaggagaagaagaggcctagcctgagccaaagagagagtacgggctcagcagccagaggaggccggtgaagtgcatcttctgcgtgttctctatttgaacaagcatttcccccagggaagtttctgggtgccccactaagtagaataaagaaaaacggttataaatacctctgtcttgtggctgaatggggttgggcctgtggttgttgggtggggcagaaagtaaagagacgctttttctggagaaggggctcagacccctatctaagaaatgtggcctcaccacatagttcttcctggggtttccttccacactcatctctccaagacctcaggaaggctgctcattgctgtccatggacacttgtttgcaatttcacataggttagggtcctttccatagagaggcacctggggactcctgtgtgttccattgttaatggtttgaggaacagggagtagggcacctaggataactgtttttgactttatagagtaggatgaaaaagcttccacttcactttaatatggtaatcatataaacaccataccatttatcccaaataacactttggagatattggatattgaatataaagacagacattaagggtctaatttcatgatgtgtcatgctgaattgcaagatggcaggactataattttagaggaagaagagatcaggaggactcccctaagtgaggagtgtggggaaaatgtaaaagatccaggttagaagaaagagacacacatcatgagattttcggaatcatgctggaactatggaccatgtcactttccagaaaataaaggaaacaaatgcttgaaagtaggagcatgagcttgagcatggagcttttttcattagagagagattcttaaaatgccagaatgaatagagttgtaaaactttagcgagcccctacttaaaatccctcctccccaccaccactattttaaactttaagtgactccttggtagtcacacaggtaacatttcaaaatggtgatctggaatccaagcgacccttcctttggggaatttgtttgtttgtttgtttttagtttgggaggtggtttcaatctgaagagtcctttctggaataaacgaatctttctgttgcataggaaggctctgggtcaggaaggatatttaaaaacctaattactgttctaaacagtgttaaaatagaacaagaaccaaagctcagtacggggcatttccctcataggctgaaggtgcgcccaacataatttggagtacagactcagaggcacctgaacacgcgccagctcaaggtgctccggctgagaaggacggatgaagatgaacgctcagggcctactaaattcaaagtctgtacgtgaaaatcccctttggcctggtgagattggttggaaccttctatttaggagagcccggctcgctcgcctaaaactggagcttgcatggaagagggcacttttttttttttagacgaagtctcactcttgtcgcccaggctggagtgcaatgacccgatctcggctcactgaaacctctgcctcctgagttcaagcgattcccctgcctcagcctcccgagtagctgggattacaggcgtccgccaccacgccctggctaatttttgtatttttagtagagacagggtttcaccatgttggccaggctggtctcgaacccctgacctcaggcgatccgcccgcctcggcctcccaaagtgctgtgattacaggcgtgagccaccgcgccggaccagaaagaaggcacttcttaatagtaggctcagagcttgaagtagtaactttgagaaaattcagtgattctccaattacaaagcattctccaattacaaagcaaggacaacagataaagttgcccttgagacaactgtattttacttaatgataaagaaacatttttgcagttttatatcccagagtaaccgccactaaaggcgagtgagactcattgcaggcctgtacagtgcgaaccagagttcgggctccagttccgctgtctgcgggtctcgcgcgccccctcccggcggcccagcccagaatgaaggccttggctggggaagcgaaagcgaaagctgcccgagccctgacgcccgccctggccgagcgtagctggcggaccagagccggtagcgaggttgggagagacggagcggacctcagcgctgaagcagaagtccccggagctgcggtctccccgccgcggctggtgagttggtgcggaggggaacctggagcgccaacagggacgcagcccaagtgactacccactccacgctcctgcttcccagtccctctgcacccggcgataggagggagcggagcccggaccacttagctcgccgcggcaggcgggggtgggggtgggggtccggggattttttttttttttttttttaagcacgaggctcctgatggtcatgcttccagctccccagaaggccgaaagctgtctgtcgtaggaggggtgtacggatgagcaccggttactcaggagagctctcagggttgaataggataaaatgagaagccgatggacgggttaggcggagccgggcgggtaggagggcagggacaaggattgggactccacccccatgatttctcatctcgtatccgttgacagagccatgcggctccctgacctgagaccctggacctccctgctgctggtggacgcggctttactgtggctgcttcagggccctctggggactttgcttcctcaagggctgccaggactatggctggaggggaccctgcggctgggagggctgtgggggctgctaaagctaagagggctgctgggatttgtggggacactgctgctcccgctctgtctggccacccccctgactgtctccctgagagccctggtcgcgggggcctcacgtgctcccccagccagagtcgcttcagccccttggagctggctgctggtggggtacggggctgcggggctcagctggtcactgtgggctgttctgagccctcctggagcccaggagaaggagcaggaccaggtgaacaacaaagtcttgatgtggaggctgctgaagctctccaggccggacctgcctctcctcgttgccgccttcttcttccttgtccttgctgttttgggtgagtcaggagaggacgttgtgagttggaggtggtaaaagggcctgggcaccagcacattcttgtgttatttttcatgcctctttcaggtgagacattaatccctcactattctggtcgtgtgattgacatcctgggaggtgattttgacccccatgcctttgccagtgccatcttcttcatgtgcctcttctcctttggcaggtaggtggtgggcagctgggtccatttgctagccccaaatctttataggggtcttcacttccctaactccatttctaggccctttcaggcgcaaaacacaaaaatacttaaactaaaatatggtgaatgtagtcaccattctgtttcatctatccattcatttcttccttcgttcatattcatccaatatcttcaaagtttatctgatcttattataggaacaagttatgagtgaaggtagtacaaaaggaatttaagtctcagatggaatgtctctcagttgtctctcaacattcctaggtccatgaaattccatttctttctgcctcctacctcctacccctaagtctgtctccaaagtatctctccagggtcactctctcaggatgggtatgcttctccctctcactcttctttcccagctcatcttgctaatccctgaagatcttactctgaggcttatcacctttctttccagaatcattactcttttcccttcacttgctttcctttctctttctagacatactcaaacaaacaaactgtttgataaggctgggactgggatgaggtgagcgaggcacctggggtgcaaagtttaaggaggtgtgcactcaccttacccaaatcccagccggcctgattgtctctatttttatggtcatacttaatttagagtaccctcgaaaaccatttcattgtgccttcattccatcctggctgctttctgctgaaactacagtcgtgcactgcataacgatgtttaggtcaatgatgggccacatataagatggtggacccacaagattataataccatatttttactgtaccttttctatgtttagatacacaaatacttacttctgtgttacagtcgcccacagtgttaggtgcagtcatatgttgtacagatttgtagcctaggagcaataggctaaactacatggcctaggtgtgcagtaggctatgacatctaggtttgtgtaagtacactctatgatgttcatacaacgatgaaaccatctaacgacacatttctcagaacacatccctgtcattaaagtacaaaccctcattatatcatgtctgactattccaaacgcctcttcaatatggtaactaaatttgtattagaaacatatattttgtaaaatacatgcttttatgctttatattttttcctctaagtgttactgtagcatgtagttggtctaagagggattttccaactcgaaggatgacagatgggaatcacatgactctggggctccagagaattgtgggggcagggaatttattattgcagttcccatgatgaagtatctatgatgacagagaagggctttgggtatggggcaggaaggagaccaaggcggaggagacgcacagagggacaagcctgagggacgctgggacagaagcaagcactgggatacttgttttcacaatatcttttcccttctattgtagttttctattgtgtctagtacagagtgcactccataaatacttgtaaatttgtacatgttatgattttgttctcacatctagctcaccatgtctcctctttcttcttcctctgtgtattccttacctcttctctctctgtgtgtctgtctctcatttctttctcttttgcccctcctggcatgctttcccctgactttgcgcttctctgcactcctggcttgctcctctgtttcacccgctggcttgctccttctctgcatctccctcccctcttattctcctaccccacagctcactgtctgcaggctgccgaggaggctgcttcacctacaccatgtctcgaatcaacttgcggatccgggagcagcttttctcctccctgctgcgccaggacctcggtttcttccaggagactaagacaggtggggcctggagtccaggtctgagattcccatggacatcccttgcccctcagtgaccttccacccacagcctctcctcctgccttcacccgtatgccaggacctggggatgcttttctcttgtttgggacagggtggagaagcagcctccactgtccctctgcaagtgaaggaggatgttcagaggagggggctgtgtcagagggaacggtcaggagggagtttctgggggccctgcagtacacatggtttcctttttcctcacctgctctgtccttcttaggggagctgaactcacggctgagctcggataccaccctgatgagtaactggcttcctttaaatgccaatgtgctcttgcgaagcctggtgaaagtggtggggctgtatggcttcatgctcagcatatcgcctcgactcaccctcctttctctgctgcacatgcccttcacaatagcagcggagaaggtgtacaacacccgccatcaggtgagcgtgcatgtaagggaaccccaaagggagaataaaactgacaggtgaggaggcttccacatttgtggctagaggatcccctagagagagatgttctcttctcagccattaggggagaaggtatattgtagtatatactacattttgtttgtccagccatccaacaatggatatttgacttcagaagattcatgattctccagaactgtaaacaaaaatgtaaagtgtatgtgaaggtatgggggagggaataggaaggggagatgataggcgatgataacttttcattagcttctcaaaggagtctgtacatcccccgcccccactgcgaagattaaaaatggtttcttagaggcttttaggcagggagattttccctttaaaatcagcagaagaagtctggatgcagcatagggaaaggaggcgtcatcaggaagtcctaagtctgaatgtcagctccaccttctctttttctcttatattgtggtaaaacatacataacataaaatttaccatttcaaccatttgaagtgtacagttcagtgacatttaggaaacccacattgttattgggtagccatcatcaccatccatctccagaacttttttcatcttcctaaaatgaaactctgtacccactaaatagtaactgcctactacccccaacccctggccgctggcaacctccattgtaccttctgtctccatgaattgtgatgactcccggtgcggtacgtaagtggaaccatacagtatttgtctttttgtgactggcatattttacttagcgtaatgtcttcaggcctcatccatattgtagcatgtgttagaatttcctcccttttaaggctgaataatattctgttgtgtgcatatatcacattttgattatccattcatctgtcaatggacatttgcgttgtttccaccttttggctgttgtgaattatgctgctgtggacatgagtgtacacctgtttgaaaccctgcttttggttcttttgggtatatacttagaagtggagctgctggatcatatggcaattctatttaacaatttttgaggaaccatgtattagtccatttttacgctgctgataaagacatacccaagattgggcaatttacaaaagaaagaggtttattggacttacagttccatgtggctgggaagacctcaaatcatggcggaaggtgaaagacacatttcacatggcagcagacaagagaaaagacagcttgtgcaggggaattcccctttttaaaaccattatatctcgtgagacttattcaatatcacaagaacagcatgggaaagacttgccctcatgattcaattacctcctacccagtccctcccacaacacatgggaattcaagatcagatatgggtagggacacagccagatcgtatcaaaccaccatacagttttccatagcggcagcaccattttaaattcccaccagcagtgcataaggtttccaatttctccacatcctcatcaacaccactttctgttgtctttttttttaatagccattctaatggtgattaggtgattaggattatctcattgtggttttgatttgcatttccctaatgattagtaaatattgagcatcttttcgtgtgattttggccacttatgtttctttcttgaaagaatgtctgcaagttctttgcccattttctgatttttttttaagttgtgggagttcactatatgttttgcctattaatttcctatcagatatatgattcacaaatattttcttgtatttcatggttgctttttcactctgttgctagagttctttgatgcacaaacgttttaaattctgatgaagtctgatttatctattttttgttgcctgtgcgtttggtgttatatccaagaaatcactgccaaatctagtggcatgaggcttttcttctacattttcctaggagttttatagtgttagctcttatgtttaggcctctgatccatttggaattacatctccacctttcttaactatctgtggctccttgggaaaactacccttctttcctgattcagacactggggatgggaaaattacctcaaatgaaggttaaaaaaattgcatgtatctcctatactacctaacactgagagctcaataatattttgttcccttgctccttcactcttattccttctggaaagaagagtaaggaagagggagagaaacagtttggtatttttaggtagactagggagcatctcactggctggagtaagatgtgggggcctgctgtctttgcacatcagccctggtgtttgctggccctcttttccaggaagtgcttcgggagatccaggatgcagtggccagggcggggcaggtggtgcgggaagccgttggagggctgcagaccgttcgcagttttggggccgaggagcatgaagtctgtcgctataaagaggcccttgaacaatgtcggcagctgtattggcggagagacctggaacgcgccttgtacctgctcgtaaggagggtaagataccagagtggttgtgaaaggagcccaggaaagggggagggcaagggaagaggaaactacagctggttctagaggcctttgcagctcagtctcatagaggcagagagggggaaagaatgggaagattcccagcctcatctctttcttctcctcttccaggtgctgcacttgggggtgcagatgctgatgctgagctgtgggctgcagcagatgcaggatggggagctcacccagggcagcctgctttcctttatgatctaccaggagagcgtggggagctatgtgcaggtgagcgagaagccaagcctgctctccttttttccctctctttttctttgtggactcctgggccttgggctttatttgttctttttaacaatacaatacaaaaccaaaacccgcaagtaattttgctatggagaattttaaacatatgccaaaaatgagacaaaataatattacaaactcacatgtatacatcctgtgctttaacaatgatcaactcatgcccaatcttgttggatctgtatccccagccacttccccccacccatattattctgaagcaaatccaagatattgtatactttcatctgtaaatatttcagtatgtttcttaaaaatacaaacatctttaaaagtgtataacaacaaagccattatcacaccaaaaaattaacagtagttcttaaaatttatcaaatagtcaattgtcaaatttccacttgtggtatccatgtagtatatgtgtatgagtgtgtttattatactttgcttaaatcaggatccagaaatggtccacatattgtgactggttgatacatcttttaagtctgtctgtctatctatctatccatccatctatccatccatccacccatcaatccatgtatctgtctaaaagtttcccttgcacagtttatttgttgaagaaataggttgtttgtcctgtggagtttcttagggtctggattttgttgactgaatccctgtggtattatatgctcttctgcctctgtacttcctgtctattgatagataaacctagaagcttgtgagattgaggggttttttttggtctttttccagcaacagtactttttaggtggtgatgcattcttcctccaagaggcacacaatgtctggttctctatttgtggcaacatcagccactgatgagcagtacctacatccatgacagaattagggctgcaaaagggagatactctatcattcttcatgtattagctgaagtagtctatgaagggagacttcccctcatctaccatttcattacccggtggtacagtttgatgaggaaaggcagagtgagcatttagatctcttcctacatttaccagttctcaaaaacagctacttcatccagggctttatttaaacattttcctagacacttgataaacatcttttttgtgtagagaactgcgctgggcactctgacggctacaaaggtgagttgggcacagtgcctgcatttaaggagctccccgtctaatcaagcaagacagaactgggcacaagtaataggaagcagtaactgaaaagatctggggctagaggcaatgctgtatggtaggagaagggactgtatatcctttatattgcaaattggaacactggggtattggtgccacttttaaattccgtccaaattgtacatttaaaagtggagaatctcttttgagtatggaggaggagcagtgcagttgtgagtggagtgtgtgaggagttgggagggtggtttctggtagaagtgtgtttaattagccggctctcccattcctgttttccagaccctggtatacatatatggggatatgctcagcaacgtgggagctgcagagaaggttttctcctacatggaccgacagccaaatctgccttcacctggcacgcttgcccccaccactctgcagggggttgtgaaattccaagacgtctcctttgcatatcccaatcgccctgacaggcctgtgctcaaggtgcctgaaagagggaggaaacctggacccttgctctctgctgctaatgcataattggacatcacagcctatagttcatttgcctctgagaacctggtcttgcctctgctaagaagagaaatggagggattttgagggagaaggggcaggcccttaactctttttctggttttctaggggctgacgtttaccctacgtcctggtgaggtgacggcgctggtgggacccaatgggtctgggaagagcacagtggctgccctgctgcagaatctgtaccagcccacagggggacaggtgctgctggatgaaaagcccatctcacagtatgaacactgctacctgcacagccaggtgggtgaggagggagaagacaggggacaggagaggggagcatgtacagagagaggatgggagatccacgggaaggcgcaccaggtgttcattctgagggaggtaggtggggaggacaaaagggcccctgccttgggggtttacacatagtcctctgcccctgtccctgctgcacaggtggtttcagttgggcaggagcctgtgctgttctccggttctgtgaggaacaacattgcttatgggctgcagagctgcgaagatgataaggtgatggcggctgcccaggctgcccacgcagatgacttcatccaggaaatggagcatggaatatacacaggtatcttctacaaattgtaagcttgctccttcagtaaaaaagagaaaatcagacttactcttagtggtgaaggtcgtgtccctgtagcttgatgtttgctgttcctctgccctttcctccattcctacgtctccttccccacacactgaattcttcagcctccctcttgatcaagagtctttgtttgcagagagcaatgcagcagtggtgctccctccatgggcagccccgtcaggtccccaccccatggccctcctcccactgggccctccccgcactgggccctcccacctcccgaggtcctactggaagtacctgctgtgcacttgtccctccttgtgtgttgtctgtgtcacttgtatctgaggaagggaatttctctgatttcctcagatgtaggggagaagggaagccagctggctgcgggacagaaacaacgtctggccattgcccgggcccttgtacgagacccgcgggtcctcatcctggatgaggctactagtgccctagatgtgcagtgcgagcaggccgtgagtaccgtgagagggcaggggacagtggggcctgggaggggcatgctgggaggatcagactgtgcagaattgggcagagggaggacgaaggacctactagtggaaacagtctgtgccttcttggggttggggaatggaatccggtggtgtgagggcagccccagttccctcctgggcttccattcctccagctgtggcagtacagccgggagagaagggcagtccaggcctttatctactgccctttcctaccttcttttatttcacaccttctttaccctaaatcataagagatggtgcccaggtggatgtggtgtccatctcattcctgtctttctgaggcactgtgatcaccccttcagctgcaggactggaattcccgtggggatcgcacagtgctggtgattgctcacaggctgcagacagttcagcgcgcccaccagatcctggtgctccaggagggcaagctgcagaagcttgcccagctctaggagggacaggacctctattcccgcctggtgcagcagcggctgatggactgaggccccagggatactgggccctcttctcaggggcgtctccaggacccagagctgttcctgctttgagtttccctagagctgtgcggccagatagctgttcctgagttgcaggcacgatggagatttggacactgtgtgcttttggtggggtagagaggtggggtggggtggggtgggggctgtctgtgtccaggaaacttaattccctggtgactagagctttgcctggtgatgaggagtattttgtggcataatacatatattttaaaatattttccttcttacatgaactgtatacattcatatagaaaatttagacaatataaaaaagtacaaagaagaaaagtaaaagtacccattgtttcacttcctggagataaccatagttgctattttgctgcctgtcccatcagtcgtttatctgttgtttgagatagaaattaaccaaaaatgacataaatattcatgagattgccttcctatatccttccttgttcctaccagtgtctgctattttgaagaagctagggtctggagggacagagaacagttccctgattaacagtattaatagcgacattggtaacagctaccatttatagagttttaatgggagtaggagctatgctaagtgtttttcatgtattatcgtttttaatcattatccccaaccctatgaggttggttattatccccattttacagatgaggaaactgaagctcaaagaggctcaatgactttcccaaggtggtcgtagtggtggagttggagtttgaacacaggcctgaccctagagtccacaccctgacccaatcaattatattgcatcttgggtccataaaccctaatccataatcccatcaagaaaagctctgctgctcttagctctaaataattcagaatctattctcttctctccagtcccgttgttatagtcttcactcatagacttaagatgatcccatcaccagagaggtttctctaccattagcttccctcttccggccattcttcacaaagtcatttttctaaattctgtgtcacatacgatgatggcatttctggaaattccttcaggtgctctcaagccctgctgcagagatccttttcagagcacacactgttccagcccatctgtctcaccctctcctgttgtatccagctccacgacaaactttctgccttccccaacacctttgtgcctttgcatatggtgttttcttgcccattttctgctcgactcgcccctgattttcaagttcaagacttaactcagggttcaggtcttccaggaggccttacttatgtcgtcagtctggggaactctccatgtgcttctatcactgtgcggttacctctttcacagcccttttaaagttctatcttccctttcccaccttttttgaccttccactagaccatgagcacctgggcggaaagccatatatcttattaagctttatatctgctacctggccgagggctaattcatagtggagaataaatagtcaattgaataaatgaataaatatctccaccatcgtactaatcttaatcctccctgcccactcccaccactgaaaatgcaacattgtacacatcactggttgttgggagggacttaccttggaaagttgctattctaggaaagagaaaccttcatattcctggaaacagcaggtagtttccagtgctggcaatgaattccccagaactgctgttttggattttttcttgcctggcagctgttgggagcagggtgcagtgaggatggagtgagagtgggcagtttcttgtgcagatttgcctttctttcatcctggggctgacttgcagctccacacccatccatctctcaaatttcacagagggtaaaataggcatttggagagaaagaactctggcctgattcctttctctcccacaaatgtcctttattcataaaacaggaataataattcctgtatctcccaactacatggaagctgcagccctcacagaagaagatgatctgagaaattctttgatttcctcagtacagttatacccatgcatcataatactttaagcctggaaggcatcttaaaaataatgcaacagtcaaacctaattttacagagaaactgacatgaaatcacgcagctaatcatgataaagctgggtggaaaacttatcttgatgggcagtacaggaagatgcagtagaccttaagatgtcctgaaagtttcttatctcaggggaaactcccaggtaggctttatgtcagggacacagaaaaatgctccctgaaagtcaaaatattcgggctagacagacaaattcctgtaagtgtggtttgtctgggaaccacagatgtcactaatcctggtttgctccagagttctttttgttcactcctaccccccatcaccatttgattgatctccttaccctgtaatttccccttcttgtcgcttacctgcagtatctttcccacccaggcatgccttattctttctaaaggaaagtatgaatggagaggggaaagcttgggaaactgatagatttccttggatgccaaaacacctccatagcctgtctgcccggccctatgtggaaacagcattgagtttcaagtcctttatgcctccacccagggatagccacttggaatccacatggcaattgtgaaacaagcaggaaatgcgtaattgtcagaattttgtggggaaaggactagggaataaggaaaacaaagatcttccttgtgttttagagctgtcagctagaggagcacctgcttgagtctgatgccatctaatggtcccagaagaaactgggttttgaacctagagttccatggactcttaggaattagactcctactactactaagcattcactggtgcttactatgtgctattgctgtgccaagtatctgaaacctgtcttcttaccttatttttcaagataattctatgtggcaggtattactatctcaattctaagagtgagaaaatggagttttagaaacatttactaacttgcctgggtcacatagctaaggaagaggtggacttgcccagctttgcataaaactcctcaaaagagttgcctatactccctgactccacttatcttcctactatcctctttttaaaatatattatttatttatttaaataagcaatatatgaatgtggtttgaaattcaaaagacacaaagaagtatacagaggaaagcctcactctcaatccttctcaaggtttgctaattcctcttgcataggcaatccgttcttccagctttgtgtttatctttccagagaagtttactgtgtattaagcaaatatgtatatctttattcttgctcagtattttcgcaaacagcagctgtctaagttcactgttctgaactttattttttaaattaaaaatatatggctatgtagtattctattttatggaagttccatatttcatttatcctgtttccttctactgatggctagttaggttattggaagtcttttgctgttgctagttagtcttgtatagacattgtaatgcacatgtgcaaaaatacaagtatgatacaatcttaaaggggagttgctgagtccaatatatacattacaaatattgatagatattgcaaaattgccttcatagaggctgtattaatttatagttccagcagcaacatatgagtttatctgtttctccatatatatatatatgtatataaccaacagacagtgttaatttttaaaattttgacaatcttctgggtgaaagtagcattgtattgtagttatcatttgctttttaatattatcatgtaagtaacagagatactaaacccagaaggataagggagcaaagatgagaaaaataaacacacacacaaacaacaataacaaatctgtctaaaatattggaaaatcagaatgagaaatgaaatatgactgtaacgataaaaatcagtaataaaaatgactattaaatttaaaaataaggcagagcaaccacaagtgacatgagaatgaggcagacaaagttaaagcacctaaagtctttgtcttgtttgaaaggagggtagagatattgattaccttcagatgctgccacatttggtaaacatgttaaaaatataagactgacttttaactaatataattagaatttaaaattcctaaatcagtaaggggaaattaaataatactttaaataaaaatgtaattgatttaatataagtgatgcaaggaaaacaaaagaagcaaagtaagacatagcaaatacagagcaccatatattgtaacagaaacgaatgtaaatagcacagtgatcacaagtataaatagcttaaatatgggagttaaaggaaagttctcagattagattaacaatatcgcaaaatccagttatatgcccttcataagatcacaagaaacctaaaaacatgaaaatgttaaatcaaaaccagatataagatacacaaagcaaacactaacagaagacagaaagacagcttatgtaattacagaaatatctaaacatatagtctaaaaccaaaggcattagtaaaaacaaagacagccattacatagtgataatgaagtcaccagaacattatactaaaactgaatcagtttgcacctagcaataaaactacaaaatatgtaagaaatataggagaattataggaagaaattaattgagaaattgaaacacatttctcaatgattatagaataagtggaaaaatgaataaggatatcaaataagcctgttgatgttcttgtctgtaacatctaggaatcaaaatatattctttaaaactaataaatcaagtgctcgtatttacacatttaagactacaaaggtagacacacacacagaaagaggaagggagaggatatgagctagttttgtgattgttcattatttaaaactaataggaattatctaaaggaagagggaactaagtgtattatatacaaataaacttatcaaagcaaccttgaaatatacaccttccttaatatctgaaaaggtaaaatttttaaaatgcacaataaagacatagtgaaagatttttaaaaatactcatgtaaacattatacttaacagaagttaatatctctgaattagactgaatctatttgctgtatgaataattataaatgggcttcttaactgaactaaataaatgaaaatatttttaaattagattaagataaaaactctattatttgcaatatgcaaaagacacctaacataaagccactcagaaagatgtattcattattttcaacaaataagatgatgggcaaagacataacaagagaaggcaaacaaaagggaagcagaggtcacattcgtcttaccaaacaagatgaaattcagacactcctcaccaaaaaaaaaaaaaaaaaaaaaaaattgagtgtgacagaggcacttataatgtaaagtataaaattcatatgaatatatgagacatgtgtttaagttctaaataccaaataggtagctcttataaagcagaaattaaggtagatacaaggaaaatattcagaaatgtactaccaatagaacactttaattccctttccctggactagaccagttaagtggacaaaaaaataggctgggcctggtgattcatgcctgtaatctcagcactttggtaggccaaggcgggtggatcacctgaggtcaggatttcgagggcagcctggccaacatggtgaaaccctgtctctaccaaaaatacaaaaattagctgggtgtggtggtgggcgcctgtaatcccagctacttgggaggccgaggcaggagaattgcttgaatctgggaggcaaaggttgtagcgagccaagatcgcaccactgcactccagcctgggcggcacagtgagactctgcctcaaaaaaaaaaaaaaaaaaaagtatgaacacagaagatagaagatattactatcaataaaaaaatagatatgctacatctatatcaaacttttaaaattgaaaatagaggccgggtgcagtggctcacacctataatcccagcactttgggaggcctaagcagtcggattgcttgaactcaggagctcaagaccagtgtgggcaacagcgaaaacccgtctctacaaaaaatacaaaaattagccagatgtggtggctcgtgcctgtggtttcaactacttggctgaggtgggaggatcgcttgggcccagttcaaggctgcagtgagctatgattgtgccactgcactccagcctgggcaacagagtgaggccttgtctctaaaacaaacaaacaaacaaacaaaaattaaatggctcaatggcatagaagaaaatttttttatgaagcaagtataatattgatgttaaactatgacaatgcacaaatataaaaattgtagatgaatttacttattatactgacacaaaaatcctaaataaaacattgcaaacagattctagcacagattaaaaaacacccattaagatcaaggggttttttttgttttttttttctagaaaaccctttggaagttcatgatattttgaatttcagtggatatttcctgggaataatgagttcaaatgaacgaatatgtggaacaaagcatcaccaacatttattttttcaggatgaggtgatggacaaaaccatcacagggaaattgaggcaaatagtacatgtaaaacaatacttcgggtgagtccacctatcccaaagtcgtatcaaagaagtggctgcagattggagcccaaagcctttggttcctcagtttccaaatggattctcactaggtgggatcatgagtttgctttggacaccccaaattctaactatttcttttgtttcttacatcctttccctcttccccagccccttcccctcatgttacacctcttgctggtttgagacgtcaatcaccactgagaaagaattaaaccagtattttgagctggcaaaattcttagcctagtacaattccttcaattaaactgtagctcaacaatgtgttctctaaaagtatgatttaatattctacctagaaactcagaatatttttcataactcctccagggcagtgtggattatgttgatgtgttaggaggaagtagaaggaagaaaatgaattgagatgtacgttttacttccatgtcaaagtcaccaaaatagcagttgaagggatatttgtgtcaggcaatagggagaataataattttatgccaccctcaaaaaacaaccacacatacacccaaattctctcactcctcagagaaaggggaaggaaagaaaagagagaagcaaaatatgagcttgagtgaaaaatcacagaggagcctgtagctatttagggagggctgctggctgaagtcaggcaggaaaaaaagatcaaaacaccctgccctatttttcaggctcgttcaagtagaagacaaaaacataaatacaggagaaaggaagaaaaccacatctttttcctcttgtctccccagaactgaacagtgtctctgataagcccaggcccttctatcgtagacactgacactatgcacagaaaatgactcaaaaacgcttctaatgggggtgaatctgatgcttcagtttatttaagatgtaccagaggccatctaaggagatccatagcttgctaactgaagcttattgctttctcttcttagttcccatgccaggctctatgccattccttgcttgtcatgtgagatcactgatttcctttggttaggtaggatatgatttccttacagagatctgtcctgacaccaaacagctatgatgaaattccttggttattttccctttttgtgtaccttatcattaccggaatgctaaagctgtaggaataaagtttccctggcttcccaagaaatacagtgtgacagaaaaagtatagcctagggacttactagttatgtgaactttggttcattccatccttacctcatctgtaaaagggagatcatgatagtatctactgcaaagggttttgtgtgatgattctctctctttctctctctctcatacacacacacgcacacatttatataatgcttagaaaatgaactcataataagcaattgacaaacattagctattattatgtaggcaagtcagattttagagtttgtgagccttagacacatttacagagaagaaagagcagccctcctaactttctggtccagcgccatatcctccacttcctccccatccccacatcccttgccatttatcaaccccctctctcctctaaatctaaatacaggcccccgtttgatccatattgtctaggcccttcctctcctctccacatggcccttccttcagctctgagggaagctgcagaagccagccatggtgctgtctacaaagaaggggacacacgcctcttccacccgctcatgctgttactgcatctgatcatctccgtgccgtgtccttgttcacttagcctgtgttgagtgtttgtctccatttccaaatgcaataaaacatctgggaaagactaaggtaggtgtgggcaggaagaagggaggaagttagacccagtggcttgagtgccctctgatgcctccttatcctcggctccacacaagccctcgccagtgtgagctccacagccatccacctggaggaggagtactcaaaaccagggtcaaatgccttgtactcgggggtctaccagtaagcctgtggccagccttccacttcatgaatcgtcacatttacatgagagatgtggagggagaggggtcagcctcctagctcctgtcctgtagcagttaagtcaagtcaggccaggctgtggtaaccaagccagtaccttctttaaagaacagttgtttctcattcatacagagtgtgttgtaggtgtgagtgattccctggggcagctgctcttcatggtgactcagctaattagactgcttttctactgggattgtgccatctcaacacaaggctgtcttggttgacttggtaggggaggaggagaagagtcatgcacgaggagttaaattctttgaccaggaaccttttgttcactttccattggtgagaacgagtcacacagctccaggagagtaggaagtctagtttctcgttttccatgggcctaggaattagaggatgaacactagcgatgtcttccacgtcttgctctctttttctttacctgttataatctcccatggagaagaaattatttttctgattggtctgatccaggcctctaaccaagggcatttactaagggtcatagaacagtaaaaggttgcacaattgcatctcacctctcttttctgaatcctgcttaattaaaactttaaaaactcacttacagaccacttcttgctcttcttagttatcaaatatattttcttccaactcctttttgacagatcttgccttgttctcagctgactcccttgcaaccatctaaatggaacttcctcattcccctttatcccctgctaatcgtcctgtctttattcttttatctgaagaagtgtacccttcttcccccaagccttatgctctctgtcttagtccatttgtgttagtgtaacaagatacacgagatagggtaatttatgaagaacagaaatttatttctcacagttctggaagctagaagttcaaggtcatggccctggaagatttgatgccttggccatcgacttgaaaaaagtcactgaagtgaacttgtggttaccatgataccctgggttcattcttaacatgcacagtataggcaaatcaggggcacatttcatgctgaaagatgatgtgaaatgatgagtaaacattgccctttaaataataataacatagatggtgaattacaatttgcacttttggttttatttgcttaaagatagtgttttactgtctaggttttactgaaagaatacttaactaaacacttgagtcaaatcattccagtgtaacagtcctcacaaggaggaaggcagaagggcaaaagtgccaagctattgcctccagcccttctatttttattgattgactgattgattgattgagacagggcctcgttctgttacccatgctggagtacagtggtgcattcatggttcactgcaactttgaacttctgggctcaagtagtcttcccacctcagcctccaaagtaactaagaccacaggtgcatgccaccatgtttatttctttaattttttaaattttatttggacatgggggtctcactatgttttccaggcaggtctctaactcctagcctcaagcaatcttcctcctcagcctcccaaagtgctgggattacaggcatgagccatcatccctgctctctctagccctttttaaagtctctaatcccattcaggaggcctctgcattcatgacttaatcacctcctaaagggcccaccttttgatactatcacattggtgattaaattgcaacacttgaattttgagtgacattcagaccacagcattttggagaaaatgtcccctttcttctcttttttctcttcagtttctcctttctacagataccttgcacttcacttgcaaccttgttgaagtctctcctgtcttaaaagtttcttttcccaaaacaccagaactcattccttctgtctaactgtaactttgtacttgttaccaacctctacccatttctacccctgactccccagcctctggtaactcctaacgtactctttacttcgatgaggtcaacttttttagattccacatatgagtgaaatcacgtaatatagtccttctgttcttggcttatttcacttaacatagagccctccaggttcacccatgttgttgaaaatgacaggatttcatgcttttttatggcggaatagtattccatcatgtatatatatcacatactaattaccctgatttgatcaatacacaatgtataggtgtgttggaacatcatgctgtaccccataaatatgtacaattattacgtgtcaatttaaaaaacccaagaaaagtattttttcttagtgttgtttttttctaaagtgtatcccattttttcctttgttttcactttcaaaattcttgaaagactattttaatctgcggcctttgttttcttgtttccaattcattcttttgaaatatggcttctacctttaacactctgctgtcctcttgaaggttattggtgccctactaaccataaaacacaataatgctctcttagattgtatcctggtgagcctttttgcaaaattttattctttgagaattctctttccatgttttcttttcttttctttttttgtggtcattttggcttataggaaatcgtactctccaaatgttctctatgtcttctatttcttctctgataatccctttactaaatcttcttgaggcatatgcttcagaatgcttaatttacatactcttaattccttcttaatttacacactgcctgtcggcaatgtcaacacccaataagaagggagacctattggtcagaacaggccagggaatagaagaatacataataaacagtctgcctagttcttctagggccccataatatgtcaaacatatatttttacttcttctcccagcccatttttagtatacctaaattactgtcagtgattctgcaggcaaacaatggttgagttgtatgacacaactttgtgaaagtatcctacccagtacctgatgatgcaaaactcttctatcttgattggttgtcaatctgaggagtttccaatcctggggaagccagaaaaacagcgatttatactcttaatgggtactttctgactgaattttatgagctcattctgaagaggctgacgattttactatctcatttttttcctttctccagaatgggttctgggtgggtcccctgggtggtggctctgctagtgaatctgacccgactggattcctccatgactcaaggcacagactctccaggtaagaacagagcaattgtttttttccagtgtgtatgcaagaattggcatgggggagtgatgcctttctttgtaagtccaggccacagaccagactggaagtggcttttggtttcaaagaacagtgttcttccctttggcagaaaggtacgccttgcctctttacatgggatggacttcatataccagagccacctattcaaggggtagggaggcaggaagagggaaacattgtgtcttgtttaggatccttattgtgtatcaacctcagtcagtacctaggcgtgttgaaggcctggcttgggttcgagcctgctgggagaaacaacctgcagtaggctgggtcacagaggcaatctgtgattttttggtcaggacacggaaacaaatctcagttggggtatatgtggacaaatgaaactggaaacaaaggttgctccttctgtcatttattaagccactattatattgtcagaattgtactaaacagttttgagaagtaagagaagttgaatagaatacattgtccttgtcctccgcacnaggtacaagttacttgtcactgttatttttcagcacaggtgacagaatatgcagccatgagcaatgtgagatgaagcacatattaatgagcagaaacaggatgtaatgtgctaagaacagaatcccctttgcatgttagtttcattaaatacaaaagaggaatcaaacctggccaggagagatcattattcttagagaatagaaaccgccctgagtttataatgtccattaaacaatacaactgaaaaaaaaatcagcacagatgttaaatgatgatgaaaaattcagatttcccccctagtttagactactagaggaaatagagaagagtatacatgctgagaaattacaggctggaacttcatctgaaattagctactgagtgagggataagtggggttcacctaggaaggtcattcttatggctcagttggaggcttcgaacttagaaaggaaaggtaaattacaacccaacattaatagcaattatctttcaagtcttgacttagatgcaatgtcttcaggacgtccttcctgacttacctacattattaactccatttgaatttccatttttattgtagttggtgtggccgcctaaccagtcttgggggtctggctggtttggtttaatttacccaagtgttcacagcacattgtaattattggcagtagtgcaagactctctcatctcttctcttgcctccgttctcattctctcccctccctggagaatccattctaaacgtgtctggtatgtctctaagtatgagagtggcttttagaaatatgtagcattattgctctttatgtgtttttaaaatttaataaatgtcatttctctggttgaatcccattctgtttcttttctcacttgacactgtgctttttgagcatactgaggtcaaggcctcttagatccatgtggtctgacgtaatttaccaggcatgggttttcccagaggagggggctggttcatggttttggttttggttttccagaagattttgtgattcaggcaaaggctgactgttacttcaccaacgggacagaaaaggtgcagtttgtggtcagattcatctttaacttggaggagtatgtacgtttcgacagtgatgtggggatgtttgtggcattgaccaagctggggcagccagatgctgagcagtggaacagccggctggatctcttggagaggagcagacaggccgtggatggggtctgtagacacaactacaggctgggcgcacccttcactgtggggagaaaaggtgagctggaagctgaggtctggcggggctcaggaatgtcccccatgtgaaccatggctcttctttcttacaagcaattttctgcttttaggataaatggttgtctgtgtagatgttctggccccagctgtgatatattatcctcacaagtcagccactgtgatcttggtctcagacccccaaggttctcagggacttcgagggctattgtaccctcaaagagaagcagtaattgtgggagtacctcagaaagtctaaatcctcctgacaggcattgacataccctgttactgatcttgggggctgagacttgcctatactttgtgttcacttgggtgacctgggaaagagattagacatagtgatagtccctaaagaatctcctgtcccagcttggtggttttctttcacggtgtctcatttttcctcccttcctagtgcaaccagaggtgacagtgtacccagagaggaccccactcctgcaccagcataatctgctgcactgctctgtgacaggcttctatccaggggatatcaagatcaagtggttcctgaatgggcaggaggagagagctggggtcatgtccactggccctatcaggaatggagactggacctttcagactgtggtgatgctagaaatgactcctgaacttggacatgtctacacctgccttgtcgatcactccagcctgctgagccctgtttctgtggagtggagtgagaattagtttctagtactctctgggcctgactcaggactatactgactcaatacagagcctgtgtcacttctgcgtttatcttggtcacaacatgaattattctttcccttgatctgggaacagtcacgaaaccagagtccttgggttagggtgggagaaaacatggcagatatctatcctcatatcttccaagaaatgaggagatctaatcacctcattatgtgcttccaaccctatgaactggtgtcctctaattctttggtcttagtatttaggaggcattcttatgggctgtgagaatctgtaaccgatgggtggtaactccatgggtgccactttggtttcgaagaaccttttctaaatttatttatttttctctagctagcattggatttggtgtctagtacagattctgggattccaagaaagtgctttaaatattgggatatttttactaatttaaagacctgtttcccataggagctcagtctgaatattcttggagaaagatgctgagtggcattgcagccttcctacttgggctaatcttccttctggtgggaatcgtcatccagctaagggctcagaaaggtaatgagcctgtgaggagtgccctgccacctgtcccagaccttccccactcccaccttccctaacgtcaatgatctgaggcaaggaaagctgattgtgcctctcagggatcaccgggataatttttttctgaagctagaaatgggataagcagagagagtgctgaccttgccagccatttgttcttccctcgggataatcatattgggtcctaattggggcaatccattcttttctcgatttctttccaggatatgtgaggacgcagatgtctggtaatgaggtaatgtctctttttccttgtctttgagtggcagatcattctcccggttctttggccagagggagatgacatgggggtagggaggagtaaggttgctgctgtctagatgggactgtcccctgagtctctggaacggctgtggggggtggtgaggctgcctcctgagaccttcatcactgtgcctccaggtctcaagagctgttctgctccctcagtcatgctaaggtcctcactgaagcttctctctctggagcctgaagtagtgatgagtagtctgggccctgggtgaggtaaaggacattcatgaggtcaatgttctgggaataactctcttccctgatccttggaggagcccgaactgattctggagctctgtgttctgagatcatgcatctcccacccatctgcccttctcccttctacgtgtacatcattaatccccattgccaagggcattgtccagaaactcccctgagaccttactccttccagtcccaaatcatttacttttctgtggtccagccctactcctataagtcatgatctccaaagctttctgtcttccaactgcagtctccacagtcttcagaagacaaatgctcaggtagtcactgtttccttttcactgtttttaaaaaccttttattgtcaaataaaatggagatacaaaaaatgtacattttagtgaattatttaagaaaaacccctgtaatcaagtcaaggaacaggactttgccagctccagcagaagtctctgtacgtcaggccaatcaaagcctctccttcccctcgaaagtgaccatatcctgattttattgtaacctctttcatgtctttgtagtctagtcccccaggtatgtgttctggacgccacagcttagttgctttacgcctaactca

SEQ ID NO: 32176 - DNA, 1000 bp, Homo Sapiens
gtcgacagttgctgggtagatgaggccaacacaggttgcaagaagaggcggggtttagaggcgtgaaactccgcagtgctcagccaagcagggagcaacgctaggaagggcgggcagaaagggcacgctcttgtgggtgactacaggttaggagaccgttgaacctggaggggccctaggatggaccccgtggaaagattcagagactgcgccctctccctggcgccgccttcccctacacgcggcgggtatattctgttgcagttggcccaggacctgtttccaagactctgccccctcgcacttccgtccctcctggttttgtaaagtgatgctcataggaacccccaccccgcgtgacactactcccagctcctggctgacttctagtcttctggttgaagctgcgcctttagatgacacgaccctacccacccctgtttccagcggatgcccgggcctggaggtacctcttactgtaacccatcgccaagtgggcttttgaaggcgcctgttcctttctcgctttcttcggaagacccttgacccatcattcccccgacccccataacgggagagcagagaagccggtccccagtgtgatggtcctggtccaggcactaactgtccttttctcggaaaaggcagggggatgtggaaaagagtcttgttccctccccttcgatctgtggctttcgctttcacttcctcctccgagagcggacagatctctgggtgctgggcggtcatggcgctactagatgtatgcggagccccccgagggcagcggccggaatcggctctcccggttgcgggaagcgggcgtcgctcggacccaggacactacagtttctctatgcgatctccagagctcgctttaccccggggaatgcaggtcggggcagtagggaagcccctagggatgcagggaggcgggcgctgaggagtggagggtcgcctgagaggaggaggcgagagcgggagcgcggggtacagggtc

SEQ ID NO: 32177 - DNA, 3535 bp, Homo Sapiens; identical to SEQ ID NO: 29218

SEQ ID NO: 32178 - DNA, 3426 bp, Homo Sapiens
aattccgggcggcggcggccgaggctgaaggaagatggcggacggcgtggaccacataaacatttacgcggatgtcggcgaagagttcaaccaggaagctgaatatggtgggcatgatcagatagatttgtatgacgatgtcatatctccatctgcaaataatggagatgccccagaagaccgagattacatggatactctcccaccaactgttggtgatgatgtgggtaaaggagcagcaccaaatgttgtctatacatatactggaaagagaattgcattatatattggaaatctaacatggtggacaacagatgaagacttaactgaagcagttcattctttgggagtaaatgatattttggagataaaattttttgaaaatcgagcaaatggccagtcaaaggggtttgcccttgttggtgttggatctgaagcatcttcaaaaaagttaatggatctgttacctaaaagagaacttcatggtcagaatcctgttgtaactccatgcaataaacagttcctgagtcaatttgaaatgcagtccaggaaaactacacaatcaggacaaatgtctggggaaggtaaagctggtcctccaggaggcagttcccgtgcagcatttccacaaggtggtagaggacggggccgttttccaggggctgttcctggtggggacagatttcctgggccagcaggaccaggagggccacccccaccttttccagctggacagactccaccacgtccacccttaggtcctccaggcccacctggtccaccaggtcctccacctcctggtcaggttctgcctcctcctctagctgggcctcctaatcgaggagatcgccctccaccaccagttctttttcctggacaaccttttgggcagcctccattgggtccacttcctcctggccctccacctccagttccaggctacggcccccctcctggcccaccacctccacaacagggaccacctccacctccaggcccctttccacctcgtccacccggtccacttgggccaccccttacactagctcctcctccgcatcttcctggaccacctccaggtgccccaccgccagctccgcatgtgaacccagctttctttcctccaccaactaacagtggcatgcctacatcagatagccgaggtccaccaccaacagatccatatgggcgacctccaccatatgataggggtgactatggcccccctggaagggaaatggatactgcaagaacgccattgagtgaagctgaatttgaagaaatcatgaatagaaatagggcaatctcaagcagtgctatttcgagagctgtgtctgatgccagtgctggtgattatgggagtgctattgagacactggtaactgcaatttctttaattaaacaatccaaagtatctgctgatgatcgttgcaaagttcttattagttctttgcaagattgccttcatggaattgagtccaagtcttatggttctggatcaagacgtgaacgatcaagagagagggaccatagtagatcacgagaaaagagtcgacgtcataaatcccgtagtagagaccgtcatgacgattattacagagagagaagcagagaacgagagaggcaccgggatcgtgaccgagaccgtgaccgagagcgtgaccgagagcgcgaatatcgtcatcgttagaagctgaaggaagaggatcaccttccaagacaaaacagtcttcatgggccaaaaatgacgcttgtccagcagtttgcttcttgtgattgaactgaacctgtaaggattcatggataaaatgaacaggaatagatctgaataaagcaaatctgcataaatggtaaccagtagctctacttttattttttatgttgcttaactgttttatttgaaggaaacctgtgtgatttaaaaagttatagcttttgcaactttattactggttatatacatttggccattatgatgtgcaagcaattggaaaaaaagtcaagtaaatgcttgtttttgtagtagtttgttcttgttaaaaatgtttatatgataatgtctgtaaacagcatcactttgattacaatagatgtagtgttgtaataaactgtttaatggggctgatgtgtaaagctgttcaagttatttgatgtttacacctcagggaaagtcttgtgttcagcaatatctaaagataatgttactatgacaacatttttactgtcctttaaagcattgcaatagcgtttttggatatgcctcaatctaatcttgcgttcagtgaattaaacatagtaattaagtgtcttttgcccttgattttgatattagaataggtgattacatggatatttaatatttctatattctgcttttctagctgtttttacctagttagcttgtgactttgctgaatggtatgtaaacttgtaaaaatagagatttgacagacatagcaatctagtcaatgtgtaaggggtcaaaaaaaacagaggttttaacacataagtaaaaacccgtacatatttgatgtgtaatgcaggttaattacaacacagatgtaccgaaacacttaattgtgaaccgctaacattgaagaaattttgacaattccgatttgatgctgcaattacttgctgtttttattgatcttatggtttatttcttaagccatagtcagtgtaaatacagccctgcagcaggtaaatgtgagtaaagagagccttatattttccaattggtataaaatttttgaaggatgtgatgttcattaacattcggttgtattccccagtatttgtaatgggaaattacagataaaccgtgtctgcacagtttaaggaatactatgtatattcatgcaccgtattgattcatgctatagttacttaatcaaagatttttttcaaacctgccttacatataggcccactttaaaagcacctgactagcatgtgttcttgattgcaaaattggcagaggcagggtgtcaacttgattaggtgtttttatgggaatgtaatttgaaatcactacttcagaaatttgacttaaaattcttgagcacgttaatatgtttttaagatctgattatctttgagagatcttctgttaatacacattggttgttaaagagtacccaaattctaggacaatgcttaaagtgttaaaataccctagatactgtgttatgtgcaactgtagaaaccctccagaaatttccactgctgttcttcactttcatcttgtctgctatcaaaccacttctgacaaaattagctgttttgaattacccatatcactgccagttttattttaaaatattttgtgtttgaagtatctgtgcatgggatcgttgatgtttatcagaactgttcactttcagaaatgattttttaaagcattttgttgaaatgcggttgctt

SEQ ID NO: 32179 - DNA, 10302 bp, Homo Sapiens; identical to SEQ ID NO: 29806

SEQ ID NO: 32180 - DNA, 1433 bp, Homo Sapiens
ggtagaggaagccgtgaggccggagcttaggtcgggaagggatggatcgctgagccgatagcgtccgctaggctgtctgcctcggtacctgttactgctgctacttcctcgtttgacaccttcctggaatctctcttgatttttgaggaaatacctagtaacaaacatgactgagttctggcttatatctgctcctggggagaaaacctgtcagcaaacatgggagaaattgcatgcggcaacttcaaagaacaataatcttgctgtcacttccaagttcaatattcctgacttaaaggttggcacgttggatgtcttggttggcttgtcagatgaactggctaaactggatgcatttgtagaaggagtggttaagaaagtagctcaatacatggctgatgtattggaagatagcaaagacaaagttcaagagaatctgttggctaatggagtggacttggttacttatataacaaggttccagtgggacatggccaaatatccaatcaagcagtccctgaaaaatatttctgaaataattgccaagggagtaactcagattgataatgacctgaaatctcgagcatctgcatacaataacctgaaaggaaatcttcagaatttggaacgaaagaatgcaggaagtttgctaactagaagtctagcagaaattgtgaagaaggatgactttgttcttgattcagagtatctcgtcacattactggtagtagttcccaagttaaaccacaacgactggattaagcagtatgaaacactagccgaaatggtagttccaaggtctagcaatgttctttcagaggaccaagacagttacctgtgtaatgtcaccttgtttaggaaggcagttgatgacttcagacacaaagccagagaaaacaaattcattgttcgtgacttccagtataatgaagaggagatgaaagcagataaagaagaaatgaacaggctttctactgataagaaaaaacaatttggaccacttgtacggtggctgaaagtgaattttagtgaagcatttattgcatggattcacgtgaaagcattacgggttttcgttgagtctgttttaaggtatggcttgccagtgaacttccaagcaatgctacttcagcccaataagaaaactttgaagaaactgagagaagtattacatgaattgtataaacatctagacagcagtgcagcagctattattgatgctcctatggatattccaggtttaaacctgagtcaacaagaatactacccctatgtgtactacaagattgattgcaacttgctggaattcaagtgaaaatgggctcctcccccgacaatcctgtccttgtgtttgtgtgtgctaacagaaataagttgcagtatggtcgtacttttaactctagtatcctttgcttgcttcttaccccctttcc

SEQ ID NO: 32181 - DNA, 15016 bp, Homo Sapiens
ctgcagtgagccatgatcgtgtcaccgcaccccagcctgggtaacagaacaagaccctgtctccaaaaaataaaataaattaaaaaataaacaaattcaaaggaaggtgaagttcttccccagcaaaaatgtttttggtcatccctctgccaccatctctcctactgattcctccctcagaagcctggataccagtgatcctttcccttccttcatctactgttttctttctttagaagtagggaggtttaccgatgtctcacagtcctgatgtcttagggaattgatttagcaaggaaaagtagaaaatatatcagtcagttcccaccagcccatcacagcccaggagcttgaaattaacaatcactaataaatagagaagctcaatatgtataaagtattggcagtgcaaagtttccactttaacttgcagaaaagtgcctgtttagcagaaagaaagaaaatcctggaaagttaacactggatgaaatcttagagatcacctacttctctccctgatttttccaaatgaggaaactaaagcttcgagagatgaagtaactagcatagttattcaactatttagtagcagggctaggactagactccagtctcctgcctcgaagacagctgttctatccatgccacttgctggcaacatgtgcatctagcaaaacacatcataaagtatcctcatcttaagccatcaggaatggaaatcaaaccatttaaacccttcctcttctctctagcaatattttttcttcgcatttctctgtgccctggtctctctctctctctctctctctctctctctctctctctcgtttttaaaatcactcctgtttctttcgtggctctttctcattgtggcatgcctgcatgagtatcttgatttttctgctctaagctatggtttcttgtccaaagaaacatatataaacaaatcaaaacccttccttggtgacctttgtagaaaaggacacttggaatttctatatgagagaagctgaacctctctcttagcctatccagtcaattaaaatgagtctgtggcccccctgagggttgttaaccaatcctaagaaaggaaagatcaatctcatttcttcgtcaccactgggcagggaggctgccaaccagtcagaatctgccactcacagtcattaaaaaaactggccaatcagtccaaccttgttatatggtctggtaggaaaagaaagggactgattggaaaggatagttctgtctccacaccctttccttcctggaccccggttttccctttgtgaagtgaaagaaggacccttccccaagcctatagttaagaagatcctccgaccctcagctaagcttctcttggatcttttgctgtcttcaaattcacccctccccttacaaacctcctttttggagcctcactgctcccttgcggatttgatttcttgcttcaagcctcgtagtaatagtcccaggattctcagcctcccctcagatctccactcaccagcaagtaaaataacttgttttgtatgacttatgcaggtgaaaacgtttttaaagtgtagttgagtctctttcaggagatactatctcaaggaccttgcaataaacagtccatataggtagcagtgcagaattgagttgcaatgcccttaactatagaagcagtgatgatgatggtgatgatggtggtgatggtggtggtggtggtggtggtggtgacgatgatgattttaatgctagcaattactgaactcttactgggtaccaagtaccttgctaaaagcttcatatgtattatcccaatattggctgtgtgataagtactattattcttctcaatttacataggaggaaatagatttagagggggttaaacagctagctcaagatcacacagcaatttgggaacccagatttgtctgaacgcagaacccattattctatgagggcaagggagtgttaaacatcgcaggctgtaacaacttttggaaagagccagctttagcttcctcccaggccccttctctgatcctcctctgggattgttagccatatctgagtgtctaaattgtcgcaacagctgcaacagccgtttgggggtggtggctcctaagaactgtggactttctctgccactgaggatgtgaagctgacagcttaaaagaattccgttttggtgggaatggagatgtctggagacctcaggggataaacttgtgtctttgctagcctgtctttctcctaacagcatctccacagtgcctggcaccacttggtacttgataaatacctgttgattgattcccaaagatcccagttccatttcccacgtacctgcccgctcggggcgcaatcaacaactaaaactggagatttggggatttcagaggaacctgtgagaatcctgatggagctggaaatgcgaatttaggaaagacaggcagtctaccaccctcctcttctcgcccgcttctcctatttctccccactccttcccctccctttcaggagctcagggccataaaaatgcagatggaggatcggtgtgaaataacgggcccatataaatccctctgccgcccgcctgcaagatggattggccgcattgaaattcctccgcgaggataattaaactcggggcctcatccgggcaaaattacattcctgtaatggcgtcgctcggggtcccgggaaattgctccgtgggctttcagcggcggtttttatcgccggccggggtgtgcctgtctgcggctcgcctctcctccgggaccgtaaagctgctgccgtgatttatcctccccttctcccaaatccgattaaatggaggagctcggggccggggcgccgcggggcccgggagccgggagggggcggcgggaaggacggggccaaggaggggaggacaaacggcccctcagagagtggcggatttgcctttatttacagccgcggctttctttttattttttattttttatggggtttggtgagcttttcccgtctttctcgtgctgcgttcaagcacgatgcagggacggcaggggtttggaactggataggccttgtcgccctgttccaaagggcagggcaggtcctgtctgggagacaaggaggcctaggaaagatgagggccaggaagcctcccccacctccttccatcaggggaagggcgagcgaaaggggagagaaaacccacgttcaggagagcatgggggcgggaggggagggcgctgcttatcccaactcgcgtagttgaaacctgagcagaggctcgggcaagcctggagtgacctcgcaaccttacagcgggtcgcaggtgcccgttattcctagactgtcccaggagccaggaaagagggattcggatcatatttaaccctatcttctggctcgctgatgctgcttctctcatggtttatcaccggaatggaaaggaggaaacggggagtgggggaaagggcgaagccaccagaagcagctgcggcattttgctgactattcgcccatggagccggtttgccatccagtgatgccagagtcccggcgcgacagaaagcaggactcccaagatcttcctcctgctgcattttaggcactgaaccccaatcccgaccgtatgttaacactgaattctgagtaggagttttgttttggcagtgtgacgactgcgcatgctcggaaaggggacgcaagtccgagatcccaaacgcggtacagaccaaaccgcagtccacgttacggatcggcttactccgcggagttggcctcatttctgcagtcggcgctccctgtagtttctcctctcgaacgccaggtggagcaaccggccggataccgccacagccctggcaggcggcgctgtgatgcctgagctgatcctgtatgttgcaatcactctatccgtggctgagcgactcgttggcccgggtcacgcatgcgctgagccttcctttcgctcttcccgctgctccgcccctctctgtcttctctgcagtgggagcaggtaaggccttgggacctagagccctctgtgcgctgcgcacgcgcgcgggacacctcaccttgcgcggatgctttgaggcgcttaccttgcgtgctcccaccctggtcctctcgccctttcttgcttccgctatcccttagccttagagttggctcttccgcgtgccggtgacctccaaccgcgcgggcctggcgccatcttggatgtctcgcagggggaggataccttggagctggccaaagttagatcctggagtgctgcttttcacctgttccacccagtccctgcaaacactcttttctcgccctctggccctttcagattgtgacaacccccaggctctcccctcctatctctgctttctcttctcatcctgacttgtgccttctttattctgaaatctccagactttaggccccagaacctcaggtgctccgagcaatggagatagtggatcgtctaaagtcaccaatccctctagtcagcacccctcaatttaaaaagtaaaccttgaacatggtagaagtgggaaaaaaagccaaaacatcgcctcccgttaggttgtggcttgggatagctaaggcagaagagagaggctggttgctttggaatcactagttatttaccagtacctttctcgcatcccggcacgctggtgaagttgtaaaagtcacaaatggtgggctagagatgagggtttctgttgaggcagcaggcccagaaaggtggggtaaggccaagctagtggggccagcatgagaccctgcctgccagctttcctgtgaaggattaattaacctccccagattctgctgttacaaggaaaagaaggtttaaggaaaggaatagttaagttactacccctgtgactcatctacactgaggaaaaagcccgtgatgattttggagtcctgattctggatagtgcctttgcccaagttgtaggctaacaattgcagagttgccatggttagatagccaatggtgggatcacttaattgccaccccttgttgtgggtttattatatgccagcaccacattaaactctttatgtatgttaatttgtaaatgaacatacttaatccccctaagagctgcattttacaaagaagataataaggtataattcccttagaaaagaaccaccccttctttttctaaaagccttaaagaactattggattttgacccaagaaaacctgaatagtacggcagcaaaattgggttagagttacatataggcaaaaatcagagttctagataggacaagagttgaagacatccattaacttaaaagtaattaaggctgggtgtggtggctcacacctgtaatcccaacactgggaggccaaggtgggaagatcttttgatgccaggagttccacaatagcctgggcaaaaaataaattaagagcaattaagatgttggattcagaagtgttttaacctgggacaatctgagttcagttcatttaatgaagtggtatttaatagccctaagcattcactgagtatttcagcctgtgacatattagaaagcatgtaacttaaaagatccaagttcaagtctatcctctaccactaccacagtttcaagactgggtttagggtcacgctcttgcgttaagtatacctaataatcatctgggaaacttgtttgaaatacagggcacttgagccttattcccagagatcttttttgtttgtttatagacagggtttcacgttgttgcccatactggacaactggcgtgatcatagctcactgaagcctccagctcctgggttcaagcagtcctcctgcctcagcttctggagtagctgggactacaggtgcacttccacctcacctggctaattttatgttttgtagagatgaggtcttgatgtttgcccaggctggtctcaaactcctggcttcaagttatctttccgccccagcttctcagtgttgggattacaggaatgagccactgaacctagctcccccagagatcttgaccaggaaggtccaagttgcgcccaagaatatgcattttttaatacgtacaccacccagataattctagttcagatgggcttctcacttcacttggagaaaccctgcctttaggtttttaactcaccttctgtttgaggtaagttcacttctaccaacttagatacctatagggtgtcagatcttctttagatcttggggagacacaatttaatacttttttttttttttttgagacagtttccctcttgttgcccaggctggagtacaatggcgcaatcttggctcaccgcagcctctgcctcctggattcaagcaattctcctgcctcagcctcctgagtagctgggattacaggcatgcaccaccatgcccgactaattttgtattttcagtagagacggggtttctccatgttggtcagcctggtctcgaactcctgacctcgtgatctacccgcctcagcctcctaaagtgctaggattacaggcgtgagccactgcgcccagccactaataccttttggatagactaataacagagttcctccttgatcttcctcatcttattaatacaggaaattgaagtattttcaggaatcagatacttccagggatcagcaaagagattgttggagaccttccagtgtcttggccttcaacaaatatctcccaaaactacaaagactctaaagggcaactttttgtttgtttgtttgtttgtttgtttgttttgagatggggtctcgctctgtcacccaggctggagtgcagtggcgtggtctcgtctcactgcaacctccgcctcctgggttcaagcaattctcctgcctcagcctcctgagtagctgggattacaggcgcgtgctaccacacctggctaatttttgtatttttagtagaggtggggtttcaccatgttggtcaggctggtctcgaactcctgacctcgtgatccgcccgcctcggcctcccaaagtgctgggattacaggtgtgaaccacgtgcccagcctaaacggcaacttttaaaggtccagatgatgaagtcttgagaagcgttccttttgaataaaaactaaggaaaacttaggcaaaagacactctgggaaaattcctgtggcaactgcaaatcatgaggctatggaaatgggtaacaggtcttacctgaacccaagtgttcacttgttcagaccaggggaagtcacttcattataaggaaatcttgggagctgtgtggggtttctggaagaagtcatgacttcagggttttaattctatttctgccaatgacttaaggtcagtcactgttttctgggccagttaagctttctagggccccttttctgctaataaggatatagtttagtgaataaggagcgtttacaatactgcttctgtaattccagctctcctgccacagctcctcaccccctgaaaatgttcgcctgctccaagtttgtctccactccctccttggtgagtacctgcttttctgggagagttttaaaggagagacatcttgtctctctctttccatcagaccttgttcttcacagcaaggctgggggagaggaggtccaggcgggcagatcacttgaggccaggagttcaaaaccagcctggccaacatggcgaaaccccatctctactaaaaaaacgaaaaccagttgggcatggtggcgggcgcctgtaatcccagctactcaggaggctgaggcaacagaatagcttgaacccaggaggtagaggttgcagtgagccaagatcgcaccactgcactccagcctgggcgtcagagcaagactctgtctcaaaaaataaataaataagtaaataagtaagaaagattcttggggagggaaggccctctgctatgattgcgtaacaggatagagtgaatgcttgctagatactctcctgccccatatcccttggcggccagttaattttttttttttttttttttttgagacagagtttcgctcttgttgcccaggctgcaatggcgcgatccaccacaacctccgcctcccgggttcaagcagttcacctgcctcagactcccaagtagctggggttacaggcacctgccaccatacccagctaatttttgtatttttagtagagatggggttacaccatgttggccgggctggtctcaaactcctgacctcgtgatccgagtagagacagggtttctccatgttggtcaggctggtcttgaactcctgacctcaggtgatccgccgtcctcggcctcctaaattgctgatattataggcatgagccaccgtgcctggctgtgcccagttaattcttacccagccatcttaggagaagaatagagatgagaatctagaccaagatcaagttattcctactcctgaaactatatgtcgtgtaagctggccatccagagtggtaaatataagtagattacataacttggactgagtatgcactgtctgtaggatcttgtcctgagttagccatagctaaggagttcattctgggacttaaatttggataggaagctaaaatttacataaatacacattggaaaagtatttgactcagaaacaacagtatggaagaaatttttgaaatagtagctagaggaggcggttggttcattcacaaataaaaaggagtaccatttattgagcatttaccatgtgccttagcactcactgagtttactaattggtatacataatctcatttactcttcaaatcaaccccaagagatgatattttgatttcataaatgagaatacaggcttagaaaggtttaagtgacttatcctgagaatacactgctgataatagaattaagatttgaatctcactttatctgatgcctaaagccctggctatgaatcaccatgtgtctgttttggtgtcactggcttggggttagtcagaaaaggctaccagaaggaggtgagttttgagcatgaatctttgttcctattttccaaaaggatgtgttcagggaaagttactggcttctttcttgtgggctgaccattacccatacagaaggcccccaactttagattaagattttttttttttaactttatgatgatgcaaaaatgatatgcattcattagaaaccatacttcgggctgggcgtggtggctcatgcctgtaatcccagcaccttgggaagccgaggtgggtggatcacctgaggtcaggaattcaaaaccagcctggccaatatggtgaaaacctgtctctactaaaaatacaaaaattagctgggcgtggttgccggcgcctgtagtcccagctacttgggaggctgaggcaggagaattgcttgaacctgggaggtggaggttgtagtgagccgagccgagatcacgacactgcattccagcctggcgatacagcaagactccgtctcaaaaaaaaaaaagaaagaaagaaagaaaccatacttcgaattaggaatctttatcttttcccaagctagcaatgtgtggtacaatactctgttgcaatactcagcaggaacccacagctcccagtcacctgcccaatcacaggggtaaacaaccagtactctacggtgtactgtgttgctaggtgatttcacctaactgtaagctaatgtaagctagtgtaagctttttgagcacattgaaggccagactatggtgtttggtaggttagcagtattaaatggtttttcaaagtatgatggatttattggcacataaccctatggtaagttgaggagcatctgtatatatttcccttgttgagtgaggcaaatgcttctgaggcttagatttcttcttgttctcaagagctataaaaggatatagcaaggttggatgctcccttatggcccaaaggaagtagactttctttccttaaagcaaagtctgagaagcaagagaaatggtgtggttctttaatttagactttgctaaaaggaagaatgatccaaaactctaacgtacatgtgaagatggaaaggccatgagaggaaagaaaatcttgtctgatgatgtaacaacgtggcatagttctgaaactcctctccagtcttccttgaccttcctgcccctgtatgtcattcctgctaggtcaagagcacctcacagctgctgagccgtccgctatctgcagtggtgctgaaacgaccggagatactgacagatgaggtaccttacagtggagttgggactgtggttttgggggtgatgggtggggagggttacctgccagaaccaggaggtagaatgctgaggacagtcatcacaggctaaaattcatgaatggccaaggccatgggctttaggtggagatggaggacacttaatacgctgtatgctatagtgctccagcttttgccactggcagcacatgcccctgtgcactgctgctaactggtattacttggcctagtctactgacttcagttggaagcatttagtcctaggaagatgatctccttggggcagcaagaatagactagggcctcagtcttacacttcttgaccacacctgaatcttaaaggcatttgaagtctacatcctacgttaaaaggttctacttgccagcattttagggcgttaaacaattttctgtttgggggagaaacaatgggatttggcagcttaaagggttttaaatggtacaaaagttaccaaagcaaaaaactttaccttctacctgcctctttttcacagagcctcagcagcttggcagtctcatgtccccttacctcacttgtctctagccgcagcttccaaaccagcgccatttcaagggacatcgacacagcagccaagttcattggagctggggctgccacagttggggtggctggttctggggctgggattggaactgtgtttgggagcctcatcattggttatgccaggtaagataagttggaccctccactggttatctgatatgctttccaaaggtcagaaaatatttgggggtctagaactatactatcccacactgtagccactagctacatgttgtttgtttgtttgtttgttttgagacagtaacgctctgtttcccaggctggagtgcagtggcgcaatctcagctcactgtcacctctacctctgggttcaagcgattcttgtgcctcagcctcccaagtagctgggattacaggcacacacaatgacgcccacctaatttttgtggttttagtagagatggggtttcgccatgttggccaggctggtctcaaactcctgacctcaagtgatccacctgcctcggcctccctaactgccaggattacaggcatgagcccccgcgcttgacctgaattttagttttaattaattaaaaatacatagtttcagttttcagttcttcagtcacgctaaccatatttcgagtgctcagtagccagatgtggctagaggctaccatattcaacaatgcaaatatagaatgtttggctgggcacagtggctcactaatcccagcactttgggaggccagggcaggtgaatcgcttgaggtcaggagttcgagaccagcctggccaacatggcgaaaccccatctctactaaaaatacaaaaattacctgggtaaggggggcgtgcacctataatcccagctattcaggaggctgaggcagaagaatcgcttgaacccgggaggtggaggttgcagtgagctgtgagccgagatcatgccactgtactccagcctaggtgacagagtgagactttggggaaaaaaaaaaaagaaaaaaacaaatataggctgggcgaggtggttcatgcctgtaatcctgcactttgggaggtcaaggcgagtggatcacctgacgtcaggagtttgagaccagcctggtcaatatggtgaaaccctgtctctgctaaaaatacaaaaattagccaggcgttgtggtgggcgcctgtagtcccagctactcgggaggatgagacaggagaattgcttgaacccgggagacagaggttacagtgagccaagatggtgccactgcattccagtctgggcaacagagtgagaccatcaaaaaaaaaaaaatttatatatatatatatatatatatatatatatatatatatatatgtgtgtgtatgtatgtatgtattagaatgtttatatcattgtgtcattgaagaaagtttcatgaacagctttggtctagagcatgtgttggcaaactaaggcctaagggccaaatctgggccatagccaggttttgtatgattgagctaaaaataattttatggccgggtgtggtgccttacgcctataatcccagcactttgggaggccgaggcgggcggatcacgaggtcaggagttcgagactagcctggccaacatggtgaaaccccttctctactaaaaatacagaaattagccaggcatggtggcagatgcctgtaatcccagctactcaggaggctgaggcaggaaaatcacttgaaccctgaaggcggaggttgcagtgagtagagatcacgccactgcactccagcctgggcaaaagagtgaaactccatctcaaaaaaaaaaatagtttcgcatttttaaaaggcttcatttttgttttaaagcaaaagagactatatgcggcccacaaaacctaaaattatttacaatgtggccctttacagaaaaagtttaccttccctgttctagagactcagtgaacatagtggctttactgctattttttcccatctctgggaatttccctctgtcactcctgggaaaactggcactgcagccagcccctggtttctgacacctgggactgtttagtactcccagctctggataactcagttaaaaccaaattaatcctctagagaccaggaagttctcttaatgtcttttgagaaatagagttctttttaagaatttgtattaaacaagaagtctgactgctgctttattcactattctgttaaatgttggtgtcgatttaccttacccatcaagacttctggaggtatcagagtaagggaaatacagattatatatgggccttcaacactgggagtcctttatccatactacttcaactcataaaccccatagaccatttgtaacttcttttttttttttttttttgagactgagtctcgctgtctcccagactgaagtgcagtggcacaatctcagcccactgcaatctctgcctcccgggttcaaatgattctcctgcctcagcctcccaagtagctgggattacaggtgcccaccaccacgcccggctaattttttatttttttattttattttattttatttttttgagacagagtctgactctgtcacccaggctggagtgcaactgtgtaatctcagctcactgcaacctctgcctctcgggttcaagcaattctcttgcctcagcctcccaagtagctgggattacaggtacgcaccgctacccccagctaatttttgtattttttttctttcttttttttttttgagacagagtcttgctctgtcgcccaggctggagtacagtggctgcggtcttggatcactgcatcctctgcctcccgggttcacgccgttctcctgcctcagcctcctgagtagctgggactacaagcgcctgccaacacgcctggctaattttttgtatttttagtagagacagggtgtcaccgtattagctaggatggtctcgatttcctgacctcgtgatctgcccacttcggcctcccaaagtgctgggattacagacatgagccactgcgcccagcaatttttgtatttttggtagagacagggtttcaccaggttggccaggctggtctcgaactcctgacctcaagcaatctactcatctcggcctcccaaagtgctgggattacaggcgtgagccaccgcgcctggcctaatttttgtatttttagtagagacggggtttcaccatgttggccaggctggtctccaacttctggcttcaagtgatccgcctgctttggcctcccaaagtgctgggattacaggtgtgagccaccgcacccagcccatttgtagtttcttaaagccccagatcttctgactatttgaaatgagagaacataatctgtccctcttactcttgtcttctagaagagcggtgttccataaatccttaggattctgaggttatgccccagagactgtcttagagaataaaggggagaccaagccgttaaaatttccccactacttttgtaccattgcagtttggcttttagatgtttactatattggagttctgcttaaagtttgaaaacactgctctagatagacccttccatcctatttgggccctggatattaagtgtctgggccaagaggtcttaatttgtggtaatgagatgggtgaaccattagtgaaggtcatgattatacctgggccatgttacaggattttagattgcctgctcccccttcattcagttcctgtagagcctttggggaatcagggcaagaatttgggcatgatggtgttaccctaaaagcttctttattatgtgagataatcttgaagagggggattctccctgagcccatcttagatatttatccttttctttgtgtgaactagaaattcagtcttttctcttctccttctaccaggaacccttctctgaagcaacagctcttctcctacgccattctgggctttgccctctcggaggccatggggctcttttgtctgatggtagcctttctcatcctctttgccatgtgaaggagccgtctccacctcccatagttctcccgcgtctggttggccccgtgtgttccttttcctatacctccccaggcagcctggggaacgtggttggctcagggtttgacagagaaaagacaaataaatactgtattaataagatgtttcttgagtctcctgtgtatatttcttttccacagttggctgagtgccttcgtgagagtacaaggcccgaagggtagtgatggtgctaaactcaacatggatttggctgagctc

SEQ ID NO: 32182 - DNA, 2797 bp, Homo Sapiens
ttccccagcattcgagaaactcctctctactttagcacggtctccagactcagccgagagacagcaaactgcagcgcggtgagagagcgagagagagggagagagagactctccagcctgggaactataactcctctgcgagaggcggagaactccttccccaaatcttttggggacttttctctctttacccacctccgcccctgcgaggagttgaggggccagttcggccgccgcgcgcgtcttcccgttcggcgtgtgcttggcccggggaaccgggagggcccggcgatcgcgcggcggccgccgcgagggtgtgagcgcgcgtgggcgcccgccgagccgaggccatggtgcagcaaaccaacaatgccgagaacacggaagcgctgctggccggcgagagctcggactcgggcgccggcctcgagctgggaatcgcctcctcccccacgcccggctccaccgcctccacgggcggcaaggccgacgacccgagctggtgcaagaccccgagtgggcacatcaagcgacccatgaacgccttcatggtgtggtcgcagatcgagcggcgcaagatcatggagcagtcgcccgacatgcacaacgccgagatctccaagcggctgggcaaacgctggaagctgctcaaagacagcgacaagatccctttcattcgagaggcggagcggctgcgcctcaagcacatggctgactaccccgactacaagtaccggcccaggaagaaggtgaagtccggcaacgccaactccagctcctcggccgccgcctcctccaagccgggggagaagggagacaaggtcggtggcagtggcgggggcggccatgggggcggcggcggcggcgggagcagcaacgcggggggaggaggcggcggtgcgagtggcggcggcgccaactccaaaccggcgcagaaaaagagctgcggctccaaagtggcgggcggcgcgggcggtggggttagcaaaccgcacgccaagctcatcctggcaggcggcggcggcggcgggaaagcagcggctgccgccgccgcctccttcgccgccgaacaggcgggggccgccgccctgctgcccctgggcgccgccgccgaccaccactcgctgtacaaggcgcggactcccagcgcctcggcctccgcctcctcggcagcctcggcctccgcagcgctcgcggccccgggcaagcacctggcggagaagaaggtgaagcgcgtctacctgttcggcggcctgggcacgtcgtcgtcgcccgtgggcggcgtgggcgcgggagccgaccccagcgaccccctgggcctgtacgaggaggagggcgcgggctgctcgcccgacgcgcccagcctgagcggccgcagcagcgccgcctcgtcccccgccgccggccgctcgcccgccgaccaccgcggctacgccagcctgcgcgccgcctcgcccgccccgtccagcgcgccctcgcacgcgtcctcctcggcctcgtcccactcctcctcttcctcctcctcgggctcctcgtcctccgacgacgagttcgaagacgacctgctcgacctgaaccccagctcaaactttgagagcatgtccctgggcagcttcagttcgtcgtcggcgctcgaccgggacctggattttaacttcgagcccggctccggctcgcacttcgagttcccggactactgcacgcccgaggtgagcgagatgatctcgggagactggctcgagtccagcatctccaacctggttttcacctactgaagggcgcgcaggcagggagaagggccggggggggtaggagaggagaaaaaaaaagtgaaaaaaagaaacgaaaaggacagacgaagagtttaaagagaaaagggaaaaaagaaagaaaaagtaagcagggctcgttcgcccgcgttctcgtcgtcggatcaaggagcgcggcggcgttttggacccgcgctcccatcccccaccttcccgggccggggacccactctgcccagccggagggacgcggaggaggaagagggtagacaggggcgacctgtgattgttgttattgatgttgttgttgatggcaaaaaaaaaaagcgacttcgagtttgctcccctttgcttgaagagaccccctcccccttccaacgagcttccggacttgtctgcacccccagcaagaaggcgagttagttttctagagacttgaaggagtctcccccttcctgcatcaccaccttggttttgttttattttgcttcttggtcaagaaaggaggggagaacccagcgcacccctccccccctttttttaaacgcgtgatgaagacagaaggctccggggtgacgaatttggccgatggcagatgttttgggggaacgccgggactgagagactccacgcaggcgaattcccgtttggggcctttttttcctccctcttttccccttgccccctctgcagccggaggaggagatgttgaggggaggaggccagccagtgtgaccggcgctaggaaatgacccgagaaccccgttggaagcgcagcagcgggagctaggggcgggggcggaggaggacacgaactggaagggggttcacggtcaaactgaaatggatttgcacgttggggagctggcggcggcggctgctgggcctccgccttcttttctacgtgaaatcagtgaggtgagacttcccagaccccggaggcgtggaggagaggagactgtttgatgtggtacaggggcagtcagtggagggcgagtggtttcggaaaaaaaaaaagaaaaaaaggg

SEQ ID NO: 32183 - DNA, 1085 bp, Homo Sapiens
ggtttctattgacttgggttaatcgtgtgaccgcggtggctggcacgaaattgaccaaccctggggttagtatagcttagttaaactttcgtttattgctaaaggttaatcactgctgtttcccgtgggggtgtggctaggctaagcgttttgagctgcattgctgcgtgcttgatgcttgtcccttttgatcgtggtgatttagagggtgaactcactggaatggggatgcttgcatgtgtaatcttactaagagctaatagaaaggctaggaccaaaccagaaacctccaattctcatgtggaagcccatgccctcaccctccaacatgaaagcctctgcagcacttctgtgtctgctgctcacagcagctgctttcagcccccaggggcttgctcagccagttgggattaatacttcaactacctgctgctacagatttatcaataagaaaatccctaagcagaggctggagagctacagaaggaccaccagtagccactgtccccgggaagctgtaatcttcaagaccaaactggacaaggagatctgtgctgaccccacacagaagtgggtccaggactttatgaagcacctggacaagaaaacccaaactccaaagctttgaacattcatgactgaactgaaaacaagccatgacttgagaaacaaataatttgtataccctgtcctttctcagagtggttctgagattattttaatctaattctaaggaatatgagctttatgtaataatgtgaatcatggtttttcttagtagattttaaaagttattaatattttaatttaatcttccatggattttggtgggttttgaacataaagccttggatgtatatgtcatctcagtgctgtaaaaactgtgggatgctcctcccttctctacctcatgggggtattgtataagtccttgcaagaatcagtgcaaagatttgctttaattgttaagatatgatgtccctatggaagcatattgttattatataattacatatttgcatatgtatgactcccaaattttcacataaaatagatttttgtataacaaaaaaaaaaaaaaaaaa

SEQ ID NO: 32184 - DNA, 4543 bp, Homo Sapiens
tgatgaggctgtgtgcttctgagctgggcatccgaaggcatccttggggaagctgagggcacgaggaggggctgccagactccgggagctgctgcctggctgggattcctacacaatgcgttgcctggctccacgccctgctgggtcctacctgtcagagccccaaggcagctcacagtgtgccaccatggagttggggcccctagaaggtggctacctggagcttcttaacagcgatgctgaccccctgtgcctctaccacttctatgaccagatggacctggctggagaagaagagattgagctctactcagaacccgacacagacaccatcaactgcgaccagttcagcaggctgttgtgtgacatggaaggtgatgaagagaccagggaggcttatgccaatatcgcggaactggaccagtatgtcttccaggactcccagctggagggcctgagcaaggacattttcaagcacataggaccagatgaagtgatcggtgagagtatggagatgccagcagaagttgggcagaaaagtcagaaaagacccttcccagaggagcttccggcagacctgaagcactggaagccagctgagccccccactgtggtgactggcagtctcctagtgggaccagtgagcgactgctccaccctgccctgcctgccactgcctgcgctgttcaaccaggagccagcctccggccagatgcgcctggagaaaaccgaccagattcccatgcctttctccagttcctcgttgagctgcctgaatctccctgagggacccatccagtttgtccccaccatctccactctgccccatgggctctggcaaatctctgaggctggaacaggggtctccagtatattcatctaccatggtgaggtgccccaggccagccaagtaccccctcccagtggattcactgtccacggcctcccaacatctccagaccggccaggctccaccagccccttcgctccatcagccactgacctgcccagcatgcctgaacctgccctgacctcccgagcaaacatgacagagcacaagacgtcccccacccaatgcccggcagctggagaggtctccaacaagcttccaaaatggcctgagccggtggagcagttctaccgctcactgcaggacacgtatggtgccgagcccgcaggcccggatggcatcctagtggaggtggatctggtgcaggccaggctggagaggagcagcagcaagagcctggagcgggaactggccaccccggactgggcagaacggcagctggcccaaggaggcctggctgaggtgctgttggctgccaaggagcaccggcggccgcgtgagacacgagtgattgctgtgctgggcaaagctggtcagggcaagagctattgggctggggcagtgagccgggcctgggcttgtggccggcttccccagtacgactttgtcttctctgtcccctgccattgcttgaaccgtccgggggatgcctatggcctgcaggatctgctcttctccctgggcccacagccactcgtggcggccgatgaggttttcagccacatcttgaagagacctgaccgcgttctgctcatcctagacgccttcgaggagctggaagcgcaagatggcttcctgcacagcacgtgcggaccggcaccggcggagccctgctccctccgggggctgctggccggccttttccagaagaagctgctccgaggttgcaccctcctcctcacagcccggccccggggccgcctggtccagagcctgagcaaggccgacgccctatttgagctgtccggcttctccatggagcaggcccaggcatacgtgatgcgctactttgagagctcagggatgacagagcaccaagacagagccctgacgctcctccgggaccggccacttcttctcagtcacagccacagccctactttgtgccgggcagtgtgccagctctcagaggccctgctggagcttggggaggacgccaagctgccctccacgctcacgggactctatgtcggcctgctgggccgtgcagccctcgacagcccccccggggccctggcagagctggccaagctggcctgggagctgggccgcagacatcaaagtaccctacaggaggaccagttcccatccgcagacgtgaggacctgggcgatggccaaaggcttagtccaacacccaccgcgggccgcagagtccgagctggccttccccagcttcctcctgcaatgcttcctgggggccctgtggctggctctgagtggcgaaatcaaggacaaggagctcccgcagtacctagcattgaccccaaggaagaagaggccctatgacaactggctggagggcgtgccacgctttctggctgggctgatcttccagcctcccgcccgctgcctgggagccctactcgggccatcggcggctgcctcggtggacaggaagcagaaggtgcttgcgaggtacctgaagcggctgcagccggggacactgcgggcgcggcagctgcttgagctgctgcactgcgcccacgaggccgaggaggctggaatttggcagcacgtggtacaggagctccccggccgcctctcttttctgggcacccgcctcacgcctcctgatgcacatgtactgggcaaggccttggaggcggcgggccaagacttctccctggacctccgcagcactggcatttgcccctctggattggggagcctcgtgggactcagctgtgtcacccgtttcagggctgccttgagcgacacggtggcgctgtgggagtccctgcggcagcatggggagaccaagctacttcaggcagcagaggagaagttcaccatcgagcctttcaaagccaagtccctgaaggatgtggaagacctgggaaagcttgtgcagactcagaggacgagaagttcctcggaagacacagctggggagctccctgctgttcgggacctaaagaaactggagtttgcgctgggccctgtctcaggcccccaggctttccccaaactggtgcggatcctcacggccttttcctccctgcagcatctggacctggatgcgctgagtgagaacaagatcggggacgagggtgtctcgcagctctcagccaccttcccccagctgaagtccttggaaaccctcaatctgtcccagaacaacatcactgacctgggtgcctacaaactcgccgaggccctgccttcgctcgctgcatccctgctcaggctaagcttgtacaataactgcatctgcgacgtgggagccgagagcttggctcgtgtgcttccggacatggtgtccctccgggtgatggacgtccagtacaacaagttcacggctgccggggcccagcagctcgctgccagccttcggaggtgtcctcatgtggagacgctggcgatgtggacgcccaccatcccattcagtgtccaggaacacctgcaacaacaggattcacggatcagcctgagatgatcccagctgtgctctggacaggcatgttctctgaggacactaaccacgctggaccttgaactgggtacttgtggacacagctcttctccaggctgtatcccatgaggcctcagcatcctggcacccggcccctgctggttcagggttggcccctgcccggctgcggaatgaaccacatcttgctctgctgacagacacaggcccggctccaggctcctttagcgcccagttgggtggatgcctggtggcagctgcggtccacccaggagccccgaggccttctctgaaggacattgcggacagccacggccaggccagagggagtgacagaggcagccccattctgcctgcccaggcccctgccaccctggggagaaagtacttctttttttttatttttagacagagtctcactgttgcccaggctggcgtgcagtggtgcgatctgggttcactgcaacctccgcctcttgggttcaagcgattcttctgcttcagcctcccgagtagctgggactacaggcacccaccatcatgtctggctaatttttcatttttagtagagacagggttttgccatgttggccaggctggtctcaaactcttgacctcaggtgatccacccacctcagcctcccaaagtgctggggattacaagcgtgagccactgcaccgggccacagagaaagtacttctccaccctgctctccgaccagacaccttgacagggcacaccgggcactcagaagacactgatgggcaacccccagcctgctaattccccagattgcaacaggctgggcttcagtggcaggctgcttttgtctatgggactcaatgcactgacattgttggccaaagccaaagctaggcctggccagatgcaccaggcccttagcagggaaacagctaatgggacactaatggggcggtgagaggggaacagactggaagcacagcttcatttcctgtgtcttttttcactacattataaatgtctctttaatgtcacaaaaaaaaaaaaaaaaaaaaaaa

SEQ ID NO: 32185 - DNA, 2306 bp, Homo Sapiens
ggtttcatatgaactctcccgccacccgggaacagctggctgccaccgtttgtgttttccgagtttgtattcttgcaggtgaccaagatggagttttctggaagaaagcggaggaagctgaggttggcaggtgaccagaggaatgcttcctaccctcattgccttcagttttacttgcagccaccttctgaaaacatatctttaacagaatttgaaaacttggctattgatagagttaaattgttaaaatcagttgaaaatcttggagtgagctatgtgaaaggaactgaacaataccagagtaagttggagagtgagcttcggaagctcaagttttcctacagagagaagctagaagatgaatatgaaccacgaagaagagatcatatttctcattttattttgcggcttgcttattgccagtctgaagaacttagacgctggttcattcaacaagaaatggatctccttcgatttagatttagtattttacccaaggataaaattcaggatttcttaaaggatagccaattgcagtttgaggctataagtgatgaagagaagactcttcgagaacaggagattgttgcctcatcaccaagtttaagtggacttaagttggggttcgagtccatttataagatcccttttgctgatgctctggatttgtttcgaggaaggaaagtctatttggaagatggctttgcttacgtaccacttaaggacattgtggcaatcatcctgaatgaatttagagccaaactgtccaaggctttggcattaacagccaggtccttgcctgctgtgcagtctgatgaaagacttcagcctctgctcaatcacctcagtcattcctacactggccaagattacagtacccagggaaatgttgggaagatttctttagatcagattgatttgctttctaccaaatccttcccaccttgcatgcgtcagttacataaagccttgcgggaaaatcaccatcttcgtcatggaggccgaatgcagtatggcctatttctgaagggcattggtttaactttggaacaggcattgcagttctggaagcaagaatttatcaaaggaaagatggatccagacaagtttgataaaggttactcttacaacatccgtcacagctttggaaaggaaggcaagaggacagactatacacctttcagttgcctgaagattattctgtccaatccaccaagccaaggggattatcatgggtgcccattccgtcacagtgatccagagctgctgaagcaaaagttgcagtcatacaagatctctcctggagggataagccagattttggatttagtaaaggggacacattaccaggtagcctgtcaaaaatactttgagatgatacacaatgtggatgattgtggcttttctttgaatcatcctaatcagttcttttgtgagagccaacgtattctaaatggtggtaaagacataaagaaggaacctatccaaccagaaactcctcaacccaaaccaagtgtccagaaaaccaaggatgcatcatctgctctggcctctttaaattcctctctggaaatggatatggaaggactagaagattactttagtgaagattcttaggcagttttataaccctttttcctcaatagcctgtttcctgtttttaagattttgcctttgttgttgaaaaagggtttcactgtcaccaaggcttagtgcagtgacacaattacagctgattgcagccttgaccttcccagctcaagtgatcctcctacctcagcctcccaagtagttaggacacacaggtgtgcacctcatatccagataatttttttcaatttttttttgtagaggtggggggtctccctatgttgcccaggcagatctcagactcctgggctcaagcgatcctcacacctcagcgtcccagagtgctgggattacagttgtgagccactgtgcctggcctttttttttttttaaccttttcgtttaacttctctcttcactgcatcccaatccatctacaggcatgcacacttattaggaaaggaggtttgaggtaacaacagagactttcactatattttgctttgacagaaggaaagaggaggagtttctattaaaatctgtcacttgagtgatgtcatttaagtcctattttaggagataaaaacagctttggggactggttaaagtcccccagaaactacaataaagaacaacttttgttttaactcttaatcactttgtaattttgactcaatccttttctggaccatttttgttaataaatatcaaagtgt

SEQ ID NO: 32186 - DNA, 3096 bp, Homo Sapiens
catcttgcatcagcctgtggatgtatgcctaccaccgggctccttcaccagcaaagtggaaaaagaagcgtttcacaacaaattcttctttttgggttggggaaacgcagtggattatagctctgttttcttctttccaaaactgtgcacccctggatgaaacctccatcaagggagacctacaagttgcctggggttcagtgctctagaaagttccaaggtttgtggcttgaattattctaaagaagctgaaataattgaagagaagcagaggccagctgtttttgaggatcctgctccacagagaatgctctgcacccgttgatactccagttccaacaccatcttctgagatgatcctgattcccagaatgctcttggtgctgttcctgctgctgcctatcttgagttctgcaaaagctcaggttaatccagctatatgccgctatcctctgggcatgtcaggaggccagattccagatgaggacatcacagcttccagtcagtggtcagagtccacagctgccaaatatggaaggctggactcagaagaaggggatggagcctggtgccctgagattccagtggaacctgatgacctgaaggagtttctgcagattgacttgcacaccctccattttatcactctggtggggacccaggggcgccatgcaggaggtcatggcatcgagtttgcccccatgtacaagatcaattacagtcgggatggcactcgctggatctcttggcggaaccgtcatgggaaacaggtgctggatggaaatagtaacccctatgacattttcctaaaggacttggagccgcccattgtagccagatttgtccggttcattccagtcaccgaccactccatgaatgtgtgtatgagagtggagctttacggctgtgtctggctagatggcttggtgtcttacaatgctccagctgggcagcagtttgtactccctggaggttccatcatttatctgaatgattctgtctatgatggagctgttggatacagcatgacagaagggctaggccaattgaccgatggtgtgtctggcctggacgatttcacccagacccatgaataccacgtgtggcccggctatgactatgtgggctggcggaacgagagtgccaccaatggctacattgagatcatgtttgaatttgaccgcatcaggaatttcactaccatgaaggtccactgcaacaacatgtttgctaaaggtgtgaagatctttaaggaggtacagtgctacttccgctctgaagccagtgagtgggaacctaatgccatttccttcccccttgtcctggatgacgtcaaccccagtgctcggtttgtcacggtgcctctccaccaccgaatggccagtgccatcaagtgtcaataccattttgcagatacctggatgatgttcagtgagatcaccttccaatcagatgctgcaatgtacaacaactctgaagccctgcccacctctcctatggcacccacaacctatgatccaatgcttaaagttgatgacagcaacactcggatcctgattggctgcttggtggccatcatctttatcctcctggccatcattgtcatcatcctctggaggcagttctggcagaaaatgctggagaaggcttctcggaggatgctggatgatgaaatgacagtcagcctttccctgccaagtgattctagcatgttcaacaataaccgctcctcatcacctagtgaacaagggtccaactcgacttacgatcgcatctttccccttcgccctgactaccaggagccatccaggctgatacgaaaactcccagaatttgctccaggggaggaggagtcaggctgcagcggtgttgtgaagccagtccagcccagtggccctgagggggtgccccactatgcagaggctgacatagtgaacctccaaggagtgacaggaggcaacacatactcagtgcctgccgtcaccatggacctgctctcaggaaaagatgtggctgtggaggagttccccaggaaactcctaactttcaaagagaagctgggagaaggacagtttggggaggttcatctctgtgaagtggagggaatggaaaaattcaaagacaaagattttgccctagatgtcagtgccaaccagcctgtcctggtggctgtgaaaatgctccgagcagatgccaacaagaatgccaggaatgattttcttaaggagataaagatcatgtctcggctcaaggacccaaacatcatccatctattatctgtgtgtatcactgatgaccctctctgtatgatcactgaatacatggagaatggagatctcaatcagtttctttcccgccacgagccccctaattcttcctccagcgatgtacgcactgtcagttacaccaatctgaagtttatggctacccaaattgcctctggcatgaagtacctttcctctcttaattttgttcaccgagatctggccacacgaaactgtttagtgggtaagaactacacaatcaagatagctgactttggaatgagcaggaacctgtacagtggtgactattaccggatccagggccgggcagtgctccctatccgctggatgtcttgggagagtatcttgctgggcaagttcactacagcaagtgatgtgtgggcctttggggttactttgtgggagactttcaccttttgtcaagaacagccctattcccagctgtcagatgaacaggttattgagaatactggagagttcttccgagaccaagggaggcagacttacctccctcaaccagccatttgtcctgactctgtgtataagctgatgctcagctgctggagaagagatacgaagaaccgtccctcattccaagaaatccaccttctgctccttcaacaaggcgacgagtgatgctgtcagtgcctggccatgttcctacggctcaggtcctccctacaagacctaccactcacccatgcctatgccactccatctggacatttaatgaaactgagagacagaggcttgtttgctttgccctcttttcctggtcacccccactccctacccctgactcatatatact

SEQ ID NO: 32187 - DNA, 3531 bp, Homo Sapiens
caggagttggagacaactctggcccaacatagagaaaccccgtctctaccaaaaatacaaaaattagccggacatggtggcaggtgcctgtaatcccagctacttgagaggctgtggtaggagaattgcttgaccccaggagtcggaggttgcagtgagccctgattgcaccattgcactccagcctgggtaaacagcaagaccctgtctcaaaaaattaaaggttggaaaaaacttttcctgtcatctttgcctcccaaaatctggctttctcccttgggcagggaaacctccccaacatttctctatcatccctgagatgtggggcctgcactctgacttctgtctgccttcctctttgtttaacagggtgaagtgatgaacctcctgatgttcctgtcgacgtgggatgggaaggtcccacagccggccatcctaaagccccggcccctgtggacaggcaagcaaatcttctccctcatcatacctggtcacatcaattgtatccgtacccacagcacccatcccgatgatgaagacagtggcccttacaagcacatctctcctggggacaccaaggtagggcttggcttctggatatgtgaggacagaatttggacatgggagccaggaccagagcaggggccttgagtgggtgctttgtccttaggtggtggtggagaatggggagctgatcatgggcatcctgtgtaagaagtctctgggcacgtcagctggctccctggtccacatctcctacctagagatgggtcatgacatcactcgcctcttctactccaacattcagactgtcattaacaactggctcctcatcgagggtgagcatggaggcgtggtaccaagacgtctctgtgaattctctaacttcttactgttcttccatccctttctttcctccttggatttggtgccccctgcttctactctcttggctataattccattccatgtttcttagaggtccaaaggggtttgctgatgtttttccctgtctctaggtcatactattggcattggggactccattgctgattctaagacttaccaggacattcagaacactattaagaaggccaagcaggacgtaatagaggtaagaggggaggccaccagagacggaataaggggtttccagggacttcgaagttagcatcatcaagagcaaggggagtttaaggttagagggtaggggcagagagtagggattgatgtctcaccgagaactctgcctccaggtcatcgagaaggcacacaacaatgagctggagcccaccccagggaacactctgcggcagacgtttgagaatcaggtgaaccgcattcttaacgatgcccgagacaagactggctcctctgctcagaaatccctgtctgaatacaacaacttcaagtctatggtcgtgtccggagctaaaggttccaagattaacatctcccaggtgagaagccttgtttttccatatatggggccgctgtgaagtttgggaggaggaaggaaggtgtttgtatgtattagggtcaggagaatcacgggagttgggggaaattttgggaactgttattcttaaggcagagggaattcaccacctttactgtttcccaggtcattgctgtcgttggacagcagaacgtcgagggcaagcggattccatttggcttcaagcaccggactctgcctcacttcatcaaggatgactacgggcctgagagccgtggctttgtggagaactcctacctagccggcctcacacccactgagttctttttccacgccatggggggtcgtgaggggctcattgacacggctgtcaagactgctgagactggtgaggctttcctcaggggtcttccttgggctgttagcagggactctgcaggctgagaaacccctaacaggtggggagcggaaatgctcaggctcctattcccagggtataattctggcccttgtggaaagaatagagtctcaagagtaggcaaacagccttgtttggattgctgtgcagcattgcacagtgcagggacagagcttccggggctctgccggcctgtcccatgggagtggttcctgctgggctttttgtccgtctagtggtagacactgagtttgcattcaaaggcctcagacacagagagtactagctgactcttctgatagtcaggtaggttaaggccccagcctgggtctttgggctttatcatccccttacttccctccaggatacatccagcggcggctgatcaagtccatggagtcagtgatggtgaagtacgacgcgactgtgcggaactccatcaaccaggtggtgcagctgcgctacggcgaagacggcctggcaggcgagagcgttgagttccagaacctggctacgcttaagccttccaacaaggcttttgagaagaagttaaggagccgggcaagacggggtggttcctcgcccctggggcctcagggcctgagtagtaggattccccatacctatttccagagagatagcctgggtatgtgtcttgcacttagagcttgcctttcagcatccttcccccacctatctgaaacagctgtgtgacatgggggaggtggtggatggaggtggatttaagattggtccccacatcgtccctgctgatattataaagcagatgcagaggggtgggcctgtacttcaggtcccagtggcagtccttgggcctgaatttttctctgtccaggattcttgcctccaaaccactaaacctggtcggctgtaaacctttgggaaccttacagtgcgttttgtgggaccaaggtcccagagcctacctgtccactagctacccttgcacttccaggttccgctttgattataccaatgagagggccctgcggcgcactctgcaggaggacctggtgaaggacgtgctgagcaacgcacacatccagaacgagttggagcgggaatttgagcggatgcgggaggatcgggaggtgctcagggtcatcttcccaactggagacagcaaggtgcgtgtgggtcgaagtgctgatgctagacatgtgcctccctgaatggctgtccccagacacagccctcgctccatttcccccactctcaggtcgtcctcccctgtaacctgctgcggatgatctggaatgctcagaaaatcttccacatcaacccacgccttccctccgacctgcaccccatcaaagtggtggagggtaagtacctgcttaggggtctccaagccaggctaggggataggagactgctgggccctggtctaatgatctcctcacctttaattggtccccaggagtcaaggaattgagcaagaagctggtgattgtgaatggggatgacccactaagtcgacaggcccaggaaaatgccacgctgctcttcaacatccacctgcggtccacgttgtgttcccgccgcatggcagaggagtttcggctcagtggggaggccttcgacttgctgcttggggagattgagtccaagttcaaccaagccattgtgagtg

SEQ ID NO: 32188 - DNA, 7969 bp, Homo Sapiens
gcaacctttccaagggagtggttgtgtgatcgccatcttagggagtgagtgtggccgggcttctcctgtggcgggtgtggggagcggcagccagagctcctgtggggccgctgctttggcggtgggccagccgggagcagcctctttcgaaggccgccgtgacctcttcaagggcgtggagacgggaaggaaaaggccggttggggttccagggcgccggtaacgttaacggcgccttgcctgtcctctaaccgtcgctccctcctcccctagaaagatgttctcgtccgtggcgcacctggcgcgggcgaaccccttcaacacgccacatctgcagctggtgcacgatggtctcggggacctccgcagcagctccccagggcccacgggccagccccgccgccctcgcaacctggcagccgccgccgtggaaggtgagatcagaccctgcccaatacagtcgtgtggtctacttgtgggccgcccagcctttgaggcctggacccggcttggaggacagggaaggacgagtccagcccgctgcaccgtagacggcgcccagttgcttgccctggggtatcggccttttccaccataggcgggtgtcagatccttggccttccctcaagggcgtggaagcgtgaggccctgtgtccttcgtgacctccgtgtgccgaggaagagaggccgtgactagctctttctcgccgtgagctcgcttggtcagcaaactaagtactgggtaaactctcctcccgaaactactgaccacccacagttctactaactatattacctgtcctttgatttgcccttagttttcttaaaaatagtcctttcctaagtttatatttgtcgacgccaggtcagtcatttttgcacttaattgtatatgagataactagatgtctgttttcgtgcgactggaggaggcagcttgcagcctacataggcaatagaaaggagataattggtgggcgtccctttggtgtgattatctcttgggattcttggtggttgggcccagctttaacttagttgtgtgtgttttaaatcctagtgaagtatgtacatacagagaaacctgaaaaccgatgtaggagtcctaagaatgttatctaccttgtgcctgtaaaatcgaaagatttttttctttaaatcattcatgtgcttctgttgtctttagtatgatagagtccttatttacactatctgtcgttcagtttaaaagttaaagctaacattatttgtgtattaaatgtatttgactgcaggaatttgtgcgtatccgtttttatgttacaggagttcttaagtggggatagtattggttagtggctgggataaactttgaagttgtttgcaagccttttacatgtcgagtgatctttctgagtttcgtttgtactctgaagtgtgctcttaccagtggttaataatttgaagtttgactttaattgtaaaagccgttaatgtagaaaacttttaaaaaaattaatatggcagaatacgagctattaatagtatcagatacagaaccctcataatttttaaatgatctgaatttggcagtgaatttttttttaaccgacttaattgtggccaaagctattcagctgtgataatagtatctcacagggaaacattttctttcattcagtggccttagtcatctctgaagaaatacttacttgatttttttttttccaatcaaacagagcagtatagctgtgactatggatctggcagattctttatcctttgtggacttggaggaattattagctgtggcacaacacatacagcattggttcctctagatctggttaaatgcagaatgcaggtttgttttgcatgctggactagagcatattgaagcatgactgactgttaagttataagatatagtcatctaacaagctgtgtggaaacctaactgtccaggaggtaagtttatgaccagtaacatgagttttatattaaaatgcatggtgtgtcttctcttactacagagtacagttgtgaatttggctccgcgaagtattatgcactgtgtggctttggtggggtcttaagttgtggtctgacacacactgctgtggttcccctggatttagtgaaatgccgtatgcaggtttgtattgagatgacaacattgaaagtatctctcatgtgacttaactctaaataaaatcttaaatgagaatttgaagacatcacaactgctagaaacttcagtaggaaaccacatagaatttctttaaattgtgggctttattttgactagtgttttaaatccaataaatgcctctattgtttgagtaaattgttcacttttagagtctggctgtaaatggctctttgctgctgctcttcacttctggccggagttcttcaagcttactagtgccccaaatagtcatttaacaagcacctatgtgttggagtgggtaaacaagtctgtgtattatgtgaagtaacaatgtcctttatctactaataagaccaaggcaaagagtacatgtagatttatttaaagtgctcttaatatcttagtatgaaaattttgtcagattagcctcttgtttatttacacaacattttaaaataatttgaatatattttaattaagatcattgaaacaaaaacaagacatcgaaaatttattgttccaaactggattagaagtctacttacctaaaagagaaatgaatttgaaatattaggagggagaggaaggtgagtataccatcccttctagtactggcagaaatagataagcttttcctccccccccattagttaatgtaatggatatgaaatgtacctttgctaaaacgtgttatgcatgtctcttgaagtgaatttagtttatgtgctttttttttttaacttgtgtttagtttgtttagtgttcacaaaactttatgctataagctacttaaagaactagcatatgttaggaatacagttatatctattatctagacagtagcttttaaaaagtaggaggtgggccaagcatggtcggccccagaccgtggaatgccgagcattttgggtagcggaagcaggtgggtcacttgaggtcggagttcgagatcagaactcaatctagccaacatggtgaaacctcatctctgctaaaatacaaaaattagctgggcatggtggcgtgccctgtagtcgcagctactcggaggctgaggcaggagaatcgcttgaacctgggaggtggaggttgcagtgagctgagatcacaccatggcactcatcctgggctacagagcagactcaaaaaacaaacaaacaaaaaacacaaaaaaagtagtaggagttgggtggtaagaaatctgttaagaatcagttttgttacgtatttttgttgaaattttaccctcttaactatcactccaagacttaagtttgacacagaaagcttttgttgaaattttaccctcttaactatcactccaagacttaggtttgacacagaaagctagaccttaatgtacaacagtttctatttataaaagtaatcaaatgaacaataataaacagtgataagcataaactaataaaagttatatgaatgtagttcctcactcaaaatatcttaatattttcagatgtcagttgaccttggataactgaagccacagaaaatgaactcttggataagggagagctactgtatttctttttttttttttgagatggagtcttgctctgctgcccaggctggagtgtagtggtgccatcgtgctcactgcaacctccacctccctcaggctcaagcgattgttctgtctcaccctcaccctcccgagtagctgggattacaggtgcacgccacatgcccgtccaattttttatattttagtagagatggggtttcactgtgttgcccaggctggtcttgaactcctgagctcaggtaatccacctgcctcagcctcccaaagcgatgggattacagatgtgagccaccgtgacctggcaggaattactgtagttaccttttgtgtagttgctgaaatttattatggaacccaaacaaaaataatcatgagattaaatttttatgttagctgtttggtgcatttaattttttttttcttgttttaaataaaggtggacccccaaaagtacaagggcatatttaacggattctcagttacacttaaagaggatggtgttcgtggtttggctaaaggatgggctccgactttccttggctactccatgcagggactctgcaagtttggcttttatgaagtctttaaagtcttgtatagcaatatgcttggagaggtatgtaattaactttaaaattgaatgttccgagtgtttaagactttccgagtgttcttagatttttgtctgtcttgcctattttagcactgaagaaaatggtcctacaaagtgagcaactgttttaatcgtatgcctgtgtcagcagagacaggttgataaatgtattcattaaattacaattctccttttaatatactatcttgttttctaagtaagttggattttgagttttttagagaagggctctgggactcctttgcgtagttccggggcatggcatctagatattttttgaatattcatgttgttcacatagttacgtgttttgttaatgaggttatgagaccacatatatattccatatcatcgtgtgttactttataaaatgtctgaagcttagttgttttctagaactgtcacttcaattgaaaaccaacacaacaacaattcacatcccttccttgtgttttggattttaggagaatacttatctctggcgcacatcactatatttggctgcctctgccagtgctgaattctttgctgacattgccctggctcctatggaagctgctaaggttcgaattcaaacccagccaggttatgccaacactttgagggatgcagctcccaaaatgtataaggaagaaggcctaaaagcgtaagtaaacacttaaaaatttatactatgaaagtacttattttaagtgaacttcatttttttttgtttttttttttgttttgtttttttgacgaaaagtctcgctctgtcacccaggctggagtgcagtggcgtgatctcggctcactgcaagctccgcctcccggttcacgccattctcctgcctcaatcccaaagagctaggactacaggcgcctgcactgcccagctaattttttgtatttttcagtatagacggagtttcaccgtctccatctcctgacctcatgatccgcccaccttggcctcccaaaatgctgggattacaggtgtgagccaccagcacccggcttcttttttttttttctttgagacggagttttgctcttgttgtccaggctggagtgcaatggcatatctcagctcactgcaacctccgcctcccaggttcaagtgattgtctgctcagcctgctgaatagctgggattacaggcatcaccaccacgcctggctaattttgtatttttagtagagactccatgttggtcaggctggtctcgaactcctgacctcagtgatccaccgcctcgcctcccaaagtgctgggattacaggcgtgagacaccgcgtctggctgtgaacttcattttttagtattaagcctaccagactttttaaaaagactattataacatttaatgtctatttacctgtatgtagaacataaacttgagaggtaaagataagttaatacatggtttgagccctggactgagttttttttttttccctagagtaaggaccatttgtcggtctacaaatgacttgatgtttggcctaaacatttactattaacttttagggagggcttgttagtatccttgtgatctattcacagttaagaatttccatgaccacaacatgcttccttagatccacctttgtggatgaatcttgaactgagttccacttgtaaacttcttgtttcttgtggttccagtagtcaaagaaacatccagcaacttttttggttgtatagtcaaaggtgcttgagtcattggcatgtaagagaaatatacctgcatgttagtctaacgtatctgatagaaatgacatgcatttactggccatttgttactatcaggactcgactcgtgtgcggacatttctgttaataatgacagtctctgatagatgagtgtatgcaactgtgtaaaacaagtctcttgatttcctagattctacaagggggttgctcctctctggatgagacagataccatacaccatgatgaagttcgcctgctttgaacgtactgttgaagcactgtacaagtttgtggttcctaagccccgcagtgaatgttcaaagccagagcagctggttgtaacatttgtagcaggttacataggtacgaattacttagaacacacttgtctgaaattatgaacaaataatcatttccattattggcgttttttgagagggaaaaatactccaaaggttataaagcagtgtttttgtttttttggtttcctgaggcatagtctcgctctgttgcccaggctggagtgcagtggcatgataatagctcactgcaacctcctcctcctgggttcaagtgattcttctgccgcagcctcccaagtagctgggacaggcatgcaccgccatgccgcgctgatttttgtttttgttttttgtttttttttgagatggagttttgcccttgttgcccaggctggagtgcagtggtgcaatcttggctcactgcagcctccgcctcctgggttcaagcgattctcctgtctcagcctcctgagtagctgggattgcaggcgtctgcactacgcccggctaatttttagtatttttagtagagacggtttcactatgttggccaggctggtctcaaactcctggggcaggtgatctgcctgcctcgcgctcccaaagtgctgggattacaggcgtgagccaccgccgacctggcctgatttttgtaaagatggggtttcaccatgttgatgagtctggtctcaaactcctgacctcaggtgatgtgcctggcctataaagcagttttatcttcccataacattttatatgctttttaggattcataaatacttgctaactagttcctaaaagggctgtttcatgggatgtcattattaggcttgggaatgtattgatcttactgttgcaccatttttttgttgttgtttattaagaattttatacagaaagtgttgaataaaatctgaaaaactttaaaagattgttccgttttacatagatagacagcttgataactgtacccgtgtcaccctgagtctgatttttattttagaactagaaaaatattattttaaaatcataaaaatgattattggctctgtgaagttttgtttttaactggcactgtatgggatcctttatcttttttcagctggagtcttttgtgcaattgtttctcaccctgctgattctgtggtatctgtgttgaataaagaaaaaggtagcagtgcttctctggtcctcaagagacttggatttaaaggtaggatgatgtttttttcttgaaagaaagaacaacagttttggatatgttgcatttttttcatttgcttttcctgtttgaaccaggtgtatggaagggactgtttgcccgtatcatcatgattggtaccctgactgcactacagtggtttatctatgactccgtgaaggtctacttcagacttcctcgccctcctccacccgagatgccagagtctctgaagaagaagcttgggttaactcagtagttagatcaaagcaaatgtggactgaatctgcttgttgatcagtgtttgaagaaagtgcaaaaggaacttttatatatttgacagtgtaggaaattgtctattcctgatataattactgtagtactcttgcttaaggcaagagtttcagatttactgttgaaataaacccaactgttcatg

SEQ ID NO: 32189 - DNA, 7560 bp, Homo Sapiens
accggccacagcctgcctactgtcacccgcctctcccgcgcgcagatacacgcccccgcctccgtgggcacaaaggcagcgctgctggggaactcgggggaacgcgcacgtgggaaccgccgcagctccacactccaggtacttcttccaaggacctaggtctctcgcccatcggaaagaaaataattctttcaagaagatcagggacaactgatttgaagtctactctgtgcttctaaatccccaattctgctgaaagtgaatccctagagccctagagccccagcagcacccagccaaacccacctccaccatgggggccatgactcagctgttggcaggtgtctttcttgctttccttgccctcgctaccgaaggtggggtcctcaagaaagtcatccggcacaagcgacagagtggggtgaacgccaccctgccagaagagaaccagccagtggtgtttaaccacgtttacaacatcaagctgccagtgggatcccagtgttcggtggatctggagtcagccagtggggagaaagacctggcaccgccttcagagcccagcgaaagctttcaggagcacacagtagatggggaaaaccagattgtcttcacacatcgcatcaacatcccccgccgggcctgtggctgtgccgcagcccctgatgttaaggagctgctgagcagactggaggagctggagaacctggtgtcttccctgagggagcaatgtactgcaggagcaggctgctgtctccagcctgccacaggccgcttggacaccaggcccttctgtagcggtcggggcaacttcagcactgaaggatgtggctgtgtctgcgaacctggctggaaaggccccaactgctctgagcccgaatgtccaggcaactgtcaccttcgaggccggtgcattgatgggcagtgcatctgtgacgacggcttcacgggcgaggactgcagccagctggcttgccccagcgactgcaatgaccagggcaagtgcgtgaatggagtctgcatctgtttcgaaggctacgccggggctgactgcagccgtgaaatctgcccagtgccctgcagtgaggagcacggcacatgtgtagatggcttgtgtgtgtgccacgatggctttgcaggcgatgactgcaacaagcctctgtgtctcaacaattgctacaaccgtggacgatgcgtggagaatgagtgcgtgtgtgatgagggtttcacgggcgaagactgcagtgagctcatctgccccaatgactgcttcgaccggggccgctgcatcaatggcacctgctactgcgaagaaggcttcacaggtgaagactgcgggaaacccacctgcccacatgcctgccacacccagggccggtgtgaggaggggcagtgtgtatgtgatgagggctttgccggtttggactgcagcgagaagaggtgtcctgctgactgtcacaatcgtggccgctgtgtagacgggcggtgtgagtgtgatgatggtttcactggagctgactgtggggagctcaagtgtcccaatggctgcagtggccatggccgctgtgtcaatgggcagtgtgtgtgtgatgagggctatactggggaggactgcagccagctacggtgccccaatgactgtcacagtcggggccgctgtgtcgagggcaaatgtgtatgtgagcaaggcttcaagggctatgactgcagtgacatgagctgccctaatgactgtcaccagcacggccgctgtgtgaatggcatgtgtgtttgtgatgacggctacacaggggaagactgccgggatcgccaatgccccagggactgcagcaacaggggcctctgtgtggacggacagtgcgtctgtgaggacggcttcaccggccctgactgtgcagaactctcctgtccaaatgactgccatggccagggtcgctgtgtgaatgggcagtgcgtgtgccatgaaggatttatgggcaaagactgcaaggagcaaagatgtcccagtgactgtcatggccagggccgctgcgtggacggccagtgcatctgccacgagggcttcacaggcctggactgtggccagcactcctgccccagtgactgcaacaacttaggacaatgcgtctcgggccgctgcatctgcaacgagggctacagcggagaagactgctcagaggtgtctcctcccaaagacctcgttgtgacagaagtgacggaagagacggtcaacctggcctgggacaatgagatgcgggtcacagagtaccttgtcgtgtacacgcccacccacgagggtggtctggaaatgcagttccgtgtgcctggggaccagacgtccaccatcatccaggagctggagcctggtgtggagtactttatccgtgtatttgccatcctggagaacaagaagagcattcctgtcagcgccagggtggccacgtacttacctgcacctgaaggcctgaaattcaagtccatcaaggagacatctgtggaagtggagtgggatcctctagacattgcttttgaaacctgggagatcatcttccggaatatgaataaagaagatgagggagagatcaccaaaagcctgaggaggccagagacctcttaccggcaaactggtctagctcctgggcaagagtatgagatatctctgcacatagtgaaaaacaatacccggggccctggcctgaagagggtgaccaccacacgcttggatgcccccagccagatcgaggtgaaagatgtcacagacaccactgccttgatcacctggttcaagcccctggctgagatcgatggcattgagctgacctacggcatcaaagacgtgccaggagaccgtaccaccatcgatctcacagaggacgagaaccagtactccatcgggaacctgaagcctgacactgagtacgaggtgtccctcatctcccgcagaggtgacatgtcaagcaacccagccaaagagaccttcacaacaggcctcgatgctcccaggaatcttcgacgtgtttcccagacagataacagcatcaccctggaatggaggaatggcaaggcagctattgacagttacagaattaagtatgcccccatctctggaggggaccacgctgaggttgatgttccaaagagccaacaagccacaaccaaaaccacactcacaggtctgaggccgggaactgaatatgggattggagtttctgctgtgaaggaagacaaggagagcaatccagcgaccatcaacgcagccacagagttggacacgcccaaggaccttcaggtttctgaaactgcagagaccagcctgaccctgctctggaagacaccgttggccaaatttgaccgctaccgcctcaattacagtctccccacaggccagtgggtgggagtgcagcttccaagaaacaccacttcctatgtcctgagaggcctggaaccaggacaggagtacaatgtcctcctgacagccgagaaaggcagacacaagagcaagcccgcacgtgtgaaggcatccactgaacaagcccctgagctggaaaacctcaccgtgactgaggttggctgggatggcctcagactcaactggaccgcggctgaccaggcctatgagcactttatcattcaggtgcaggaggccaacaaggtggaggcagctcggaacctcaccgtgcctggcagccttcgggctgtggacataccgggcctcaaggctgctacgccttatacagtctccatctatggggtgatccagggctatagaacaccagtgctctctgctgaggcctccacaggggaaactcccaatttgggagaggtcgtggtggccgaggtgggctgggatgccctcaaactcaactggactgctccagaaggggcctatgagtactttttcattcaggtgcaggaggctgacacagtagaggcagcccagaacctcaccgtcccaggaggactgaggtccacagacctgcctgggctcaaagcagccactcattataccatcaccatccgcggggtcactcaggacttcagcacaacccctctctctgttgaagtcttgacagaggaggttccagatatgggaaacctcacagtgaccgaggttagctgggatgctctcagactgaactggaccacgccagatggaacctatgaccagtttactattcaggtccaggaggctgaccaggtggaagaggctcacaatctcacggttcctggcagcctgcgttccatggaaatcccaggcctcagggctggcactccttacacagtcaccctgcacggcgaggtcaggggccacagcactcgaccccttgctgtagaggtcgtcacagaggatctcccacagctgggagatttagccgtgtctgaggttggctgggatggcctcagactcaactggaccgcagctgacaatgcctatgagcactttgtcattcaggtgcaggaggtcaacaaagtggaggcagcccagaacctcacgttgcctggcagcctcagggctgtggacatcccgggcctcgaggctgccacgccttatagagtctccatctatggggtgatccggggctatagaacaccagtactctctgctgaggcctccacagccaaagaacctgaaattggaaacttaaatgtttctgacataactcccgagagcttcaatctctcctggatggctaccgatgggatcttcgagacctttaccattgaaattattgattccaataggttgctggagactgtggaatataatatctctggtgctgaacgaactgcccatatctcagggctaccccctagtactgattttattgtctacctctctggacttgctcccagcatccggaccaaaaccatcagtgccacagccacgacagaggccctgccccttctggaaaacctaaccatttccgacattaatccctacgggttcacagtttcctggatggcatcggagaatgcctttgacagctttctagtaacggtggtggattctgggaagctgctggacccccaggaattcacactttcaggaacccagaggaagctggagcttagaggcctcataactggcattggctatgaggttatggtctctggcttcacccaagggcatcaaaccaagcccttgagggctgagattgttacagaagccgaaccggaagttgacaaccttctggtttcagatgccaccccagacggtttccgtctgtcctggacagctgatgaaggggtcttcgacaattttgttctcaaaatcagagataccaaaaagcagtctgagccactggaaataaccctacttgcccccgaacgtaccagggacttaacaggtctcagagaggctactgaatacgaaattgaactctatggaataagcaaaggaaggcgatcccagacagtcagtgctatagcaacaacagccatgggctccccaaaggaagtcattttctcagacatcactgaaaattcggctactgtcagctggagggcacccacggcccaagtggagagcttccggattacctatgtgcccattacaggaggtacaccctccatggtaactgtggacggaaccaagactcagaccaggctggtgaaactcatacctggcgtggagtaccttgtcagcatcatcgccatgaagggctttgaggaaagtgaacctgtctcagggtcattcaccacagctctggatggcccatctggcctggtgacagccaacatcactgactcagaagccttggccaggtggcagccagccattgccactgtggacagttatgtcatctcctacacaggcgagaaagtgccagaaattacacgcacggtgtccgggaacacagtggagtatgctctgaccgacctcgagcctgccacggaatacacactgagaatctttgcagagaaagggccccagaagagctcaaccatcactgccaagttcacaacagacctcgattctccaagagacttgactgctactgaggttcagtcggaaactgccctccttacctggcgacccccccgggcatcagtcaccggttacctgctggtctatgaatcagtggatggcacagtcaaggaagtcattgtgggtccagataccacctcctacagcctggcagacctgagcccatccacccactacacagccaagatccaggcactcaatgggcccctgaggagcaatatgatccagaccatcttcaccacaattggactcctgtaccccttccccaaggactgctcccaagcaatgctgaatggagacacgacctctggcctctacaccatttatctgaatggtgataaggctcaggcgctggaagtcttctgtgacatgacctctgatgggggtggatggattgtgttcctgagacgcaaaaacggacgcgagaacttctaccaaaactggaaggcatatgctgctggatttggggaccgcagagaagaattctggcttgggctggacaacctgaacaaaatcacagcccaggggcagtacgagctccgggtggacctgcgggaccatggggagacagcctttgctgtctatgacaagttcagcgtgggagatgccaagactcgctacaagctgaaggtggaggggtacagtgggacagcaggtgactccatggcctaccacaatggcagatccttctccacctttgacaaggacacagattcagccatcaccaactgtgctctgtcctacaaaggggctttctggtacaggaactgtcaccgtgtcaacctgatggggagatatggggacaataaccacagtcagggcgttaactggttccactggaagggccacgaacactcaatccagtttgctgagatgaagctgagaccaagcaacttcagaaatcttgaaggcaggcgcaaacgggcataaattggagggaccactgggtgagagaggaataaggcggcccagagcgaggaaaggattttaccaaagcatcaatacaaccagcccaaccatcggtccacacctgggcatttggtgagaatcaaagctgaccatggatccctggggccaacggcaacagcatgggcctcacctcctctgtgatttctttctttgcaccaaagacatcagtctccaacatgtttctgttttgttgtttgattcagcaaaaatctcccagtgacaacatcgcaatagttttttacttctcttaggtggctctgggatgggagaggggtaggatgtacaggggtagtttgttttagaaccagccgtattttacatgaagctgtataattaattgtcattatttttgttagcaaagattaaatgtgtcattggaagccatccctttttttacatttcatacaacagaaaccagaaaagcaatactgtttccattttaaggatatgattaatattattaatataataatgatgatgatgatgatgaaaactaaggatttttcaagagatctttctttccaaaacatttctggacagtacctgattgtattttttttttaaataaaagcacaagtacttttgaaaaaaaaccggaattc

SEQ ID NO: 32190 - DNA, 2919 bp, Homo Sapiens; identical to SEQ ID NO: 29636

SEQ ID NO: 32191 - DNA, 10660 bp, Homo Sapiens
ctactacagtggcggacgtacaggacctgtttcactgcagggggatccaaaacaagccccgtggagcaacagccagagcaacagcagctgcaagacattgtttctctccctctgcccccccttccccacgcaaccccagatccatttacactttacagttttacctcacaaaaactactacaagcaccaagctccctgatggaaaggagcatcgtgcatcaagtcaccagggtggtccattcaagctgcagatttgtttgtcatccttgtacagcaatctcctcctccactgccactacagggaagtgcatcacatgtcagcatactggagcatagtgaaagagtctattttgaagcttcaaacttagtgctgctgcagaccaggaacaagagagaaagagtggatttcagcctgcacggatggtcttgaaacacaaatggtttttggtctaggcgttttacactgagattctccactgccaccctttctactcaagcaaaatcttcgtgaaaagatctgctgcaaggaactgatagcttatggttctccattgtgatgaaagcacatggtacagttttccaaagaaattagaccattttcttcgtgagaaagaaatcgacgtgctgttttcatagggtatttctcacttctctgtgaaaggaagaaagaacacgcctgagcccaagagccctcaggagccctccagagcctgtgggaagtctccatggtgaagtataggctgaggctacctgtgaacagtacgcagtgaatgttcatccagagctgctgttggcggattgtacccacggggagatgattcctcatgaagagcctggatcccctacagaaatcaaatgtgactttccgtttatcagactaaaatcagagccatccagacagtgaaacagtcaccgtggaggggggacggcgaaaaatgaaatccaaccaagagcggagcaacgaatgcctgcctcccaagaagcgcgagatccccgccaccagccggtcctccgaggagaaggcccctaccctgcccagcgacaaccaccgggtggagggcacagcatggctcccgggcaaccctggtggccggggccacgggggcgggaggcatgggccggcagggacctcggtggagcttggtttacaacagggaataggtttacacaaagcattgtccacagggctggactactccccgcccagcgctcccaggtctgtccccgtggccaccacgctgcctgccgcgtacgccaccccgcagccagggaccccggtgtcccccgtgcagtacgctcacctgccgcacaccttccagttcattgggtcctcccaatacagtggaacctatgccagcttcatcccatcacagctgatccccccaaccgccaaccccgtcaccagtgcagtggcctcggccgcaggggccaccactccatcccagcgctcccagctggaggcctattccactctgctggccaacatgggcagtctgagccagacgccgggacacaaggctgagcagcagcagcagcagcagcagcagcagcagcagcagcatcagcatcagcagcagcagcagcagcagcagcagcagcagcagcagcagcagcacctcagcagggctccggggctcatcaccccggggtcccccccaccagcccagcagaaccagtacgtccacatttccagttctccgcagaacaccggccgcaccgcctctcctccggccatccccgtccacctccacccccaccagacgatgatcccacacacgctcaccctggggcccccctcccaggtcgtcatgcaatacgccgactccggcagccactttgtccctcgggaggccaccaagaaagctgagagcagccggctgcagcaggccatccaggccaaggaggtcctgaacggtgagatggagaagagccggcggtacggggccccgtcctcagccgacctgggcctgggcaaggcaggcggcaagtcggttcctcacccgtacgagtccaggcacgtggtggtccacccgagcccctcagactacagcagtcgtgatccttcgggggtccgggcctctgtgatggtcctgcccaacagcaacacgcccgcagctgacctggaggtgcaacaggccactcatcgtgaagcctccccttctaccctcaacgacaaaagtggcctgcatttagggaagcctggccaccggtcctacgcgctctcaccccacacggtcattcagaccacacacagtgcttcagagccactcccggtgggactgccagccacggccttctacgcagggactcaaccccctgtcatcggctacctgagcggccagcagcaagcaatcacctacgccggcagcctgccccagcacctggtgatccccggcacacagcccctgctcatcccggtcggcagcactgacatggaagcgtcgggggcagccccggccatagtcacgtcatccccccagtttgctgcagtgcctcacacgttcgtcaccaccgcccttcccaagagcgagaacttcaaccctgaggccctggtcacccaggccgcctacccagccatggtgcaggcccagatccacctgcctgtggtgcagtccgtggcctccccggcggcggctccccctacgctgcctccctacttcatgaaaggctccatcatccagttggccaacggggagctaaagaaggtggaagacttaaaaacagaagatttcatccagagtgcagagataagcaacgacctgaagatcgactccagcaccgtagagaggattgaagacagccatagcccgggcgtggccgtgatacagttcgccgtcggggagcaccgagcccaggtcagcgttgaagttttggtagagtatcctttttttgtgtttggacagggctggtcatcctgctgtccggagagaaccagccagctctttgatttgccgtgttccaaactctcagttggggatgtctgcatctcgcttaccctcaagaacctgaagaacggctctgttaaaaagggccagcccgtggatcccgccagcgtcctgctgaagcactcaaaggccgacggcctggcgggcagcagacacaggtatgccgagcaggaaaacggaatcaaccaggggagtgcccagatgctctctgagaatggcgaactgaagtttccagagaaaatgggattgcctgcagcgcccttcctcaccaaaatagaacccagcaagcccgcggcaacgaggaagaggaggtggtcggcgccagagagccgcaaactggagaagtcagaagacgaaccacctttgactcttcctaagccttctctaattcctcaggaggttaagatttgcattgaaggccggtctaatgtaggcaagtagaggcagcgtgggggaaaggaaacgtggctctcccttatcatttgtatccagattactgtactgtaggctaaaataacacagtatttacatgttatcttcttaattttaggtttctgttctaaccttgtcattagagttacagcaggtgtgtcgcaggagactggtgcatatgctttttccacgagtgtctgtcagtgagcgggcgggaggaagggcacagcaggagcggtcagggctccaggcatccccggggaagaaaggaacggggcttcacagtgcctgccttctctagcggcacagaagcagccgggggcgctgactcccgctagtgtcaggagaaaagtcccgtgggaagagtcctgcaggggtgcagggttgcacgcatgtgggggtgcacaggcgctgtggcggcgagtgagggtctctttttctctgcctccctctgcctcactctcttgctatcggcatgggccgggggggttcagagcagtgtcctcctggggttcccacgtgcaaaatcaacatcaggaacccagcttcagggcatcgcggagacgcgtcagatggcagatttggaaagttaaccatttaaaagaacatttttctctccaacatattttacaataaaagcaacttttaattgtatagatatatatttccccctatggggcctgactgcactgatatatattttttttaaagagcaactgccacatgcgggatttcatttctgctttttactagtgcagcgatgtcaccagggtgttgtggtggacagggaagcccctgctgtcatggccccacatggggtaaggggggttgggggtgggggagagggagagagcgaacacccacgctggtttctgtgcagtgttaggaaaaccaatcaggttattgcattgacttcactcccaagaggtagatgcaaactgcccttcagtgagagcaacagaagctcttcacgttgagtttgcgaaatctttttgtctttgaactctagtactgtttatagttcatgactatggacaactcgggtgccacttttttttttttcagattccagtgtgacatgaggaattagattttgaagatgagcatatattactatctttaagcatttaaaaatactgttcacactttattaccaagcatcttggtctctcattcaacaagtactgtatctcactttaaactctttggggaaaaaacaaaaacaaaaaaaactaagttgctttctttttttcaacactgtaactacatttcagctctgcagaattgctgaagagcaagatattgaaagtttcaatgtggtttaaagggatgaatgtgaattatgaactagtatgtgacaataaatgaccaccaagtactacctgacgggaggcacttttcactttgatgtctgagaatcagttcaaggcatatgcagagttggcagagaaactgagagaaaagggatggagaagagaatactcatttttgtccagtgtttttctttttaagatgaacttttaaagaaccttgcgatttgcacatattgagtttataacttgtgtgatattcctgcagtttttatccaataacattgtgggaaaggtttgggggactgaacgagcataaataaatgtagcaaaatttctttctaacctgcctaaactctaggccattttataaggttatgttcctttgaaaattcattttggtctttttaccacatctgtcacaaaaagccaggtcttagcgggctcttagaaactctgagaattttcttcagattcattgagagagttttccataaagacatttatatatgtgagcaagattttttttaaacaattactttattattgttgttattaatgttattttcagaatggctttttttttctattcaaaatcaaatcgagatttaatgtttggtacaaacccagaaagggtatttcatagtttttaaacctttcattcccagagatccgaaatatcatttgtgggttttgaatgcatctttaaagtgctttaaaaaaaagttttataagtagggagaaatttttaaatattcttacttggatggctgcaactaaactgaacaaatacctgacttttcttttaccccattgaaaatagtactttcttcgtttcacaaattaaaaaaaaaatctggtatcaacccacattttggctgtctagtattcatttacatttagggttcaccaggactaatgatttttataaaccgttttctggggtgtaccaaaaacatttgaataggtttagaatagctagaatagttccttgactttcctcgaatttcattaccctctcagcatgcttgcagagagctgggtgggctcattcttgcagtcatactgcttatttagtgctgtattttttaaacgtttctgttcagagaacttgcttaatcttccatatattctgctcagggcacttgcaattattaggttttgtttttctttttgttttttagcctttgatggtaagaggaatacgggctgccacatagactttgttctcattaatatcactatttacaactcatgtggactcagaaaaacacacaccaccttttggcttacttcgagtattgaattgactggatccactaaaccaacactaagatgggaaaacacacatggtttggagcaataggaacatcatcataatttttgtggttctatttcaggtataggaattataaaataattggttctttctaaacacttgtcccatttcattctcttgcttttttagcatgtgcaatactttctgtgccaatagagtctgaccagtgtgctatatagttaaagctcattcccttttggctttttccttgtttggttgatcttccccattctggccagagcagggctggagggaaggagccaggagggagagagcctcccacctttcccctgctgcggatgctgagtgctggggcggggagccttcaggagccccgtgcgtctgccgccacgttgcagaaagagccagccaaggagacccgggggaggaaccgcagtgtcccctgtcaccacacggaatagtgaatgtggagtgtggagaggaaggaggcagattcatttctaagacgcactctggagccatgtagcctggagtcaacccattttccacggtcttttctgcaagtgggcaggcccctcctcggggtctgtgtccttgagacttggagccctgcctctgagcctggacgggaagtgtggcctgttgtgtgtgtgcgttctgagcgtgttggccagtggctgtggaggggaccacctgccacccacggtcaccactcccttgtggcagctttctcttcaaataggaagaacgcacagagggcaggagcctcctgtttgcagacgttggcgggccccgaggctcccagagcagcctctgtcaccgcttctgtgtagcaaacattaacgatgacaggggtagaaattcttcggtgccgttcagcttacaaggatcagccatgtgcctctgtactatgtccactttgcaatatttaccgacagccgtcttttgttctttctttcctgttttccatttttaaactagtaacagcaggccttttgcgtttacaatggaacacaatcaccaagaaattagtcagggcgaaaagaaaaaaataatactattaataagaaaccaacaaacaagaacctctctttctagggatttctaaatatataaaatgactgttccttagaatgtttaacttaagaattatttcagtttgtctgggccacactggggcagaggggggagggagggatacagagatggatgccacttacctcagatcttttaaagtggaaatccaaattgaattttcatttggactttcaggataattttctatgttggtcaacttttcgttttccctaactcacccagtttagtttgggatgatttgatttctgttgttgttgatcccatttctaacttggaattgtgagcctctatgttttctgttaggtgagtgtgttgggttttttccccccaccaggaagtggcagcatccctccttctcccctaaagggactctgcggaacctttcacacctctttctcagggacggggcaggtgtgtgtgtggtacactgacgtgtccagaagcagcactttgactgctctggagtagggttgtacaatttcaaggaatgtttggatttcctgcatcttgtggattactccttagataccgcatagattgcaatataatgctgcatgttcaagatgaacagtagctcctagtaatcataaaatccactctttgcacagtttgatctttactgaaatatgttgccaaaatttatttttgttgttgtagctctggattttgttttgttttgttttttaaggaaacgattgacaataccctttaacatctgtgactactaaggaaacctatttctttcatagagagaaaaatctccaatgcttttgaagacactaataccgtgctatttcagatatgggtgaggaagcagagctctcggtaccgaaggccgggcttcttgagctgtgttggttgtcatggctactgtttcatgaaccacaagcagctcaacagactggtctgttgccttctgaaaccctttgcacttcaatttgcaccaggtgaaaacagggccagcagactccatggcccaattcggtttcttcggtggtgatgtgaaaggagagaattacactttttttttttttaagtggcgtggaggcctttgcttccacatttgtttttaacccagaatttctgaaatagagaatttaagaacacatcaagtaataaatatacagagaatatacttttttataaagcacatgcatctgctattgtgttgggttggtttcctctcttttccacggacagtgttgtgtttctggcatagggaaactccaaacaacttgcacacctctactccggagctgagatttcttttacatagatgacctcgcttcaaatacgttaccttactgatgataggatcttttcttgtagcactataccttgtgggaatttttttttaaatgtacacctgatttgagaagctgaagaaaacaaaattttgaagcactcactttgaggagtacaggtaatgttttaaaaaattgcacaaaagaaaaatgaatgtcgaaatgattcattcagtgtttgaaagatatggctctgttgaaacaatgagtttcatactttgtttgtaaaaaaaaaaagcagagaagggttgaaagttacatgtttttttgtatatagaaatttgtcatgtctaaatgatcagatttgtatggttatggcctggaagaattactacgtaaaaggctcttaaactatacctatgcttattgttatttttgttacatatagccctcgtctgagggaggggaactcggtattctgcgatttgagaatactgttcattcctatgctgaaagtacttctctgagctcccttcttagtctaaactcttaagccattgcaacttctttttcttcagagatgatgtttgacattttcagcacttcctgttcctataaacccaaagaatataatcttgaacacgaagtgtttgtaacaagggatccaggctaccaatcaaacaggactcattatggggacaaaaaaaaaaaaaattatttcaccttctttccccccacacctcatttaaatggggggagtaaaaacatgatttcaatgtaaatgcctcattttattttagttttattttgatttttatttaatataaagaggccagaataaatacggagcatcttctcagaatagtattcctgtccaaaaatcaagccggacagtggaaactggacagctgtggggatattaagcacccccacttacaattcttaaattcagaatctcgtcccctcccttctcgttgaaggcaactgttctggtagctaactttctcctgtgtaatggcgggagggaacaccggcttcagtttttcatgtccccatgacttgcatacaaatggttcaactgtattaaaattaagtgcatttggccaataggtagtatctatacaataacaacaatctctaagaatttccataacttttcttatctgaaaggactcaagtcttccactgcagatacattggaggcttcacccacgttttctttccctttagtttgtttgctgtctggatggccaatgagcctgtctccttttctgtggccaatctgaaggccttcgttggaagtgttgttcacagtaatccttaccaagataacatactgtcctccagaataccaagtattaggtgacactagctcaagctgttgtcttcagagcagttaccaagaagctcggtgcacaggttttctctggttcttacaggaaccacctactctttcagttttctggcccaggagtggggtaaatcctttagttagtgcatttgaacttggtacctgtgcattcagttctgtgaatactgccctttttggcggggtttcctcatctccccagcctgaactgctcaactctaaacccaaattagtgtcagccgaaaggaggtttcaagatagtcctgtcagtatttgtggtgaccttcagattagacagtcttcatttccagccagtggagtcctggctccagagccatctctgagactccgtactactggatgttttaatatcagatcattacccaccatatgcctcccacaggccaagggaaaacagacaccagaacttgggttgagggcactaccagactgacatggccagtacagaggagaactagggaaggaatgatgttttgcaccttattgaaaagaaaattttaagtgcatacataatagttaagagcttttattgtgacaggagaacttttttccatatgcgtgcatactctctgtaattccagtgtaaaatattgtacttgcactagcttttttaaacaaatattaaaaaatggaagaattcatattctattttctaatcgtggtgtgtctatttgtaggatacactcgagtctgtttattgaattttatggtccctttctttgatggtgcttgcaggttttctaggtagaaattatttcattattataataaaacaatgtttgattcaaaatttgaacaaaattgttttaaataaattgtctgtataccagtacaagtttattgtttcagtatactcgtactaataaaataacagtgccaattgcaaaaaaaaaaaaaaaaaaaaaaaaaaaaaaaaaaaaaaaaaaaaaaaaaaaaaaaaa

SEQ ID NO: 32192 - DNA, 4080 bp, Homo Sapiens
gcccatgagcgcgccgcggcccgggctggcgtgcgggtgcggctgcggcggccgcgcggcggggccccgggaggcgggtcgctgagcggggcgcgcggccccgaggatgcgggagcgggagcgggagcagcgctggcgtcaatgctcccttcctcgggccattggagactccgttgctttttaatggcggcagcggctgctgggtgagcagctggaggccggacagtgttcgtcccatccggagaggatcgctttctcctggcgtcaccagcgctgggttggtgggggtagcttttccctctttgctcctccattcttgaagaaagaagaagatgccactgccatttgggttgaaactgaaacgcacccggcgctacacggtgtccagcaagagttgcctggttgcccggatccaactgcttaataacgagtttgtggagttcaccctgtccgtggagagcactggccaggaaagcctcgaggccgtggcccagaggctggagctgcgggaggtcacttacttcagcctctggtactacaacaagcaaaatcagcgccggtgggtagatttggaaaaacctttgaagaagcagctggataaatatgcattggaacctaccgtctattttggagtggtgttttatgtgccttcagtttctcagctgcagcaggagattaccaggtatcagtattatctgcaactgaagaaagatatcttggaaggaagtattccttgtaccttagaacaagcaattcagctagcaggcttagctgttcaagcggattttggtgactttgatcagtatgaatcccaggactttcttcagaaatttgccttgtttcctgtgggatggttacaagatgaaaaagtattggaagaagcaacccaaaaagtggccttactacatcagaaatacagagggctcacagctcctgatgctgaaatgctgtacatgcaggaggtagagagaatggatggctatggagaagagagctaccctgctaaggatagccaaggaagtgacatatccattggagcgtgtcttgaaggtatctttgtgaaacacaagaatggaaggcatcctgtggtatttaggtggcatgacattgccaacatgtcccacaacaagtccttttttgcattagagctggcaaataaagaggagaccattcaatttcaaactgaagacatggaaacagcaaaatacatttggagactctgtgttgcgcgacacaagttttacagactaaaccagtgtaacctgcaaactcagactgtcacagtgaacccaatcaggaggaggtcttcttcaaggatgtctctgcctaaaccccagccctacgtgatgcctcccccaccgcagttgcactataatggacattatacagaaccatatgcttcttcccaagataacctctttgtgcccaaccagaacggatactactgtcactctcagacaagcttggatagagcccagattgacttcaacggtcggatccgtaatggcagtgtctacagtgcacacagcaccaactccttaaataatcctcagccctacttgcagccctcgccgatgtcgtccaaccctagcatcaccgggagtgacgtcatgaggcctgactacctcccgtcccatcggcacagcgccgtgatacccccgtcctaccgccccaccccagactatgagactgtgatgaagcagctcaacaggggcctggtgcatgcggaacggcagagccactcgctgcgaaacctcaacatcggcagctcgtacgcctacagcaggcccgcggcgctggtctacagccagcccgagatccgcgagcacgcacagctcccctcgccagcggccgcacactgcccgttcagcctgagctacagcttccacagcccgtctccctacccctaccctgccgagcggcggcccgtggtgggcgcggtcagcgtgccggagctgaccaatgcgcagctgcaggcgcaggactacccgtctcccaacatcatgcggacgcaggtgtaccggccacccccaccctacccgccccccaggcccgccaacagcacgccagacctgtcccgccacctttacatcagcagcagcaaccccgacctcatcacgcggcgcgtgcaccactcggtgcaaacgttccaggaggacagcctgcccgtggcgcactcgctgcaggaggtcagcgagcccctcaccgccgcgcgccacgcgcagctgcacaaacggaacagcatcgaggtggccgggctcagccacggcctggagggcctgcggctcaaggagcgcaccctatccgcgtcggcggcagaggtggcgccgcgagccgtctcggtgggctcccagcccagcgttttcaccgagaggacacagcgagaagggccggaggaggcggagggcttgaggtacggccataagaagtccctgtcggacgccaccatgctaatccacagcagcgaggaggaggaggacgaggacttcgaggaggagagcggggcccgggcgccccctgcacgtgcgcgcgagcctcggcccggcctggcccaggacccacctggctgccctcgcgtcctgctcgccgggcccctgcacatcctggagcccaaggcccacgtcccagacgcggagaagaggatgatggacagcagccccgtccgcacgaccgcagaggcccagcggccctggagagacgggctgctgatgccctccatgtcggagtccgacctcaccacgtcaggccgctaccgagcccggagggactctctgaagaaaaggccggtgtcggaccttctctctgggaagaagaacatcgtggaagggctcccgcctctagggggaatgaaaaagactcgagtagatgcaaaaaaaattggtcctcttaaactggctgccctaaatggactctccctatctcgagtgcctctgcctgatgaaggaaaggaagtggctaccagagcaacgaatgatgaaaggtgtaaaattctggaacaacgattagaacaaggaatggtattcacagaatatgaaagaattcttaagaaacggctagttgatggggagtgctcaacagcacgactccctgaaaatgcagaaagaaatcgattccaagatgttcttccttatgatgatgcgagagtggagttggtcccaactaaagaaaacaacactggttacatcaacgcatcacatattaaggtctctgtcagtggaatcgaatgggattatattgccacacagggaccattacagaatacctgtcaagatttttggcagatggtatgggaacagggaattgcaattatagcaatggtgacagcagaagaggagggtggaagggagaagagctttaggtactggccacgacttggttccaggcacaacactgtcacctatggaaggtttaagatcacgacccggttccgcacagactctggctgctatgccaccacaggcctgaagatgaagcacctccttaccgggcaagagaggaccgtctggcacctccaatacacagactggcctgaacatggctgtccagaagacctcaagggatttttatcatatcttgaagagatccagtctgttcgacgccatacaaatagcacaagtgatccccaaagccccaaccctccgttgttggtccactgcagtgctggggtaggaaggactggcgtggtgattttgtcggagatcatgatcgcctgcctggaacacaatgaggtgctggacatcccgagagtgctggacatgctgaggcaacagagaatgatgctggtgcagactctctgccagtacacatttgtgtacagagtcctcatccagttcctgaaaagctccaggctcatctaagctcccacaatttcttacggggccagtcatgtgaagcgtttacagcttaaaaaaaaagcgcttgcctaactcatactttcccgttgacacttgatccacgcagcgtggcactgggacgtaagtggcgcagtctgaatggcggcacgctgaaggaaacgtgcgaagcacaggctgaagaggggtttctaacctgggaaaggtgctcaaggaggacttggtttca

SEQ ID NO: 32193 - DNA, 1614 bp, Homo Sapiens
atggcccgggccgctgccctcctgccgtcgagatcgccgccgacgccgctgctgtggccgctgctgctgctgctgctcctggaaaccggagcccaggatgtgcgagttcaagtgctacccgaggtgcgaggccagctcgggggcaccgtggagctgccgtgccacctgctgccacctgttcctggactgtacatctccctggtgacctggcagcgcccagatgcacctgcgaaccaccagaatgtggccgccttccaccctaagatgggtcccagcttccccagcccgaagcctggcagcgagcggctgtccttcgtctctgccaagcagagcactgggcaagacacagaggcagagctccaggacgccacgctggccctccacgggctcacggtggaggacgagggcaactacacttgcgagtttgccaccttccccaaggggtccgtccgagggatgacctggctcagagtcatagccaagcccaagaaccaagctgaggcccagaaggtcacgttcagccaggaccctacgacagtggccctctgcatctccaaagagggccgcccacctgcccggatctcctggctctcatccctggactgggaagccaaagagactcaggtgtcagggaccctggccggaactgtcactgtcaccagccgcttcaccttggtgccctcgggccgagcagatggtgtcacggtcacctgcaaagtggagcatgagagcttcgaggaaccagccctgatacctgtgaccctctctgtacgctaccctcctgaagtgtccatctccggctatgatgacaactggtacctcggccgtactgatgccaccctgagctgtgacgtccgcagcaacccagagcccacgggctatgactggagcacgacctcaggcaccttcccgacctccgcagtggcccagggctcccagctggtcatccacgcagtggacagtctgttcaataccaccttcgtctgcacagtcaccaatgccgtgggcatgggccgcgctgagcaggtcatctttgtccgagagacccccaacacagcaggcgcaggggccacaggcggcatcatcgggggcatcatcgccgccatcattgctactgctgtggctgccacgggcatccttatctgccggcagcagcggaaggagcagacgctgcagggggcagaggaggacgaagacctggagggacctccctcctacaagccaccgaccccaaaagcgaagctggaggcacaggagatgccctcccagctcttcactctgggggcctcggagcacagcccactcaagaccccctactttgatgctggcgcctcatgcactgagcaggaaatgcctcgataccatgagctgcccaccttggaagaacggtcaggacccttgcaccctggagccacaagcctggggtcccccatcccggtgcctccagggccacctgctgtggaagacgtttccctggatctagaggatgaggagggggaggaggaggaagagtatctggacaagatcaaccccatctatgatgctctgtcctatagcagcccctctgattcctaccagggcaaaggctttgtcatgtcccgggccatgtatgtg

SEQ ID NO: 32194 - DNA, 1460 bp, Homo Sapiens
tttgccaatatactttcagaagcctgttccctacaaagaggagatcgggtaattctgattctgcccagggtcccagagtggtggcttgcaaatgtggcctgtctgcgaacaggttagtaatgtttgctttccgatcatatttattactaagctggaggggagattttccagaacacctaagtaatcatgatacatttattttgttgtgggcttattgtcaaagagtgcctttaaattatataaaagttaggccgtggtaggctaattccttatccctaggtggaacatctttaaaagataaccttagagttacagcctcacaaaaattgttgtgttgccctgattagaaagaaaagatattctaaagaacctgtgttctggtcctggttgttggtttcttgaagaaccctgatggaggcctggtccttcccaaagtgaaggatgagccggtgtcaagagtccaggaatgccagacatgtgttccccaatcttcttgcctactgtgtcgcctgggaagagtaaaacctattgtgaagtgaatgctttccatccctgtcttaagggtctgggacttaagggtggtggggcccaggaggaagatctatatatttttgagagtccatttatcctttgagaaaataatacccaaagcttactgagcactgttctaagttctttacatattttaactcatttaatcacctaattatcctataaaagaagtagtattattacaatatcactttacagatgcagaacctgaagctcacagaggtgaagtggcttgtccaagtcccagctataagagtgtctggcaccaggacactcttaatcattatacttcatcttacagtgtaatatataaccagcaggaatagaaccacagaaaaagatgaatgcctcctctcttccttttggaaagaaatcataaagcaatcatgtacattttaagaggcactcagctgatgtggtgaagtgtacagttctggagtcaggctacagggttcaatccctgcactgtcacttgtcacttactacttaagtgataccttgggcaagttattcatagcttttatgttttggggtttttttggtggggactgaataagttaaaacatataatcaaatactcaataaatattggttaatattacttttcaatcaaaaccttcttcaagctcaatgttagggatggtcttcaaagaataattatccagtatttaacatgctttcatgttaagccaaaagggtcatagactctgaaatcccttgaaaggcaaaagcagataagtgaaagcaagataaatagatatcttcctggtaaactgactaactcactctgagaaatacagaatgtatagacggtatctacactactctaacataatgaagaataacatttcttctaaacactgtttcttttctgcccctttagggacagttttaattccaggaaccac

SEQ ID NO: 32195 - DNA, 2554 bp, Homo Sapiens
aacacatagcatttgtgacggagagcatttgggtacaaagtgagaatttacagagatcatcctcttcagaaacagttcggtttttgcccactagggatgatgtggtttctcatgaggttacttgctctaaaggactttatattttggaaccataagagcacccttgctggcccaggcatttatggatgatcccttttagtgctcccagtaaccttccaagattgtcaagtggtcagactgttgtttgccattagcttgcagacctggggatccttatcggctaattgctgaagcaagtgtggacaacttcagcaagctgggggtggcgttcatggaagatagactccacatggataatggactggtaccccaaaagattgtgtcggtgcacttgcaggactccactctgaaggaagttaaggatcaggtctcaaacaagcaagcccagatcctagagccgaagcctgaaccttctcttgagattaagcctgagcaggacggtatggagcatgttggcagagatgacccaaaggctcttggtgaagaacccaaacaaaggagaggcagtgcctctgggagtgagcctgctggggacagtgacaggggagggggccccgttgagcattatcacctccatctgtctagttgccacgagtgtctggaacttgagaacagcaccattgagtcagtcaagtttgcgtctgccgagaacattccagaccttccctacgattatagcagcagtttggagagtgttgctgatgagacctcccccgaaagagaagggaggagagtcaacctcacgggaaaggcacccaacatcctcctctatgtgggctccgactcccaggaagccctcggccggttccacgaggtccggtctgtgctggccgactgtgtggacattgacagttatattctctaccacctgctggaggacagtgctctcagagacccgtggacggacaactgtctgctgttggtcattgctaccagggagtccattcccgaagacctgtaccagaagttcatggcctatctttctcagggagggaaggtgttgggcctgtcttcatccttcacctttggtggctttcaggtgacaagcaagggtgcactgcacaagacagtccagaacttggttttctccaaggctgaccagagcgaggtgaagctcagcgtcttgagcagtggctgcaggtaccaggaaggccccgtccggctcagccccggcaggctccagggccacctggagaatgaggacaaggacaggatgattgtgcatgtgccttttggaactcgcgggggagaagctgttctttgccaggtgcacttagaactacctcccagctccaacatagtgcaaactccagaagattttaacttgctcaagtcaagcaattttagaagatacgaagtccttagagagattctgacaacccttggcctcagctgtgacatgaaacaagttcctgccttaactcctctttacttgctgtcagctgcggaggaaatcagggatcctcttatgcagtggcttgggaaacatgtggactccgagggagaaataaaatccggccagctctctcttagatttgtttcatcctacgtgtctgaagtagaaataaccccatcttgtatacctgtggtgaccaacatggaggccttctcatcagaacatttcaacttagagatctatcgccaaaatctgcagaccaagcagttggggaaagtaattttgtttgccgaagtgacccccacaacgatgcgtctcctggatgggctgatgtttcagacaccgcaggaaatgggcttaatagtgatcgcggcccggcagaccgagggcaaaggacggggagggaatgtgtggctgagccctgtgggatgtgctctttctactctgctcatctccattccactgagatcccagctgggacagaggatcccgtttgtccagcatctgatgtccgtggctgtcgtggaagcagtgaggtccattcccgagtatcaggatatcaacttacgagtgaagtggcccaacgatatttattacagtgacctcatgaagatcggcggagttctggttaactcaacactcatgggagaaacattttatatacttattggctgtggatttaatgtgactaacagtaaccctaccatctgcatcaacgacctcatcacagaatacaataaacaacacaaggcagaactgaagcccttaagagccgattatctcatcgccagagtcgtgactgtgctggagaaactgatcaaagagtttcaggacaaagggcccaacagcgtccttcccctttattaccgatactgggtccacagtggtcagcaagtccatctgggcagcgcagagggaccaaaggtgtccatcgttggcctggacgattctggcttcctccaggttcaccaggagggcggcgaggttgtgactgtgcacccggacggcaactccttcgacatgctgagaaacctcatcctccccaaacggcggtaatgccgggcgtccccgagacgcggctgcctgtccgtgcccatg

SEQ ID NO: 32196 - DNA, 1758 bp, Homo Sapiens
cgcccgccggaggggcctggagtgcggcggcggcgggacccggagcaggagcggcggcagcagcgactgggggcggcggcggcgcgttggaggcggccatggcaaagcagtacgactcggtggagtgccctttttgtgatgaagtttccaaatacgagaagctcgccaagatcggccaaggcaccttcggggaggtgttcaaggccaggcaccgcaagaccggccagaaggtggctctgaagaaggtgctgatggaaaacgagaaggaggggttccccattacagccttgcgggagatcaagatccttcagcttctaaaacacgagaatgtggtcaacttgattgagatttgtcgaaccaaagcttccccctataaccgctgcaagggtagtatatacctggtgttcgacttctgcgagcatgaccttgctgggctgttgagcaatgttttggtcaagttcacgctgtctgagatcaagagggtgatgcagatgctgcttaacggcctctactacatccacagaaacaagatcctgcatagggacatgaaggctgctaatgtgcttatcactcgtgatggggtcctgaagctggcagactttgggctggcccgggccttcagcctggccaagaacagccagcccaaccgctacaccaaccgtgtggtgacactctggtaccggcccccggagctgttgctcggggagcgggactacggcccccccattgacctgtggggtgctgggtgcatcatggcagagatgtggacccgcagccccatcatgcaggccaacacggagcagcaccaactcgccctcatcagtcagctctgcggctccatcacccctgaggtgtggccaaacgtggacaactatgagctgtacgaaaagctggagctggtcaagggccagaagcggaaggtgaaggacaggctgaaggcctatgtgcgtgacccatacgcactggacctcatcgacaagctgctggtgctggaccctgcccagcgcatcgacagcgatgacgccctcaaccacgacttcttctggtccgaccccatgccctccgacctcaagggcatgctctccacccacctgacgtccatgttcgagtacttggcaccaccgcgccggaagggcagccagatcacccagcagtccaccaaccagagtcgcaatcccgccaccaccaaccagacggagtttgagcgcgtcttctgagggccggcgcttgccactagggctcttgtgttttttttcttctgctatgtgacttgcatcgtggagacagggcatttgagtttatatctctcatgcatattttatttaatccccaccctgggctctgggagcagcccgctgagtggactggagtggagcattggctgagagaccaggagggcactggagctgtcttgtccttgctggttttctggatggttcccagagggtttccatggggtaggaggatgggctcgcccaccagtgactttttctaagagctcccggcgtggtggaagaggggacaggtccctcacccacccacaatcctattctcgggctgagaaccctgcgtgaggacagggctcgcctcaggaatgggctgtttttggcctaaccctcagaaacactggggctggcacaaactcttggtttcttcaacaggagaattttactgtgtttcttttggttccattgtttggagacattcctgggcacagtttggtccgttagaattaaaagttgaatttttaaaaaaaaa

SEQ ID NO: 32197 - DNA, 1998 bp, Homo Sapiens
cgggcggttcctgtcaagggggcagcaggtccagagctgctggtgctcccgttccccagaccctacccctatccccagtggagccggagtgcggcgcgccccaccaccgccctcaccatggtgctgttggcagcagcggtctgcacaaaagcaggaaaggctattgtttctcgacagtttgtggaaatgacccgaactcggattgagggcttattagcagcttttccaaagctcatgaacactggaaaacaacatacgtttgttgaaacagagagtgtaagatatgtctaccagcctatggagaaactgtatatggtactgatcactaccaaaaacagcaacattttagaagatttggagaccctaaggctcttctcaagagtgatccctgaatattgccgagccttagaagagaatgaaatatctgagcactgttttgatttgatttttgcttttgatgaaattgtcgcactgggataccgggagaatgttaacttggcacagatcagaaccttcacagaaatggattctcatgaggagaaggtgttcagagccgtcagagagactcaagaacgtgaagctaaggctgagatgcgtcgtaaagcaaaggaattacaacaggcccgaagagatgcagagagacagggcaaaaaagcaccaggatttggcggatttggcagctctgcagtatctggaggcagcacagctgccatgatcacagagaccatcattgaaactgataaaccaaaagtggcacctgcaccagccaggccttcaggccccagcaaggctttaaaacttggagccaaaggaaaggaagtagataactttgtggacaaattaaaatctgaaggtgaaaccatcatgtcctctagtatgggcaagcgtacttctgaagcaaccaaaatgcatgctccacccattaatatggaaagtgtacatatgaagattgaagaaaagataacattaacctgtggacgagacggaggattacagaatatggagttgcatggcatgatcatgcttaggatctcagatgacaagtatggccgaattcgtcttcatgtggaaaatgaagataagaaaggggtgcagctacagacccatccaaatgtggataaaaaacttttcactgcagagtctctaattggcctgaagaatccagagaagtcatttccagtcaacagtgacgtaggggtgctaaagtggagactacaaaccacagaggaatcttttattccactgacaattaattgctggccctcggagagtggaaatggctgtgatgtcaacatagaatatgagctacaagaagataatttagaactgaatgatgtggttatcaccatcccactcccgtctggtgtcggcgcgcctgttatcggtgagatcgatggggagtatcgacatgacagtcgacgaaataccctggagtggtgcctgcctgtgattgatgccaaaaataagagtggcagcctggagtttagcattgctgggcagcccaatgacttcttccctgttcaagtttcctttgtctccaagaaaaattactgtaacatacaggttaccaaagtgacccaggtagatggaaacagccccgtcaggttttccacagagaccactttcctagtggataagtatgaaatcctgtaataccaagaagagggagctgaaaaggaaaattttcagattaataaagaagacgccaatgatggctgaagagtttttcccagatttacaagccactggagaccccttttttctgatacaatgcacgattctctgcgcgcaaggaccctcgactcacccccatgtttcagtgtcacagagacattctttgataaggaaatggcacaaacataaagggaaaggctgctaattttctttggcagattgtattggccagcaggaaagcaagctctccagagaatgcccccagttaaatacctcctctacctttacctaagttgctcctttatttttattttataataataa

SEQ ID NO: 32198 - DNA, 3149 bp, Homo Sapiens
ctaaagtttttttctttgaatgacagaactacagcataatgcgtggcttcaacctgctcctcttctggggatgttgtgttatgcacagctgggaagggcacataagacccacacggaaaccaaacacaaagggtaataactgtagagacagtaccttgtgcccagcttatgccacctgcaccaatacggtggacagttactattgcacttgcaaacaaggcttcctgtccagcaatgggcaaaatcacttcaaggatccaggagtgcgatgcaaagatattgatgaatgttctcaaagcccccagccctgtggtcctaactcatcctgcaaaaacctgtcagggaggtacaagtgcagctgtttagatggtttctcttctcccactggaaatgactgggtcccaggaaagccgggcaatttctcctgtactgatatcaatgagtgcctcaccagcagggtctgccctgagcattctgactgtgtcaactccatgggaagctacagttgcagctgtcaagttggattcatctctagaaactccacctgtgaagacgtgaatgaatgtgcagatccaagagcttgcccagagcatgcaacttgtaataacactgttggaaactactcttgtttctgcaacccaggatttgaatccagcagtggccacttgagttgccagggtctcaaagcatcgtgtgaagatattgatgaatgcactgaaatgtgccccatcaattcaacatgcaccaacactcctgggagctacttttgcacctgccaccctggctttgcaccaagcagtggacagttgaatttcacagaccaaggagtggaatgtagagatattgatgagtgccgccaagatccatcaacctgtggtcctaattctatctgcaccaatgccctgggctcctacagctgtggctgcattgtaggctttcatcccaatccagaaggctcccagaaagatggcaacttcagctgccaaagggttctcttcaaatgtaaggaagatgtgatacccgataataagcagatccagcaatgccaagagggaaccgcagtgaaacctgcatatgtctccttttgtgcacaaataaataacatcttcagcgttctggacaaagtgtgtgaaaataaaacgaccgtagtttctctgaagaatacaactgagagctttgtccctgtgcttaaacaaatatccatgtggactaaattcaccaaggaagagacgtcctccctggccacagtcttcctggagagtgtggaaagcatgacactggcatctttttggaaaccctcagcaaatgtcactccggctgttcgggcggaatacttagacattgagagcaaagttatcaacaaagaatgcagtgaagagaatgtgacgttggacttggtagccaagggggataagatgaagatcgggtgttccacaattgaggaatctgaatccacagagaccactggtgtggcttttgtctcctttgtgggcatggaatcggttttaaatgagcgcttcttccaagaccaccaggctcccttgaccacctctgagatcaagctgaagatgaattctcgagtcgttgggggcataatgactggagagaagaaagacggcttctcagatccaatcatctacactctggagaacgttcagccaaagcagaagtttgagaggcccatctgtgtttcctggagcactgatgtgaagggtggaagatggacatcctttggctgtgtgatcctggaagcttctgagacatataccatctgcagctgtaatcagatggcaaatcttgccgttatcatggcgtctggggagctcacgatggacttttccttgtacatcattagccatgtaggcattatcatctccttggtgtgcctcgtcttggccatcgccacctttctgctgtgtcgctccatccgaaatcacaacacctacctccacctgcacctctgcgtgtgtctcctcttggcgaagactctcttcctcgccggtatacacaagactgacaacaagacgggctgcgccatcatcgcgggcttcctgcactaccttttccttgcctgcttcttctggatgctggtggaggctgtgatactgttcttgatggtcagaaacctgaaggtggtgaattacttcagctctcgcaacatcaagatgctgcacatctgtgcctttggttatgggctgccgatgctggtggtggtgatctctgccagtgtgcagccacagggctatggaatgcataatcgctgctggctgaatacagagacagggttcatctggagtttcttggggccagtttgcacagttatagtgatcaactcccttctcctgacctggaccttgtggatcctgaggcagaggctttccagtgttaatgccgaagtctcaacgctaaaagacaccaggttactgaccttcaaggcctttgcccagctcttcatcctgggctgctcctgggtgctgggcatttttcagattggacctgtggcaggtgtcatggcttacctgttcaccatcatcaacagcctgcagggggccttcatcttcctcatccactgtctgctcaacggccaggtacgagaagaatacaagaggtggatcactgggaagacgaagcccagctcccagtcccagacctcaaggatcttgctgtcctccatgccatccgcttccaagacgggttaaagcctttcttgctttcaaatatgctatggagccacagttgaggacagtagtttcctgcaggagcctaccctgaaatctcttctcagcttaacatggaaatgaggatcccaccagccccagaaccctctggggaagaatgttgggggccgtcttcctgtggttgtatgcactgatgagaaatcagacgtttctgctccaaacgaccattttatcttcgtgctctgcaacttcttcaattccagagtttctgagaacagacccaaattcaatggcatgaccaagaacacctggctaccattttgttttctcctgcccttgttggtgcatggttctaagcgtgcccctccagcgcctatcatacgcctgacacagagaacctctcaataaatgatttgtcgcctgtctgactgatttaccctaaaaaaaaaaaaaaaaaaaaaaaaaaaaaaa

SEQ ID NO: 32199 - DNA, 3907 bp, Homo Sapiens
ctactgttgtttttgaggggcgggcagccgcgccgccgcggcacttttttaattttttcgggtgccgcagcagcgacccctcggcgccgatgtccctgatccctggagcgacgacggccgctgcctaagctgggaagaggaatgccagctcctgagcaggcctcattggtggaggaggggcaaccacagacccgccaggaagctgcctccactggcccaggcatggaacccgagaccacagccaccactattctagcatccgtgaaggagcaggagcttcagtttcagcgactcacccgagaactggaagtggaaaggcagattgttgccagtcagctagaaagatgtaggcttggagcagaatcaccaagcatcgccagcaccagctcaactgagaagtcatttccttggagatcaacagacgtgccaaatactggtgtaagcaaacctagagtttctgacgctgtccagcccaacaactatctcatcaggacagagccagaacaaggaaccctctattcaccagaacagacatctctccatgaaagtgagggatcattgggtaactcaagaagttcaacacaaatgaattcttattccgacagtggataccaggaagcagggagtttccacaacagccagaacgtgagcaaggcagacaacagacagcagcattcattcataggatcaactaacaaccatgtggtgaggaattcaagagctgaaggacaaacactggttcagccatcagtagccaatcgggccatgagaagagttagttcagttccatctagagcacagtctccttcttatgttatcagcacaggcgtgtctccttcaagggggtctctgagaacttctctgggtagtggatttggctctccgtcagtgaccgacccccgacctctgaaccccagtgcatattcctccaccacattacctgctgcacgggcagcctctccgtactcacagagacccgcctccccaacagctatacggcggattgggtcagtcacctcccggcagacctccaatcccaacggaccaacccctcaataccaaaccaccgccagagtggggtccccactgaccctgacggatgcacagactcgagtagcttccccatcccaaggccaggtggggtcgtcgtcccccaaacgctcagggatgaccgccgtaccacagcatctgggaccttcactgcaaaggactgttcatgacatggagcaattcggacagcagcagtatgacatttatgagaggatggttccacccaggccagacagcctgacaggcttacggagttcctatgctagtcagcatagtcagcttgggcaagaccttcgttctgccgtgtctcccgacttgcacattactcctatatatgaggggaggacctattacagcccagtgtaccgcagcccaaaccatggaactgtggagctccaaggatcgcagacggcgttgtatcgcacaggtgtatcaggtattggaaatctacaaaggacatccagccaacgaagtacccttacataccaaagaaataattatgctctgaacacaacagctacctacgcggagccctacaggcctatacaataccgagtgcaagagtgcaattataacaggcttcagcatgcagtgccggctgatgatggcaccacaagatccccatcaatagacagcattcagaaggaccccagggagtttgcctggcgtgatcctgagttgcctgaggtcattcacatgcttgagcaccagttcccatctgttcaggcaaatgcagcggcctacctgcagcacctgtgctttggtgacaacaaagtgaagatggaggtgtgtaggttagggggaatcaagcatctggttgaccttctggaccacagagttttggaagttcagaagaatgcttgtggtgcccttcgaaacctcgtttttggcaagtctacagatgaaaataaaatagcaatgaagaatgttggtgggatacctgccttgttgcgactgttgagaaaatctattgatgcagaagtaagggagcttgttacaggagttctttggaatttatcctcatgtgatgctgtaaaaatgacaatcattcgagatgctctctcaaccttaacaaacactgtgattgttccacattctggatggaataactcttcttttgatgatgatcataaaattaaatttcagacttcactagttctgcgtaacacgacaggttgcctaaggaacctcacgtccgcgggggaagaagctcggaagcaaatgcggtcctgcgaggggctggtagactcactgttgtatgtgatccacacgtgtgtgaacacatccgattacgacagcaagacggtggagaactgcgtgtgcaccctgaggaacctgtcctatcggctggagctggaggtgccccaggcccggttactgggactgaacgaattggatgacttactaggaaaagagtctcccagcaaagactctgagccaagttgctgggggaagaagaagaaaaagaaaaagaggactccgcaagaagatcaatgggatggagttggtcctatcccaggactgtcgaagtcccccaaaggggttgagatgctgtggcacccatcggtggtaaaaccatatctgactcttctagcagaaagttccaacccagccaccttggaaggctctgcagggtctctccagaacctctctgctagcaactggaagtttgcagcatatatccggggcggccgtccgaaaagaaaagggctccccatccttgtggagcttctgagaatggataacgatagagttgtttcttccggtgcaacagccttgaggaatatggcactagatgttcgcaacaaggagctcataggcaaatacgccatgcgagacctggtcaaccggctccccggcggcaatggccccagtgtcttgtctgatgagaccatggcagccatctgctgtgctctgcacgaggtcaccagcaaaaacatggagaacgcaaaagccctggccgactcaggaggcatagagaagctggtgaacataaccaaaggcaggggcgacagatcatctctgaaagtggtgaaggcagcagcccaggtcttgaatacattatggcaatatcgggacctccggagcatttataaaaaggatgggtggaatcagaaccattttattacacctgtgtcgacattggagcgagaccgattcaaatcacatccttccttgtctaccaccaaccaacagatgtcacccatcattcagtcagtcggcagcacctcttcctcaccagcactgttaggaatcagagaccctcgctctgaatacgataggacccagccacctatgcagtattacaatagccaaggggatgccacacataaaggcctgtaccctggctccagcaaaccttcaccaatttacatcagttcctattcctcaccagcaagagaacaaaatagacggctacagcatcaacagctgtattatagtcaagatgactccaacagaaagaactttgatgcatacagattgtatttgcagtctcctcatagctatgaagatccttattttgatgaccgagttcactttccagcttctactgattactcaacacagtatggactgaaatcgaccacaaattatgtagacttttattccactaaacgaccttcttatagagcagaacagtacccagggtccccagactcatgggtgtacgatcaagatgcccaacagaggaactctttctttctaaccttgttcagattgaggtgaaaagtccatcttgctgatttcatgattgaaatgtgaaagtgaagtggaaggaatgaatgaagtgtgtttttttttcctttttgaggaattatcaggggaattcgatatcaagcttatcgataccgtcgac

SEQ ID NO: 32200 - DNA, 2313 bp, Homo Sapiens
gaattccttgtactttttttcccttctcagttctgcacttaactcgtctaaaaaaattaaaaaagaatttaagaaaccacaaagctaagctgggtgcggtggctcacgcctgtaatcctagcactttgggaagccaaggcattcggattgcccaagctcaggagttcgagaccagcctgggcaacatgttgaaaccccatttctactaaaaatacaataaattagctgggtgttgtggcatgtgcgcctgtaatcccagctactctggaggctgaggcgcgataattgcttgaacccgggaggcagaggttgcagtgagccgaaatcataccactgcactccagcctgggcgacagagtgagtgagactctgtctcaaaacaaaacaaaacaaacaaacaaaaaaaccggaaaccaacaaaactttttgaggaacaaagggaaccaggtattttattaattctcatacctccagagtgttaggcacaaaataaacattcaaccaagacctgttgcactgagcagttcatatataacaggagtgacccaagttgaaacgtagaatcagccctctcataccactttttgccaggtgatcataggcaagttacttagcatctatgtttccttattattaaaatggtcataattacaatgcctaagataagggggttgctgtgaagattattaaatcctcagtaaactttggctattgttactcctatgattatcatcaatatcatcaattaccttatctgttcaatactggtggcacaggtccaccagctagatgtctaatcccttatgtgtctattagtggtacaagtggagtttgagtgggatttttttttttttttttaagaccagttccaaatcatcaaggatgataccactagtagcagcttgtcttgtctgtacagtggtaagtcctggccttgcctttgtggcaaatacaacccccttgaattgcttggcccttctcagcattgcctaatattagggaggactcctgtaaagctcactggttagaagatcaagacacttgggcctggttctgcccctgggggccattgggtaattccttssagtctccaggcctcacttgccctctgaacaagaaagaggcctgttctggtcatccctccagcctgtccagccctggcactctgtgagtcggtttaggcagcagccccggaacagatgaggcaggcagggttgggacgtttggtcaggacagcccaccgcaaaaagaggaggaaagaaatgaaagacagagacagctttggctatgggagaaggaggaggccgggggaaggaggagacaggaggaggagggaccacggggtggaggggagatagacccagcccagagctctgagtggtttcctgttgcctgtctctaaacccctccacattcccgcggtccttcagactgcccggagagcgcgctctgcctgccgcctgcctgcctgccactgaggtatgtgtgacccccgcccagcctttcccttctatagttgcaccaaccccgacacccccgttcacgccgtcagctcgtgtgcaagggagggaagctctgctgaggatgcgcctctcctcccggctccatcacggctccccttaagagcatggccctcggtcctgtctgcctgttgcttttcagaaggtggactcactgtgtaactttgtcttcccttacaggtttacaggaaaataatctcactatgttcttcgggggagcattttctcactctctgtttttctctgtgtctgtctctggtttcagaggctgcctgcctgtcctctttgctccctttgcaaatgtggcagcctcctcctttcctgggaatctgatcccatcacagctgccacagggacctggccagcaaccggagtctgtcctccagatctcggtcaggggttctgttttccaaaaagggactttgcagaacaatcagttgatctctgaaagggaaagggggaggcttcaccattaatccacacctctgggaagcttctgttttcctctaattctcctcactcccaaacaccaccttccgtccccccaatacacaaatttcagcaccattctgcctgaaatggcaccatcacaacctcagtcttgggttaggtgttgttcctgtcctgagttccttgggatggtaaacacaggcagtagcccttagtttatctagatctgaaaacccagacatcagatatcgtcaaccaagacatgggtgtaatgggaggtggagtgtgctgggggagatattctcagaagggggaaagggggaagggaagagggagagaattc

SEQ ID NO: 32201 - DNA, 6743 bp, Homo Sapiens
tctagactctaatgggtatagcctaaactgagataagtgcagttttcctttttactcctaaagtgtaagtaaggtaagattgtttcatgggaagtcaatagcttcctgaaacaatgctttgtcttctcatgctgttaaccagtagtttattagaatgatttaaagccttttgaatataactgctttgctgctttttaagatcaagccctcttgttggatgttaacatttagtactgagcatttgagttgcatctgtcctaataatagattgtattttgaagtcatttttgttactgaccttttgatttttattttttattattattattttttattttgactgagtttcactctgtcacccaggctggagtgcagtggtgcagtcttggctcactgcaacctctccctcctgggttcaagcaattctcccacctcagcctacctagtagctgggattacaggcacccaccaccacgcctggctaatttttgtatttttagtagagatgaggtttcaccacgttggccaggctggtctcgaactcctgacctcaggtgatccacctgcctcggcctcccaaagtgctgggattacaggcatgagccactgtgcccagccctttttgatttttaattaaagatcttacaatggtcgggtgcggtggctcttgcctgtaatccaagcactttgtggaggctgaggcgggcggatcacctgaggtcaagagtttgagaccaccctgaccaacgtggagaaacctcatctctactaaaaatgcaaaattagtcgggtgtgtggcgcatgcatgtaatcccagctactctgaggcaggagaatcgcttggacccgggaggcggaggttgcggtgagctcagatggcgccattgtactcctgtctgggcaacaagagcaaaacacagtcttaaaaaaaaaaaaaaaattcttacacttacatgcgtagaggtcaatttttaactggattggtggcaaaagaagagctggaaatgatgtttaatgatactatgatgcttacactgagccgtcttgtttgggtggtctaaggtagcagtgaatctaaatagtcattgccagttgaaaaactattaatgaaccatctccctccacattcccctttctttaaaacatttaaatattcttaacttagttgcacactattgatgtgataaaaacttataagccttttaagtttagagttgtattatttggtaggatgatgattgtgatttaatctgctgatcattagtttacttttgttttctgagtcagatgctcacccagttttaccatgatttttggaaagcttggctagaaataaaatagaacatttgcttctctgtccccaagcattatgttatttcttatttctctttataattccctctctgtccaggtatacctggtttaagacttctcatttgtaacctcagtgttcacatttgaaacaagaaaagtgcattaacatgagaatcattctggtgcaaagattctcaggatttgtaatatccttaagaatcacccaaggagcttattgaaaatgcacattcctggatttactctcaagtatggtaccccagggtctgcatacttcacaagcgtccctggtggttttagggcaagtggtgaaaaaagtacacttggagaaactattctagagttgtagactagactagggaataaagaaacataaatgtccttcattcctgagcactaaccccgccattatgtgaatgcatattaatggatacttaatcacattgaattacagtatgcagattttattaagaacatgtctacctcttattctgatgctgtgaatgtctaccacaatgagaaagtaattttaaaatcatttctatttgtgtaagagaaacccgagtttgaggaccttattttattctacgctgtttagatttgtatcctctggtaatttagtggcattagtcacctgctaattaatctttttcctttcccctgtgttccatatagagaaaagtggtaaagaatctacctcactgggaatgtcatcattaccaacttcagatgggtttaaccatcccgcccgttcttcaggacagagtcctgatgttggtaatcctatgagtcttgctcgctctgtctctgcttcagtctgccctatcaagcccagtgactcagatcgcattgaacctaaagctgtgaaggctttgaaggcttcagctgaattccagctaaactctgaaaagaaagaacatctttctttacaagatctttctgatcatgcttcctcagcagaccatgctccaacagaccagagtccagctatgcctatgcagaattcatccgaagaaataactgttgcaggtaatctggagaaatctgctgaaagaagcacccagggcctcaaatttcatctccatacaagacaggaagctagtttatctgtcacatctactaggatgcatgaaccacagatgtttctaggtgaaaaggattggcatccagaaaatcagaacctgagtcaagtgagtgaccctcagcagcacgaagaaccagggaatgaacagtatgaggttgcacaacaaaaagcttcacatgaccaagaatatctttgtaacataggggaccttgagcttcctgaagaaaggcaacagaatcaacacaaaattgttgatttggaagctacgatgaaaggaaatgggctcccacagaatgtggatcctccaagtgcgaagaaaagtattccatcttcagaatgcagtggctgctcaaattcagaaacatttatggaaatcgatacagctcaacagtccctagttactttgcttaattcaacaggcaggcagaatgccaatgtcaagaacattggtgcattggatctcactttagataatcccttgatggaagtagaaacatcaaaatgtaacccttcatctgaaattttgaatgattccatttccactcaggatttacagcccccagaaactaatgttgaaatacctggaacaaataaagaatatggccattactcctctccaagtctctgtggcagttgtcagccttctgtggagtcagcagaagaatcttgcccgtctataacggcagccttgaaagaacttcatgaacttttggttgttagcagtaaaccagcttcagaaaatacatctgaagaagtaatctgtcaatcagaaaccatagctgagggccaaaccagtattaaagacctttctgaaagatggacccaaaatgagcatcttacccagaatgaacagtgtccacaagtctcctttcatcaggccatatctgtatcagtggagacagaaaaattaacaggtacttcatctgacactggaagagaagctgtagaaaatgtaaacttcaggagtctaggtgatggcctgtcaaccgataaggaaggtgtccccaaatctagggaatccataaataagaaccgttctgtcactgtaacctcagctaaaacatccaatcagttacactgcaccttaggtgtagaaatttcacccaaacttttagcaggtgaggaggatgcactcaatcagacttctgagcaaactaagtctttgtcatccaatttcatattggttaaagacttaggtcagggcatacagaattcagtaacagacaggcctgaaaccagagaaaatgtctgtcctgatgcttcgaggccattacttgaatatgaaccacctaccagccatccatcatcaagtcctgccattcttccaccattgatttttcctgccacagatattgaccgcattctccgtgctggctttactttgcaggaagctcttggagctttgcatcgagttggtgggaatgcagaccttgcacttcttgttttgctcgcaaaaaacatcgtagttcctacatgactgtgggaaagtgggctagaccgttctccattccctttaaacaaaagaaagctctctctatatacacgcacacatacacactcaccacatatacagtatatatagaaacctgcaagcagaatgttgagccagattttttttaaagatttttttcggccaaagtaatttatgatcttttgtctgatgaatttgtctatcctacttgttaaaatttaggcctttttaaatgtattggcagtatgtgcatacagaagctttttattctcattaagatgtatcctggaataaaatggatggttttgtgtgtagcatactgttttagaatgagagtaaatgctttgaaaagcagaagccatgagaaatcccactacccatccagctaaaaacagatgaactctccacactgtgactgtgtgtctgtgctgatggcaaggtatggtttgctggctcagttgtcaatttagaaacttttgaccacataatttggtgtttggaattctacccagtgctctgtgtatcatgattcattaattataacaggaaattggagaataattgaatatcttatcgtagagtggtatgtttttatttgtgtgcttaggatttgacattttaatagggcgagcaggagggtttaaatcttgggctactttgtgcatcacaggctgctgcatggattgccatgaatccttattacattggatgggatattgtgggggagttacaatgcaagtgaaacatggtgctacccagattcttaaaagaacagaacaaccataattccatttgcagatgtcaagaactgtgagggaaaaataatggcctaaacactggaatttgctagagtttgggtttgctagcatctcactgataacacctcaacccttaatgactaatggtggaattaagttcaggaatggattcattgccagcagcttatttcctttctagactcttctgccaggaagttcttcaaacgctcagtgtgagctgtgatctgagtgaaatactaagtgtgataaccttgtcactggttaatcttggtgcttggaacggtcagtctatttggagagtgtcctttgtggcagtggaaatagtaattacagtttctgacttaagtggccttggtagagttttccatccttttctttcctcaggagtttcttttttaagcaaaattcatcttatttgtgtttaccatgtcaagttagagtggggcataatatatagatgtatttattgtggcctttttttatataaggactagcccttggaaatcattgtcctgtgggccccactgtgcaataatcctactggataggttttagataattctttcctggcaaactgctcttttgggtacctagcaggaatctgaagtcttggttttattgaaaagaattttgagattcataatttctgattctagattatagtttgtaacatgtttgaaacagaagcttcgaaagagtgatttctcaacttagtgttaaatgattttgtctgaagtctgactctttgtaagcttgtttgtttcatcaaattttaagtcattgagcacaatcaaaatggaggctcatatctcaggagtttttgaaattttaatttaggggcacttagagacatttttttctaccccatccaacttctttctttccttttgctatgatgtttgtatgtatgttataagactttagtgatgggatggcgtgtcacgtagattcatcatgatcctttatgtagttaggaaatggttgacagaaggaattgtagtttactgcttttcagagggcgtgaagaacaacaggtcagccaggttgtctttaagatgttcttttagacagctgcacattgtagaccctttcacctgccctacaccaaagatgtacgatgcactaggaaactgctcataggatttctgtcagctgacttaaagctgtgattgtaattaaatagttggtgctatgattgatgcaaaatctagtagcaatgcaatgggaccctgtatttgctttatgggtggtggtttgggaatgtattctaagcttataaatctttggaaccacggggtgggaagggtgggggaacttactgatgacaatagactccctcctaaagggccttccatgtaagcagaacgaaccttggcacacaattcagtgtggatatttgggaaacagttccaagtggaatatataatatcagtcgggaaaagatttcattaggatagctttttgtgtatgtatatgtatatttatttttaggaatagatctatagttgtacatgaattcctgttaggaatactctgaatgagcttaacccacttgccaaatatccttgtcccttccatcattttatttttgagatggggtcttgcagtgttgcccaggctggactcaaactctggggcttaatcatccttctgagtagctgggactacataaaggccaaagtataattgcttttgatttttaaaatcttcttgcccatcatttttataaaaataaagctgtttgtccaacacggtgaaacctcatctctactaaaaatacaaaaaattagctgggcatggtggcacacgcctgtaatcccagctacttgggagactgaggcaggagaattgcttgaacctgggagatgggggttgcagtgagcctagatcacgccactgcactccagtgtgggcggcagagtgagactctgtctcacccaaaaaaaaaaaaaaaaagctattgacactgttaatattttggatgacttaaatttagcagctctagaatgcaaagggtatattaaggagcattacaatagtgaaccttcatcgtcagcttttattcaattaagagctc

SEQ ID NO: 32202 - DNA, 2365 bp, Homo Sapiens
gaattcaagttcagtgcctaccgaagacaaaggcgccccgagggagtggcggtgcgaccccagggcgtgggcccggccgcggagcccacactgcccggctgacccggtggtctcggaccatgtctcccgccccaagaccctcccgttgtctcctgctccccctgctcacgctcggcaccgcgctcgcctccctcggctcggcccaaagcagcagcttcagccccgaagcctggctacagcaatatggctacctgcctcccggggacctacgtacccacacacagcgctcaccccagtcactctcagcggccatcgctgccatgcagaagttttacggcttgcaagtaacaggcaaagctgatgcagacaccatgaaggccatgaggcgcccccgatgtggtgttccagacaagtttggggctgagatcaaggccaatgttcgaaggaagcgctacgccatccagggtctcaaatggcaacataatgaaatcactttctgcatccagaattacacccccaaggtgggcgagtatgccacatacgaggccattcgcaaggcgttccgcgtgtgggagagtgccacaccactgcgcttccgcgaggtgccctatgcctacatccgtgagggccatgagaagcaggccgacatcatgatcttctttgccgagggcttccatggcgacagcacgcccttcgatggtgagggcggcttcctggcccatgcctacttcccaggccccaacattggaggagacacccactttgactctgccgagccttggactgtcaggaatgaggatctgaatggaaatgacatcttcctggtggctgtgcacgagctgggccatgccctggggctcgagcattccagtgacccctcggccatcatggcacccttttaccagtggatggacacggagaattttgtgctgcccgatgatgaccgccggggcatccagcaactttatgggggtgagtcagggttccccaccaagatgccccctcaacccaggactacctcccggccttctgttcctgataaacccaaaaaccccacctatgggcccaacatctgtgacgggaactttgacaccgtggccatgctccgaggggagatgtttgtcttcaaggagcgctggttctggcgggtgaggaataaccaagtgatggatggatacccaatgcccattggccagttctggcggggcctgcctgcgtccatcaacactgcctacgagaggaaggatggcaaattcgtcttcttcaaaggagacaagcattgggtgtttgatgaggcgtccctggaacctggctaccccaagcacattaaggagctgggccgagggctgcctaccgacaagattgatgctgctctcttctggatgcccaatggaaagacctacttcttccgtggaaacaagtactaccgtttcaacgaagagctcagggcagtggatagcgagtaccccaagaacatcaaagtctgggaagggatccctgagtctcccagagggtcattcatgggcagcgatgaagtcttcacttacttctacaaggggaacaaatactggaaattcaacaaccagaagctgaaggtagaaccgggctaccccaagtcagccctgagggactggatgggctgcccatcgggaggccggcccgatgaggggactgaggaggagacggaggtgatcatcattgaggtggacgaggagggcggcggggcggtgagcgctgctgccgtggtgctgcccgtgctgctgctgctcctggtgctggcggtgggactagcagtcttcttcttcagacgccatgggacccccaggcgactgctctactgccagcgttccctgctggacaaggtctgacgcccaccgccggcccgcccactcctaccacaaggactttgcctctgaagaccagtgtcagcaaggtggtggtgggtgggctgctcccatccgtccggagccccctccccgcagcctccttgcttctctcagtcccctggctggcctccttcaccctcaccgcctgtagcttgtgtctgtccagccccatctgaatgtgttgggggctctgcacttgaaggcaggaccctcagacctcgctggtaaaggtcaaatggggtcatctgctccttttccatcccctgacataccttaacctctgaactctgacctcaggaggctctgggcactccagccctgaaagccccaagtgtacccagttggcagcctcccgtcactctgactaaaaagaatcttcagagtgcatatttggaggtggaaagattgttcagttaccctaaagactttgaaagaaagaaagaaagaaagaaaaaaaaaaaaaaaaaaaaaaaaaaaaa

SEQ ID NO: 32203 - DNA, 7247 bp, Homo Sapiens; identical to SEQ ID NO: 29401

SEQ ID NO: 32204 - DNA, 3422 bp, Homo Sapiens
ccacgcgtccggcagcctgtatgagcaagtgccgaggcctacggtgagcgccggagccggagaggcagctatatgtctttggctttcaagatcttctttccacaaaccctccgtgcactcagccgaaaagaactgtgcctattccgaaaacatcactggcgtgatgtaagacaattcagccagtggtcagaaacagatctgcttcatggacatcccctcttcctgagaagaaagcctgttctatcattccagggaagccatctaagatcacgtgccacctaccttgttttcttgccagggttgcatgtgggactctgcagtggcccctgtgagatggctgagcaacggttctgtgtggactatgccaagcgtggcacagctggctgcaaaaaatgcaaggaaaagattgtgaagggcgtatgccgaattggcaaagtggtgcccaatcccttctcagagtctgggggtgatatgaaagagtggtaccacattaaatgcatgtttgagaaactagagcgggcccgggccaccacaaaaaaaatcgaggacctcacagagctggaaggctgggaagagctggaagataatgagaaggaacagataacccagcacattgcagatctgtcttctaaggcagcaggtacaccaaagaagaaagctgttgtccaggctaagttgacaaccactggccaggtgacttctccagtgaaaggcgcctcatttgtcaccagtaccaatccccggaaattttctggcttttcagccaagcccaacaactctggggaagccccctcgagccccacccctaagagaagtctgtcttcaagcaaatgtgaccccaggcataaggactgtctgctacgggagtttcgaaagttatgcgccatggtggccgataatcctagctacaacacgaagacccagatcatccaggacttccttcggaaaggctcagcaggagatggtttccacggtgatgtgtacctaacagtgaagctgctgctgccaggagtcattaagactgtttacaacttgaacgataagcagattgtgaagcttttcagtcgcatttttaactgcaacccagatgatatggcacgggacctagagcagggtgacgtgtcagagacaatcagagtcttctttgagcagagcaagtctttccccccagctgccaagagcctccttaccatccaggaagtggatgagttccttctgcggctgtccaagctcaccaaggaggatgagcagcaacaggccctacaggacattgcctccaggtgtacagccaatgaccttaaatgcatcatcaggttgatcaaacatgatctgaagatgaactcaggtgcaaaacatgtgttagacgcccttgaccccaatgcctatgaagccttcaaagcctcgcgcaacctgcaggatgtggtggagcgggtccttcacaacgcgcaggaggtggagaaggagccgggccagagacgagctctgagcgtccaggcctcgctgatgacacctgtgcagcccatgttggcggaggcctgcaagtccgttgagtatgcaatgaagaaatgtcccaatggcatgttctctgagatcaagtacgatggagagcgagtccaggtgcataagaatggagaccacttcagctacttcagccgcagtctcaagcccgtccttcctcacaaggtggcccactttaaggactacattccccaggcttttcctgggggccacagcatgatcttggattctgaagtgcttctgattgacaacaagacaggcaaaccactgccctttgggactctgggagtacacaagaaagcagccttccaggatgctaatgtctgcctgtttgtttttgattgtatctactttaatgatgtcagcttgatggacagacctctgtgtgagcggcggaagtttcttcatgacaacatggttgaaattccaaaccggatcatgttctcagaaatgaagcgagtcacaaaagctttggacttggctgacatgataacccgggtgatccaggagggattggaggggctggtgctgaaggatgtgaagggtacatatgagcctgggaagcggcactggctgaaagtgaagaaagactatttgaacgagggggccatggccgacacagctgacctggtggtccttggagccttctatgggcaagggagcaaaggcggcatgatgtcaatcttcctcatgggctgctacgaccctggcagccagaagtggtgcacagtcaccaagtgtgcaggaggccatgatgatgccacgcttgcccgcctgcagaatgaactagacatggtgaagatcagcaaggaccccagcaaaatacccagctggttgaaggtcaacaagatctactatcctgacttcatcgtcccagacccaaagaaagctgccgtgtgggagatcacaggggctgaattctccaaatcggaggctcatacagctgacgggatctccatccgattccctcgctgcacccgaatccgagatgataaggactggaaatctgccactaaccttccccaactcaaggaactgtaccagttgtccaaggagaaggcagacttcactgtagtggctggagatgaggggagctccactacagggggtagcagtgaagagaataagggtccctcagggtctgctgtgtcccgcaaggcccccagcaagccctcagccagtaccaagaaagcagaagggaagctgagtaactccaacagcaaagatggcaacatgcagactgcaaagccttccgctatgaaggtgggggagaagctggccacaaagtcttctccagtgaaagtaggggagaagcggaaagctgctgatgagacgctgtgccaaacaaaggtattgctggacatcttcactggggtgcggctttacttgccaccctccacaccagacttcagccgtctcagacgctactttgtggcattcgacggggacctggtacaggaatttgatatgacttcagccacgcacgtgctgggtagcagggacaagaaccctgcggcccagcaggtctccccagagtggatttgggcatgtatccggaaacggagactggtagctccctgctaggtttgctgtcttccctctccctcaggccatactctcctttaccatactattggactggactcaggctggaggcagatagacacagtatagggggaatgggcttgcttctcccaaacccaccagttctccactgtctcttctggaccaggaattagttgctgtgggtgccacagctgaagtcagtttgtcttgctggtttaaatagatctttcagagctgggtgctgggtttgccatctttttgttttctttgaaaagcagcttagttaccctttttataaataaaatatcttgcagttaaaaaaaaaaaaaaaaaaaaaa

SEQ ID NO: 32205 - DNA, 6034 bp, Homo Sapiens
ccacgcgtccggagctggaggaggcggcgggcgcgagacccggaatgcgcagggcccccgcctcgccccccccagcccgggccgcggcccccgccttccccgcagtcgtcccgcactcggtgcccgccccccgaggccggcggctgctcccactcggggccgttgctgcttgtgccgtgagcgccgcccagccattgtccccgtcgctccgtcagccgcgccggaccgcgcaccaggaggcgagagcgcgcatggggagcctctgttgatgccgccgccgcgccgccctccgaggctgcgtcccgggaagcccggctccccgagcgctccggcctggcccggtgccccggacctgagtgcgtccccatggaggcgcccgggctggcccaggcggccgcggcggagagcgactcccgcaaggtggcggaggagacccccgacggggcgcccgcgctctgccccagccctgaggcgctgtcgccggagccgcctgtgtacagcctgcaggactttgacacgctggccaccgtgggcactgggacgttcgggcgggtgcacctggtgaaggagaagacagccaagcatttcttcgccctcaaggtgatgagcattcctgacgtcatccgcctaaagcaggagcaacacgtacacaatgagaagtctgtcctgaaggaagtcagccacccgttcctcatcaggctgttctggacgtggcatgacgagcgcttcctctacatgctcatggagtacgtgccgggcggcgagctcttcagctacctgcgcaaccgggggcgcttctccagcaccacggggctcttctactctgcagagatcatctgtgccatcgagtacctgcactccaaagagatcgtctacagggacttgaagccagagaacatcctgctggatagggatggccacattaagctcacggactttgggttcgccaagaagctggtagacaggacttggaccctctgtggaacacccgagtacctagcccccgaagtcattcagagcaagggccacggaagggccgtggactggtgggccctcggcatcctgatattcgagatgctttcggggtttcctccgttttttgatgacaacccgtttggcatttatcagaaaattcttgcaggcaaaatagatttccccagacatttggatttccatgtaaaagacctcattaagaaactgctcgtggttgacagaacaaggcgattaggaaacatgaagaacggggcgaatgatgtgaagcatcatcggtggttccgctccgtggactgggaagctgttccgcagagaaaactgaagcctcccatcgtgcccaagatagctggtgacggcgacacttccaacttcgaaacttaccctgagaatgactgggacacagccgcgcccgtgccgcagaaggatttagaaatcttcaagaatttctgaggacaggagctcacatctggaagaaacaggaagattggaatctgcctggaacaaagaactgcacctaagcagaccagaagcaaaatgtcttcttcacggcataaggacatctccacttttctctgtacctgtgtgtatagaaatagattagagcacagttgaaattcatggaactggcattatttaagcaactggaattccacactgtaggaaggttttgaaaattgtttggttgtagattttatcttatcctttagtgttgtgttcctactgtgatgtcttggtttttgtcatagacttaagtttataagtttgaactggacttgttcgattataaccacaaattgtgtgtgtgtgtgtgtgtgtgtgtgtgtgtgtgtgtatgcctgtgtgtatatatagaagtcattatggcagatgcacagaaattgtgcagtgatgtaaatgttcatactttacagagcctataatttttatttttcaatttgttttttcaaaaatctcttctcggggacaacatctgaagggtatgttgcatgcattaaaaaaaatcatctcacatgcattttatagttttggggaagaaaatatcatggggaggtctaccttcagtatctttagttcttcttaccgggtaacttgagactttaaaagaagaaacaaagaggggaagatatgggagcgaatttattccaagaatctacaatgacattgaagttgttggaggaatgtactgtatttaaaaaaaccttctgtgacacattcaaaaatttcatctgagctggatgcagtggcttgttcctatagtcccagcactttgggaggctgaggtgggtggattgcttgagcccaggagttggagaccagtctgggaaacgtggtgagacctcatctctacaaaatacaaaaaaattagccgggcatggtggcacgtgagttaggtctcagctactcaggaggctgagatgagaggatcacttgagcctggggaggtccaggccgcagtgatccgagatcacaccactgcattccagcctgggtgacagagtgagaccctgtccaaaaaaaaaaaaaaaaaaaagaaggcaatggctttgtgcttttgaagatggattgaagagaacgtccaccttaaggctttaaaagacagtgaagctgggtgcggtggtgcactcctgtaaccctgggactttgggaagctgaggcaggaagattgagcctaggagttcgagactgacctgggcagcatagcgagaccccatctctatataaaaaaaaagatgttaaaacagtgaaattacagaaacagaacatagccaccctttttcatcagtgaccttttcttcacgtggaggtcaactcagtaggtgagaataattagtaggttcagcagaataaactctttacaattaataactcagtggaaaatgatgttcagatggtgaaatgtggaaatgttttagacaactctattttcagcctgtgcttctcactcaccatcctgttgggattaacagttgagggccatcgctgcctaaacatttagcgtgcggtttcccatcagttttaccgtgaatgtgaaaaggtgaaactggtgctgacttcggcagcaggtatactaaaattggaatgacacagaggagattagcatggccccctgcgcgaggaagatctgcagattcatgcagcattccatatttttttaagaaaaggttacactgtgcaccgacatgtggagctagaaggaaaagcttttaagtctcatgtttgctgactataaaaataaatcatagtaataatattgaacattctactttaaaaattattaataaaaccataaatgaaacacttgagcacactttaaaaagtacataaatccatgagtccatatgcctatttttaggttgtctgttttattatccaggatttcatactcagatgagaattagcatcaggaaagcctgaaatgccttaattgtgaactgatatgcaggaaaatgaaatatgcaagcacattggtgaccttgttctttacagacgtcgtgatcagcctccagccatacagaacaaatgagaaattagaagcgattccaagaacgtgtgatggtgtgaacccactttggaccatcacacacatttcagcatttgaagtgacacaagctacctggtaactgcccatggcggggtcatagtttaaatggcccaatgtcatgtagaggttaatttaatcaaaatgagctataaacatggagcaatcactgtataattttaaaatagtttacctggccaggcatggtcgtcacgcctgtaatcccagcactttgggaggccgaggcaggtggatcacctgaggtcaggagttcgagaccagcctggccaacatggcaaaacccccgtctctactaaaatacaaaaattaggtgtggtggcgggcacctgtaatcctggctactcgggaggctgaggcaggagaatcgcttgaacccgggaggcagaggctgcagtgagccgagatcgtgccactgcactccagcctgggccacagagcaagactccgtctcaaaacataaaaataaaaaaaatacaaatagctgacccgggtgggcattccaaaatgtccgcatggacgatcacgaaacaatcacggtgcgaaatgtccgcatggatgatcacgaaacaatcacggtgcggaatgtccgtatggatgatcatgacaaacaatcactgcgcaaaatgtggaggaaaattcattaccataatcacaacatttgtatcagaaaaacattacaaatttactttgcttcatgtaattttacgagttggcaatattttcttaaattggaatactctaagagaataggacatggatatgttacaagaagaagtgtattggggcaagtcttgtttttctgaagggaaatgccaccggcctgctttcataggcattgataaagccaggaaggaaataaagtcacaaccaaatagtatacactgtctctactgaattcttctaattccttcgcaacagaagtctaaatcctgcttagcctaaacatatctatagccagcgatgggcaaattatatttgctgtcagcatgatagaataagaagcagaaaccccccagcagtggggtaagattgcgcgcttcatcccctcaaaatgcagctcagccccactccctctccatgcccatcaaacaactgcacaatcacttgttactgaatttcccattcagcgttttgtttctttctgtccatacttaaagaccaaatcatttgtttgctttgaagaaaaagcaaaaacaagaacaaaaacaccaaatcatttgaaatcactgtccattaaaaaaaatcaccagtggaactaaacagttgagtggtttgggatgtgttcgccatttctgtgtttgacctacatggcctgtaattctttggaccattgtaactgtgaactatggcttaatactgttaaagaccccaaggctccactctgtagccaggtgcacctcaggctgcacaaataccccaccagaatgtcacaatcattcattgctccagctactgagtgaacagggtgcaagacagcactggcttgggttgtatttttgcagccagttaactttgcatcaggtctacacagtccttgcagcctttgatttctccagttgtagagatttgaaatggggtgcccgggttgctctcgtttttccttcaagctacctagcatgcattttacacacattggaggagtcgtatgcactgtttttctgttgctgatggaggcaagcaggccttctaattagtctaagttaaacggatgggattcacttaagaaaagcaagaagaaaagcacacgaacaggtgtcttaatgcatttggatagtttctttgcggggtgtgtgtgtgtgtgtgtgtgtgtgtgtgtgtgtgtgtgtcttggtgaaggtgaggggctgtattttcaccaagccttttcataatcaagtttgctttgcaaaccttatggccttgcaccccgcagaacagtcccttcctaatagcagggatgctctgtcatggtttttctgtaaattatcgtgtgttgggaagttctgttgaggcttagtttgatcttccatggtggacacgtctgttctgtatgtaaaaggcattacaattgtgttttagcagatgagacttgaagcctttccacagtccttgtgctctgagatggctgttgagctctgctcaactgtcgtagctgaattctttctttgcgctgaacactgggcagcctcaccatgttgccaacgtgcttctggggcccctgtcactgccgctggatgccgcgcacacaggcagagtgccttggcaggtttgtgcaccccttggcgagccagaactgggaaccccgcggggtgaccccttctcatggggggtcggggaggggagtgcctatttttaatcctgtctgtttgttgcacaatggaaatcactgtgatttgtacatatgccctaggaaaattttactgctgtctaatttatgtaataatactgttgattccaggtttatttaataaaactttgtatcttttcagaaaaaaaaaaaaa

SEQ ID NO: 32206 - DNA, 2599 bp, Homo Sapiens
cagattcacaaactgcaggactgggcagggagcagacagtgagcaaacgccagcagggctgctgtgaatttgtgtaaggattgagggacagttgcttttcagcatgggcccaggaatgccaaggagacatctatgcacgaccttgggaaatgagttgatgtctccggtaaaacaccggagactaattcctgccctgcccaattttgcagggagcatggctgtgaggatggggtgaactcacgcacagccaaggactccaaaatcacaacagcattactgttcttatttgctgccacacctgagccagcctgctccttcccaggagtggaggaggcctggggggagggagaggagtgactgagcttccctcccgtgtgttctccgtccctgccccagcaagacaacttagatctccaggagaactgccatccagctttggtgcaatggctgagtgcacaagtgagttgttgccctgggtttctttaatctattcagctagaactttgaaggacaatttcttgcattaataaaggttaagccctgaggggtccctgataacaacctggagaccaggattttatggctcccctcactgatggacaaggaggtctgtgccaaagaagaatccaataagcacatattgagcacttgctgtatatgcagtattgagcactgtaggcaagacccaagaaagagaaggagccatctccatcttgaaggaactcaaagactcaagtgggaacgactgggcactgccaccaccagaaagctgttcgacgagacggtcgagcagggtgctgtgggtgatatggacagcagaagggggagaccaaggttccagctcaaccaataactattgcacaaccacctgtccctgcctcagttcccttttatgtaacatgaagtcgttgtgagggttaaaggcagtaacaggtataaagtacttagaaaagcaaagggtgctacgtacatgtgaggcatcattacgcagacgtaactgggatatgtttactataaggaaaagacactgaggtctagaaatagctccgtggagcagaatcagtattgggagccggtggcggtgtgaagcaccagtgtctggcacacagtaggtgctcattggctcccttccacctgtcattcccaccaccctgaggccccaaccgccacacacacaggagcatttggagagaaggccatgtcttcaaagtctgatttgtgatgaggcagaggaagatatttctaatcggtcttgcccagaggatcacagtgctgagaccccccaccaccagccggtacctgggaagggggagagtgcaggcctgctcagggactgttcctgtctcagcaaccaagggattgttcctgtcaatcaatggtttattggaaggtggcccagtatgagccctagaagagtgtgaaaaggaatggcaatggtgttcaccatcggcagtgccagggcagcactcattcacttgataaatgaatatttattagctggttggagagctagaacctggagagctagaacctggagaactagaacctggagggctagaacctggagaggctagaaccaagaagggctagaacctggaggggctagaacctagagaagctaaaacctgagctagaagctggaggactagaacctggagggctggaatctgaagggctagaacctggagggctggaatctggagagctagaacctggagggctagaacctggagggctagaacctagaagggctagaacctggagggctggaatctggagagctagaacctggagggctagaacctggagggctagaacctagaagggctagaacctggagggctagaacctggcaggttagaacctagaagggctagaacctggagagccagaacctggagggctagaacctggaagggctagaacctgtagagctagaacatggagagctagaacccggcaggctagaacctggcaagctagaacctggagggaatgaacctggagggctagaacctggagaatgagaaaaatttacatggcaaagagcccataaatcctgaccaatccaactctgaattttaaagcaaaagcgtgaaaaaaaagattccctccttacccccaacccactcttttttcccaccacccactctcctctgcctcagtaagtatctggaggaagaaaacaggtgaaagaagaagtaaaaaccatttagtattagtattagaatgaagtcaaactgtgccacacatggtgaatgaaaaaaaaaaaaaagaggctgtgttttgtcacacagggcagtcattcagcaccagagcacgtgatggtctgagactctcttaggagcagagctctgccgcaatggccatgtggggatccacacctggtctgaggggcaactgagtctgcgggagaagagcggccctatgcatggtgtagatgccctgataaagaacatctgtcctgtgaaagactcaatgagctgttatgttgtaaacaggaagcatttcacatccaaacgagaaaatcatgtaaacatgtgtcttttctgtagagcataataaatggatgaggtttttgcaaaaaaaaaaaaaaaaa

SEQ ID NO: 32207 - DNA, 3880 bp, Homo Sapiens
tgcagttgaggattgctggtcaatatgattcttcttgctgtgctttttctctgcttcatttcctcatattcagcttctgttaaaggtcacacaactggtctctcattaaataatgaccggctgtacaagctcacgtactccactgaagttcttcttgatcggggcaaaggaaaactgcaagacagcgtgggctaccgcatttcctccaacgtggatgtggccttactatggaggaatcctgatggtgatgatgaccagttgatccaaataacgatgaaggatgtaaatgttgaaaatgtgaatcagcagagaggagagaagagcatcttcaaaggaaaaagcccatctaaaataatgggaaaggaaaacttggaagctctgcaaagacctacgctccttcatctaatccatggaaaggtcaaagagttctactcatatcaaaatgaggcagtggccatagaaaatatcaagagaggtctggctagcctatttcagacacagttaagctctggaaccaccaatgaggtagatatctctggaaattgtaaagtgacctaccaggctcatcaagacaaagtgatcaaaattaaggccttggattcatgcaaaatagcgaggtctggatttacgaccccaaatcaggtcttgggtgtcagttcaaaagctacatctgtcaccacctataagatagaagacagctttgttatagctgtgcttgctgaagaaacacacaattttggactgaatttcctacaaaccattaaggggaaaatagtatcgaagcagaaattagagctgaagacaaccgaagcaggcccaagattgatgtctggaaagcaggctgcagccataatcaaagcagttgattcaaagtacacggccattcccattgtggggcaggtcttccagagccactgtaaaggatgtccttctctctcggagctctggcggtccaccaggaaatacctgcagcctgacaacctttccaaggctgaggctgtcagaaacttcctggccttcattcagcacctcaggactgcgaagaaagaagagatccttcaaatactaaagatggaaaataaggaagtattacctcagctggtggatgctgtcacctctgctcagacctcagactcattagaagccattttggactttttggatttcaaaagtgacagcagcattatcctccaggagaggtttctctatgcctgtggatttgcttctcatcccaatgaagaactcctgagagccctcattagtaagttcaaaggttctattggtagcagtgacatcagagaaactgttatgatcatcactgggacacttgtcagaaagttgtgtcagaatgaaggctgcaaactcaaagcagtagtggaagctaagaagttaatcctgggaggacttgaaaaagcagagaaaaaagaggacaccaggatgtatctgctggctttgaagaatgccctgcttccagaaggcatcccaagtcttctgaagtatgcagaagcaggagaagggcccatcagccacctggctaccactgctctccagagatatgatgctccctttcataactgatgaggtgaagaagaccttaaacagaatataccaccaaaaccgtaaagttcatgaaaagactgtgcgcactgctgcagctgctatcattttaaataacaatccatcctacatggacgtcaagaacatcctgctgtctattggggagcttccccaagaaatgaataaatacatgctcgccattgttcaagacatcctacgttttgaaatgcctgcaagcaaaattgtccgtcgagttctgaaggaaatggtcgctcacaattatgaccgtttctccaggagtggatcttcttctgcctacactggctacatagaacgtagtccccgttcggcatctacttacagcctagacattctctactcgggttctggcattctaaggagaagtaacctgaacatctttcagtacattgggaaggctggtcttcacggtagccaggtggttattgaagcccaaggactggaagccttaatcgcagccacccctgacgagggggaggagaaccttgactcctatgctggtatgtcagccatcctctttgatgttcagctcagacctgtcacctttttcaacggatacagtgatttgatgtccaaaatgctgtcagcatctggcgaccctatcagtgtggtgaaaggacttattctgctaatagatcattctcaggaacttcagttacaatctggactaaaagccaatatagaggtccagggtggtctagctattgatatttcaggtgcaatggagtttagcttgtggtatcgtgagtctaaaacccgagtgaaaaatagggtgactgtggtaataaccactgacatcacagtggactcctcttttgtgaaagctggcctggaaaccagtacagaaacagaagcaggcttggagtttatctccacagtgcagttttctcagtacccattcttagtttgcatgcagatggacaaggatgaagctccattcaggcaatttgagaaaaagtacgaaaggctgtccacaggcagaggttatgtctctcagaaaagaaaagaaagcgtattagcaggatgtgaattcccgctccatcaagagaactcagagatgtgcaaagtggtgtttgcccctcagccggatagtacttccagcggatggttttgaaactgacctgtgatattttacttgaatttgtctccccgaaagggacacaatgtggcatgactaagtacttgctctctgagagcacagcgtttacatatttacctgtatttaagatttttgtaaaaagctacaaaaaactgcagtttgatcaaatttgggtatatgcagtatgctacccacagcgtcattttgaatcatcatgtgacgctttcaacaacgttcttagtttacttatacctctctcaaatctcatttggtacagtcagaatagttattctctaagaggaaactagtgtttgttaaaaacaaaaataaaaacaaaaccacacaaggagaacccaattttgtttcaacaatttttgatcaatgtatatgaagctcttgataggacttccttaagcatgacgggaaaaccaaacacgttccctaatcaggaaaaaaaaaaaaaaagaaaaagtaagacacaaacaaaccatttttttctctttttttggagttgggggcccagggagaagggacaaggcttttaaaagacttgttagccaacttcaagaattaatatttatgtctctgttattgttagttttaagccttaaggtagaaggcacatagaaataacatctcatctttctgctgaccattttagtgaggttgttccaaagagcattcaggtctctacctccagccctgcaaaaatattggacctagcacagaggaatcaggaaaattaatttcagaaactccatttgatttttcttttgctgtgtcttttttgagactgtaatatggtacactgtcctctaaggacatcctcattttatctcacctttttgggggtgagagctctagttcatttaactgtactctgcacaatagctaggatgactaagagaacattgcttcaagaaactggtggatttggatttccaaaatatgaaataaggagaaaaatgtttttatttgtatgaattaaaagatccatgttgaacatttgcaaatatttattaataaacagatgtggtgataaacccaaaacaaatgacaggtgcttattttccactaaacacagacacatgaaatgaaagtttagctagcccactatttgttgtaaattgaaaacgaagtgtgataaaataaatatgtagaaatcaaaaaaaaaaaaaaaaaaaa

SEQ ID NO: 32208 - DNA, 4211 bp, Homo Sapiens
cccctccctggacacccaggcgacaatggcagaactgcccacaacagagacgcctggggacgccactttgtgcagcgggcgcttcaccatcagcacactgctgagcagtgatgagccctctccaccagctgcctatgacagcagccaccccagccacctgacccacagcagcaccttctgcatgcgcacctttggctataacacgatcgatgtggtgcccacatatgagcactatgccaacagcacccagcctggtgagccccggaaggtccggcccacactggctgacctgcactccttcctcaagcaggaaggcagacacctgcatgccctggcctttgacagccggcccagccacgagatgactgatgggctggtggagggcgaggcaggcaccagcagcgagaagaaccccgaggagccagtgcgcttcggctgggtcaagggggtgatgattcgttgcatgctcaacatttggggcgtgatcctctacctgcggctgccctggattacggcccaggcaggcatcgtcctgacctggatcatcatcctgctgtcggtcacggtgacctccatcacaggcctctccatctcagccatctccaccaatggcaaggtcaagtcaggtggcacctacttcctcatctcccggagtctgggcccagagcttgggggctccatcggcctcattttcgctttcgccaatgccgtgggtgtggccatgcacacggtgggctttgcagagaccgtgcgggacctgctccaggagtatggggcacccatcgtggaccccattaacgacatccgcatcattggcgtggtctcggtcactgtgctgctggccatctccctggctggcatggagtgggagtccaaggcccaggtgctgttcttccttgtcatcatggtctcctttgccaactatttagtggggacgctgatccccccatctgaggacaaggcctccaaaggcttcttcagctaccgggcggacatttttgtccagaacttggtgcctgactggcggggtccagatggcaccttcttcggaatgttctccatcttcttcccctcggccacaggcatcctggcaggggccaacatatctggtgacctcaaggaccctgctatagccatccccaaggggaccctcatggccattttctggacgaccatttcctacctggccatctcagccaccattggctcctgcgtggtgcgtgatgcctctggggtcctgaatgacacagtgacccctggctggggtgcctgcgaggggctggcctgcagctatggctggaacttcaccgagtgcacccagcagcacagctgccactacggcctcatcaactattaccagaccatgagcatggtgtcaggcttcgcgcccctgatcacggtggtcatcttcggggccaccctctcctctgccctggcctgccttgtctctgctgccaaagtcttccagtgcctttgcgaggaccagctgtacccactgatcggcttcttcggcaaaggctatggcaagaacaaggagcccgtgcgtggctacctgctggcctacgccatcgctgtggccttcatcatcatcgctgagctcaacaccatagcccccatcatttccaacttcttcctctgctcctatgccctcatcaacttcagctgcttccacgcctccatcaccaactcgcctgggtggagaccttcattccaatactacaacaagtgggcggcgctgtttggggctatcatctccgtggtcatcatgttcctcctcacctggtgggcggccctcatcgccattggcgtggtgctcttcctcctgctctatgtcatctacaagaagccagaggtaaattggggctcctcggtacaggctggctcctacaacctggccctcagctactcggtgggcctcaatgaggtggaagaccacatcaagaactatcgcccccagtgcctggtgctcacggggccccccaacttccgcccggccctggtggactttgtgggcaccttcacccggaacctcagcctgatgatctgtggccacgtgctcatcggaccccacaagcagaggatgcctgagctccagctcatcgccaacgggcacaccaagtggctgaacaagaggaagatcaaggccttctactcggatgtcattgccgaggacctccgcagaggcgtccagatcctcatgcaggccgcaggtctcgggagaatgaagcccaacattctggtggttgggttcaagaagaactggcagtcggctcacccggccacagtggaagactacattggcatcctccatgatgcctttgatttcaactatggcgtgtgtgtcatgaggatgcgggagggactcaacgtgtccaagatgatgcaggcgcacattaaccccgtgtttgacccagcggaggacgggaaggaagccagcgccagagtggaccccaaggccctggtgaaggaggagcaggccaccaccatcttccagtcggagcagggcaagaagaccatagacatctactggctctttgacgatggaggcctcaccctcctcattccctatctccttggccgcaagaggaggtggagcaaatgcaagatccgtgtgttcgtaggcggccagattaacaggatggaccaggagagaaaggcgatcatttctctgctgagcaagttccgactgggattccatgaagtccacatcctccctgacatcaaccagaaccctcgggctgagcacaccaagaggtttgaggacatgattgcacccttccgtctgaatgatggcttcaaggatgaggccactgtcaacgagatgcggcgggactgcccctggaagatctcagatgaggagattacgaagaacagagtcaagtcccttcggcaggtgaggctgaatgagattgtgctggattactcccgagacgctgctctcatcgtcatcactttgcccatagggaggaaggggaagtgccccagctcgctgtacatggcctggctggagaccctgtcccaggacctcagacctccagtcatcctgatccgaggaaaccaggaaaacgtgctcaccttttactgccagtaactccaggctttgacatccctgtccacagctctgagtgtgtgggataagttggaacttgattgcctctagtccacagggatgagactcatgttctgttgcactttaagtggcagcatctgatgatctcacccgaaaaagatggtagatttccaaatctggctggactccacttccatgggacacattccctgggtcttgtgtttatgggctagagaaatagcagatggagctgcaaggaaaactctctaaagcatcctattccttttaaaggatttcttttgattttgatgaccattaattaagagttcagtctttgatttgtatgcaaattggagtcccaatgctgggcgtgaatcttgacagtttctacagaccttcctgggtgaaagttcctaaatcatgccttgcttcctccaataggagaatgggagcctcacctgtaggacctacaggctctctaaggaatgcaggtctctctctgagcctccacagccaggcaaatacatatatatatatttttttttagatgaagttttttctcttgttgcccaggctagggtgtaatggcatgatctcaggtcactgcaacctcctcccgggttcaagcatttcttctgtctcagcctcccgaatagctgggattacaggcacctgccatcacaccagctaatttttgtatttttagtagagatggggtttcaccatgttgaccaggctggtgttgagctcctgacctcaggtgatccacccacctcggtctcccaaagtgctggggttacaggcctgagccactgcgcccggcccaggcaaatttcttgaaccacttctcactcccgtcactttcaataaggggtctttgatgtcttcactggttctttggacgagggacttttcgaacttttttggttgcaacacacagtaagaaatatatttcacactgagacttgcagcgcacacacacggaaacgaccaaaacaaaaatgtcacaaaacaatacttacccttccctgggggacgtcctccagtatgttctgttctgtttatttttcactgttggttgcaatccaataaaatgactttgggatccactcatgggtggggacccacacatttgaaaccg

SEQ ID NO: 32209 - DNA, 6449 bp, Homo Sapiens
aattctaaggaaaacctggaagcacaatgggagatgacagtgagtggttgaaactgccagttgatcagaaatgtgaacacaagctgtggaaagcaaggttaagtgggtatgaagaggccctgaagatcttccagaaaataaaggatgaaaagagcccagagtggtccaaatttttaggattgatcaaaaaatttgtcactgattccaatgcagtggttcaattgaaaggattagaagctgcacttgtttatgttgaaaatgcccatgtagcaggaaaaaccacaggagaagttgtgtcaggtgttgtaagtaaggtgttcaatcaacctaaagctaaagccaaggagctgggcatagagatctgtcttatgtacatagagattgagaaaggagaggctgttcaagaagagctcctgaaaggcttggacaataagaatcccaagatcatagtggcctgtatagagacactgaggaaagccttaagtgaatttggttccaaaatcatcttgcttaagccaattatcaaagtgttgccaaaactctttgagtctcgagagaaggctgttcgagatgaagccaaactaattgctgtggagatttacagatggattcgggatgctctgagacccccattacaaaatataaactctgttcagttgaaagaactagaagaagaatgggtcaaactgccaacaagtgctcctagacctactcgatttcttcgttcccaacaagaactagaagctaaattggaacaacaacagtctgctggtggagatgctgaaggaggtggtgatgatggtgatgaggtgccacaaatagatgcttatgagcttttagaagctgtagaaatcctttccaaacttcccaaagacttttatgacaaaattgaggcaaaaaaatggcaagagagaaaagaggccctggagtctgtagaagtactaataaaaaaccccaaactggaagctggcgattatgcagatttagtaaaagcattaaagaaggttgttggaaaggacaccaatgtcatgttggtggctttggcagcaaaatgtcttactggcctggctgttgggctaaggaagaaatttggacaatatgcaggacatgttgtgccaaccatcttggagaaattcaaagagaagaaacctcaagtggtacaagccctgcaggaggcaattgatgcaatcttccttactaccacactacagaacatcagtgaggatgttttagcagtaatggataataaaaatccaaccatcaagcagcagacatctctttttattgcaagaagtttccgccactgcactgcttctaccctgccaaagagcttgctaaagcccttttgtgctgcactacttaagcacatcaatgattctgctcctgaagtcagagatgccgcatttgaagcattgggtactgctttgaaggtggttggcgagaaagcagtaaaaccattcctagctgatgtggacaaactcaagcttgataagatcaaagaatgttcagaaaaggtagaactgatacatggtaagaaagctggactagctgctgataagaaggaattcaaacctctgcctggaaggactgctgcttcaggggctgcaggagataaggacacaaaggacatttctgcacccaaaccaggacctctaaaaaaggcacctgctgctaaggctggtgggccaccaaaaaaggggaaaccagctgcaccaggaggcgcagggaatactggaaccaagaacaagaaaggactggagactaaagaaatagtggagcctgagctctcgatagaagtatgcgaagaaaaagcttcagctgttcttccccctacctgtatacagcttcttgacagcagtaactggaaagaaaggctggcttgtatggaagagttccagaaggctgttgagctaatggaccgaactgaaatgccatgccaggcattagtgaggatgctagccaagaaacctggatggaaagaaactaattttcaggtgatgcaaatgaagcttcatatagttgctttgattgcccagaagggaaatttttccaaaacgtcagctcaggttgtattagatggccttgtggacaagattggagatgtgaaatgtgggaacaatgcaaaagaagctatgacagcaatagccgaagcctgtatgttaccatggactgctgaacaggttgtgtcaatggctttctcacaaaagaatcccaaaaatcagtcagaaactctgaattggctatcaaatgccataaaagaatttggtttttctgggttgaatgtcaaagctttcattagcaatgtgaagacagctcttgctgcaacaaacccagctgtgaggactgctgccataaccctgcttggcgtgatgtatctgtatgttggtccctctttgcgaatgttctttgaggatgagaagcctgccctcctatcccagatagatgcagaatttgagaagatgcagggacaaagtccacctgctccaaccagaggaatttccaagcatagcacaagtggtacagatgaaggagaagatggagatgaaccagatgacgggagcaatgatgtcgttgatcttttgccgaggacggagatcagtgataaaatcacttcagagttggtatctaagattggtgataagaattggaagattaggaaagaaggcctagatgaagtggcaggtattattaatgacgcaaaatttatccaaccgaatataggtgaacttccaactgccttgaagggtcgactcaatgattcaaataaaatcttggtacagcaaacgctgaatatcctgcaacaactggcagtagccatgggcccaaatattaagcaacatgtaaaaaatttaggcatccctatcatcacagtccttggagacagcaagaacaatgttcgagctgctgccctagcgactgtgaatgcttgggcagaacagactggcatgaaggaatggctggaaggagaagatctttctgaagagctcaaaaaggaaaatcctttcttgaggcaagagcttctgggctggctggctgagaaactacctactcttcgttccacccctacagaccttatcctttgtgttcctcatctctactcctgcctagaagatcgaaatggagatgtgcgaaagaaggcccaagatgccttgccattcttcatgatgcatttaggatatgaaaaaatggccaaggctactgggaaactaaagccaacttctaaagatcaggtattggccatgctagagaaagccaaagttaacatgccagccaagcctgctccacccactaaagcaacttctaaaccaatgggagggtccgctccagccaaattccagcctgcatcagcacctgctgaagattgtatttccagcagtacagaacccaaacctgatccaaaaaaggccaaagctccaggattatcctctaaagcaaagagtgcacaagggaagaagatgccaagcaaaaccagcttaaaggaggatgaagacaaatccgggcctatttttattgttgttccaaatggaaaagagcaaaggatgaaagatgaaaaaggattgaaggtgctaaagtggaattttactaccccacgggatgaatacattgagcaactaaagactcaaatgtctagctgtgtggctaaatggttacaagatgagatgtttcactcagactttcagcatcataacaaagcccttgctgttatggttgatcacttggagagtgaaaaagaaggagttattggttgcctggatcttatcttaaagtggcttaccctgaggttttttgacaccaatacaagcgtcctgatgaaagcactagaatatttaaaattgctcttcaccttgctaagtgaagaagaatatcatcttactgagaatgaagcatcttccttcatcccctatcttgtcgtcaaggttggagaaccaaaggatgtcattcgtaaagatgttcgtgccatcctgaaccggatgtgccttgtctacccagctagcaagatgtttccctttatcatggaaggaaccaaatccaaaaactctaagcagagagcagagtgcctggaagagctgggatgtctggttgagtcctatggcatgaatgtttgccaaccaaccccaggaaaagccttaaaggaaatagctgttcacataggagaccgtgacaatgctgtacgcaatgctgcactcaacaccattgtaacggtgtacaatgtacatggggatcaggtgttcaaactgattggaaatctttctgaaaaggatatgagcatgctcgaggagaggattaagcggtcagcaaagagaccctctgctgcaccaataaaacaggtggaagagaaacctcagcgtgcacagaacataagctccaatgccaacatgttacgcaagggaccagctgaggacatgtcttccaaactcaaccaagcccgaagcatgagtgggcatcctgaggcagcccagatggtccgccgagaattccagctggatctagatgagattgagaatgacaatggtacagtccgatgtgaaatgccagaacttgttcagcacaaactggatgacatttttgagccagtccttattcctgaacccaagatccgggctgtttctccacacttcgatgacatgcacagtaatacagcatccacaatcaatttcattatctcccaagtagccagtggtgacatcaacacaagtatccaagctctgacacagctgtttcagatagagagccttgcccgggaggcctccactggagtactaaaagacctaatgcatggcctcatcaccttaatgctggattctcggattgaagatcttgaggaaggacaacaggtcatccgctctgtgaacctcttggtggtgaaggttctggagaagtcagaccagaccaacatcctgagtgccctacttgttttgctccaagacagcctgctagcaacagccagttctcccaaattctcagagcttgttatgaagtgtctctggagaatggttcgactgttgcctgataccatcaatagcattaacctagacagaattcttctggatatccacattttcatgaaggtcttccccaaagagaaactgaagcaatgcaaaagtgaatttcccataaggaccctaaagaccctgctacacaccttatgcaaattaaaagggcccaagatcctggaccacctaacgatgatcgacaacaaaaacgagtctgagctggaggcccatctctgccggatgatgaagcacagtatggaccagactgggagcaagtctgataaggaaacagcaaagggagcatctcgaatagatgcaaaatcatcaaaggccaaagtgaatgatttcttagctgagatttttaagaagattggctctaaagaaaacactaaagagggactagcagagttatatgaatataagaagaaatactcagatgctgacattgaaccatttctgaaaaattcctcacagttcttccagagctatgtcgaaagaggccttcgggtgattgagatggagagggagggcaaaggtcgtatttccacttcaacaggcatctcccctcagatggaagtcacatgtgtgcccacgcccacaagcacagtgtcctccataggtaacacaaatggggaagaagtggggccatctgtctacttggaaaggctaaagatcctccgacagcgatgtggtctggacaacacaaagcaagatgaccgacctcctttgacctctttgctctccaaaccagcagttcctactgtcgcctcttccacagacatgctccacagcaaactctctcagctccgggagtcacgggagcagcaccagcattcagacctggattctaaccagactcactcttcaggaactgtgacctcctcctcctccacagctaacatagacgacttgaaaaaaagactggagagaataaagagcagtcgcaaatgaagctgccccactcccccggcaccctgcagctttagtttactaaactagaagtcctcatagtttaaaatggcctcagcaggcctagtgtatacaaactggttgtatgtatcatgccgtggagctagggggaggggtcattgtggcacaagtatttgtacatactctgcttctctctgtcagcgtcctgctgctctagaagactgtccgtggatgagtttagtgtacagacttgtaaacagctgccccctctctgctcagtctagttcccaggtccttttcttttctttttaattgctcatttgtaaaattgtcctaatctttcctagctttttaatagttaatattagaaactctttaatagttttcctttcagtttgtgagctcttctctgtcgccctgaagggtcactgtattctgtatgaatccatggcatgatacaactaatttaagagtcttttataaataaagtttgcattaactaaaaaaaaaaaaaaaaaaaaaaaa

SEQ ID NO: 32210 - DNA, 1936 bp, Homo Sapiens
agcgctagcgcagcagccgggcccgatcacccgccgcccggtgcccgccgccgcccgcgccagcaaccgggcccgatcacccgccgcccggtgcccgccgccgcccggcaccggcatggcgctccggggcttctgcagccgatggctccgacccgctctggccattgggctgtttgcctccatggctgcggtgctcctaggtggggcccgggcatccaggttgctcttccagaggctcctgtgggatgtggtgcgatctcccatcagcttctttgagcggacacccattggtcacctgctaaaccgcttctccaaggagacagacacggttgacgtggacattccagacaaactccggtccctgctgatgtacgcctttggactcctggaggtcagcctggtggtggagtggcctaccccactgccactgtggccatcctgccactgtttctcctctacgctgggtttcaggtggcttgcggccaatgtggagctcctggggaatggcctggtgtttgcagctgccacgtgtgctgtgctgagcaaagcccacctcagtgctggcctcgtgggcttctctgtctctgctgccctccaggtgacccagacactgcagtgggttgttcgcaactggacagacctagagaacagcatcgtgtcagtggagcggatgcaggactatgcctggacgcccaaggaggctccctggaggctgcccacatgtgcagctcaacccccctggcctcagggcgggcagatcgagttccgggactttgggctaagataccgacctgagctcccgctggctgtgcagggcgtgtccttcaagatccacgcaggagagaaggtgggcatcgttggcaggaccggggcagggaagtcctccctggccagtgggctgctgcggctccaggaggcagctgagggtgggatctggatcgacggggtccccattgcccacgtgggcgtgcacacactgcgctccaggatcagcatcatcccccaggaccccatcctgttccctggctctctgcggatgaacctcgacctgctgcaggagcactcggacgaggctatctgggcagccctggagacggtgcagctcaaagccttggtggcctgcctgcccggccagctgcagtacaagtgtgctgaccgaggcgaggacctgagcgtgggccagaaacagctcctgtgtctggcacgtgcccttctccggaagacccagatcctcatcctggacgaggctactgctgccgtggaccctgggacggagctgcagatgcaggccatgctcgggagctggtttgcacagtgcactgtgctgctcattgcccaccgcctgcgctccgtgatggactgtgcccgggttctggtcatggacaaggggcaggtggcagagagcggcagcccggcccagctgctggcccagaagggcctgttttacagactggcccaggagtcaggcctggtctgagccaggaccctcaaccgtaccccagttggaccagcccgcacagcctgcagtgctggagatggaagtgacccgttggtcatcgatagctccacacgatattgagtctagacctgtgtttggtctctgggagggaaaatggcagagaaagtggccaattatcacagagcatcagagccggaaggacctagcaatacacaggtctgccggcaggcccatctcgccctgtccaccctgcagccaatgtcaacagcgactctcagccccgctgtactctggactcacctgggggcctcaagcacatgcccaggctcccggctagcccttaaatcagaatctctgaggctgggaactgccatgctgtgtgtactttttacaaattaacacttttattttgggataatcccagactcacatgcagttaaagaaacaataatataaaaaaaaaaaaaaaaaaaaaaa

SEQ ID NO: 32211 - DNA, 6246 bp, Homo Sapiens
ctcttctgggacccagccatgagtgtggagctgagcaactgaacctgaaactcttccactgtgagtcaaggaggcttttccgcacatgaaggacgctgagcgggaaggactcctctctgcctgcagttgtagcgagtggaccagcaccaggggctctctagactgcccctcctccatcgccttccctgcctctccaggacagagcagccacgtctgcacacctcgccctctttacactcagttttcagagcacgtttctcctatttcctgcgggttgcagcgcctacttgaacttactcagaccacctacttctctagcagcactgggcgtccctttcagcaagacgatggctgtgctcaggcagctggcgctcctcctctggaagaactacaccctgcagaagcggaaggtcctggtgacggtcctggaactcttcctgccattgctgttttctgggatcctcatctggctccgcttgaagattcagtcggaaaatgtgcccaacgccaccatctacccgggccagtccatccaggagctgcctctgttcttcaccttccctccgccaggagacacctgggagcttgcctacatcccttctcacagtgacgctgccaagaccgtcactgagacagtgcgcagggcacttgtgatcaacatgcgagtgcgcggctttccctccgagaaggactttgaggactacattaggtacgacaactgctcgtccagcgtgctggccgccgtggtcttcgagcaccccttcaaccacagcaaggagcccctgccgctggcggtgaaatatcacctacggttcagttacacacggagaaattacatgtggacccaaacaggctcctttttcctgaaagagacagaaggctggcacactacttcccttttcccgcttttcccaaacccaggaccaagggaacctacatcccctgatggcggagaacctgggtacatccgggaaggcttcctggccgtgcagcatgctgtggaccgggccatcatggagtaccatgccgatgccgccacacgccagctgttccagagactgacggtgaccatcaagaggttcccgtacccgccgttcatcgcagaccccttcctcgtggccatccagtaccagctgcccctgctgctgctgctcagcttcacctacaccgcgctcaccattgcccgtgctgtcgtgcaggagaaggaaaggaggctgaaggagtacatgcgcatgatggggctcagcagctggctgcactggagtgcctggttcctcttgttcttcctcttcctcctcatcgccgcctccttcatgaccctgctcttctgtgtcaaggtgaagccaaatgtagccgtgctgtcccgcagcgacccctccctggtgctcgccttcctgctgtgcttcgccatctctaccatctccttcagcttcatggtcagcaccttcttcagcaaagccaacatggcagcagccttcggaggcttcctctacttcttcacctacatcccctacttcttcgtggcccctcggtacaactggatgactctgagccagaagctctgctcctgcctcctgtctaatgtcgccatggcaatgggagcccagctcattgggaaatttgaggcgaaaggcatgggcatccagtggcgagacctcctgagtcccgtcaacgtggacgacgacttctgcttcgggcaggtgctggggatgctgctgctggactctgtgctctatggcctggtgacctggtacatggaggccgtcttcccagggcagttcggcgtgcctcagccctggtacttcttcatcatgccctcctattggtgtgggaagccaagggcggttgcagggaaggaggaagaagacagtgaccccgagaaagcactcagaaacgagtactttgaagccgagccagaggacctggtggcggggatcaagatcaagcacctgtccaaggtgttcagggtgggaaataaggacagggcggccgtcagagacctgaacctcaacctgtacgagggacagatcaccgtcctgctgggccacaacggtgccgggaagaccaccaccctctccatgctcacaggtctctttccccccaccagtggacgggcatacatcagcgggtatgaaatttcccaggacatggttcagatccggaagagcctgggcctgtgcccgcagcacgacatcctgtttgacaacttgacagtcgcagagcacctttatttctacgcccagctgaagggcctgtcacgtcagaagtgccctgaagaagtcaagcagatgctgcacatcatcggcctggaggacaagtggaactcacggagccgcttcctgagcgggggcatgaggcgcaagctctccatcggcatcgccctcatcgcaggctccaaggtgctgatactggacgagcccacctcgggcatggacgccatctccaggagggccatctgggatcttcttcagcggcagaaaagtgaccgcaccatcgtgctgaccacccacttcatggacgaggctgacctgctgggagaccgcatcgccatcatggccaagggggagctgcagtgctgcgggtcctcgctgttcctcaagcagaaatacggtgccggctatcacatgacgctggtgaaggagccgcactgcaacccggaagacatctcccagctggtccaccaccacgtgcccaacgccacgctggagagcagcgctggggccgagctgtctttcatccttcccagagagagcacgcacaggtttgaaggtctctttgctaaactggagaagaagcagaaagagctgggcattgccagctttggggcatccatcaccaccatggaggaagtcttccttcgggtcgggaagctggtggacagcagtatggacatccaggccatccagctccctgccctgcagtaccagcacgagaggcgcgccagcgactgggctgtggacagcaacctctgtggggccatggacccctccgacggcattggagccctcatcgaggaggagcgcaccgctgtcaagctcaacactgggctcgccctgcactgccagcaattctgggccatgttcctgaagaaggccgcatacagctggcgcgagtggaaaatggtggcggcacaggtcctggtgcctctgacctgcgtcaccctggccctcctggccatcaactactcctcggagctcttcgacgaccccatgctgaggctgaccttgggcgagtacggcagaaccgtcgtgcccttctcagttcccgggacctcccagctgggtcagcagctgtcagagcatctgaaagacgcactgcaggctgagggacaggagccccgcgaggtgctcggtgacctggaggagttcttgatcttcagggcttctgtggaggggggcggctttaatgagcggtgccttgtggcagcgtccttcagagatgtgggagagcgcacggtcgtcaacgccttgttcaacaaccaggcgtaccactctccagccactgccctggccgtcgtggacaaccttctgttcaagctgctgtgcgggcctcacgcctccattgtggtctccaacttcccccagccccggagcgccctgcaggctgccaaggaccagtttaacgagggccggaagggattcgacattgccctcaacctgctcttcgccatggcattcttggccagcacgttctccatcctggcggtcagcgagagggccgtgcaggccaagcatgtgcagtttgtgagtggagtccacgtggccagtttctggctctctgctctgctgtgggacctcatctccttcctcatccccagtctgctgctgctggtggtgtttaaggccttcgacgtgcgtgccttcacgcgggacggccacatggctgacaccctgctgctgctcctgctctacggctgggccatcatccccctcatgtacctgatgaacttcttcttcttgggggcggccactgcctacacgaggctgaccatcttcaacatcctgtcaggcatcgccaccttcctgatggtcaccatcatgcgcatcccagctgtaaaactggaagaactttccaaaaccctggatcacgtgttcctggtgctgcccaaccactgtctggggatggcagtcagcagtttctacgagaactacgagacgcggaggtactgcacctcctccgaggtcgccgcccactactgcaagaaatataacatccagtaccaggagaacttctatgcctggagcgccccgggggtcggccggtttgtggcctccatggccgcctcagggtgcgcctacctcatcctgctcttcctcatcgagaccaacctgcttcagagactcaggggcatcctctgcgccctccggaggaggcggacactgacagaattatacacccggatgcctgtgcttcctgaggaccaagatgtagcggacgagaggacccgcatcctggcccccagcccggactccctgctccacacacctctgattatcaaggagctctccaaggtgtacgagcagcgggtgcccctcctggccgtggacaggctctccctcgcggtgcagaaaggggagtgcttcggcctgctgggcttcaatggagccgggaagaccacgactttcaaaatgctgaccggggaggagagcctcacttctggggatgcctttgtcgggggtcacagaatcagctctgatgtcggaaaggtgcggcagcggatcggctactgcccgcagtttgatgccttgctggaccacatgacaggccgggagatgctggtcatgtacgctcggctccggggcatccctgagcgccacatcggggcctgcgtggagaacactctgcggggcctgctgctggagccacatgccaacaagctggtcaggacgtacagtggtggtaacaagcggaagctgagcaccggcatcgccctgatcggagagcctgctgtcatcttcctggacgagccgtccactggcatggaccccgtggcccggcgcctgctttgggacaccgtggcacgagcccgagagtctggcaaggccatcatcatcacctcccacagcatggaggagtgtgaggccctgtgcacccggctggccatcatggtgcaggggcagttcaagtgcctgggcagcccccagcacctcaagagcaagttcggcagcggctactccctgcgggccaaggtgcagagtgaagggcaacaggaggcgctggaggagttcaaggccttcgtggacctgacctttccaggcagcgtcctggaagatgagcaccaaggcatggtccattaccacctgccgggccgtgacctcagctgggcgaaggttttcggtattctggagaaagccaaggaaaagtacggcgtggacgactactccgtgagccagatctcgctggaacaggtcttcctgagcttcgcccacctgcagccgcccaccgcagaggaggggcgatgaggggtggcggctgtctcgccatcaggcagggacaggacgggcaagcagggcccatcttacatcctctctctccaagtttatctcatcctttatttttaatcacttttttctatgatggatatgaaaaattcaaggcagtatgcacagaatggacgagtgcagcccagccctcatgcccaggatcagcatgcgcatctccatgtctgcatactctggagttcactttcccagagctggggcaggccgggcagtctgcgggcaagctccggggtctctgggtggagagctgacccaggaagggctgcagctgagctgggggttgaatttctccaggcactccctggagagaggacccagtgacttgtccaagtttacacacgacactaatctcccctggggaggaagcgggaagccagccaggttgaactgtagcgaggcccccaggccgccaggaatggaccatgcagatcactgtcagtggagggaagctgctgactgtgattaggtgctggggtcttagcgtccagcgcagcccggggcatcctggaggctctgctccttagggcatggtagtcaccgcgaagccgggcaccgtcccacagcatctcctagaagcagccggcacaggagggaaggtggccaggctcgaagcagtctctgtttccagcactgcaccctcaggaagtcgcccgccccaggacacgcagggaccaccctaagggctgggtggctgtctcaaggacacattgaatacgttgtgaccatccagaaaataaatgctgag

SEQ ID NO: 32212 - DNA, 2619 bp, Homo Sapiens
gtagtggataggcctgtgacgaaggtgctaccatcgtgagagtaagattatattctcctgccttttaaaaagatggacttcagcagaaatctttatgatattggggaacaactggacagtgaagatctggcctccctcaagttcctgagcctggactacattccgcaaaggaagcaagaacccatcaaggatgccttgatgttattccagagactccaggaaaagagaatgttggaggaaagcaatctgtccttcctgaaggagctgctcttccgaattaatagactggatttgctgattacctacctaaacactagaaaggaggagatggaaagggaacttcagacaccaggcagggctcaaatttctgcctacagggtcatgctctatcagatttcagaagaagtgagcagatcagaattgaggtcttttaagtttcttttgcaagaggaaatctccaaatgcaaactggatgatgacatgaacctgctggatattttcatagagatggagaagagggtcatcctgggagaaggaaagttggacatcctgaaaagagtctgtgcccaaatcaacaagagcctgctgaagataatcaacgactatgaagaattcagcaaaggggaggagttgtgtggggtaatgacaatctcggactctccaagagaacaggatagtgaatcacagactttggacaaagtttaccaaatgaaaagcaaacctcggggatactgtctgatcatcaacaatcacaattttgcaaaagcacgggagaaagtgcccaaacttcacagcattagggacaggaatggaacacacttggatgcaggggctttgaccacgacctttgaagagcttcattttgagatcaagccccacgatgactgcacagtagagcaaatctatgagattttgaaaatctaccaactcatggaccacagtaacatggactgcttcatctgctgtatcctctcccatggagacaaaggcatcatctatggcactgatggacaggaggcccccatctatgagctgacatctcagttcactggtttgaagtgcccttcccttgctggaaaacccaaagtgttttttattcaggcttgtcagggggataactaccagaaaggtatacctgttgagactgattcagaggagcaaccctatttagaaatggatttatcatcacctcaaacgagatatatcccggatgaggctgactttctgctggggatggccactgtgaataactgtgtttcctaccgaaaccctgcagagggaacctggtacatccagtcactttgccagagcctgagagagcgatgtcctcgaggcgatgatattctcaccatcctgactgaagtgaactatgaagtaagcaacaaggatgacaagaaaaacatggggaaacagatgcctcagcctactttcacactaagaaaaaaacttgtcttcccttctgattgatggtgctattttgtttgttttgttttgttttgtttttttgagacagaatctcgctctgtcgcccaggctggagtgcagtggcgtgatctcggctcaccgcaagctccgcctcccgggttcacgccattctcctgcctcagcctcccgagtagctgggactacaggggcccgccaccacacctggctaattttttaaaaatatttttagtagagacagggtttcactgtgttagccagggtggtcttgatctcctgacctcgtgatccacccacctcggcctcccaaagtgctgggattacaggcgtgagccaccgcgcctggccgatggtactatttagatataacactatgtttatttactaattttctagattttctactttattaattgttttgcacttttttataagagctaaagttaaataggatattaacaacaataacactgtctcctttctcttatgcttaaggctttgggaatgtttttagctggtggcaataaataccagacacgtacaaaatccagctatgaatatagagggcttatgattcagattgttatctatcaactataagcccactgttaatattctattaactttaattctctttcaaagctaaattccacactaccacattaaaaaaattagaaagtagccacgtatggtggctcatgtctataatcccagcactttgggaggttgaggtgggaggatttgcttgaacccaagaggtccaaggctgcagtgagccatgttcacaccgctgcactcaagcttgggtgacagagcaagaccccgtccccaaaaaaattttttttttaataaacccaaatttgtttgaaaacttttaaaaattcaaatgatttttacaagttttaaataagctctccccaaacttgctttatgccttcttattgcttttatgatatatatatgcttggctaactatatttgctttttgctaacaatgctctggggtctttttatgcatttgcatttgctctttcatctctgcttggattattttaaatcattaggaattaagttatctttaaaatttaagtatcttttttccaaaacattttttaatagaataaaatataatttgatcttaaaaaaaaaaaaaaaaaaaaaaaaaaaaaaaaaaaa

SEQ ID NO: 32213 - DNA, 4975 bp, Homo Sapiens
aggcgggggtgggcgggcgcgccgggcggcaggtgtcggcgtcggcggcattcggcggcgatggagcggccctggggagctgcggacggcctctcgcgctggccccatggcctcggcctcctcctcctcctgcagctgctgccgccgtcgaccctcagccaggaccggctggacgcgccgccgccgcccgctgcgccgctgccgcgctggtctggccccatcggggtgagctgggggctgcgggcggccgcagccgggggcgcgtttccccgcggcggccgttggcgtcgcagcgcgccgggcgaggacgaggagtgcggccgggtccgggacttcgtcgccaagctggccaacaacacgcaccagcatgtgtttgatgatctcagaggctcagtatccttgtcctgggttggagatagcactggggtcattctagtcttgactaccttccatgtaccactggtaattatgacttttggacagtccaagctatatcgaagtgaggattatgggaagaactttaaggatattacagatctcatcaataacacctttattcggactgaatttggcatggctattggtcctgagaactctggaaaggtggtgttaacagcagaggtgtctggaggaagtcgtggaggaagaatcttcagatcatcagattttgcgaagaattttgtgcaaacagatctcccttttcatcctctcactcagatgatgtatagccctcagaattctgattatcttttagctctcagcactgaaaatggcctgtgggtgtccaagaattttgggggaaaatgggaagaaatccacaaagcagtatgtttggccaaatggggatcagacaacaccatcttctttacaacctatgcaaatggctcctgcaaagctgaccttggggctctggaattatggagaacttcagacttgggaaaaagcttcaaaactattggtgtgaaaatctactcatttggtcttgggggacgtttcctttttgcctctgtgatggctgataaggataccacaagaaggatccacgtttcaacagatcaaggggacacatggagcatggcccagctcccctccgtgggacaggaacagttctattctattctggcagcaaatgatgacatggtattcatgcatgtagatgaacctggagacactgggtttggcacaatctttacctcagatgatcgaggcattgtctattccaagtctttggaccgacatctctacactaccacaggcggagagacggactttaccaacgtgacctccctccgcggcgtctacataacaagcgtgctctccgaagataattctatccagaccatgatcacttttgaccaaggaggaaggtggacgcacctgaggaagcctgaaaacagtgaatgtgatgctacagcaaaaaacaagaatgagtgcagccttcatattcatgcttcctacagcatctcccagaaactgaatgttccaatggccccactctcagagccgaatgccgtaggcattgtcattgctcatggtagcgtgggggatgccatctcagtgatggttccagatgtgtacatctcagatgatgggggttactcctggacaaagatgctggaaggaccccactattacaccatcctggattctggaggcatcattgtggccattgagcacagcagccgtcctatcaatgtgattaagttctccacagacgaaggtcaatgctggcaaacctacacgttcaccagggaccccatctatttcactggcctagcttcagaacctggagctaggtccatgaatatcagcatttggggcttcacagaatctttcctgaccagccagtgggtctcctacaccattgattttaaagatatccttgaaaggaactgtgaagagaaggactataccatatggctggcacactccacagaccctgaagattatgaagatggctgcattttgggctacaaagaacagtttctgcggctacgcaagtcatccatgtgtcagaatggtcgagactatgttgtgaccaagcagccctccatctgcctctgttccctggaggactttctctgtgattttggctactaccgtccagaaaatgactccaagtgtgtggaacagccagaactgaagggccacgacctggagttttgtctgtacggaagagaagaacacctaacaacaaatgggtaccggaaaattccaggggacaaatgccagggtggggtaaatccagttcgagaagtaaaagacttgaaaaagaaatgcacaagcaactttttgagtccggaaaaacagaattccaagtcaaattctgttccaattatcctggccatcgtgggattgatgctggtcacagtcgtagcaggagtgctcattgtgaagaaatatgtctgtgggggaaggttcctggtgcatcgatactctgtgctgcagcagcatgcagaggccaatggtgtggatggtgtggatgctttggacacagcctcccacactaataaaagtggttatcatgatgactcagatgaggacctcttggaatagctcttcagaggagctggacccagcatggatggtggaaccacagtacctcttacactccctgtggctccaacttcaggaaataaatttcccattgcgaggacccagctctgtttctgctgcttccatcaaagccaaaagacctacactaaagaaatgcagggtgggggtggggaaccctgagcacttttttacaattggctctgagaaaaagggagacattttaaattctttaacttcttatttctcgtcctgtctctttgcaaagtatgggcttttgtttttgttttttaagggaaacgaaatggaattcgaagggaccttttcactaaccccacttctgtgtgttctgcatggtgcctgccccagggcatctgccaactccagtatcagctctcacagtgtacttggtaccatccctgggctctgctggcgagacgaaacagctgtagagatgaaaacaggctgcagaggctggcacagctggccggcttttctccatctggggacagtcctactccaagaacactgcacaccagctcctcacacagatcccacttacggcgcgcaacgggttctaggctgcaggcagctcgaggacccgcggccccgccccggctcggcctggcagatagcagaggcagcaggcgtgccgggggggcatgttgctgtaaccagtggcccaggggatgttacggtggacagtgcacctggagggcgggccccgcagggtgaaccatgctgcagtggctgtcgggcatcgggtatactccttcgggggttactgctctggtgaagactatgagacactgcgtcagatagatgtgcacattttcaatgcagtgtccttgcgttggacaaagctgcccccggtgaagtctgccatccgtgggcaagctcctgtggtaccctacatgcgctatggacactcaaccgtcctcatcgacgacacagtcctcctttggggcgggcggaatgacaccgaagggcctgcaatgtgctctatgcctttgacgtcaatacgcacaagtggttcacaccccgagtgtcagggacagttcctggggcccgggatggacattcagcctgtgtcctaggcaagatcatgtacatttttgggggctacgagcagcaggcgactgtttttccaatgacattcacaagctagataccagcaccatgacatggactcttatctgtacaaagggcagccctgcacgctggagggacttccactcagccacaatgctgggaagtcacatgtatgtctttgggggccgtgcgaccgctttgggccattccattccaacaatgagatttactgcaaccgcattcgagtctttgacaccagaactgaggcttggctggactgtcccccgactccagtgctgcctgaggggcgccggagccactcggcctttggctacaatggggagctgtacatctttggtggttataatgcaaggctgaaccggcacttccatgacctctggaagtttaatcctgtgtcctttacctggaaaaagattgaaccgaaggggaagggccatgtccccgccggcgccagtgctgctgtattgttggtgacaagattgtcctctttggggtaccagtccatctcctgaggaaggcctgggagatgaatttgaccttatagatcattctgacttacacattttggacttagtgggagctgaatgccatgaccaccaacagcaatatcagtcgccccatcgtctcctcccatgggtaggaggaagtttctgccacctcccctcctgagcctgctgtcatcttcactgcccctgcccatctgtcacccacctgctccttgacccctggacttggtatacctccatgtggagttgttgggcgagaggtgttctctgtgctgtgaactcagtggggagctgtagcgggtgggggcatggttcctccccccttggccgagggttccccttggtgctctgtccccatccacctcctttcagctgctcctgggcctcagctctgcccagggccagccaggttctgctgggaagggaagggaatggggagaagggagaagcaagcagtgtctgagcctcaggagcttccccctccccctttgcctatcccctcccctctgcttgagccttgagccttgactgggagctgaaaggagttgcagctgttggcatgagacctccttctccccgtcttggggaggtggggaccagcagataaatcccacccttccttgagctgtcgctgtactctgaagttcagccagctcagattttatctcgtgccgaattctttggatccactagtgtcgacctgcaggcgcgcgacgtccagcttttgttccctttagtgagggttaatttcgagcttggcgtaatcaaggtcatagctgtttctgtgtgaattgttatccgct

SEQ ID NO: 32214 - DNA, 2126 bp, Homo Sapiens
ggaccctggagcggtgtctgacggaagtcggcaaagccacgggtcggcccgagtgcttcctcacgattcaagagggattggcatcaaagttcacttctttaacaaaagtgctttatgactttaataaaatattagagaatggtaggatccatggaagccccttgcaaaaacttgtgatagaaaattttgatgatgagcagatttggcaacaactggaattgcaaaatgaaccaattttacaatactttcagaatgcagttagtgaaacaattaatgatgaagatatcagtcttctcccagagagtgaagaacaggaacgtgaagaggatggttcagagatagaggctgatgacaaggaggacctagaagatttagaggaggaggaagtgtccgacatgggtaatgatgatcctgaaatgggtgagagagctgaaaactcaagcaaatctgatctgaggaaaagccccgttttcagtgatgaggattctgaccttgactttgatatcagcaaattggaacagcagagcaaggtgcaaaacaaaggacagggaaaaccaagagaaaagtccatagtagatgataaattcttcaaactctctgaaatggaggcctatttagaaaacatagaaaaagaagaggaacgaaaagatgataatgatgaggaggaggaagatattgatttttttgaagatattgattctgatgaagatgaagggggactgtttggaagtaaaaaacttaagtcaggtaaaagttccagaaatctgaaatacaaagatttttttgatccagttgaaagtgatgaagacataacaaatgttcatgatgatgagctggattcaaacaaagaagatgatgaaattgctgaagaagaagcagaagaactaagtatttcggaaacggatgaagatgatgaccttcaagaaaatgaagacaataaacaacataaagaaagcttgaaaagagtgacctttgctttaccagatgatgcggaaactgaagatacaggtgttttaaatgtaaagaaaaattctgatgaagttaaatcctcctttgaaaaaagacaggaaaagatgaatgaaaaaattgcatctttagaaaaagagttgttagaaaaaaagccgtggcagcttcagggggaagtgacagcacagaagaggccagagaacagcctcctggaggagaccctacactttgaccatgctgtccggatggcacctgtgattacagaggaaaccacccttcaactggaagatatcattaaacagaggataagagatcaggcttgggatgatgtagtacgtaaagaaaaacctaaagaggatgcatatgaatataaaaagcgtttaaccttagaccatgagaagagtaaattgagccttgctgaaatttatgaacaggagtacatcaaactcaaccagcaaaaaacagcagaagaagaaaatccagaacatgtagaaattcagaagatgatggattccctcttcttaaaattggatgccctctcaaacttccactttatccctaaaccgcctgtaccagagattaaagttgtgtcaaatctgccagccataaccatggaggaagtagccccagtgagtgttagtgatgcagctctcctggccccagaggagatcaaggagaaaaataaagctggagatataaaaacagctgctgaaaaaacagctacagacaagaaacgagagcgaaggaaaaagaaatatcaaaagcgtatgaaaataaaagagaaggagaagcggagaaaactgcttgaaaagagcagtgtagatcaagcagggaaatacagcaaaacagtagcttcggagaagttaaaacagctgaccaaaactggcaaagcttccttcataaaggatgaaggtaaagacaaggccttaaagtcctctcaagcattcttttctaaattacaagatcaagtaaaaatgcaaatcaatgatgcaaagaaaacagaaaagaaaaagaagaaaagacaggatatttctgttcataaattaaagctgtaatatattttgaatataatgtaaatattaatgtgtaagcttatattgtgtcattgttctgttttataataaaattcttgagaaccttaaaaaaaaaaaaaaaaaaaa

SEQ ID NO: 32215 - DNA, 5869 bp, Homo Sapiens
ctcgaggatctcggctcactgcaacctccgcctcccaggttcaagctgttcttctgcctcagcctcccgagtagctgggattacaggcgcctgccaccatgccctgctaatttttgtatttttagtagagatggggtttcaccgtgttggccagactggtctcgaactcctgacctcgtgatccacccgcctcagcctcccaaatgctgggattacagatgtgagccaccgcacccggcctggcagaggatactttttaaggtcaaagacagtagcagaggtggagttcctgggaacagggtcatgaggggaagagggggttcggagggagcgagtagccactggctacctctagaaagggaaggctttggtgcaacatcgttcccctgcagttttactcatctttgcttcctgccctttcatcatccaatcgggcaggcaggacagggcctgagggggcagggatccagtgggtgcctctctagactaaccccagctcaggactcccagagccccttccctgaggccctgctgcccccaagcccagattggggatcccaagcagcacgtaggcagagccagtgaggtccccgttagtcccattgaaagctctaaaaccagcgaaccctcagtccagcctcaggtcaggcatccaggacggcctcagccctcatgggtgagccatctctgcggacactgcacagggcctacgatccatcgctgcctcccgaggatgccagccaggcccccgttgagataactgcttccctgctggacaaggctgggaccagccatctcggtgacagttccagaacccctggcctgggctgctgggttcaatggaaaaaggctgtgactagagtcagggggatggtctcagtgacctcaaggataaggccagatccttgcactgtcagtgacccaaagcaacaggtgtccagagcagcagtgtggcgccttcacgcccccacacatcagcccaactcacccaggacagggactgtagcctcagcactcaacccatgtgccctgtgtggggtctcttcccactgcactcacaggagaggaagggtccctcaggggtccactggggtcccctcctgcaaatggggcaaggagaggggcaaggggctgtctcaaggcccctggagcacatgcaggtcctggactggggctcctgggagggccatgattctgggctccatgagttcagagcagacgccttgtttttccttgtccactgtcagccaccccacccttccctgacccttaaaagaaccaggaaacagcacatgatctgttggaaggaggcattcattctttcctttctgtgggtgtggggaggggaccacagggcacataccccaccctgggatccagctgagcaggggggtcagagatgacagctcttccggctcacaggccaccggcccacatacagggcaatcagaagaaagaaacagcacaaggaaggcacagagggagtcgttgtccctgccagaggtgcagcactccgggaatgtccctcactctccccgtccctctgtcttgcccaatcctgaccaggtgcagaaatcttgccaagtgtttccgcaggagttgctggcaattgcctcacattcctggccttggcaaagaatgaatcaacccaccctagatcccataaatagggccacccaggtgagcctctcactcgccacctcctcttccacccctgccaggcccagcagccaccacagcgcctgcttcctcggccctgaaatcatgcccctaggtctcctgtggctgggcctagccctgttgggggctctgcatgcccaggcccaggactccacctcagacctgatcccagccccacctctgagcaaggtccctctgcagcagaacttccaggacaaccaagtaaggggccaagaggggcacctgcaggcagggcctggggaagagtgggagcagaggggaggagaggtgaagagactcaggaagagcgttgggcaggacttaggagtccagggtccaggtttcagctcactctgtgccaccagggtcccctggtggaaaccatgccccttccccccatccccaccccctctcagcctgaacagactcccccaggtccacatcccctctcccataacccccattgtccaaagaaggtgggagcacttttagtccccctgcacagatgaggaaactgaggctcaggaaggcccaccagccacatgcctcctccagtgaggaggtcaccctcctccctgccagactcagaaccgcctcttcccccaggactcccttctggactgatggcctcctgctcctgccccttcaccagtgcaggcccagcctgggccctgctgcccagctagaggggctcatggttccaagctgggcggcccagaggtgccacagggacagagctggaggggtggctcctagggccattcctgggttgtgcctcttatcagtcccttgcagttccaggggaagtggtatgtggtaggcctggcagggaatgcaattctcagagaagacaaagacccgcaaaagatgtatgccaccatctatgagctgaaagaagacaagagctacaatgtcacctccgtcctgtttaggtgagggccgacatctcctgggggtgtgagagtcagactgacgtcacaggcaagggatggccaaagctgagggatcctgtcgttcacctcgctgttctgcccggaattcatctgtgttcatccttcctctgttccttagagcaacgtttatagcacatttccatgcagacacacagacagtggtggggatggacatgcacagtcgttagaaaacaagacggagagaggaggggtgcctgggagcgggaggaggggacactggatccagcctggaaccccacccagtgccttcatggaaggcttccagggaggtggccttaaaagagccaacctgcttcaaaaggaaatgtggggtgttcccggcaggggctggagtcagagagagcccccccttcaggaaggagcaagccatcgcagggtcaccctgagcagagctgctgagcagcctggaggggcaggtggccacgctagcacctagcacggtcctcaggccccgccccagcggatctgctgcggagtggcttagagcagggctcttgggccgcagggtggggagacttggtggggtgcagcctagggggtcgggagaccagcgaaagtgaagcggggccgtcacaggtgtgagagaacaggcgcagggtgaagaggcagggagccagggatcagccgcccccagtgggtttctgactctggcagctgagtggattgggattggggcatttgtggagcaaggagcagaatacagacaggttggggagctcagccctggggtgccaggggatgggaagtgggaggactcaaggatggggtcaggtttgacccgagagctaggggaacggctggcatggagcagactggaagtaccgaggtggatccccgggagagggtataggaagggaagcagcaagctgagtgcaggggagaaatgcagggtttcctgtgtgttgggtggcggcgggggtgaaagccacccagggaggcagccaaaggaaagaaggacatcgggtgctggagggtctgagtggggtccaggggccccaggcaggccaggagggacagcctggtgtcagctcagggagaaggcccaggcccatctcggctgggtggggtagggcccctccaggtagtgggggatgagctgtcacgggttgggccggactgagagcaacagaaccctgctgctgccctggccccaccttgtccagcacaggaggcccaagcctgggttgtctcccctctcacccacccatctctccctcccaaggaaaaagaagtgtgactactggatcaggacttttgttccaggttgccagcccggcgagttcacgctgggcaacattaagagtgagtcttgagtgaggtggggcactgagttggggctccggggagctgggtaggggcacagaccttcctgcccctccacacagatgtgttgtatggggagaagcccacgttgatgggctggggagggaggggacagctccctcctcccatccagggcagggctgacccctcaccgtccacgcctgcaggttaccctggattaacgagttacctcgtccgagtggtgagcaccaactacaaccagcatgctatggtgttcttcaagaaagtttctcaaaacagggagtacttcaagatcaccctctacggtgggtcctctcccatcccctcggggactggctcctgatcacacttagtgggaggggaggccggtcccccatgaggaagggatctgaggcctcatctactcattcaacgatatttatgtggtgtctgccggccactcactggccatcttggtcacagggagaaccaaggagctgacttcggaactaaaggagaacttcatccgcttctccaaatatctgggcctccctgaaaaccacatcgtcttccctgtcccaatcggtaatggccagtctggatgaggggacggggacatggggactgttcaggcaggatgcttccctaccagggatcagggagaggagggactccgtcctcagcttcagtcactggagcagtggatggtccaggagctccttggaagccactctgggcccaggaagactgtgccccaccccagggtctatgggactcccagggacccaggccgcaagtgctctttcctggcagtttagcccgggtctgcccagacaaggatttcaggcccaggcctgagtatccatttctcagtctcactggcctgacacctctggccaccctcccaggcccccttgttctgggccatctcccccgaccctcccaggcctcgtcaccctgggttttgctgtcctggctgtcctctctcccctggggacttgctcaccactgacttgggagctgtccttgactccagggagcctggcttgggcaggaggctccagccaggccattcagagagccactggcctcccccaggctgagagactgcctggactggtaaacaggcaggagacctgggtgcccgaggagcctgggagctgggcctcactcagggcagcccctccccaggcctttctcccacatcccctgccctgccatccacccctctgttgccccatctctgaaaggaacccccatatcttctgcagctgggccaggtggggcaggggctgcccaggggcagtgcagaggacctggcagtcagggatcacacacacacactcatacacgcacacacacacacagctgcctgttctgacggactttctccctaacagaccagtgtatcgacggctgagtgcacagtgagtgtggctgggcggctgcgagggggcttgtgggaggccagggtgcagtgggctgggggtcttgggcctgcctttgctcatccccctgccccccagcactgctgctgtctttattctgctgtccccatctcgggtgcctcccatttccccacccatcaccctcatatccacctctgtccagggtgccgccagctgccgcaccagcccgaacaccattgagggagctgggagaccctccccacagtgccacccatgcagctgctccccaggccaccccgctgatggagccccaccttgtctgctaaataaacatgtgccctcaggcctctgagtctacactgtttgacccctgggccttcgaggaaggggaggggcgggaggctcccactggcatcactctcagggtctgcacccccaggatggagcctagcgaacccagcctgggtgttagggctgcagagtgaagacacaagcccctggtcatcaccagcagctttgtgg

SEQ ID NO: 32216 - DNA, 2046 bp, Homo Sapiens
ggatcttactgtggtggccgcgccttcagctgcatctcggcctgtgggccccggcccggccgctgctgcatcaccgctgccccctaccgtggcatctcctgctaccgcggcctcaccgggggcttcggcagccacagcgtgtgcggaggctttcgggccggctcctgcggacgcgacttcggctaccgctccgggggcgtgtgcgggcccagtcccccatgcatcaccaccgtgtcggtcaacgagagcctcctcacgcccctcaacctggagatcgaccccaacgcgcagtgcgtgaagcaggaggagaaggagcagatcaagtccctcaacagcagattcgcggccttcatcgacaaggtgcgcttcctggagcagcagaacaaactgctggagacaaagctgcagttctaccagaaccgcgagtgttgccagagcaacctggagcccctgtttgagggctacatcgagactctgcggcgggaggccgagtgcgtggaggccgacagcgggaggctggcctcagagcttaaccacgtgcaggaggtgctggagggctacaagaagaagtatgaggaggaggtttctctgagagcaacagctgagaacgagtttgtggctctgaagaaggatgtggactgcgcctacctccgcaaatcagacctggaggccaatgtggaggccctgatccaggagatcgacttcctgaggcggctgtatgaggaggagatccgcgttctccagtcccacatctcagacacctccgtggttgtcaagctggacaacagccgggacctgaacatggactgcatcattgccgagatcaaggcacagtacgatgacattgtcacccgtagccgggctgaggccgagtcctggtaccgcagcaagtgtgaggagatgaaggccacggtgatcaggcacggggagaccctgcgccgcaccaaggaggagatcaacgagctgaaccgcatgatccagaggctgacggctgaggtggagaatgccaagtgccagaattccaagctggaggctgcggtggctcagtctgagcagcagggtgaggcggccctcagcgatgcccgctgcaagttggccgagctggagggtgccctgcagaaggccaagcaggacatggcctgcctgatcagggagtaccaggaggtgatgaactccaagctgggcctggacatcgagatcgccacctacaggcgcctgctggagggcgaggagcagaggctgtgcgagggcgtcggctcggtgaatgtctgcgtcagcagctcccgcggtggcgttgtctgtggcgatctctgcgcctccactactgcccctgttgtctccaccagagtcagtagcgtccccagcaacagcaacgtggtggtgggcactactaacgcctgcgccccctccgcccgggttggcgtctgcggcggcagctgtaagaggtgctaggaggctgccgcctccgccagcgcctgtcgccgtcactctccacccagccagtacctcgcgccaggagaacgcgccgcccgcgccggcctcccaatagccgccgcccgctgcctgcactctaagcgctctccccacgtccgctccgggagccatccccggtcgcaggagtccggggagggccgggaggcgccatggtctctctctgtagcctttcctggtagtcaatttgttgtcccgaggattcatctttttcttcctcctaccttctgttttttttttcatgtatgcattggtcttgcctgagctcttcctcaaagcttggaggaacgggggagggcccgggaatgtccctgtctgcacgacctgggactctgcccatgtgcttttgcctgtggaatggagacgcggaccctggatagtggttctatgactctgcgagggacaggcccacgcgtgtggggagaacatctccttccggggctgccctcaagagcttctgaaaaactaatgactctgctgccttctcctttgtctttgtttcactctgtgtttccaataaactcattgtagcgaatcaaaaaaaaaaaaaaaaaa

SEQ ID NO: 32217 - DNA, 812 bp, Homo Sapiens
ccccgctctggcccaaccggccttccctgaggacacactgctttggccggcccccacccaatcttctctccgccagtccccggtgtccaccccagccccgctaccgatgaagctcaagccagggtccccatcacctgcttcacggccatccctgcacttgagctcaggggctcagggttgtgctgacacgcctgcctgtcacccctcaccgacacctctgcagtcctcctcagggcccaacaggacccccaggaccccgctcccattctgcccttgctcctgccaacctgtcttctctatgcccatgactttggaaccctctgccacaagtgccagcccccacatctgtagcccctgcaggaacaagccctaatctggactcattgcaatggctcagcttctcttccaacctgtccataaacctccaggcagagatcacaaaactaacagctctttctgcaaatctggactctctcctccaccttcttcaccgtccaggcctccctgtcatccgtcctggggacctcagagatctcttcatttcacaggtgaagacttggctcagagagggcagagcccctgggtcacacagcccgtctccagtagggctggggaaaagaacccagggcgctcttgttggcagtgttttaatgactggcgggagggagagaatggctaatgaggctctaggcatcagcacagccagctgctggaggtcccagaggacgggtgactcagcaggaatgggggagtctgaggggttgacagagtgcccaattctcacctcctcctgcaccttccagagagacggg

SEQ ID NO: 32218 - DNA, 481 bp, Homo Sapiens
tctccttgccgggtcagccctgacaaaggtcagctagccccttgaggacatcagctttggcctcagggtcctaatggcagcagaaccactgacagagctagaggagtccattgagaccgtggtcaccaccttcttcacctttgcaaggcaggagggccggaaggatagcctcagcgtcaacgagttcaaagagctggttacccagcagttgccccatctgctcaaggatgtgggctctcttgatgagaagatgaagagcttggatgtgaatcaggactcggagctcaagttcaatgagtactggagattgattggggagctggccaaggaaatcaggaagaagaaagacctgaagatcaggaagaagtaaagccgcctggctgagatggggtgggcagggcagagctgatcagggccgagcagaaccgcactcttcccaaataaagcttcctccttgaaaaaaaaaaaaaaaaaaaaaaaa

SEQ ID NO: 32219 - DNA, 4209 bp, Homo Sapiens
acatgcgcattgcgcccgcagccctggaccatttgtcaggactactcgtgagacggagaaaaaaaaaagagaaaatttggggtgctagaacccttaggagaaatcttgagagtggacagcaattgtgaagatcgccagagagttctgtgtttcatcaccgccgaaaggttaaaaaataaatcatgactgaatctgcctctagcacaagtggtcaagagtttgatgtgttcagtgttatggactggaaagatggagtgggcacgttaccaggaagtgacttaaagtttcgggtaaatgagtttggagccctggaagttattacagatgagaatgagatggaaaatgttaaaaaagcaactgctaccaccacttggatggtaccaactgctcaagaagccccgacctctcccccgagctccaggcccgtatttccacctgcctactggacatctccacctggatgtcccacagtcttttcagagaagactgggatgcctttcaggttgaaggatccagtgaaagtagaagggcttcagttctgtgagaactgttgtcagtatggcaacgtagatgagtgtctttctggaggaaactattgcagccagaattgtgctcggcacatcaaagataaagatcagaaggaagaaagggacgtagaagaagacaatgaggaagaagatcctaagtgtagtcggaagaaaaaaccaaaattatctctgaaagctgacaccaaggaggatggagaagagagagatgatgaaatggagaacaaacaagatgtaagaatcctgaggggttcgcagagagcacggaggaaaagacgaggggattcggctgtactaaagcagggtttgcctcctaaaggaaagaaagcgtggtgctgggcatcctacctggaagaggagaaagcggtggcagtgccggcgaagctgttcaaggagcatcaatcctttccatataacaaaaatggattcaaagttggcatgaaattagaaggcgtggatcctgagcatcagtctgtgtactgtgtcctcaccgtcgcggaggtttgtggataccggataaagcttcactttgatgggtattctgattgctatgacttctgggtgaatgcagacgctctggatatccacccagttgggtggtgtgagaaaaccggccacaaactccatcctccaaaagggtataaagaagaagaattcaattggcagacctatcttaagacatgtaaagctcaagctgctcctaagtcattatttgaaaatcagaatataacagtgatcccatcgggctttcgagttggtatgaagcttgaggcagtagacaaaaagaatccctcattcatctgtgttgctacggtaacagatatggtggacaatcgtttcctggtacattttgacaactgggatgagagctatgactattggtgtgaagcatcaagtccacatattcatccagttggttggtgtaaggaacatagaagaacccttattactccaccaggttatccaaatgtgaaacatttttcttgggataaatacttagaagaaaccaattctttacctgctcctgcaagagctttcaaagtgaaacctcctcatggattccagaaaaaaatgaagcttgaggttgtagacaaaaggaaccctatgtttattagagtagcaactgtggcagacacagatgatcaccgggtaaaagttcactttgatggctggaacaattgctatgattactggatagatgcagattctcctgatattcaccctgtaggctggtgttcaaaaacaggacatccccttcagcctcctttgagccccttagaattaatggaagcttcagaacatggtggatgctcaaccccgggatgtaaagggattggccatttcaagagagcgagacatctgggccctcacagtgctgccaactgtccctattcagaaatcaatttgaataaagaccgtatttttccagaccgcttaagtggtgagatgcctccggctagtccgtcatttccaagaaataaaaggacagatgcaaatgaaagctcttcttcccctgaaatcagagaccagcatgctgatgatgtcaaagaagactttgaagagagaacagaaagtgaaatgagaacatcacatgaagccagaggtgcccgggaagaacccaccgtccagcaggcacagcgtcggtcagctgtctttctgtcctttaagtccccaattccatgtctgcccttgcgctgggagcagcaaagcaaacttcttccaactgtcgcaggaatccctgccagtaaagtttccaaatggagcacagacgaggtgtcagaatttatacagagcttacctgggtgtgaagaacatggaaaggtatttaaagatgaacaaattgatggagaagcatttctacttatgactcaaacagacattgttaaaattatgagcattaaactgggccctgctctcaaaattttcaattccatcctgatgttcaaagctgcagagaagaattctcacaatgaactttgaagatggtgaattctgaataccatcagcattctgctttaaagctcatgttttattcaaagcacaaggacggttataactcctaagtgagaagtctccaaaactcaaaagagcaacactatcggattatttatattactcaagagacaatatatatgaattcttatgaaagtgcttgagcttttaaccaggtactgtctaacaacagtcatcttttggttctgttcactgagctaaatttatctttgtaaatctttttgagtctggggggtggggggaaggggggcttcattaattatttatggtaatggggggcagagtaagaacttttggcattttgtaaacattgttgaattctctttcatgtacactgtttctttttcaatactttcagaaacctttttatataatcaaatttcaatttaaaccaaattagtcgaaacctggctaagtttagccagtaggactgttatctgtattgttaattttgtgccatattttgaattgcaacattatgctaagtataactttgcaagtcatgatattgcctaactgcttgtcataattgtcagggctgaatagttgtaagaatgacttttctttgaatcagtatttttccttttgcacgcattatgaaatgttaaacaaattacttttcaccagcatctttactataattaccaaaaacatgtatataaaagaatgaaattgaaaaataaaatatataaacataaataaattaggtagtgtattttgagtggcatcagtctcactcatcttggtgccccggtgtttacaagagccagatggtgtcagaggagtacgcagttgtatgcagttatggttggggggaatgtttgtgagggtcttgaactatttatgagatgatcttgagcttctaattttcattgatgaaattgtggtggtttacagagactaagagctcattctgtcaacagaaacactaatctgtacagagcgctgtctcaggtcatgcattgtcctccaaacccaaaggtttttttcagggttggctagagagcgagtattgtgattttgctgaaaagacaaggtgtgaaggagcaacttcagttgacacaaaatttgaaatgctcacagatcagggaggtgatttcccaaagtaattgcccaagaacctccgttttggaaggattcctttttctgtagaatactttgcctcgatatataagcatacagatgcactttaaatgaaaacccttgattataaattgatagctggtagtgtttcttttgcaagaatgcatttctaaggcaaaaggtaaattattttgtccgtcttttgatgtactttctgattccaggattggatatttattcaaggactattttaaaaatagaaagtaagtttgtagcatgctgtctgaattctggggtaagttccacctcttctttagttgctttcgttttttatgatgtaggacttcctttgatatccctgttggaagtccattagcagtcctttgcatttgccaattcaaggtaaaacagggtcagtgacatctgcagtgtcccagtcatttatttgcatgaatctgcttaaataagttttttgttgctgttttttcttttttatgttttgttcagaatttgtacattcaagttgtacttgttatatctgacatgaatgaaataaaatcttaattac

SEQ ID NO: 32220 - DNA, 4373 bp, Homo Sapiens
ggcggctcacgcgggttcccaggagctgattgatggattttcaggaattctggaacccgagcgtcatgttagggtgaagcagaggacctcagtgctgaacatgctaaggaggttggacaaaatcaggttcagaggtcacaagagagatgacttcctcgatctagcggagtctccaaatgcctcggacaccgaatgcagcgacgaaatccccctgaaggtaccgcggacctcgccccgggacagcgaggagctgagggaccctgctggtccagggaccctcatcatggccacaggagtccaggactttaaccggacagagtttgatcgactgaatgagatcaaaggtcacctggaaattgccttattggaaaaacatttcttacaggaggagctccggaagctgcgagaagaaaccaacgcggagatgctgcggcaggagctggaccgcgagcggcagcggcggatggagctggagcagaaggtgcaggaggtgctgaaggccagaaccgaggagcagatggctcagcagcccccaaaagggcaggcccaggccagcaatggagcagagcgccggagccaggggctgtcctcgcgcctgcagaagtggttctacgagcggtttggggagtacgtggaggacttccggttccagcccgaggagaacactgtggagacagaggaacccctgagcgcccgcaggttaactgaaaatatgagacggctcaagcgcggtgccaagccggtcactaactttgtgaagaacctctctgccttatccgactggtactccgtctacacgtctgccattgccttcaccgtgtacatgaatgccgtgtggcatggctgggccatcccattgttcttatttctagcaattctgaggttatccctcaattacctcatcgccagggggtggcggatacagtggagcatcgtgcccgaagtgtctgagcccgtggaacctccaaaggaagacctgactgtgtctgagaagttccagctggtgctggacgtcgcccagaaagcccagaaccttttcgggaagatggctgacatcctggagaagatcaagaacttgttcatgtgggtccagccggagatcacacagaagctgtatgtggcgctctgggctgccttcctggcctcctgcttcttcccctaccgcctggtggggcttgccgtgggactctatgctggtatcaagttcttcctcattgatttcatctttaaacgctgcccgaggctgcgcgccaagtacgacacgccctatatcatctggaggagtctccccaccgacccgcagctcaaggagcgctccagcgccgcagtctcacgcaggctgcagacgacctcgtcacggagctacgtacccagcgcaccggccggcctgggtaaagaggaggacgccggtcgcttccacagcaccaagaagggcaatttccacgagatcttcaatctgacagaaaacgagcgtccgctggcggtgtgcgagaatggctggcgctgctgcctcatcaacagggaccggaagatgcccacggactacatcaggaacggggtgctctacgtcacggagaattacttgtgcttcgaaagctccaaatctgggtcctcaaagaggaacaaagtcatcaagctagtggacatcacggacatccagaagtacaaggtcctgtctgtcctcccaggctcaggcatggggattgccgtgtcgacgccatccacccagaaaccgctcgtgtttggtgccatggtgcacagggatgaggccttcgagaccattctcagccagtacatcaagatcacctcagcggcagcgtctggcggggacagctagtattgacttgcccaggacgttgctggaattttctttttctttttctttttctttttttttttttacgatttggtagtggaaacaattggacatcctcatgagcttttgcaataattctcctggacctgtggttctattgtgttgacctctgcgttttatcgaccaagaaggggccagggctcacagggacgggggtgcccctctcccacagggcacgtcaggtgcctctgagggccacccgcagactgggggagggggcagaggccctcgggggcccgtggagaagacacacaggacccctggccctgcccttctccgttccagcctggacagagaaacctctccagccaccccaagaggttctcgcaaccttgtgtcccgctctccagaggccagaagctcgtccaccaccaaagccatagctgaagagtgcggggcccttcctcctggggacagaaagatgtcgtcaaggagggacatgggggcctttcaccaaccaccgagaaacgggcctggcggccctccttcctcttacatgagaccctcctgtggcatttgcccttggtgccgggctggggccgggcgcagtgaccctgcctgcgctccacactcgctccacgggaacagagagggtgagaagggcccacccctcgcctgccctcagtgtctttggtggcaccttccttgctggcctccagggcgctcagcaccgcgtctgtaagggcctgcctgctgctctcggcctgacacgccggccaggaggtctgtagctggggaccagtaagggcacaggatggtgcaggtaaaagcacatctttctcacactttgctctttggaaggcccaggagaacatccgcgaaggctgttggaggtgctccgagcactgtggcatgtctggcacatggcccccaggctgcggttgcctgggttggttgggggaggaagtggggaggagtgttccgggaccatggtggcccaggctgcagccgcctttgggccatccgagaggctctggcagcccctgtgctttagggagcaaccgtgagccgagcccagaggcctgggcctgcactgcctgcagccgacatgcgacagcgttccctcccccgcgtgcctagccggtgccggtccgggcacagacccccccagcccccgccctgccccagggaagcctgggcttcccgggaacaaggtggcatttgtggagggagcgcccgcaggcctggtctgctggggccgcctgcgctgggctgaagggagggaaaggcggcttgggcctcctggaaggaggtggccaccccgcgggcctgcgtgtctgctggggcggatcccgcagctccctcagcttgtcctgagtcccttgggtgtcgttgagattgttgttttttgaagaaacagaagattctattttttacagcgagcaagctggttttcttatttttgtatcctttttcagatgtaatttttatctttgctccgatcctcatttgctggtgtgggtgagggatccggcggcatgggctggtttcacccccttcacgaggggccgcagagtcacacgctggtgccgggggtgctttggggggagctgcgccgatcaccagattaagcacatgtcctatcccaggcggtggagcggagcccccgtggctctggactgcgcggacgttggcgtcaggatgaccacacggcggcctttcccgaatggggacagaacccgctctgagccgtgggtctggctcctgtaggggactggctctcttggtgcaccaggggagggggacatatcccagtgaaccccaccttggcgcctgaggcaacacagggtgggcactgacccacccccaggggcggctgcagaggcagtgcccgcagacaatggccacacctctctccccagggcccggcagtgcccaaggatgggtccggggcctcggggccaatgagcgcctcttcctaggtgctgggattcagtccccaaacacagcgggaggggtccctggggcagatggggctttaccagcgtcgggtggtttagttcgagtcccttttgtggagaaagggagatgaaaactgaccacgtgccaggtgtggccgaagcccccagggagggccacattcggggagcggggggtcgggggagggccaccgactggctctgctgccagcacaggcccctccctggaagtcctcgggagcggagcgcggatcggcacgggctctgggctccccgtggagagaagctgtagtttttaccaaattgtgtacatctgggcagatgtttaatttctgtgactaatcactgaactagacgaatgttaaattttttatgtctgaagcctgagtctattttggatctgtaaataatcattgccagtgtgacttttgttcaacaaaaggattgtactgtattaagaaccgatgaaaaaaattctcctgtaacatttttttaagaaaactttgtttgtttaaagaaaaagtattgtataaattataatttttatttaaataaacctaaaatgctttgtgctaagg

SEQ ID NO: 32221 - DNA, 7136 bp, Homo Sapiens
aatatttctacggaaggcgctgcacagactagcaaaggctgtttcttttacctgactgaggtcactgcatcagctgaaggcagacgatgtgcttaagcctgagtggagcagagatgggcaccagttgcgtcttgaagtgccatcagctgtaaccaaagttccacatcccaagacgacagccaggcgttcctgccctcaagaactgaagacaatggagctctctgatagtgaccgacccgtcagcttcggttccacatcatcctcggcctcttcccgcgacagccatggttccttcggcagcagaatgaccttagtttcaaatagccacatgggcttgtttaaccaggataaggaggtaggggccataaaactggagctgattcctgccaggccgttttccagcagcgagctgcagagggacaaccccgccacggggcaacagaacgcggatgagggcagcgaaaggccacccagagcgcagtggagagtggactcaaacggggcacccaagacgatcgcagactcggccacgagccccaagctcctctatgtggatagagttgttcaggaaattctggaaaccgaaaggacttatgtacaagatttaaaaagcatcgtagaggattaccttgactgcatcagggaccaaacaaaacttcccctggggaccgaagaaagatcagccctttttggaaacatacaggatatctaccacttcaatagtgaacttctgcaagatttggaaaactgtgaaaatgatcctgtggccatagcagagtgttttgtgtccaagagtgaagagttccacatttatacccagtattgcactaactatccaaggtccgtggctgtgctaacagagtgtatgaggaacaagatactggccaaattcttcagggagcgtcaggaaactctgaaacactcgctgcctctggggtcctatctcttgaaaccagttcagcggattctcaagtatcatctccttctgcatgaaatagaaaaccaccttgataaggacacagaaggctatgatgtggtgcttgatgctatagacacaatgcagcgagtcgcctggcatatcaatgacatgaagcggaaacacgagcacgcggtccggttacaggagatacagagtttgctcactaactggaaggggccagacctgaccagctacggggaactggtgcttgagggaaccttccgcatccagcgagccaagaatgagcggacgctcttcctcttcgacaagctgctgctcatcacgaagaagagagatgacacgtttacatacaaagctcacatcctgtgtggcaacctcatgcttgtggaggtgattccaaaagagccgctcagcttcagcgtcttccactacaagaatcccaagctgcagcacacagtccaggccaaatcccagcaagacaaacgcctctgggttctgcacctaaagagactgattctggagaaccatgcagccaagattccagctaaggccaagcaagcaatccttgaaatggatgccattcatcatccaggcttctgttacagtcctgagggagggacgaaagcactgttcggctctaaagaaggttctgctccatatcggctgagaagaaaatctgaaccttcctcacggtcacataaagttttgaagaccagtgaaacagcacaagacatccaaaaggtttctagagaggaaggatctccccagctgtcttcagcaaggccgtctcctgcccagagaaatagtcagcctagcagttctaccatgatcagcgtgcttcgagcgggtggagctctcagaaacatctggaccgatcaccagatcaggcaagccttgtttcccagccgacggtccccgcaggagaatgaggatgatgaagatgattatcagatgttcgtgccgtcattttcctcctcagatctgaactctaccagactatgtgaagatagcacttctagtcgcccttgcagctggcatatgggacagatggagtccacagagacctccagctctggtcacaggattgtcaggcgggccagcagtgctggggagagcaacacatgccctcctgaaataggaactagtgacagaactagggaactgcagaacagccccaaaacagaagggcaggaggagatgactccctttgggtcatccatagagttgactattgatgacatagaccatgtctatgataacatcagttatgaggacttaaaactaatggttgctaagcgggaagaagctgaatccactccctctaaatcagccagggactccgttcgccccaagagcaccccagagttagccttcacaaagaggcaagctggccacagtaagggctctctttacgcacaaacagatggcaccctctcaggtggagaggcatccagccaaagcacgcatgaactccaagcggttgaggagaacatctatgacaccatagggctcccagatcctccgtcgctgggttttaagtgcagcagcctaaagcgtgcaaagcggagcacctttttgggtctggaggccgacttcgtgtgctgtgacagcctgaggccatttgtttcccaagacagcctccagctcagtgaggacgaagccccttaccatcaggccactcccgatcatggttatctgagtttgctgtatgactctcccagtggtaacttgtctatgcctcataagcctgtatctgataaactgtccgaagaagtagatgaaatctggaatgacctggaaaattacatcaagaaaaatgaagacaaggccagagaccgtctcctggcagcgtttcctgtgagcaaggatgatgtgccagacaggctgcacgcagagagcacccctgagctgagccgggacgtggggcgctctgtgtccacgctgtccctgcctgagagccaggctctcctcacgcccgtgaagagcagggctggcagagccagccgcgccaactgcccctttgaggaagacctgatttctaaagaaggctcctttatgagccttaaccggctttctctggctagtgaaatgcccctcatggacaatccctacgacctggccaacagtggcctgtctcaaacagacccagaaaaccctgacctggggatggaggccacagataagacaaaaagcagggtgtttatgatggctcggcagtacagtcagaagattaagaaggcgaatcaacttttaaaagtgaaaagtctggagctggagcagccgccggccagtcagcatcagaaatccatgcacaaagacctggctgccatcttggaagagaagaagcaaggagggcccgccattggtgccaggattgctgagtattcccagttgtatgaccagattgtattcagagagtctcccttgaaaattcagaaggatggctgggccagccctcaagaatcctccctcctgaggtctgtgtcaccttcccaggtccaccatggtagtggagactggcttctgcattcaacctatagtaatggagagttagcagatttctgtctcccaccagagcaagacttgaggtcaagatatcccacgtttgagatcaatacaaaaagtactcccaggcaattgtccgcagcttgctctgtgccttctcttcaaacctctgaccctctgccaggctctgtgcagagatgcagcgtggtagtaagtcagcccaacaaagagaactggtgtcaggaccatctttacaactccttgggtcggaaagggatcagcgctaaatctcagccttatcacaggtcccagtcatcttcctccgtcttgatcaacaaatcaatggattccatcaactaccctagtgatgtgggaaagcagcagctgctgtctttacacagaagttcaaggtgtgagagtcaccaggacttgctgccagatattgctgactcgcatcaacagggcactgaaaaactctcagatctcacactccaagactcacagaaagttgtggtggtcaatagaaatttacccttaaatgcccaaattgcaacacagaattatttttccaatttcaaagagactgatggagatgaagatgactatgtggaaatcaagtcagaagaagatgagtcggagttggagctatctcacaatcgtagaaggaaatctgactcaaagtttgtggatgctgacttttctgataatgtctgcagcggcaacacattgcattctttgaatagtccgcgcactccaaaaaagccggttaacagcaaacttggcctttcaccatatctgacaccatataatgattctgacaaactgaatgactatctttggagggggccatctcccaatcaacaaaatattgtccagtctctaagggaaaaatttcagtgtctcagttcaagcagctttgcttaaggttcttcataataactgcttgaatcaacttcttattttgctcataaaacgttacagatactgatgaggtgttttatgtataccagattaaaacaattttgtaagaaccagaggtgtaaaatatactttcttttacagcacaacttttggaaatggctgacgatgcagcccggattgtactgtagcacatgttggcatcaacagtatattttctcatgctgagtgtcttcatgtttcatgtaagtcaatcttacttgaaagtttttagacttttaacacgatggccataacctgacaatagtgcccacaccttaagaaatgcaataatcctttcctgttatccagaaggcccaggtagttttatcctgtgactcaaaggcagcaaggagactttttcacattttaaaaggcaacgaaagctgttgaaagaattatgcttatatctcacattttggttatatttgtggtaacaccttaggataacgtaagccagagatctgtaaattggactgcagtctgaggtgcccattttagggtttttgtgctagtattcttttatgtcattttgatgcagaaattgtgtgactgttgaaaattaaaatgtagcgggacccattttctgtacgcagaaccctttacctgtattcctggacaaggcctagagaacgagctgctcatcatgtttctaatataatttctggggtgaaatgaatgatttccttactggcttagagaaaaccaaggtcaataaaatgcagattgacttaactattagaaaagatgggatgacttctgggaaccacttaactcttcaaatgactgttgaaagagaaaaagcaaaactgaaatcccaccagaccattttgtgtgcctgtttctaatcgatacaaagttaagcatgagctaaaatcagacaaagcactttaaatttatcctttccagagcgctttgcacatgcaccctcctgagtttgggattctgccaaatgaccaacttgatcctggccctgaggagtcattggctgcaggaatagggcaagaatctatttcctaaactacacataacatgggagcctttttttcgttgttttcaggtatattaaagaatgaaatctttggttactaggtgctgactaataaataacaccttttatattctgaccatttgtcacatttcattgtgatactgtatactgatctaactccttatgaaaggcaacaaacaaaaataagacattgaataaaaagcaaaatcaaagaagctaaagagaaaaatgaaggcagatatattgcaactttataacatattctattttattgaagactgcaattaatgcagcaagaatgctttctcaagcggtggcctttgtattctcattttaatcaggtgtacattctatggcctctcccccatgctgttagtttctattttaaaagatacaataatatatgtagggaaaggggcctgggctcttcatttaaaggtaagcagtaatattgagtaagtgacataattctttttctctttgttaagtcctatgcctctttttcttaactgtaaaacatagaatatgagcgtttttatcttacaaataggtacctaaggcatgtgattttatttttaaataacaaaaaataacccaagtttcttgcttctccaaagtattcttctcatagcttataaaagaaagtccacattgaatagcatggtctgggaacattccttctttattgtgtttatttgaacatgatatgagtttccaagatgaaatgatcaaaaaagataagtaccacaagaaagtttttttgtttggttggtttttttgtttgtttgtttttttcttgagactgagtctctccctgttgcccaagttggagtgcaatcttggctcactgcagcctccacctccccggttccagcgattctcctgcctcagcctcttgaatagctgggattacaggcgcccgccaccacacctggctaatttttgtgttgttagtagaggcggggtttcatcatgttggccaggctggtctcgaactcctgatctcatgatccgtctgcctcggcctcccagagtgctgggattacaggcatgagccactgcgcccggccaagaaagtatgtttttagaggtgtgtgtaagtgcatttgtattacctatgaacaaaattacctgactcttgtcccaggaaagctgtttcgcattttcgctttttgattggtattatccagttctatgtagttcatattattgttctgtctgactctcagaaattacttcttcacgccagtgtcttgttgcatgactttgatgtcacctataggaatacacctcactgcacgtaagtgggtatcttactgtataaaaggtctacatggctttaggttttaggacaaatgtgtagatttatagaccatttctgttggccaggacacagattttgagagctgtgtgtatatatatataatcatgtttgtatttttttcctgaaagttatcaattgcttttgtttaaaacagtttgttttagaggtggggtggggatgtatataacgaggaaaagttatatgtactttaaagtatgtcaagttcttactagtttcctgtactgaaggttcaattttttttatataagtttacttttcacctgctctattctttgtggggaaaaaatgcatctagaaaaacatagtttaaatactgtatataagataatgaaagttagtaacgtccattatttaataaagtttgtaaagtacaaggt

SEQ ID NO: 32222 - DNA, 4871 bp, Homo Sapiens
ggaagatggctgcggagccgagcaccgggcagtggctgcggcggcggcggcggcggcgggccgggagcgcggcgggcgggggctccgccttgcgcgtggggcgctgagccgagaggcgcggaggcggcgagggcgcgggggctctgaggaccgctcggcgccgcctcctgccacaccatgggcagcgcagaggacgcagtcaaagagaaactgctgtggaacgtgaagaaggaggtgaagcaaatcatggaggaggctgtcaccaggaagtttgtgcatgaagacagcagccacatcattgctttatgtggtgcagtggaggcttgcctcttgcatcagctgagacgccgtgccgctggcttcctgcgcagtgacaagatggcagccctgttcaccaaggtggggaagacgtgcccagtggcgggggagatttgccacaaggtacaggagctgcagcaacaagcagagggcaggaaaccctcaggggtcagccaggaggccctgcggagacagggctcagccagcgggaaggccccggccctcagccctcaggccttgaaacacgtatgggtacgcacggcgctcatcgagaaagttctggacaaggtcgtgcaatacctggcggaaaactgcagcaagtactacgagaaggaggcactgctggcagaccctgtgttcggcccgatcctggcctctcttctagtgggaccctgtgccttggaatacactaagctcaagacagccgatcactactggactgacccctctgctgatgagctggtccagcggcaccgcatccggggtccacctactcgccaggactcccctgcaaagcgcccagccctggggatccggaaacggcactcaagcggcagcgcgtcggaggacaggctggctgcctgtgcccgcgagtgtgtggagtccctgcaccagaactcacggacgcggctgctctatggcaagaaccacgtgctggtgcagccgaaggaggatatggaggcggtccctggctacctctccctgcaccagtctgcagagagcctgactctgaagtggacccccaaccagctcatgaatgggactctgggggactccgagctggaaaagagcgtttactgggactatgccctcgtggtgcccttcagccaggtcgtgtgcatccactgccaccagcaaaagagcggtggcacgcttgtgctggtgagccaggatggcatccagaggccgccgctgcatttcccacagggaggacacctgctgtcctttctgtcctgtctggagaatgggctgctgcctcggggacagctagagcccccgctgtggacccagcaagggaaggggaaagtgttccccaagctacggaaacgaagcagcattcgctccgtggatatggaggagatgggcacggggcgggccaccgactatgtgttccggatcatctaccccggccacaggcacgagcacatcactattaactaccaccacctagcggccagccgcgcggcctcggtggacgatgatgaggaagaggaggataaactgcacgcgatgctctcaatgatctgctcgcggaacctcacagctcccaatccgatgaaagacgctggtgacatgatcgagatgcagggctttgggcccagcctgccagcctggcacctggagcccctgtgcagtcagggctcctcctgcctctcctgctcctccagcagctccccacatgcaacccccagccactgtagctgcatccccgaccggttgccgctcaggctactgtgtgagagtatgaagaggcagatcgtgtcccgggccttctacggctggctggcacactgccgccacctgtccacggtgcggacccacctgtcggcgctggtgcaccatagcgttatcccacctgaccggcccccgggggcctccgcgggcctcaccaaggacgtgtggagcaagtatcagaaggacaaaaagaactacaaagagctggagctgctgcggcaagtttactacggaggcatagagcacgagatccgcaaggacgtctggccctttctgcttggccactacaagttcggcatgagcaagaaggagatggagcaggtggacgcagtggtggcagcaaggtaccagcaggtgttggcagagtggaaggcctgcgaggtggtggtgaggcagcgggagcgggaggcccacccagccacacgcaccaagttctcctcaggcagcagcatcgacagccacgtgcagcgcctcatccaccgagactccaccatcagcaacgatgtgtttatctcagtggatgatctggaacccccggagccccaggaccctgaagattccagaccaaaacctgagcaggaagcaggacccgggactccgggcaccgccgtggtggagcagcagcattccgtggagttcgactctccagactcaggactgccctcctctcgcaattactccgtggcctcgggcatccagtcaagcctagatgaggggcagagcgtgggcttcgaagaggaggacggcggtggggaggaaggctccagtgggcccggccctgcagctcacactttgagggagccccaggatcccagccaggagaagcctcaggccggagaactggaggccggagaggagcttgcggctgtgtgtgcggctgcctacactatagaattactggacactgtggccttaaacctgcaccgcatagacaaggatgtgcagaggtgtgaccgcaactactggtacttcacgccccccaacctcgagaggctcagagacgtcatgtgcagctacgtgtgggagcacctggacgtgggctatgtgcagggcatgtgcgatctgctggcgcctctcctggtcaccctcgacaatgatcagctggcctacagctgcttcagccacctcatgaagaggatgagccagaacttccccaacgggggtgccatggacacccactttgccaacatgcgctccctcatccagatcctggactcagagctgtttgagctgatgcatcagaatggagactacacccacttctacttctgttatcgctggttcctgctggattttaagagagaactgctgtatgaggatgtgtttgctgtgtgggaggtgatctgggcagccaggcacatctcatcggagcactttgtcctgttcatcgccctcgccctggtggaggcctaccgagagatcatccgtgacaacaacatggacttcactgacatcatcaagtttttcaatgaacgtgctgagcatcacgatgcccaggagatcctgcggattgcccgggacctcgtccacaaggtgcagatgctcatagagaacaagtgagctggggccaggaggcagcagccgtgcagagcctgggctccggcagggagaggtgcaggggagtcaccgcccagacctccccagccaccaaccgaccccacctctgttcctaacaaagcggttgtgagcctggatccgactcccggcagtgctgaccctgcagggcaagtcaggggccaggatgccctcggatcagggccgggatgggaggggtcagcctcagggagcagctgccttgggggacacacctactctgctcccctctcacacatctgggagtagccccactgccacctgcagccgcagcctggactgctgcccacgagtgaacctggggccccacaggattaacaggggctatagcggcctgggccctactcagctggggtggcagagggcgagaggctctgtgctgtgtcccttctgagggtccctttgcagtcccagtatattgtgcgtgcaccagccccagctggagcaaccaaaactgcttctggtttaggcacacgtcacgggtgcgggagacccgggcacgggagacccgggccgccttcaggccgctcccccgagattctggggcagtcggaagatgtgggccctgggtgggagcagcccacttcagcagcactgccactgcctttggccacctgaggtgacccccaggcctccccggccttgtacagtgtacctctgtgtatctgtacagcctcgctcctgccaccccacccttgcgttctgcattaggtacttccctgaaaaccacgtgtaagaagtgatgcttttgccagtggatgatctggaatgcgaccggagcacttgctctgaggaatcccagggtgactctgtcggggaagaatccggtcacagcctcccctcagagacaggcctcagttcgagggcagcccattatctgtcgcagacatctgccatgtccctgagactgcgggaggcaggggatgcatgggtgtccccatctgtccctggtgagaagcaaggctagctctgccttccacatgcttctcaggatgccaagaggcctaggaacccagaaacccccttggaggagctgtgtatgcgggggtgccaggaagggcatagctcctgcccccaggcctaggcatgctgcttgctcggccatccccacttcctcctctaccccaacacatgcaggctaggccttgccctggaacatggaggccctgcccggggctggggcctagtccagcagccaccaaagtctggcagactttctgcatttgagaaacatgacaaagggccccgcagcccttctgcacccagcacagcctgcccagcccagccctgcccccgggcactgcacagcctgtctgggggccagaccaccccattgtccatccttgttgtccgtgagtccttggcctccaccaagcacgtgtggccattgtgtgcctgccttagtgactccgtggttttgtgaggagcagagtgtgtatgatttttgcctcagaaactatactcttctgtgtaacagaccaataaacaacatttgtcaacactgg

SEQ ID NO: 32223 - DNA, 1920 bp, Homo Sapiens
gagggagggagctgcttccccgcctgccgcgccaccagtccgaccctcggtcccgccgtgtgagcagctggtggagtggagctcagcgcggacgccggagctgcggccgccccctctgcaggtgcctgtgaggaggcgcccgggccgcaaccgctttccgagatccccagtcgcgcactcgctccccgcgctcctgaggggccgcccggccggaggaggccgtcgcggggctcggcgttcagcatgaaccgcagccaccggcacggggcgggcagcggctgcctgggcactatggaggtgaagagcaagtttggagctgaatttcgtcggttttcgctggaaagatcaaaacctggaaaatttgaggagttttatggattactacaacatgttcataagatccccaatgttgacgttttggtaggctatgcagacatccatggagacttactacctataaataatgatgataattatcacaaagctgtttcaacggccaatccactgcttaggatatttatacaaaagaaggaagaagcagactacagtgcctttggtacagacacgctaataaagaagaagaatgttttaaccaacgtattgcgtcctgacaaccatagaaaaaagccacatatagtcattagtatgccccaagactttagacctgtgtcttctattatagacgtggatattctcccagaaacgcatcgtagggtacgtctttacaaatacggcacggagaaacccctaggattctacatccgggatggctccagtgtcagggtaacaccacatggcttagaaaaggttccagggatctttatatccaggcttgtcccaggaggtctggctcaaagtacaggactattagctgttaatgatgaagttttagaagttaatggcatagaagtttcagggaagagccttgatcaagtaacagacatgatgattgcaaatagccgtaacctcatcataacagtgagaccggcaaaccagaggaataatgttgtgaggaacagtcggacttctggcagttccggtcagtctactgataacagccttcttggctacccacagcagattgaaccaagctttgagccagaggatgaagacagcgaagaagatgacattatcattgaagacaatggagtgccacagcagattccaaaagctgttcctaatactgagagcctggagtcattaacacagatagagctaagctttgagtctggacagaatggctttattccctctaatgaagtgagcttagcagccatagcaagcagctcaaacacggaatttgaaacacatgctccagatcaaaaactcttagaagaagatggaacaatcataacattatgaaaccgtggtttgaatgttttcagagtgaggatgccatgaggacttgtacatttggctagtttaaaagcatatatacctctgaccagtgacgtggaataggcatgagacgagtaacgttgcaagcttacaatattattaaagtagtagtttgataattgttaatataaactttggtggatcagaggtgaatttaagtccaaaacaaaggggcctttgctgatgaagttacgtgcttttgctgttttgtctgtggagaatcagatgttaaagcacattcttggaactatgtgagaagactagatcatttctgttggaagtggttgcatatttaacctgctgtgcagagcccagttaatttttcctttaactgtatttttaaaattctaatgtgaagtctgattctctcttgtggtacattggggacctcagctcttaaaggtctcatgttcccaatattttattttgattttttttttttttttttttttttttttttttagtgactgggtctcactctgttgcccacactggaatgcagtggcatgatcacagctctct

SEQ ID NO: 32224 - DNA, 5601 bp, Homo Sapiens
atgagccgctggagtctgctgatgtttacacaactactgctctgtggatttttatatgttcgggttgatggatcgcgtcttcgccaggaggactttcccccgcggattgtggagcatccttccgatgtcatcgtctctaagggcgagcccacgactctgaactgcaaggcggagggccggccaacgcccaccattgagtggtacaaagatggggagcgagtggagactgacaaggacgatccccggtcccacaggatgcttctgcccagcggatccttattcttcttgcgcatcgtgcacgggcgcaggagtaaacctgatgaaggaagctacgtttgtgttgcgaggaactatcttggtgaagcagtgagtcgaaatgcgtctctggaagtggcattgttacgagatgacttccgacaaaaccccacagatgttgtagtggcagctggagagcctgcaatcctggagtgccagcctccccggggacacccagaacccaccatctactggaaaaaagacaaagttcgaattgatgacaaggaagaaagaataagtatccgtggtggaaaactgatgatctccaataccaggaaaagtgatgcagggatgtatacttgtgttggtaccaatatggtgggagaaagggacagtgacccagcagagctgactgtctttgaacgacccacatttctcaggaggccaattaaccaggtggtactggaggaagaagctgtagaatttcgttgtcaagtccaaggagatcctcaaccaactgtgaggtggaaaaaggatgatgcagacttgccaagaggaaggtatgacatcaaagacgattacacactaagaattaaaaagaccatgagtacagatgaaggcacctatatgtgtattgctgagaatcgggttggaaaaatggaagcctctgctacactcaccgtccgagctcccccacagtttgtggttcggccaagagatcagattgttgctcaaggtcgaacagtgacatttccctgtgaaactaaaggaaacccacagccagctgttttttggcagaaagaaggcagccagaacctacttttcccaaaccaaccccagcagcccaacagtagatgctcagtgtcaccaactggagacctcacaatcaccaacattcaacgttccgacgcgggttactacatctgccaggctttaactgtggcaggaagcattttagcaaaagctcaactggaggttactgatgttttgacagatagacctccacctataattctacaaggcccagccaaccaaacgctggcagtggatggtacagcgttactgaaatgtaaagccactggtgatcctcttcctgtaattagctggttaaaggagggatttacttttccgggtagagatccaagagcaacaattcaagagcaaggcacactgcagattaagaatttacggatttctgatactggcacttatacttgtgtggctacaagttcaagtggagagacttcctggagtgcagtgctggatgtgacagagtctggagcaacaatcagtaaaaactatgatttaagtgacctgccagggccaccatccaaaccgcaggtcactgatgttactaagaacagtgtcaccttgtcctggcagccaggtacccctggaacccttccagcaagtgcatatatcattgaggctttcagccaatcagtgagcaacagctggcagaccgtggcaaaccatgtaaagaccaccctctatactgtaagaggactgcggcccaatacaatctacttattcatggtcagagcgatcaacccccaaggtctcagtgacccaagtcccatgtcagatcctgtgcgcacacaagatatcagcccaccagcacaaggagtggaccacaggcaagtgcagaaagagctaggagatgtccttgtccgtcttcataatccagttgtgctgactcccaccacggttcaggtcacatggacggttgatcgccaaccccagtttatccaaggctaccgagtgatgtatcgtcagacttcaggtctgcaggcgacatcttcgtggcagaatttagatgccaaagtcccgactgaacgaagtgctgtcttagtcaacctgaaaaagggggtgacttatgaaattaaagtacggccatattttaatgagttccaaggaatggatagtgaatctaaaacggttcgtactactgaagaagccccaagtgccccaccacagtctgtcactgtactgacagttggaagctacaatagcacaagtattagtgtttcctgggatcctcctcctccagatcaccagaatggaattatccaagaatacaagatctggtgtctaggaaatgaaacgcgattccatatcaacaaaactgtggatgcagccattcggtccgtaataattggtggattattcccaggtattcaataccgggtagaggttgcagctagtaccagtgcaggggttggagtaaagagtgagccacagccaataataatcgggagacgcaatgaagttgtcattactgaaaacaataacagcataactgagcaaatcactgatgtggtgaagcaaccagcctttatagctggtattggtggtgcctgctgggtaattctgatgggttttagcatatggttgtattggcgaagaaagaagaggaagggactcagtaattatgctgttacgtttcaaagaggagatggaggactaatgagcaatggaagccgtccaggtcttctcaatgctggtgatcccagctatccatggcttgctgattcttggccagccacgagcttgccagtaaataatagcaacagtggcccaaatgagattggaaattttggccgtggagatgtgctgccaccagttccaggccaaggggataaaacagcaacgatgctctcagatggagccatttatagtagcattgacttcactaccaaaaccagttacaacagttccagccaaataacacaggctaccccatatgccacgacacagatcttgcattccaacagcatacatgaattggctgtcgatctgcctgatccacaatggaaaagctcaattcagcaaaaaacagatctgatgggatttggttattctctacctgatcagaacaaaggtaacaatggtgggaaaggtggaaaaaagaagaaaaataaaaactcttctaaaccacagaaaaacaatggatccacttgggccaatgtccctctacctccccccccagtccagccccttcctggcacggagctggaacactatgcagtggaacaacaagaaaatggctatgacagtgatagctggtgcccaccattgccagtacaaacttacttacaccaaggtctggaagatgaactggaagaagatgatgatagggtcccaacacctcctgttcgaggcgtggcttcttctcctgctatctcctttggacagcagtccactgcaactcttactccatccccacgggaagagatgcaacccatgctgcaggctcacctggatgagttgacaagagcctatcagtttgatatagcaaaacaaacatggcacattcaaagcaataatcaacctccacagcctccagttccaccgttaggttatgtgtctggagccttgatttctgatttggaaacggatgttgcagatgatgatgccgacgacgaagaggaagctttagaaatccccaggcccctgagagcactggaccagactcctggatccagcatggacaatctagacagctctgtgacaggaaaagcctttacctcctctcaaagacctcgacctaccagcccattttctactgacagtaacaccagtgcagccctgagtcaaagtcagaggcctcggcccactaaaaaacacaagggagggcggatggaccaacaaccagcattgcctcatcgaagggaaggaatgacagatgaggaggccttggtgccctatagcaagcccagtttcccatctccaggtggccacagctcatcaggaacagcttcttctaagggatccactggacctaggaaaaccgaggtgttgagagcaggccaccagcgcaatgccagcgaccttcttgacataggatatatgggctccaacagtcaaggacagtttacaggtgaattatagtaaatgagaggagacatacaaagctgctctgaaggaccatcaggtccggactcatggaagtgatgactctaaacagtgcaatgaacaatttatttatgtactattaaaagaactgtaaatgcaatgtaaagacacacagccacacatatcccacagatattttcattgtgttcttctcttaagtacaccacccaccttaactctttcttgtcaggagtatataaaaaagaaagaaaacaaaactcgccctacaggaagaaaaggattctcctctgtatataatttcttttgtgcattgctatgcaagctcactctttttagctctgctcatattattgtctgttcttattggtctgttgtactatatgtgaattaataggctgtggtgccatatattaacttttaattgtgtaacttttatgtttaaattttgcactgcaattttatttggtgataagcacaaatctctactcctcatgacatgaagaaaaagactgaatgtgaagggagtttctgtactgtaagctagattggataatgatggctgtaacaaatcatgttagatggttttcagttggggtgtagaaataggaagatgcaaaggaacaatggtgttggcaaagtcttctttgaatatcagggactgagtcaataaaaaaaatagtagaaaggtggcttttactattgacaaaagccggggtcaaaaaaagtagtttaagtcttaagactgaatatgcattaaagtatgcaggtagcaaagatgtaataaatttgcttaaaaaaagaaattaaagttttatttagaatcaattttacctgtcattgtaattgacccatctgagaattacaataagcaagaggaaattaaggtgttttgcaagagctgtatttatattacagttttttaaaaacattttctgaattatcgtaattaagctctccaactcgttaagtcagaatataatatgaagttccccaaggaaacgaacaaaatgaactctagaatatctagcaaatagttaaagaagcaatttattattagggcatactcgggctgtttccaaatataaactctattgcaatatcttatttcatctttctaatacatgtacagtgcacactagaggatagagctgcatcacttaaattcatgacttaaaaaataatacagtttatatacaacttgttttttatttgattaagaagtgaagtttacgccacccaatgtatagccaaattgtacgtgcttaaaaaacagtgccgagagtatgttcagttcgcagtaagtagatttattggaataaatattctatggtacattctcagaaattggcttccaactaaaatacgtttgacccattttgaataaggaaattgaaaagaaaaatttaaaaggagaaaaaaatgcatgtttataaactttttaaataaaaccagaccttgtaagtggacatt

SEQ ID NO: 32225 - DNA, 4339 bp, Homo Sapiens
taaaggggccgcatcaccctgccggcccggcgcgggtcgggggtgggtgcggtaggggtcccggggcggccgagcgcagaggacggacgggaaggagggcagggggcgcgggagccggcgaagcggagcgggcatcggaccgagccccccaaagaggccccgccccggccctggccccggccgggccggatggaaccccccgcggccaagcggagccggggctgccccgcgggacccgaggagcgcgatgccggggccggggccgcgcgtggccggggccggcccgaggcgctgctggacctcagcgccaagcgggtagccgagagctgggccttcgagcaggtggaggagcggttctcccgggtgcctgagcccgtccagaagcgcatcgtgttttggtcgtttccacgcagtgaacgggaaatatgtatgtactcgtcgctgggttacccgcccccagagggcgagcacgatgcccgggtgccctttacccgcgggctgcacctgctccagagcggggccgtggaccgcgtgttgcaagtgggattccacctgagcggaaacatccgcgagccagggagtcctggagagcccgagcgcctctaccatgtctccatcagctttgatcgctgcaagatcacgtccgtgagctgcggctgtgacaaccgcgacctcttctactgtgcccacgtggtggccctgtccctgtaccgcattcggcacgcccaccaggtggagctgcggctgcccatctccgagacgctctcccagatgaaccgggaccagctgcagaagttcgtgcagtacctcatcagcgcccatcacactgaggtgctgcccactgctcagcgcttggctgatgagatcctcctgctgggctccgagatcaacttggtgaatggtgccccagaccccaccgccggcgcaggaatcgaggacgccaactgctggcacctggacgaggagcagatccaggagcaggtgaagcagctactgtccaatggcggctactacggggccagccagcagctgcgctccatgttcagcaaggtgcgggagatgctgcgaatgcgggactccaacggggcgcgcatgctgattctcatgaccgagcagttcctgcaggacacgcgcctggccctgtggcggcagcagggcgcgggcatgacggacaagtgccggcagctctgggatgagctgggggccctgtgggtttgcgtcgtcctgagcccccactgcaaaccagaggaaagggcaggctggctccagctactcagcaggtgggacaagctcgacgtctgcccactggaagagggcaactactccttcgacggccccagcctgcagcccaccatggcccccgccccagagctgctccagaagggctccacctgcatcaccaacaccgaaggatgggtggggcaccccctggaccccattggctgcctctgcagggcgctcctggaggcctgtcgtctggaggaggagacacttaccctttacccagactcaggccccgagaagcggaaggtggcctaccagcacgtgcctgtgcccgggagccctggggagtcctacttggtgctggcgctggaggtggcactgctggggctggggcagcagcgggccctgccggaggggctgtacgcccaggacaaggtggtgcgcaacgaggagcagctgctggccctgctggaggaggtggagttggatgagcggttggtgcaggtgctgcgcaagcaggcggggctgctgctggaagggggtcccttcagtggctttggggaggtgctgttccgggagagcgtgcccatgcacacctgtgcccgctacctgttcaccgcactgctgcctcatgacccggacctggcctatcgcctcgcgctgcgagctatgaggctgcccatactggagacagcatttcctgctggagaacctcatcccagcccgctggactccatcatgagcaaccgcttcccccgctggttcatccttggccacctggagacccgccagtgtgaactggcttccaccatgttgacggccgccaagggagaccccaagtggctgcacacggtactgggctccatccagcagaacatccactctccggccctgctctttaagctggcgcaggacgcctgcaagacagccaccccggtcagcgccccaccagacaccacgctgctgggcatcgcactggagctggggctgcaggtgatgcggatgactctgaacgtaatgacctggcggcggagggagatggtgcgctggctggtcagctgtgccacagagattggcccgcaagccctgatgaatatcatgcagaactggtattccttattcacaccagtggaggcggctaccatcgtggcagtgacgggcaccacacacgccactctgctgcgactgcagctggacacatcgcggagggaggagctctgggcctgcgcccgcaccctggccttgcagtgcgcgatgaaggaccctcagaactgcgccttgcctgccctgaccctgtgcgagaagaaccactcggccttcgaggcggcctaccagatcgtgctggacgcggcggccggcggcctgggccacgcccacctcttcactgtggcccgctatatggagcaccgcgggctgccgctccgggcctacaagctggcgacgctggccctggcgcagctcagcatcgccttcaaccaggacagccaccctgccgtcaacgacgtgctttgggcctgctctctcagccactccctgggccggcacgagctctctgccatcgtccccctcatcattcgcagcatccactgtgccccaatgctgtccgatattctgcgccgctggactctctcggcgcccggtctgggccccttaggggcacgccgggccgccaagccactgggtgccgaccgggcgccgctctgccagctcctggacgcggcagtcaccgcctacatcaccaccagccactcgcgcctcacgcacatcagcccgcggcactatggggatttcatcgaattcctgggcaaggcccgggagaccttcctgctggcgcccgacgggcacctccagttctcacagttcttggagaacctcaaacagacctacaagggcaagaagaaactcatgcttttggtgcgggagcgttttggttgagggacagtggggtgcgtgggagtggggatccccctcgcccctgcgtcccccacccttgctctccaattaggcccacgtggcatttcagtattattaagtcagggaaggagcccggctggagatgggggcagggggagcagcatcctgccacgtgtgtgcctgggagtctgtgagcaagtgtgcaagactccagaagcagaagccatactgccacccagaagcctggaaggggtgtgtgcttgggctgctggtatgaccccactttgggcaccccaaaagcaataggcaaactccccttacccagactggcttgggctccaggagggaggctgggaggcaggactttccagaaatcgaccctctaagtcaatgtagcacattttcccccaaccccaccctgggtggccaagggtcctcccccaccccctactgctcagggccccccattatgccacctccaaagtggctgcccagccaggaccattggctcacccccactgaaggaattgaagaggcctcaggcctcagcctcatacctcacccccttatcctatccggccaggacccccatttccttgggcactagggtcccagggtgggctcagggttggggaagtcctcgctgccctctcttctcacctgctagtcactggacgtacaactcaggaactgagcgaggctcacactgccccttccaacctggggttgggggacacagacgcgagagagccggagacccccacccccgatctggaaaggaaagagacctgtatcttggtgtttttctggctttttcaccctttcgcctcctgtctttctgcttcgccccttcatcttactctgtttccatttttcccggcacttacctgcctttctctctgcacctaagtccctgccgccctctctctttggccatccttcctttcccccaccttgacccagggaggagaagggagaacatcacccccccaagtcacccccacatcttttcccttcttgtatattaaggacaaaataccacatcattttgtaactttttttctatttattgaacggtgtattacatgtccttttcctttttttttttcaaagattgaacagaaatttttctttttaattttattttgagactggggtgcatctccagagccactcacaccctcaacctcgtttcctccgc

SEQ ID NO: 32226 - DNA, 6014 bp, Homo Sapiens
aaatgatgagtgtgcgaccagactgcggcagagaacgagccatgctctctgagtgtaaaagctgcattgtgagcacacgtgacgatccgaaggagttaattctcccccgggggctgacttgttccacagaaggggcgacaggcctggagagcagtttgaagccttttcctccacgagggctgtgggatttgactcccgcagtgctgttgttgacagtttctctgtgtgatgggggaaacctttgctgaagccttttgaaacttttgatggccgatcaaagaggagtgattcgtgaaatcggttatttttcccatctgctgaatgtgaacagtaaaacgtttttgcaaaaccaaaacggggagttcatctggcttcaaaacaaggagaccagccctgcaaagcagcgttgactttccactggacccaaaaagtgccgttttgacctcagccaagcattgcaggctgtgaacagcagagtcagcttttgaggatcctccagaaccctctggaagccctatgaggacacttcttaggttttgatacacttgactctatccaacacttacctccttgccttgggtctctgggtttaatttcctgctgtgttatagcaactaaagggaaaggaacgatgacagtgccgatttgaggtgccagctccagtttgccaaagaggaagccttcctgatgcgcaaaaagatggccaagctaggaagggagaaggacgagctggagcaggagctccagaagtacaagtccctctatggggatgtggacagtcccctgcccacgggggaagcaggcgggccccccagcacccgggaggccgagctgaagctgcggctaaagctggtggaggaggaagccaacatcttgggccggaagatcgtggagctggaggtggagaaccgtggcctcaaggcagagatggaggacatgcggggccagcaggagcgggagggcccgggtcgggaccacgcacccagcattcctacctcacccttcggtgactccctggagtcctccactgagctccgccgccacctgcagtttgtagaagaggaagcggagttgctccggaggtccatctccgagatcgaagaccacaaccggcaactgacccacgagctcagcaagtttaagtttgagcctccccgggagccgggctggctaggagagggtgcaagtcctggtgccgggggtggggcccccctgcaggaggagctgaagtcagccaggctgcagatcagcgagctcagcggcaaggtgctcaaactgcagcacgagaaccacgcgctgctgtccaacatccagcgctgcgacctggcagcccacctggggctgcgtgcccccagtccccgggacagcgatgccgagagtgatgcgggcaagaaggagagtgatggggaggagagccgcctgccccagcccaagcgggaagggcctgttggcggggagagtgactcggaggaaatgtttgagaagacgtcgggcttcgggagcgggaagccatcggaggccagcgagccatgccccacggagctcctgaaggcccgggaggactctgagtacctagtgaccctaaaacacgaggcccagcggctagagcggacggtggagcgcctcatcacggacaccgacagcttcctccatgatgcggggctgcggggtggtgcgcccttaccggggcctggcctccagggcgaagaggagcagggtgagggggaccagcaggagccccagctgctggggaccatcaacgccaagatgaaggctttcaagaaagagctgcaggccttcctggagcaggtgaaccgcattggggatggcctatcccccttgccccacctcacagagtcctctagcttcctctccactgtgacttccgtgtcccgggactcccccatcgggaacctggggaaggagctgggcccagacttgcagtccagactgaaagagcagctggagtggcagctcgggccggcccgaggggacgagcgggagagcctgcgcctccgagccgcgcgggagctgcaccgccgcgcagacggggacaccgggagccacgggctgggaggccagacctgcttcagcctggagatggaggaggagcacctctatgccttgaggtggaaagaactggaaatgcacagcctggctttgcaaaacaccctccatgagcgaacctggagtgatgagaagaatctgatgcagcaggagctccggtccttgaagcagaacattttcctcttctacgtcaaactcaggtggctgctgaaacactggcggcaagggaagcagatggaggaggaaggagaggagttcactgagggtgaacatccagagaccctctccaggctcggggagcttggagtccaggggggtcaccaggcggatggcccagaccacgacagtgaccgaggctgtggctttccagtgggggagcactccccacactcccgggtgcagattggagatcacagcttgcggctgcagaccgcggacaggggacagccccacaaacaggtggtggaaaaccagcagctgttcagcgccttcaaggccttgctggaggacttccgtgcggagctgcgggaggatgagcgtgcccgactacggctgcagcagcaatatgccagcgacaaggcggcctgggacgtggagtgggccgtgctcaagtgccgtctggaacagaattgttgtggatatcccagaattaacattgaggaggagactttaggcttcaccaggctgccagctgggtccacggtaaaaacgttgaagagccttgggttgcagagattggagctggaagagaagactgagaacaagttgggagaactaggctcctccgctgagagcaagggggccttgaagaaggagagagaggtgcaccagaagctcctggcagacagtcacagcctggtcatggacctgcgctggcagatccatcacagcgagaagaactggaaccgggagaaggtggaacttctcgaccgcctggacagagatcggcaggagtgggagcggcagaagaaggaattcttgtggaggatagagcagggaagcctccgcatgccccgtccagtggccatgtggccttgtgcagatgctgactccatcccgtttgaagaccggccgctgtccaagctgaaggagtcggacaggtgctcggccagtgagaatctctacctggatgccttgtccctggatgacgagccagaagagccaccagcccacaggcccgagagggagttcaggaaccgcctccctgaggaagaagaaaatcacaaaggaaatcttcaaagggcggtgtccgtgtcctccatgtctgagttccagcgtctaatggacatctcccccttcctgcctgagaagggcctgccgtccaccagcagcaaggaggatgtcaccccacccctgtctccagacgacctcaagtacatcgaggagttcaacaagagctgggactacacacccaacaggggccacaatggtggggggccggacctttgggccgacaggaccgaggtggggcgggcagggcacgaggacagcacagagcctttccccgactcctcctggtacctaaccacaagtgtcaccatgaccacggacaccatgaccagcccagagcactgccagaagcagccactgcggagccacgtcctcaccgagcagtcggggttgcgcgtgttacacagcccgcctgccgtgcgcagggtcgacagcatcacggcggcaggtggtgagggtccctttcccacaagcagagccagagggagcccgggagacaccaagggaggccctccagaacccatgctcagcaggtggccttgcacctcccccaggcactcccgggactatgtggagggggcacggcgcccccttgatagtcccctctgtacctccctggggtttgcctccccactgcacagcctggagatgtccaagaacttgagtgatgacatgaaggaggtggccttctctgtcaggaatgccatctgctccggccctggcgagctgcaagtcaaggacatggcctgccagaccaatgggtcccggacgatggggacccagactgttcagaccatcagtgtgggcttgcagactgaagccctgcgtggcagcggtgtcaccagcagcccccacaagtgtctcactccaaaggctgggggcggtgctacacccgtgtcgtctccttcccggagccttaggagcagacaggtggcccctgccatcgagaaggtgcaggccaagtttgaacgcacatgctgctcccccaagtatggttctcccaagctgcagaggaagcccctccccaaagccgaccagccaaataacaggacgtcaccagggatggcccagaaagggtacagtgagtcagcctgggcccgctccaccaccacaagggagagccccgtgcacaccaccattaatgatggcctctccagcctcttcaacatcattgaccacagccccgtggtgcaggaccccttccagaaggggctgcgggccggcagtcggtctcgctcagcagagccccgaccagagctgggcccaggccaggaaacaggcaccaattcccgaggaaggtcgcctagccccattggggtggggtcagagatgtgcagggaggaagggggagagggcacgccagtgaagcaggacttatctgctccccctggctacacgctcactgagaacgtggcccggatcctcaacaagaagctgctggaacatgccttaaaggaggagaggaggcaggctgcccacgggcccccgggtctccacagtgacagccactcgctgggggacacagccgagccagggcccatggaggaactaccttgttctgcactagctccatccctagagccctgcttctccaggcccgagagaccagcaaaccgtcgccctccgtcccgttgggccccacattcccccactgcctcacagcctcagtcacccggagacccgacgtccttggaggagcatggtggcgaggagccgcccgaggagcagccacaccgagatgcaagcttgcatggattatcacagtataattcactgtaatttgcataaccacaccatcaccatgaacaaaactctgcccaacaggagagatctagttttctcaaggtcaaagaatgttttttaaaaacacaaagctgctgaatgttcaacctgtgaaactgagatgtttctagaatgaaacagtaaatgtgcctgtaataacttaatttttttcatagctcagaaaactatttttgtctccatcttttttacacacagtatattaaacgaaaaggtaaataaggtataaatagatttaaaaaataaaagttttaaaaaatgtacattttaagagattctgaacaccctcgctgtcaatacctgactgcctctgttaaatttgcactgttacattttggttcagtttatttccatgttgaattagagtggattaagttaattttattttgtcagtgttactgttttttacgaattttttaatgcttcagactgtctgattcagtgaactttttgtagtgaaaaagccatgaagccagtagacaagacagatattctgtatgctggaggggatacaggatgattttgaaaaggtacaaagtcctcagtgggcttagaaaattcactgtatgatccttatattatcctacttggcttgcacgtcttcgggtgcatgtatataccgctactgtgtcctcgccatcacctaaatgtgactcagtctgttccactgtaatatgttgtgaatttccttgtactgtacttttattgttggtcttcttgcatcgatgatccaacagcaacaccatttttaaattattgtgaaaagattaactggcaatgtacagagtttactcaaagttttcttaagggaaaacactacaaaaagtcacaaggataccaaatggaaacacatgatgatgcctctgggtctgtatgagaccgtgatgaagtagaaataaagcccttctgagatggca

SEQ ID NO: 32227 - DNA, 4501 bp, Homo Sapiens
gagaacttaaaggcgaggggcggggcgcgcccggcccagagcggctcccgggcggcgccgagcggagcggatcccggggctgggattgcgcgcccgcccggaacccagaaccagcccgagccgcctgccccgtcgcccggccgccggcttagggcgcagcgcggttggtcctcgccccctcccgcccgccggcctaccaggccatgggggcgtcccgggaccgcgggctggccgcgctctggtgccttgggctcctggggggcctggcgcgcgtcgcgggcacgcactaccgctacctctggaggggctgctacccatgtcacctgggccaggccggctaccccgtgagcgccggtgaccagaggccagatgtggacgaatgccgaacccacaacggtggctgccagcaccggtgcgtgaacaccccaggctcctacctctgtgagtgcaagcccggcttccggctccacactgacagcaggacctgcctggccattaactcctgcgccctgggcaatggcggctgccagcaccactgtgtccagctcacaatcactcggcatcgctgccagtgccggcccgggttccagctccaggaggacggcaggcattgtgtccgtagaagcccgtgtgccaacaggaacggcagctgcatgcacaggtgccaggtggtccggggcctcgcccgctgtgagtgccacgtgggctatcagctagcagcggacggcaaggcctgtgaagatgtggacgaatgtgccgcagggctggcccagtgtgcccatggctgcctcaacacccaggggtccttcaagtgcgtgtgtcacgcgggctatgagctgggcgccgatggccggcagtgctaccggattgagatggaaatcgtgaacagctgtgaggccaacaacggcggctgctcccatggctgcagccacaccagtgctgggcccctgtgcacatgtccccgcggctacgagctggacacagatcagaggacctgcatcgatgtcgacgactgtgcagacagcccgtgctgccagcaggtgtgcaccaacaaccctggcgggtacgagtgcggctgctacgccggctaccggctcagtgccgatggctgcggctgtgaggatgtggatgagtgcgcctccagccgtggcggctgcgagcaccactgcaccaacctggccggctccttccagtgctcctgcgaggccggctaccggctgcacgaggaccgtaggggctgcagccccctggaggagccgatggtggacctggacggcgagctgcctttcgtgcggcccctgccccacattgccgtgctccaggacgagctgccgcaactcttccaggatgacgacgtcggggccgatgaggaagaggcagagttgcggggcgaacacacgctcacagagaagtttgtctgcctggatgactcctttggccatgactgcagcttgacctgtgatgactgcaggaacggagggacctgcctcctgggcctggatggctgtgattgccccgagggctggactgggctcatctgcaatgagacttgtcctccggacacctttgggaagaactgcagcttctcctgcagctgtcagaatggtgggacctgcgactctgtcacgggggcctgccgctgccccccgggtgtcagtggaactaactgtgaggatggctgccccaagggctactatggcaagcactgtcgcaagaaatgcaactgtgccaaccggggccggtgccaccgcctctacggggcctgcctctgcgacccagggctctacggccgcttctgccacctcacctgcccgccgtgggcctttgggccgggctgctcggaggagtgccagtgtgtgcagccccacacgcagtcctgtgacaagagggatggcagctgctcctgcaaggctggcttccggggcgagcgctgtcaggcagagtgtgagctgggctactttgggccggggtgctggcaggcatgcacctgcccagtgggcgtggcctgtgactccgtgagcggcgagtgtgggaagcggtgtcctgctggcttccagggagaggactgtggccaagagtgcccggtggggacgtttggcgtgaactgctcgagctcctgctcctgtgggggggccccctgccacggggtcacggggcagtgccggtgtccgccggggaggactggggaagactgtgaggcagattgtcccgagggccgctgggggctgggctgccaggagatctgcccagcatgccagcacgctgcccgctgcgaccctgagaccggagcctgcctgtgcctccctggcttcgtcggcagccgctgccaggacgtgtgcccagcaggctggtatggtcccagctgccagacaaggtgctcttgtgccaatgatgggcactgccacccagccaccggacactgcagctgtgcccccgggtggaccggctttagctgccagagagcctgtgatactgggcactggggacctgactgcagccacccctgcaactgcagcgctggccacgggagctgtgatgccatcagcggcctgtgtctgtgtgaggctggctacgtgggcccgcggtgcgagcagcagtgtccccagggccactttgggcccggctgtgagcagcggtgccagtgtcagcatggagcagcctgtgaccacgtcagcggggcctgcacctgcccggccggctggaggggcaccttctgcgagcatgcctgcccggccggcttctttggattggactgtcgcagtgcctgcaactgcaccgccggagctgcctgtgatgccgtgaatggctcctgcctctgccccgctggccgccggggcccccgctgtgccgagaagtgcctcccccgggacgtcagagctggctgccggcacagcggcggttgcctcaacgggggcctgtgtgacccgcacacgggccgctgcctctgcccagccggctggactggggacaagtgtcagagcccctgcctgcggggctggtttggagaggcctgtgcccagcgctgcagctgcccgcctggcgctgcctgccaccacgtcactggggcctgccgctgtccccctggcttcactggctccggctgcgagcagggatgtccgcccgggcggtatgggccaggctgtgaacagctgtgtgggtgtctcaacgggggctcctgtgatgcggccacgggggcctgccgctgccccactgggttcctcgggacggactgcaacctcacctgtccgcagggccgcttcggccccaactgcacccacgtgtgtgggtgtgggcagggggcggcctgcgaccctgtgaccggcacctgcctctgccccccggggagagccggcgtccgctgtgagcgaggctgcccccagaaccggtttggcgtgggctgcgagcacacctgctcctgcagaaatgggggcctgtgccacgccagcaacggcagctgctcctgtggcctgggctggacggggcggcactgcgagctggcctgtccccctgggcgctacggagccgcctgccatctggagtgctcctgccacaacaacagcacgtgtgagcctgccacgggcacctgccgctgcggccccggcttctatggccaggcctgcgagcaccggcgctcaggagccacctgtaacctggattgcagaaggggccagtttgggcccagctgcaccctgcactgtgactgcgggggtggggctgactgcgaccctgtcagtgggcagtgtcactgtgtggatggctacatggggcccacgtgccgggaaggtgggcccctccggctccccgagaacccgtccttagcccagggctcagcgggcacactgcccgcctccagcagacccacatcccggagcggtggaccagcgaggcactagtagaggcagtcccgtggagcccgcctctccagtcccagccagaggggaccctggcctttggtgaccactgagaaggacacttcacgggcccagagctcctggtactgcccttcctttgagggccgtggagggctgtggacagcccagcaacctgtcgctcttggaggctggtgtggccttgaggagggaagcctcgcatggccgctggaagagaggcgcctcctggcctggctctgcagaacccaggggcacgctctgggcctgggctgaggaagtcccgctctccccgcggctctgagttggactgaggacaggtgtgggcgccagtgtgggtgcaggcgcaggtgcaggcacagggccactgtcctccaggcaggctttttggtgctaggccctgggactggaagtcgcccagcccgtatttatgtaaaggtatttatgggccactgcacatgcccgctgcagccctgggatcagctggaagctgcctgtcatctcctgcccaatccccagaaaccctgattcaggtctgcaggctcctgcgggctcaccaggctgctggctccggtaccatgtaaacctaggaaggtaaaggagcaggcaacctc

SEQ ID NO: 32228 - DNA, 7018 bp, Homo Sapiens
atgagcagactgcaagtttgcctctcccaccagtatgggagctgccgaagcggcaagaacagcgtttccgtccatcgagcgccagtcgactattcagccttgcaggcgcctctggcgggcttcactgagatccgctctttcggtgctcgactcgcccgtgctgctgccgccgccgaaggaggggcaaagctcaagatggcggacaaaacgccaggcggatctcagaaggccagttcaaagacgagatcatcagatgttcattcatctggatcttcagatgcacatatggatgcatctggaccctcagatagtgatatgccaagtcggacacgacctaagagcccaagaaaacataattataggaatgaaagtgcccgtgaaagcctttgtgattctcctcatcagaatctctcaagacctcttctggaaaacaaacttaaagcattcagtattggaaaaatgagtacagctaagcgaactttaagtaaaaaggaacaggaagaattaaagaaaaaggaggatgaaaaggcagctgctgagatttatgaggagtttcttgctgcttttgaaggaagtgatggtaataaagtgaaaacatttgtgcgagggggtgttgttaatgcagctaaagaagaacatgaaacagatgaaaaaagaggtaaaatctataagccatcttcaagatttgcagatcaaaaaaatcctccaaatcagtcttccaatgaaagaccaccatctcttcttgtgatagaaaccaaaaaacctccacttaaaaaaggagagaaagaaaagaaaaaaagcaatttggaactcttcaaagaagaattaaagcaaattcaagaggaacgtgatgagagacataaaacaaaaggcagattaagtcgatttgaacctcctcagtcagattctgatggtcagcgtcgttctatggacgcgccttcaagaagaaatagatcatctggtgttcttgatgattacgcacctggctcacatgatgtaggagatccaagcactactaatttataccttggaaacattaatccacagatgaatgaagaaatgctgtgccaagaatttggaagatttggaccgttagccagtgtgaaaatcatgtggcctagaactgatgaagaaagagccagagagagaaattgcggctttgtggcctttatgaatagaagagatgctgaaagagctttaaaaaatttgaatggaaaaatgattatgtcttttgaaatgaagttaggttggggtaaagctgtacctattcctccacatccaatatacattccgccttctatgatggaacatacgcttcccccacctccatccggactgccttttaatgcgcagcctagagagcggttaaaaaaccctaatgctcctatgttaccgccacctaaaaacaaagaggattttgagaagactctgtcgcaagccatagtcaaagtggttatcccaacagaaaggaatttgctcgccctgatacatcgaatgatagagtttgttgtacgtgaagggccaatgtttgaagctatgattatgaacagagaaatcaacaatcctatgttcaggttcttatttgaaaaccagacaccagcccatgtttactataggtggaagctttattctattctgcagggagattctccaactaaatggcggacggaagattttcgtatgttcaaaaatggatctttttggaggccaccaccattaaatccgtacttgcatggaatgtcagaagagcaagaaacagaagcttttgtagaggaacctagtaaaaagggagcacttaaggaagaacagagggataaattggaagaaatcttgcggggattaactccaaggaaaaatgatattggagatgcaatggttttctgtcttaataatgctgaagctgctgaagaaatagtggattgcattactgagtcgttgtccatcttaaagacaccccttcctaaaaagattgccagattatatttggtttctgatgttttgtacaactcttcagccaaagttgctaatgcttcatattatagaaaattttttgaaacaaagttatgtcagatattttcagacctcaatgccacctatcgtacaattcaaggccatttacaatctgaaaactttaagcaacgggtaatgacttgcttcagagcatgggaagattgggcaatttatccagaaccatttttgatcaaactacaaaatattttcttaggacttgtaaatattattgaagaaaaggaaacagaggatgttccagatgaccttgatggtgcccccatcgaggaagagcttgatggtgcacctctggaagatgtagatggaattcctattgatgctactcccatcgatgatcttgatggagtccctataaaaagtcttgatgatgatcttgatggagtgcctttggatgcaactgaagactcaaaaaagaatgagcctatatttaaagttgccccatcaaaatgggaagctgtggatgaatctgaattggaagcacaggctgttacaacttctaaatgggaattatttgaccagcatgaagaatcagaagaagaagaaaatcaaaatcaagaagaagaaagtgaagatgaagaagatactcaaagttccaaatctgaagaacatcatttgtactctaatccaatcaaagaagaaatgactgagtctaagttctctaagtactctgaaatgagtgaggaaaaacgagccaaacttcgtgaaattgagctcaaagttatgaagtttcaggatgaattggaatctgggaaaagacctaaaaaaccaggccagagttttcaggagcaagtagaacactacagagataaacttcttcaacgagagaaagagaaagagttagaaagagaacgagaaagagacaagaaagataaagaaaaattggaatctcgctccaaagacaagaaggaaaaagatgagtgtactccgacaaggaaggaaaggaagaggcgacacagtacatcccccagcccatctcgcagtagcagtggtagacgagtgaaatccccatcaccaaaatcggagcgatcagagcgttcagaaagatctcataaagagagctcacggtccaggtcatctcacaaagattctcctagagatgttagcaaaaaagccaaaagatcaccatctggttcaaggacacctaaaaggtctaggcgatcacggtctagatctcctaaaaaatcaggaaagaagtccagatcccagtccagatctccacacaggtctcataaaaagtcaaagaaaaacaaacactgacgtaaatttttaagatgctgtcacttattggaaatgcgatttgttttgtgcctgaacggtctgttttttaaaaaaacaaaaaatcaaatgaaagagcattcctggggttttttgtttgtttgtgtatgcatgtgtaaactcatgagcaactgcatctgtagatctgtcattgttttatattgtgtaaattactttcattgtggctatttctcaagatgaaatttttattgttctaatggatttcatcagaaatgtgtataatggatctgctgacagtagtagtattttgttttaggatgttgtgacttagcaaaaataatacagatgtcttccccccttttgtagctttgacaatttgaattagatttcaaataaaatctgaacagaaaactataatgttgtttttttgccccaccggtgatattaagtcccttaaagtcctactgagtttcacactactgttgtgcttcttatacctgatgcactttataagccccagtgttcaagtagcttaagttttatatttactaagatgactatccaaattaagggacctgagactcctatttggtggtttgctaaccatttgcttttgataagtttctcttgggtaatactaatacccagatatcaaagactaggtagatatggcatggcgttttgttagtggaatgcctggctaaaacatttttttcacagaagcaatatgatttccatacatccaacccatgttctgagcaactacttacttttagggggaaattaaatatcttttcatttcctcttctattatgaaagaagtttatttgtaaaacaaattttctaacaaggtttggccatagaattctcttgtatgatcgttgaccttttataatcttctgtaggctatctttcaaacactggcatcagaatattttttataagtttgtgtttaaacagcttagttggtccccccccactcccaagagacttgggtttagttatagctttaagtaaaatttaaaaataaaatgtttttcaggaaacttcgtatctaatggtttgtaaattcaaggtgcaaaaagttgatttaaaccatttgcagagttgaactctattatgaaaataaatttgctacggtatgaggaagaaataaaacttgtgtaatgttggtcataatactgctataaatataataaagggttatgtagaattgaactgacactattatttgtgaatcttgatttcagttttttatgtaggcacttcatacactggtttgatgggttttttttttcctccctaaaagagaaagtagaaaactattctaacaatggattattttgatttagcttgctttttaaaaaaatcttttcaacttgttttacttaatcttgcctagtcacaaaataagatgtgcacccatggtttggagagttcctatattagctgagcagtgagatacactatttccaaacggtgcacacctacagtagctttggaaatgagccaatcactgttttacttaatggttcttatcagcatgcaaatattgcttgaaagttatttccttattcactgttttgttagtccattttgttaggaaacattaattcctaaaaatttgttcagaataattaaaagtgaacatttggtgctgatactcaaaaacctacaaatgtagccatttaaaaagtaacatgtttttctcccctgctcattgcctgggagaatggaattttatataactacctttctttgcaaaaataacggtcgtgtcgagttggtggtgattttggcattccatcttgcactggtttctagtataggcttagaaataattggtcaggtaataatctttccagtcaagttgcaagggatgcttatttctcttcaaaaaaagacatcctgcgggattgagtagaaaattttaggtcagttttgggtgcttatttgtaatatttttcctactacattggagtttagcagttctttttttctggatccagatacaagtgtcatggtttatcttacagtgggtgaaactgactttcttttggttgggtgggtgaggatttcttaggcctgatagaatatatattctgtgaagtttgttaatgtacatattagattgtattggatttttttttcttgaattgcaaatggtattattagataggttatttccagttttacttcatgacaaattacctagagtaaacctacttaatactcccatggattctatgaaagtttaatgggatcagaaattggtgacttataagggggaagatattctaccatatttttataatagcttattattcatgtttcttgtctgaaggacactcaagttacagagcaaaatttctataggttgactagaatgttcataagcatggtcttccagttgcaggaaagatcatgttctatctgtggacacttactgtcctctaccacagctacgtgccagagttgttttccacagttcttataaagggcatgacttaggctctttaccctccaacttaatgtttatacacagggattgtttactaggttaatgacatttaactcccctctcttctgtaggtgagagaaaataagtaagtcttgatctgtttcttaccaaagagagacagacctatgatggaaaatgatcacgtctctgaattttttctttaacgttatagttccttattacagatagtaagcatatgggaatttctgagctataacatgttgagaagttagaaattaaaactaacacaacaaaaggcgctgaatcaaaagatctttgcttttatttggctcagaatgtttttggcttttctgctaaagatggcagaaattactctacacagacctgatttttctttattgcagaccattcttgtgggcttaccctgagacttttatcccaattagtgaatcttggagggaatacttgcttatttatgacttaggtatttccccccaaactttaatattcttgagcacttgaaaatacttttgagaaattttaactgtgattaaatttaggtttattagaaatattctgtacacatttgcctccatggtggcgtaagttctgaaaaattatatgaccgtgacaatagtttatcatcatcattattgttattcaaaataagggtaaataaatctctgtattgccaaagtgacttaaactgttctgatgaccacacagtgtgatttctttagcagagaaagttggttttaaaaataaatagtaccacttttctaagactgtacagtttacaaataaggtttttttctttgttgttttcctcttctattaagttttagtgaaaagcctaattacagaaaattgtgcagatactagtgaagatactagtataagtttaaaggaacacgtgactgtaaaatctcacatttacaaagtgcttgatctcttcatatttcacacgcatgttttagaatagattttagggagtgtttaattcattatccttttgacttaaaatttttgttaccaacttcctaggacttagataatatataaataagtacaaatcccaggggaagtgttgtgatgctagactaaaaggtgggaatgtgctgctgttccgtgagccttgttccattgttgaaaatttgatgcctcagtgtttattcagtaccacctcatggagcttcaatgtaaatggattatatgtataattggtaatttgtatagttttgtagattgtagattaaatgcactcatcatgtc

SEQ ID NO: 32229 - DNA, 1737 bp, Homo Sapiens
acaaattgcatcaccctcctcctctgcccagacctgggggctccaacacctttcgctaggtctggctctggcctctgagcgaaccttccgtacagtatggcggctcccgaagccccgcccctggacagagttttccgtacaacatggctgtctacagagtgcgattcccacccacttccgcctagctaccggaagtttctatttgaaacccaggcggccgacttagccggtggcacgacagttgctgcagggaatcttttaaacgagagcgagaaggactgcgggcaggaccggcgggctcctggggttcagccgtgccgcctcgttacgatgaccagtgtggttaagacagtgtatagcctgcagcccccctctgcgctgagcggcggccagccggcagacacacaaactcgggccacttctaagagtctcttacctgttaggtccaaagaagtcgatgtttccaaacagcttcattcaggaggtccagagaatgatgttacaaaaatcaccaaactgagacgagagaatgggcaaatgaaagctactgacactgccaccagaaggaatgtcagaaaaggctacaaaccactgagtaagcaaaaatcagaggaagagctcaaggacaagaaccagctgttagaagccgtcaacaagcagttgcaccagaagttgactgaaactcagggagagctgaaggacctgacccagaaggtagagctgctggagaagtttcgggacaactgtttggcaattttggagagcaagggccttgatccagctttaggcagtgagaccctggcatcacgacaagaatccactactgatcacatggactctatgttgctgttagaaactttgcaagaggagctgaagctttttaacgaaacagccaaaaagcagatggaggagttacaggccttaaaggtaaagctggagatgaaagaggaaagagtccgattcctagaacagcaaaccttatgtaacaatcaagtaaatgatttaacaacagcccttaaggaaatggagcagctattagaaatgtaagaagaagcaagtggccagatggctccctcttgggcataaaatctcagaggaagctacttaggacatcatcttggccatgatcttctgggactcaccatctccagaatgaaaacaatttctacagtagacttaaggacagtttatgctgaaatggcaattcctcatttaagcaagttttcccaaccttcaggttggtcagccctcctgagcctcacaggtggataattgaggcctacaagagaggggagcctaggagcttggattgaccttctagtcaaccacctgacttcagcacaccattacaatcgggagactaaaccaacaaccagaggatctaaaatgtcacattcagattttcaggaagaaaatcttcattacagtggagcacaaatgttccatacaagacatcattgaggagccatgctgtccccttctaacctgaaacacattctttcccatcctggttgggcttctgtacctccttattaatttatgaacctgaagttgcttgaagtgttttgggcttaataaatggggtgaaagtataggtagcagtaacacctacatgaaacaatacaccttggatcttttaatctaaattacttttcttttttaagtctacttttaaaataaatacttctgtaaatattctgactgtaacattgaggaatgaaaatagccttttaacct

SEQ ID NO: 32230 - DNA, 12006 bp, Homo Sapiens
atggaggagaaacagcagattatattggctaatcaagatggtggaacagtggcaggagcagcacctaccttctttgtcatcttaaagcagccaggaaatggcaaaactgatcaaggaattttggttactaatcaggatgcctgtgctttggctagtagtgtgtcatcaccagtaaaatctaaagggaagatttgccttccagctgattgtactgtgggtggaatcactgttaccctcgataacaatagtatgtggaatgagttctatcatcgaagcacagagatgattctgaccaagcaaggaagacgcatgtttccttactgtcgttattggataacaggtttagattcaaatttgaagtatattcttgtcatggatatatctcctgtggataaccatcgttataagtggaatggtcgttggtgggaacctagtgggaaggctgaacctcatgttttggggagggttttcattcatccagaatctccttccacaggtcattattggatgcatcaaccagtatctttctataaactcaaacttaccaacaatacactggaccaagaagggcatatcatcttgcactctatgcatcgttacctgccgaggcttcatttggtgcctgcagaaaaggctgtggaggtgatacaattaaatggccctggtgtccacacttttaccttcccacagactgaattctttgcagtaacagcttatcagaacattcagattactcagctgaaaatagattacaatccatttgccaaaggctttcgggatgatgggctgaataataagccccagagagatggaaaacaaaagaacagctctgaccaagaagggaataatatttccagttcttctggtcatcgggtccgtcttacagaaggtcaggggtcagagatacaaccaggtgatttggatcctttgtcaaggggtcatgaaacatcaggcaagggtttggagaagacttcccttaatataaaacgagactttcttggtttcatggatactgattcagcacttagtgaagttcctcaattgaagcaagagatttctgaatgtcttattgccagcagttttgaagatgactcccgtgtagcctcaccgttagaccagaacggaagcttcaatgttgttattaaagaggaacctctagatgattatgactacgaacttggtgagtgcccagaaggggtcactgtgaaacaggaagagacagatgaagagacggatgtatactcaaacagtgatgatgatcctatactagagaaacagctaaagaggcacaataaagttgacaacccagaagctgaccatctatcttctaaatggcttccaagcagcccatcaggtgttgctaaagctaaaatgttcaaattagacactggaaagatgccagtagtctatctggagccctgtgctgtcaccagaagcacagttaagatttctgaactccccgataacatgctttccacatctcgaaaggataaatcttctatgttggcagaattggaatatttgcctacatacattgaaaattccaatgagactgccttctgcttaggcaaggaatcagaaaatggtcttagaaaacattcaccagatctcagagtggtacaaaaatatcccttactgaaagagcctcagtggaaatatcctgatatatctgacagcattagcacagaaagaatactcgacgattcaaaggattcagttggagactcactttcaggaaaagaggacttgggcagaaagagaacaactatgcttaagattgcaacagccgcaaaggtagtgaatgctaatcagaatgcctctccaaatgtccctggaaaaagaggaaggccacgaaaattgaaactctgtaaggcaggacgaccacctaagaacacaggaaagtctttaatttctacaaagaatacacctgtaagccctgggagtacctttccagatgtgaagcctgatctggaagatgtggatggtgttctctttgtttcctttgaatcaaaggaagctctagacattcatgcagttgatgggacaacagaagaatcttctagtctccaggcatcaaccacaaatgactcaggttacagagcaagaatttcccagttggaaaaggaattgatagaagatttgaagactttgcggcacaagcaggtgatacatcctggtcttcaagaagtgggcttaaaattgaattcagtggatccaacaatgagcattgatcttaaatacttgggagtacagttacctttggctccagctactagctttcctttttggaaccttacaggaaccaaccctgcctctcctgatgcgggatttccctttgtttctaggacagggaaaaccaatgatttcactaagatcaagggatggaggggaaaatttcatagtgcttctgcatctaggaatgaaggtggaaattcagaaagttcactgaaaaatcgttctgctttctgtagtgataagctagatgaatacttggaaaatgaaggcaagctgatggaaacaagcatgggtttttcttctaatgctcccacatctcctgtggtgtaccagcttcccactaagagtaccagttatgtacgaacacttgatagtgtactaaagaagcaatctactatttccccttctacctcttattctttgaaacctcattctgtaccccctgtctctcgaaaggcaaagtctcaaaacagacaggcaactttcagtggccgaactaaatcatcttataaatccattttaccataccctgtttcaccaaagcagaaatactctcatgtgattctaggagataaggttaccaagaattcttcaggcatcatctcagaaaatcaggcgaataactttgttgtgccaactttggatgaaaatatatttccaaagcagattagtttgcggcaggcacagcagcagcagcaacagcaacagggaagtcgccctccaggcttgtctaaatctcaggtgaagctaatggacctggaagactgtgcactttgggaaggaaaaccaaggacatacatcacagaagagcgagcagatgtatccttaacaactctacttacagctcaagcatccctcaaaactaaacctatccacacaatcataaggaaacgagcccctccctgcaacaatgacttctgtcgactgggttgtgtatgttccagtctagctttggagaagcgccaacctgctcactgccgccgaccagactgcatgtttggttgtacttgtttgaaaagaaaagttgtacttgttaaaggaggatccaaaactaagcattttcagaggaaggctgctcatcgagatccagtattttatgatactctgggagaggaggcaagggaggaggaagaaggaatcagggaggaggaggaacaattgaaagagaaaaagaagagaaagaagctagaatacactatatgtgagacagagcctgaacagcctgttcgacattacccattatgggtaaaagtagaaggtgaagtagatccagaaccagtttatatccccacgccttctgtcattgagcctatgaaaccattgttattgcctcagccagaagttttatctcctactgtgaagggcaaactgctcactggaattaaatctccacggtcatatactcccaaacccaatcctgtgattcgggaagaggacaaagatccagtctacttgtactttgaaagtatgatgacttgtgctcgagttcgagtatatgagcgaaaaaaagaggaccagagacaaccatcttcctcctcctccccatctccatcatttcagcagcaaacttcatgtcattctagccctgagaaccataataatgcaaaggaacctgattctgaacagcagcccttaaaacaactcacctgtgacttggaggatgattctgataaattacaagaaaagagctggaagtcttcctgcaatgaaggagaatcctcttctacttcttatatgcatcagaggtcacctggtggtcccaccaaactgattgagatcatctcagactgcaactgggaggaagatcggaacaagattttgagcatcttatcccagcacatcaatagcaacatgccacaatcacttaaggtgggcagcttcatcattgagttggcttctcagcgaaagagccggggtgagaagaaccctcctgtttattcttctcgtgtgaaaatctctatgccatcatgtcaagaccaagatgatatggctgagaaatctggatcagagactcctgatggtccattgtcccctgggaaaatggaggatatctctcctgtgcagacagatgccctggattcagtgagggagagattacatggaggcaaaggtctgcctttttatgcagggctttctcctgcagggaagcttgtggcctataaacgtaaacccagttcaagtacatctgggcttatccaggttaatggtaagagttacccgcaggctaagttgctattgggacagatgggggcattgcatccagccaataggctagctgcttatatcacaggcaggttgcgaccctcagtcctggacctctcaaccctcagtactgtcatctccaaggtagcatccaatgccaaggtggctgcatccaggaaaccacgtaccctgttgccttcaacatccaattccaaaatggcatcctcctctggcactgcaacaaatcgccctgggaagaatctgaaggcgtttgtcccagcaaaacggccaattgcggctcgaccctctcctggtggtgtgttcacacagtttgtgatgagtaaagttggagccttgcagcagaagatacctggagttagcacaccccaaaccctggcagggacacagaagttcagtatcagaccttctccagtaatggtcgtcacacctgtggtttcttctgagccagttcaggtgtgcagccctgtgactgctgctgtcactactaccacccctcaagtgtttttagaaaatactactgctgtgacacctatgactgctatttctgacgtggaaactaaagaaactacttattcttctggtgccaccactacaggggttgttgaggtctctgaaactaataccagcacctctgtaacatctacccagtctacagccactgtgaaccttaccaaaaccactgggataactacccctgtggcttcagttgcttttcctaagtctttggtagcatctccttcaaccataactcttcctgttgcttccactgcttccacctccttagtcgtggtgactgcagctgcatcttcctccatggtgaccacaccaacttcatctctgggctctgttcctattatactctcaggaattaatgggagtccaccagtgagccagagaccagaaaatgctgctcaaattccagtggctactccacaggtctctcctaacacagtgaaacgtgctggacctcgattgttgttgattccagtgcagcagggttctcctactcttagacctgtctcaaacacacaacttcagggacatcggatggtcttgcagcctgttaggagtccaagtggaatgaacttattcaggcaccctaatgggcagattgtccagcttctacctttgcatcagcttcgaggctctaatacccagcccaacttacagcctgtcatgtttcggaacccagggtctgtgatgggaatccggttacctgctccttccaaaccctctgagactccgccatcttccacttcgtcctctgctttctctgtcatgaatcctgtaattcaagctgttgggtcttcttcagcagtgaatgttatcactcaggcaccatcattgctttcctctggagctagttttgtgtctcaggctggtacattgaccctgaggatttctcctcctgaaccacaaagctttgcaagtaaaacaggctctgaaaccaaaataacttatagctcaggaggacagcctgttggtacagccagtcttattcctctccagtctggtagttttgccttgttacagctcccaggacaaaagcctgttcctagctccattcttcagcatgttgcttcccttcagatgaagagagaatctcagaatccagaccagaaagatgaaacaaactcaataaaaagagagcaagaaacgaagaaggttctacagtcagaaggagaggctgtagaccctgaggctaatgtaataaaacaaaactcaggagctgctacctcagaagaaactctgaatgattccttggaagataggggtgatcatttggatgaagaatgccttccagaagaaggttgtgcaactgtcaaaccatctgagcattcctgtatcactgggtcacatacagatcaagattataaagatgttaatgaagaatatggggctaggaatcgtaagagttccaaagaaaaagtggctgttctggaagttaggaccatttctgaaaaagccagtaataagacagtccaaaatttaagtaaagtacagcatcaaaaacttggtgatgtgaaggtggaacagcagaaaggatttgacaatccagaagaaaactcaagtgaatttccagtcacctttaaggaagaaagtaaatttgaattgtcaggaagcaaagttatggagcagcaatctaatctacagccagaggccaaagagaaggaatgtggagactctctggagaaagacagggaaagatggagaaaacatctgaagggccccttaaccaggaaatgtgttggagcttcacaggaatgtaagaaagaggcagacgagcagttaattaaagaaacaaagacatgtcaggaaaattcagatgtgtttcagcaagaacaaggcatctctgacttacttggaaaaagtggaattactgaagatgccagagttttgaaaactgaatgtgattcttggagtaggatttctaatccttcagccttctccattgttcctaggagagctgcaaaaagcagcagagggaatggacattttcagggtcacttactgctacctggagaacagatacaaccaaagcaagagaagaagggtgggagaagcagtgctgacttcactgttttggatttggaagaagatgatgaagatgataatgagaaaactgatgattctattgatgaaattgtggatgttgtttctgactaccagagtgaggaggttgatgatgtagaaaagaataactgtgtagaatacattgaggatgatgaggagcacgtggacattgagactgtagaagagctctcagaggaaattaatgttgctcacctgaagaccacagcggcccacacacagtcattcaaacagccgtcctgtactcacatctctgcagatgaaaaagcagctgaaaggagtcgaaaggctccaccaattcctctaaaactgaagcctgattactggagtgacaaactacagaaagaagcagaagcgtttgcttattatcgccggacacacactgccaatgagcggcggcggcgtggtgaaatgagggatctctttgagaaattaaagatcacattgggattacttcattcttccaaggtttccaaaagtctcattcttactcgagccttcagtgaaattcagggactaacagatcaggcagacaaattgataggacagaaaaatctcctgactcgaaaacggaatattctgatacggaaagtatcgtctctttcaggtaagacagaagaagtggtcctgaagaagctagagtatatttatgcaaaacagcaagcactagaggcacaaaaaagaaaaaagaagatgggatcagatgagtttgacatatctcccagaattagcaaacagcaggaaggatcttctgcatcatctgtagatcttggacagatgtttataaataacaggagggggaaacctttgattctttccagaaaaaaagaccaggccacagaaaatacctcacccttgaacactccacacacctctgccaaccttgtgatgactccgcaagggcaattgctcaccctaaaaggtcccctattctcaggaccagtggtagctgtttctcctgatctcttagaatctgatcttaagcctcaagttgccggtagtgctgtggctctaccagaaaatgacgacttatttatgatgccacgaattgttaatgtgacatcattggccacagagggaggtttggtagatatgggtggcagcaaatatcctcatgaagttcctgatagcaagccatctgaccatctgaaagacaccgtcaggaatgaagataattccttagaggataagggtagaatctcttccagaggaaacagagatggcagagtgacgttgggtccaacgcaggtttttctggcaaacaaagattctggttatccacaaatagttgacgtttccaatatgcagaaagcacaagagttcttacctaaaaagatttctggtgatatgagagggattcagtataaatggaaagagagtgaatcaagaggggagagagtgaagtcaaaggattcttcatttcataaattaaagatgaaagatctcaaggactcaagcatagagatggaactgaggaaagtaacatcagctatagaggaagcagctcttgattccagtgaactgctgactaacatggaagatgaggatgatactgatgagacactgacttcactgctcaatgaaattgcctttcttaatcaacaactaaatgatgactctgttggcctggctgaactacccagctctatggatacagagttcccaggggatgctcggcgggcttttattagtaaggttcctcctggaagcagagcaactttccaggttgagcacttgggaactggtttgaaagagttgcctgatgttcaaggggagagtgactctatcagtcccctcctcttgcacttggaagacgatgacttttctgagaatgaaaaacaacttgcagaaccagcctctgagccagatgtccttaagattgttattgactctgaaataaaggattccctcctttccaacaagaaagctattgatggagggaagaatacttctggcctccctgcagagcccgaaagtgtgtcctcaccccccaccctacacatgaagactggcttggagaacagcaacagcacagacactttgtggaggcctatgccaaagttggcccctctaggtttaaaagtagctaatccttccagtgatgcagatggtcagagtctcaaggtgatgccttgtttggcacctatagctgccaaagttgggtcagttggacacaaaatgaacttaacagggaatgaccaggaaggccgggaaagcaaggtgatgcctacattggcacctgttgtggctaaattgggcaactcgggggcctcaccaagttctgcagggaaatgaacttacttgtccttaagcagaagccaggctgtgaggggaaatagatctcacctcctttctctgcaggcatctgtttgtttgtgtcttagaacttggatccttgacttcaatgatgcagtggataatgatgggagaaagggggtagggtgctgaccctggtataagaagtactctgaaattctgatcatgttaaaatgtgttacctcacttgtggtgctgggtcccctcatcctctctaagaagatgtgatccattactgaacatgaggtgcccctcttacccaaggaatttataacatgactctggctccacagtggtttctagttcttcccccacaagcgaaagagctgtttgcaactttggagttgctgtagactgaactgtagcttgtagctgttgaattaagtccaaaatctaaggaatgcgatggacttgtgcaaagggatccagaagagacactttttagttgatgtttcaagaatagggagagagaggatgggtaccatggaataccaaagtgaaggactttgtgtcattcagtaaaattttcttttttcatatcctaagtagctcccattccctcaccttttcaatcagaattaacaaattcaagccttcagtaaagtagggatgcttttaacttttattattaattattttgagatcttaaaaaaatagtagttctcccttattatttttgtgggcattgaaaagctcatttcacagtaccagagatttttactgggagtatatattttggaggtaggcatagagggagccctaccccttccacaaattacgttactcaagagacagctaaaataaaatgcattatctccccagaccagagacagtggccaaaataaaaaatcatggggctggaaatttcccaaatcaaaccagcctcctggtgcttgaaggtttcattcactattacctgcacaggatgtaaagaaaagtcacagtaggcactctttaccagggaaataaggcagtatttgaatcacaagatatattttttatctgcaaccatggatccaatgatctgtagagctttttcactcattaactgtcaggatatgaaggactgacagtctgtaaagatatttatatttttgtatagttgttttcatagatttctcaaaggctgaagttttcaacctagaagatgagatttgtattgagtatagaaatgatgtttcctatctagtttgtaaataatcatggtgcacttgaggggtctcttggaaactcctagggggtcaagaatcactattctgaaactgtatagactgggatttagctgctgcattttgcctttcttaaataattatattttggaatgtaacccctgttctgtcttcattgacaggatttgcttgtgttgttaaaacactaacacaagagcttccagtgcctgggccgtgcctaggtgatgctatttcttctatatctcctgtcttctttatcccaaatcccactcagcatatcttcagacctaggttgtaagaccaactttggattggatctagccagtgaattattatttccatggttggttccctttctgttaactctggtaatcaacagattgaaaacggtggaagaacttctgaaaattgcagtgggagcaaattcttgttggttttgtgctgcttgcctttctagatctgctcatcagcacttaaccttccctcctctaaaggttactaaagaagcctgaagtaggtaaagagtgctcctcagcttcttatccttccactctttacccagcagatttcattcaatgccttagccaaggagtccagcacctgtctcccctgctaataattgtccttagagatgctagtactttaatccaggtatagcagtttcccgttattttcttgcttgtcgttcccctacatttcctcctgatttcccaagactctctttgtggcttttgagggtcagccaaggagcaggcaagtgagtgaacaatcctcaggaaaagaaggaccattttagcttaacacttccttttttttttttttttttttaagaagaatataggtaaacaggtaatgattcttgattggagataccatttgactcttgatgagagttgtacgaagatggaaatgagggatgattccaggcgttttagggggaaggctgcagataccattctaacccccaagatactgtgttctcaagacctcttagaactaggtgttgtcagggataatttgaggagggcttagtcttcagaacaatcctgcagtcttgacagaaatctaaaatctccaaaaactcctaccctttaaccttaccctagggggaactgatctatgaatattacatgtgtgattatgaaaggtgaagttgagtgagaggagttgaggaacgtggaagacagtgagctctcaccctaacactataagaagcatgatctcaatagaccaataattcacctttttatacatctgtaaataaatggaatgtttttaagaatataattatgtcagatttagcattttcttttatatattaaatatatatatctttccttttctgctttcgaaaagtgactatttttttagaaatctaagaacagaagtttggtgattgaaaggtagaatatataaacctgaaataaagcagttaaaacaattaaagcag

SEQ ID NO: 32231 - DNA, 12420 bp, Homo Sapiens
gaatacaaaccaccttctccaagcagggcatcaaaaaggcatcagagggttctggcaactagggtcagaaatattaccaaaaagtcctctcacttgcctcttggcagtcctttgaagagacaacaaaatacaagggacccagacaccatggtcccactcacagatttcagcccagtaatggatcattcaagagaaaaagacaatgatttatctgacacagatagcaactactcattggattctctctcatgtgtctatgccaaagccctgatagagccactgaagccagaggagaggaaatgggatttcccagagccagagaactctgaaagtgatgacagccaactatctgaggactcactggctgagaagaggtaccaaagccccaaaaacaggctagggggcaatcgtcccaccaacaaccgtggccaacccaggaccagaactagagcttctgtgaggggcttcactgcagcctcagacagtgacctacttgctcaaactcataggagcttctccttggatagcctgattgatgcagaggaagaactgggggaagatcagcaagaagaacctttccctggttcagctgacgagatacccacagagactttttggcacctggaggactctagtctgcctgtaatggaccaagaggcaatatgcaggcttggtcccatcaactacagaacagcagctaggctggatgccgtcctgccaatgagcagttcgttttaccttgatcctcagttccaaccccattgtgagctccaaccccattgtgagctccaaccccattgtgagctccagccccattgtgagcaggctgaatcacaggtagagccaagctactctgaacaagccgactctctccaaggcatgcagctttcaagagagagcccactgatgtccatggattcctggttttcctgtgactctaagatcaaccccagcagccccccaggaatagtgggttctttatgtccaagtcctgatatgcaggaatttcactcctgtaagggggagaggcctggatactggccaaatactgaggaactaaagccatcagatgcagaaacggttctgccatatagctccaaactgcaccaaggcagtactgagctcctctgcagtgcaagagatgagcacacagcctctgctgctgatacgtctaggctgtctctctggggaattcaaaggcttattcaaccaggagctgatggcacctttcagggcagatgtatccctgacatgacccagcagggcagctctgaagcatcccacaattctagcgtatcaaacgtgctggctgcctctgccaccaccttgactcatgtaggcagcacccatgaaagggattggtctgcccttcagcagaagtacctccttgaactctcttgtcctgttttggaggccataggagcacccaagccagcttacccctaccttgaggaagactctggttccctggcccaagcttctagcaaaggaggagatactctattgccagttggccctagggtatctagcaatctgaatctcaacaactttccagtccatctgtccagaatcaggcgtttgagggcagagaaagaacaggacagtttaaatgccaaattagaaggtgtttcagatttctttagcactagtgagaaagaggcgagttatgacgaaacttattcggcagacttagaatcattgtctgcttctcgatctacaaatgcacaggtctttgcaacagagaacgcgataccagattccatgacagaagcatgtgaagtcaagcagaacaacttggaagaatgccttcagagttgcaggaaacctggactgatgacttcctctgatgaggattttttccagaagaacgcttgtcacagtaatgtcactacagccaccaaagcagaccattggtcccaaggctgggctcctctcaggaaaaatagtgcagtccagccagggcaattaagtcccgacagccactacccactagaggaagagaagacagattgccaggagagctctaaggaagcagttagaagacacataaatgtttcctttgcccttccttcaggtccagagctataccttcactctgctccctggaatccattgtcatcttccctgcagcccccactcttggaaacattctatgtgaccaaaagcagggatgccctgacagaaactgccttagagattccagcttgcagagaagtaagggtaccctccccaccccccagggaagcctggggctttggtcacaaccaccaagctctccaaggtgcttatttgaagaataatttgccagtgctgttacaaaaccagaattctaagattgcctcatctcagcaggtcacagctgagataccagttgatctgaataccagggaagtcatcagagaatcaggtaaatgccctggaaatattacagaagaaagccatgattcagtttattcttctgttactcagaacagacattttctcccctctaccagcacaaaagtatgtgaatttgaaaaccaagttgtaattttaaataaaaaacacagttttccagcacttgagggaggagaggtcactgctcagtcctgttgcggtgcttcctcagacagcactgagtctgggaagtctctcctctttcgtgaatctgaggcacgagaggaagaagagctggatcagaatacggttctgaggcagaccatcaatgtaagccttgagaaagacatgccaggggaaagtgctgtttctttgaaatccagatcagtagatcgtagagtaagcagcccagtgatggtggcccagggtggtggcccaacccctaagtgggaagggaaaaatgaaactgggcttcttgaaaaaggtcttcgtcccaaagatagctcagaagagtttaagcttccaggtacaaagcctgcatatgaaaggttccagttagttgcatgccctcaggaaagaaaccccagtgaatgcaagtcacaagaaatgttaaatcccaacagagaaccttctggaaagaaacagaataaaagagttaataatactgatgaaatggctaggctaattaggagtgtaatgcagctggaaaatggcatcttagaaattgaatctaagcagaataagcaggttcatgcttcccacacaccaggaaccgataaggagttggtgttccaggaccagaaggagcaggagaagactgaccatgcctttaggccagacagctctggaaaccctttgccctctaaggatcagccatcttctccaagacagacagatgatactgtctttagggatagtgaagctggagcgatggaggttaacagcattgggaaccatccccaggtccagaaaatcaccccaaaccccttcaggtcaagggaaggtgtacgagagagtgaacctgtgagagagcacacccacccagctggatcggacagacctgccagggatatttgtgattctttagggaaacacacaacttgcagagagttcaccaacacttctcttcacccacagagaatgaaagcattggctagagctctgccattgcaacccaggctagagaggtcttctaagaataatggccagtttgtaaaagcatcagcaagtctcaaagggcagccttggggcttaggaagtcttgaggaattggagactgtgaaaggttttcaggaaagccaagtagctgaacacgtaagtagttccaaccaagaagagccaaaagctcaaggtaaagttgaagaaatgcctatgcaaaggggaggcagccttcaggaagaaaataaagtgactcagaaatttcctagtctcagccagctttgtagggacacgtttttcaggcaggaaactgtcagcccattactaagccggacagaattctgtacagctcctcttcaccaagacctgagtaataccttgcccttgaattctccaaggtggccaagaaggtgtcttcatgtacctgttgctctaggcatctcttcacttgactgtgtgctggatctcacaatgttgaaaattcataacagtcccttggtaactggagtagagcatcaggaccagagtacggagaccagaagccacagccccgaaggaaatgttagagggcgttcctctgaggcacacactgcctggtgtgggtctgtgcgatccatggccatgggatctcatagtcaatctggtgtaccagagagcattcctctggggacagaggacaggatctcagcaagcaccagcccccaagaccatggaaaggacctcagaatcaccttgctgggtttcagtaccagtgaagattttgcttctgaagccgaggtggctgtacaaaaagaaataagagtcagttcactgaacaaggtctctagccagcctgaaaagagggtcagcttctccttggaagaggatagtgaccaagccagcaagccaaggcagaaggcagagaaggagactgaggacgtcggactgaccagcggtgtttccttagcacctgtttccctgccgagggtgcccagtccagagcctaggctgttggagccctctgaccatgcatccatgtgcctggccatcttggaggagatcagacaggcaaaggcccagagaaagcagcttcatgactttgtggccaggggcacagtcctttcttactgtgaaactttactagaacccgaatgttcttcaagggttgctggcaggcctcagtgtaaacaaatagaccagtcatcatcagaccagaccaggaatgagggtgaagcaccgggatttcatgtggcatctctatctgctgaagcagggcagatagatctgttacctgatgagaggaaagtccaggccacatctctgtctgcagacagctttgaatctctgcccaatacggaaactgacagagagccatgggatcctgtgcaggctttctcccatgctgctcctgctcaagacaggaaacgtcgtactggagaactgaggcagttcgcgggagcaagtgaaccatttatatgtcactctagttcttctgaaatcatagagaaaaagaaagatgcaaccagaacaccttcctcagctgatcctttggccccagacagtcctcgttcttcagcacctgtggaggaggtcaggagggtagtatcaaagaaggtagtggctgccttaccttctcaggccccttatgatgatcctagagtgactctgcatgagctaagtcagtcagttccgcaggagactgcagagggcataccccctggcagtcaggacagcagcccagagcatcaggaacccagaactctagacaccacatatggagaagtttcagataatttgttagtgactgcacagggagaaaaaacagcccattttgaaagtcagtctgtgacctgtgatgttcagaattctacaagtgcctcagggcctaagcaagaccatgtccaatgccctgaggcttctactggctttgaagaaggtagggcaagtcccaaacaagataccattctgcctggagctctgacaagggttgcactggaagctcccacacagcagtgtgtgcagtgtaaggagagtgttgggtctgggttgacagaagtctgcagggctggcagcaaacattccaggccaattccactgccagatcaaagaccaagcgcaaatcctgggggaattggggaggaagccccatgtagacacccaagggaagctttagatggccctgtcttctcaaggaaccctgaaggcagcaggactctcagcccgtctagagggaaagagagcagaactcttccttgccgacagccatgcagttctcaacctgttgctactcatgcttattcctcccattcctctactttactgtgttttagagatggtgacctagggaaggagcctttcaaggctgccccacatactatccacccaccctgtgtagtaccttccagggcctatgaaatggatgagacaggagagatctctaggggacctgatgtgcacttgacacatggccttgagcccaaagatgttaacagggaatttaggctaacagagagcagcacttgtgagccttctactgtggctgctgtcctatctcgagctcaaggctgcagatccccttctgctcctgacgtgaggacaggttccttcagccactcagctactgatggaagcgtggggttaataggggttcctgagaaaaaggttgctgagaagcaagcaagcacagaacttgaggctgcctctttccctgcaggcatgtactctgagcccctgaggcagtttagggacagctctgtaggtgaccagaatgcacaggtgtgtcaaaccaatccagaaccacctgcaacaactcagggaccacacaccctggatttaagtgaagggtctgctgagagcaagttggtggtagagccacagcatgaatgtttagaaaataccactagatgttttttggaaaagccacaattttccactgagttgagggatcacaatcgcttggattcccaagccaagtttgtagcaaggttaaaacatacctgcagcccccaggaagacagtccctggcaggaagaagagcagcacagagaccaggcttcaggtggtggagaaggcttcgcccagggtgtgaatccccttcctgatgaagatggcttagatggctgtcagattttagatgctgggagagaggaggtggctgtggccaagcctcctgtgtccaagattttatcacagggcttcaaagacccagccactgtgtccttgaggcaaaatgaaacaccgcagcctgctgctcagaggagtggccacctctacactggcagagagcagccagcacccaaccacaggggctcacttcctgtgactacaatcttctctggccccaaacactccaggtcctcccccacaccacagttctcagttgtcggctcttctcgttctcttcaggagctgaacttgagtgtggagcctccttcccctacagacgaagatacacaggggcctaacagattgtggaacccacatctcaggggctattcctcaggaaagtcagtggcaagaacatctctgcaggctgaggacagcaatcagaaagcctcatctcgcttggatgatgggactaccgatcacaggcacctgaagcctgccacccctccttatccaatgccttccactctctcacacatgccaacccctgatttcacgaccagctggatgtctggtactttggaacaagcccaacagggaaagcgagagaaactgggtgtccaggttaggccagaaaattggtgctctcagatggacaaaggaatgctgcactttggctccagtgacatcagtccctatgcgctgccgtggcgtccggaggagcctgcacgtatcagctggaagcagtatatgtctggcagtgcagtcgatgtttcctgcagccagaagccccaggggctgacactatcaaatgtggcccggtgctccagcatggacaatggcctagaagaccagaactcccctttccactcccacctcagcacttacgccaatatttgtgatctgtcaaccacacacagcagcactgagaatgcccagggttcaaatgaggcctgggaagtattccgagggagttcttcaattgccttaggagacccccacatcccgacgagccctgaaggagtagcccccacttcgggtcatgacagaaggcctcagttcaggggcccttctggtgaagcagactgtctgaggagtaagccccccttggccaaaggaagtgctgcaggtccagtggatgagattatgctgctgtatccatcagaggcaggctgccctgtgggacagaccaggacgaacacattcgaacagggcacacagaccctcggcagcaggcgccactggagcagcactgacatctcctttgctcagcctgaagccagtgcagtatcagcctttgatctggcctcatggaccagcatgcacaatctgtctctccacctctcacagctcctgcacagtacctcagagctgcttgggagtctctcccagccagatgtggccagaagggagcagaacaccaagagggacatcccagataaagccccacaggccctgatgatggatggctctactcagaccactgtggatgagggcagccagactgacctcaccttacccaccctgtgcctccagacttcagaggctgaacctcagggagccaatgtgatccttgaagggctaggctcagatacctcgactgtgtctcaagaagagggagatgtgccaggggtacctcagaagagagaggcagaggaaacagcacagaaaatggctcagctcctctatcttcaggaagaaagcactccctacaagccccagagcccttcaataccctcatcccacttgaggtttcagaaagcccccgttgggcagcatcttccttctgtgagcccctcagtttctgatgctttcctgcctcccagctcccagccagaggagtcatattgcttagttgtcagcagtcccagtcccagctcccctcattccccagggctctttcccagtacttccgagtatcctggggactccagggtccagaagaagctgggccccacaagtgctttgttcgtggacagggcctcctccccaatcctcactcttagtgccagcacccaagagccgggtctttccccaggctctttgaccctctcagccccttcaactcaccctgttgaaggccaccagaagcttgactccagcccagaccctgttgatgccccaaggactccaatggataattattcccaaaccactgacgagttaggtggctcccagagaggtagaagttccttacaaaggagtaatgggagatccttccttgagttgcactccccacacagcccacagcagagtccaaaactccaatttagtttcttagggcagcaccctcagcagcttcagcccaggacaactatcggggtccaaagcagactgctgccaccaccactgaggcacaggagccaaaggctgggcaacagctttgtgcctgagaaggtggcttccccggagcattgcccactgagcggtagggagccaagtcagtggcagagcaggacagaaaatggaggtgagagttcagcatctccaggggaaccacaacgcactctggaccgaccttcttcatggggaggcctccagcacctcagcccctgccctgtctctgagttgactgatactgcagggctccgaggttctgccttgggcctccctcaggcctgccaacctgaggagttactgtgcttcagttgccagatgtgcatggcccctgagcaccagcaccacagtctgagggacctcccggtgcataacaaatttagtaactggtgtggggttcagaagggctcacctggggggttggacatgactgaggaggagctgggggccagcggtgatctcagctctgaaaagcaggaacagagtcccccacaacctcctaatgaccacagccaggattctgagtggtccaagagggagcagatccccctgcaagttggggcccagaacctctcactcagcgtggaactcacagaagcgaaactgcaccatggctttggggaggccgatgccctgctccaggtgctgcagagtgggacaggggaggcgcttgctgctgatgaacctgtgacatccacctggaaggagctctatgcacggcaaaaaaaggccattgagaccctcaggagagagcgggctgagcgacttgggaacttctgccggacgcgaagccttagccctcagaaacaactgagcctcctgcccaacaaagatctcttcatctgggatcttgacttgcccagcagacgccgagaatacctgcagcaactgaggaaggatgttgtggagaccaccaggagcccagagtcagtgtcaaggtcagctcacacaccctctgacatagagttgatgctgcaagactaccagcaggcccatgaggaggccaaggtggagattgcccgggcccgagaccaactgcgggagcggactgaacaagagaagctgagaatccaccagaagatcatttcccagctattgaaggaagaggataaactacataccttggccaattccagctccctgtgcaccagctctaatggaagcctctcgtctggcatgacctctggctataatagcagcccagccttgtcaggccagctccagttcccagagaatatggggcatacaaacttgcctgattccagggatgtatggataggggatgagcgaggaggccattctgcagtgaggaagaactctgcctacagccacagagcctccctgggcagttgctgctgttcaccatccagtctgtccagcttggggacctgcttttcctcctcctaccaggatttggccaagcatgtcgtggacacttctatggctgatgtaatggctgcttgttcggataatttgcacaacctcttcagctgccaggcaactgctggctggaactatcagggtgaggagcaggcggtgcagctttactacaaggtgttttctcccactcggcatggcttcctgggggcaggtgtggtgtcccagccgctgtctcgtgtgtgggcggctgtcagtgaccccactgtgtggcccctgtattacaagcccatccagacagcaaggctgcatcagcgagtgaccaacagcatcagcctggtgtacttggtgtgcaacaccaccctgtgcgcactgaagcagccacgggatttctgttgtgtctgcgtggaagccaaagagggtcacctgtctgtcatggcagcccagtctgtgtatgatacatccatgccaagacccagcagaaaaatggttcgcggggagatcctgcccagtgcctggatcttgcagcccatcactgtggaagggaaggaagtcaccagagtcatctacttggcccaggtggaacttggtgctccaggcttcccacctcagctcctgagctctttcatcaaacggcagccactggttatagccagactggcttccttccttggtaggtagcatctcaccgtcaagatggtgctgctgagatgcaggcccaggctgctcaagagagacactgtggcagctccttgttactttccataccacagtgcaggaaaagctgatgctacctgctgtggccgattggggcagacagcactggcccagggatgctagcaaagcccagtcagtacttggtcacagctggcaccagtgcagagcaaacggcctgagctcctggcccagactatccagagtgaatgcagctccgctcaccttttggatttctcacctttctttcctgtttctgggactctgcggcagacaggacacttaaggaccaggactgggcacagccagcagagccggggactgcagtgctttggcaaggtgcttccgcaggctggtagggaagcaggcagccactggccaagactctgttctgaatctacctcctctagcattcagctctactgtgtgatgggacgttaaaaataccaaaacagaaagagggtttaaaaaacagctgcacaaaccagaacaccgattcagaatcttttctccctcttgagtttttgcaaaatactttattattgatttttgctttttttctccctttccctcccaggagaagacatttgggtcttggcctgaggcaggggtgttgagcgatgatgctctgatatggagctgtcactctagagctcggtcagatggaagacactatagaaccaggttggacagatttggggtcagggttggaggctgagttcttttgaggactggttggagtggcagccagatggtggctgctgacaaggcaagaggaatttcagagattaaacattgtcctttgaggaagggagaggaggtgaatgaactcccagaggaggtgagtggcttgttgggaggaagctcagttccagaacttacctcagtgcacttgggaggggtggagtcctgagcattccatgatttctgccctggccccacctatcctaggatggggtgggatggagagtgggttcagttttcttgtactttagcctggctgaacatgaactttgtgtttacctggaagtggtaggggtgggagagattctcatctttagttctggtgcccaaaatctttggtagatggagggaactggggattcagaagatgtggtaaaggtctatttctgtagtgtggcagagatgtgtttttctaaagtgtttgcagggcatttttccctcttacctcagattaagttatttatatattgttgattgaaggttttttaaaattgcttttaaacttctatttctcgggtaaattttttggtgacatgatatatttaacaccctatttatatactcctacctcttttcatataaatctcttactaagactactgaccaaaaaagaacattttaaaattaaaa

SEQ ID NO: 32232 - DNA, 7253 bp, Homo Sapiens
atgcccaagatgggcgtgcgcgcaagggtggccgactggccgcccaagcgggaggccctgagagagcacagcaacccaagcccctcccaggacacagatggcacaaaggccaccaagatggcccattccatgaggagcatacagaacggacagccccccaccagcaccccggcttcctcagggtccaaagccttccaccgactctccaggagaaggtccaaagacgtggagttccaggacgggtggccccggtcccccggcagggccttcctcccccttcggcaccgcagcagcagcgagatcaccctcagcgagtgtgacgcggaggacgcgggggagccgcggggggcccggcacacgggggcgctgcccctcttccgcgagtacgggagcacctcgtccatcgacgtgcagggcatgcccgagcagagcttcttcgacatcctgaacgagttccgcagcgagcagcccgacgcccgagggtgccaggccctcaccgagctcctccgggcagatcctggcccacacctcatggggggcggcggcggagccaagggggactcccacaacgggcagcccgccaaggacagcctcctgccactgcagcccacgaaggagaaggagaaggcccggaagaaacctgcgcggggcctcggcggcggggacacggtggactcgtccatctttcggaagctaaggagcagcaaacccgagggggaggctgggcgttccccgggggaggccgacgagggccggagccccccggaagccagcaggccgtgggtgtgtcagaagagcttcgcccacttcgacgtgcagagcatgctgttcgacctcaacgaggcggccgccaacagggtgtcggtgtcgcagcggcggaacaccaccacgggtgcttcggccgcttccgccgcctcggccatggcctccctcacggcctcgcgggcccacagcctcggaggcctggacccggccttcaccagcacagaggacctaaactgcaaggagaacttggagcaggacctcggcgatgacaacagcaacgacctgctgctcagctgcccgcacttccgcaatgagatcgggggcgagtgtgagcgcaacgtgagcttctcccgggcttccgtgggctccccgagcagcggcgagggccacctggcagagcccgccctgagcgcctaccgcaccaacgccagcatctcggtgttggaagttcccaaggagcagcagcggacgcagagtcggccccggcagtacagcatcgagcatgtggacctgggcgcccgctactaccaggattacttcgtgggcaaagaacatgccaattacttcggcgtggatgagaagctggggccagtggctgtgagcattaagcgggagaagctggaagaccacaaggagcacggacctcagtaccagtacaggatcatcttccggacccgcgagctcatcaccctgcggggctccatcctggaagatgctacgcccacagccaccaagcatgggaccgggcggggcctgcccttgaaggatgccctggagtatgtcatccccgagctcaacatccactgcctgcggctggccctcaacacccccaaggtgacggagcaactgctgaagctcgatgagcaagggctctgccggaagcacaaggtgggcatcctctattgcaaggccggccagagctccgaggaggagatgtacaacaatgaggaggccggccccgcctttgaggagttcctctccctcatcggcgagaaggtctgcctgaagggcttcaccaagtacgctgcccagctggacgtcaagaccgactccacgggaacccactccctctacacgatgtaccaggactacgagatcatgttccatgtctccaccctgctcccttacacccccaacaacaggcagcagctgctacggaagaggcacataggaaatgacatcgtgacgatcatcttccaggagcctggcgcgctaccgttcacccccaagaacatccgctcccacttccagcacgtcttcatcattgtccgagtccacaacccctgcactgataacgtctgttacagtatggctgtgacccgatccaaagacgctcctcctttcggcccccccatccccagtggaaccacattccgcaaatccgacgtcttcagagacttcttgctggccaaggtgattaacgctgagaacgccgcgcacaagtccgacaagttccacaccatggccaccaggacccgccaggagtatctcaaggacctggccgaaaactgtgtctccaacacccccatcgactccaccggcaaattcaacctcatctccctgacctccaagaagaaggaaaagacaaaagcacgggctggcgctgagcagcacagtgcaggggccatcgcctggagggtggtggcccaggactacgcccagggggtggaaatcgactgcattttgggaatttccaatgagtttgtggtgctcctggacttacgcaccaaggaggtggtgttcaactgctactgcggggatgtcattggctggactccagactcctccacactcaaaatcttctatggacgaggagaccacatcttcctacaggcgacagagggttctgtggaggacataagggagatagtgcagagactgaaggtgatgaccagtggctgggagacggtggacatgacgcttcggcggaacgggctcgggcagctgggcttccacgtgaagtacgacggcacggtggccgaggttgaggactatgggttcgcctggcaggccggcctccggcagggcagccgactagtggagatctgcaaggtggccgtggtcacactgacccacgaccagatgatcgacctgctgcgcacctctgtcactgtgaaggtggtcatcatcccgccttttgaggacggcactccccggaggggttggccggagacctacgacatgaatacctcggagcccaagacggagcaggaaagcatcactcctgggggccggcccccctaccgcagcaatgctccctggcagtggagcgggcccgcatcccataactctctaccagcctccaagtgggccactccaaccactcccggccatgcccagtccctgagccggcccctgaagcagacccccatagtccccttccgggagtcccagccactgcacagcaagaggcctgtcagcttcccagaaaccccttacacagtatcaccagcaggggccgacagagtccctccctaccgacagccttctgggagcttctccacccccggttcggccacctacgtgagatacaagccatccccagaaaggtacacggctgccccacaccccctgctatctcttgatccccacttcagccacgatgggacgtccagcggcgactcctcttccggcggcctgaccagccaggagagcaccatggaacgccagaagccagagcctttgtggcatgtgcctgcccaggccaggctctcagccatagccggaagcagcgggaacaagcacccgtccaggcaggatgcagcaggcaaagattcccccaacaggcattccaaaggagaacctcaatactcaagtcattccagcagcaacaccctctccagcaacgcatccagcagccacagcgacgaccgctggttcgaccccctggaccccctggagccagagcaagaccccctctccaagggtggctctagtgacagcggcatcgacaccaccctctacacctccagccctagctgcatgtccctggccaaggctccacggcccgccaagccacacaagccccctggaagtatgggcctttgtggcgggggtcgcgaggccgctgggaggtcccaccacgcagacaggcggcgggaggtctcccctgcccccgcagttgccggccaaagcaagggctaccgaccgaagctgtactcctccggctccagcacccccacgggactggcggggggcagccgagacccaccgaggcagcccagtgacatgggctcgagggttggctaccccgctcaggtttacaaaactgccagtgcagagactcctcggccctcccagctggcccagcccagcccctttcagctctccgcctccgtccccaagtccttcttctccaagcagcctgtacgcaataagcacccaacagggtggaagagaacggaggagcccccaccacggccactccccttcagtgacccaaagaagcaggtggacacgaacaccaaaaatgtctttgggcaaccgaggttgagggcatccctccgagacctccggtcaccacggaagaactacaaatccaccatcgaggatgacctgaagaaactcatcatcatggacaacctggggccagagcaggagagagacacgggacagtcaccgcagaagggcctgcagcggacgctgtcggacgagagcctgtgcagcgggcgccgggagcccagcttcgccagccccgctggcctagagccagggctgcccagcgacgtgctcttcaccagcacctgcgccttcccgtccagcacgctgcctgcacgccgccagcaccagcacccccacccgcccgtcggccccggtgccacccctgccgccggcagcggctttcccgagaagaaatccaccatctcagcctcggagctctcgctggctgatgggcgggaccgccccctgcggcgcctggaccctgggctgatgcccctgcctgacacagctgctggcctcgagtggtccagcctggtgaacgcagccaaggcatacgaagtgcaaagagccgtctcactcttctctctgaacgacccggccctgagcccggacatcccgcctgcacacagtcctgtccacagccacctgagcctggagaggggacccccgacccccaggaccacccctaccatgagcgaggagccacccctggatctgacaggcaaggtgtaccagctggaggtgatgctgaaacagctgcacactgacctgcagaaggagaagcaggacaaggtggtgctccagtcagaggtggccagcctgcggcagaacaaccagcggctgcaggaggagtcgcaggccgccagcgagcagctgcgcaagtttgcggagatcttctgcagggagaagaaggagctctgaggtgggaggccgccgcccgccttcgctccttcccctcaggccgtggccctgctgcctctctccctccactcagctcccagctgccggtgtgaccaagatgacccatccagggccctccccatggacacggaaactccgatggcctcactagggctgtgagtcagggtcagcgcgcacagccctcatgccccagagggcgaagtggtctcaggcctccctccaagctgcccagctgtggtcccggtgagctgggctgtgcttacaccgctcccgggcctgccccgctgtccccatctagcctcttcctgggaccagcccttcgaagctgatggggacggagagaggagccagtctccagacgcctcggctccaggaggtcacacagcaggtttctgcaccacgcacaacaaagttgcggcttgtggggccgaggcccctgcatgaaaagtacagcgtgaaagcaaccctttcttccccacacccagagaggtgaggcccgcgtggacacagaccagggcgcctcggtccctagcacgtgagctccaaaaagcacgaacatgatcccctccctaaccccctcctcccaaaaagcagccaggagcactttcttagagtttaaattattttcttgggggcctgaggatagagagaggcaaggctagcctccagagccgatttatttgagagagaaactctatttggatctccaggacggtttatacgatctttttctatcagctcctcttccgccagaggccactgcacctgggctaggggtccacaggcccctccaccttccagctaaccaggccaggccggggcggtggagccaccacacagccgactctctcctcctcctcccggcacgacctggccctgaccagcagcctcggcctcttctgggttccaggaggggctcccgaagccctcaggacagggctggaggagaacagccttcatctcctcctctggtttttttttcctttgcaagtctcccagcccatctctccgagcagcggccaccagaccccctcaccatgctccccggggagcactgcaccccgcgaaccccactggacgctggttctctaaaggcaataaggggcggccatgccggtgtggtaccacgctgttcctccaggaaaccgtttctttttttccttctttaaaagcaaacagaaaaagatatatatatatatatatatatatttattttttcatgtagagttggcgccagaacaagcctgtatggccacagtctgtggattcatccccccaacctcaagctgaggaccaaggcgtgtcccctgtgggctgggggtcagtgggaggaccagagggatgaagtcagggcaggccggtgccctttttgggaggcaccaggcggggaggagttggcggagcaggtctggctgtgagccagcaccaggcaacccggcccttgtccagggacctctgctgccttctctctggggtcaggaacctcagaggagggggctctggggactgcataggacgcaggcactcggaggtgccggtgtggatgggtgggggtgagagaagagggttcttatcgcgtctcctgtgatcagcctctggccccctggaggaggaaacctcagcgctgcccctgcccccaccctcacccccaacaccaagagtgaggtgggcgtgccccaggcagcgtcctcagccctggccagctactgtgatgccatcttctcccccatccccttctctggggggcccacccgtcccccacccccaccccttagaccctcatcgggtccctttttttttttttttttcagttgtctcctcccatcttcagatcattcgaatcattttggggacttaatcatgtacatggacaagtgtaaattatgatttttggttttgttttctgttattttttaaggatttctgcaaaaacagatctatttaatttgaggttgatgttctatccaatggccgaagatagcagcaggttttttttttcatatgttgatttgtttcatttggattttttttttattattctttattgtcttttttttttccccatccctgtcttgagattttctggcatgtttctggaggtttcaaaggaaataaaggtttcatag

SEQ ID NO: 32233 - DNA, 2356 bp, Homo Sapiens
atcccaagatgcatcgcgcataggcaatatggtcccgctactggacccatttcctacctgggaaatggagtcgaagctgactcaaaacgtaacggcccaattgtccttgagacttcattccccagcaagctcagcgtgtaacgtgcgctatggagccgaaagtcgcagagctgaagcagaagatcgaggacacgctatgtccttttggcttcgaggtttaccccttccaggtggcatggtacaatgaactcttgcctccagccttccacctaccgctgccaggacctaccctggccttcctggtactcagcacgcctgccatgtttgaccgggccctcaagcccttcttgcagagctgccacctccgaatgctgactgacccagtggaccagtgtgtggcctaccatctgggccgtgttagagagagcctcccagagctgcagatagaaatcattgctgactacgaggtgcaccccaaccgacgccccaagatcctggcccagacagcagcccatgtagctggggctgcttactactaccaacgacaagatgtggaggctgacccatgggggaaccagcgcatatcaggtgtgtgcatacacccccgatttgggggctggtttgccatccgaggggtagtgctgctgccagggatagaggtgccagatctgccacccagaaaacctcatgactgtgtacctacaagagctgaccgtatcgccctactcgaaggcttcaatttccactggcgtgattggacttaccgggatgctgtgacaccccaggagcgctactcagaagagcagaaggcctacttctccactccacctgcccaacgattggccctattgggcttggctcagccctcagagaagcctagttctccctccccggaccttccctttaccacacccgcccccaagaagcctgggaatcccagcagagcccggagctggctcagccccagggtctcaccacctgcatcccctggcccttgattttctcccatgtggaccctgatttatggtggtacttgctaggacttaattggctttggcaaagcaaaaggttttgagtacaagattactatttttgataatatagtagagatcttccatgaagataacaaggctcaaggaagttaggtttggccaagataaaggccagggaaccagaattcccatctgccttcaaatgagttttttttttttttttagacagagtcttactctgtcacctaggctggagtgcagtggcacagtctctactcaggaggctgaggcagtagaatcatttgaaccagggaggcagagattgcagtgagccgagattgcatggctgcactctagcctgggtgacagtgtgagactctgtctcaaaaaaaaaaaaaaaagtacctacctcaggtagggactgaataaacacgtgtaaggcactttggaaaaatacctggcatatatagtaagcagtatgttggccattaccaaaggccctgggaattctgtactgctgctcatgggtgtagtcggttctagaggggtgggcaggtgggagtagctgaggaagacaagtggctggaatggtatcacatgatacacagaagtatcctcagttctgaatctaccttggcctcaagggcccaggagaataacttttcccagctgacagcctctctgaggacaatgacatatgaatgaggatcaaaacgagctttggccaggcactgtggcgctcacctgtaatcccaccattttgggaggctgaggcggaggaccgcctgaggcaaggaattcagaaccactctgggcaacataatgacactaaaaaagactatctctaatcaaggctagaaccaagggaaggctaagaattgcccagtactgtgcaactacgaaagccctacccaaggccaccagccttgtcttcctctttcctctgtcagttcaaaaagaacagaaacctccagctcttttacatagcaggtaccaggcatttatcagaagaggccaagcttctggttcccatgcagccctttgaatagtgtgtctaaacaaaaataggtgtccaagtagtcacactgagactttaactggtaacccagcctgtggcgtcagtcgcagtgctctggccaacactatagcagggcttattcttctccctcatgtgtagtgaaacaaaatgtaacaccttgggttcattcagttccattccctatatctacctgtgtcaatataattccctgatttggaggcagctctcctcattttccccaaaacagggaaagcaaggagtaaattcctcttaaaatcaaaagctaataatatgcttcctaaaataaagactcatcaaggtctca

SEQ ID NO: 32234 - DNA, 5942 bp, Homo Sapiens
ggagaactccaccgggctatgcgaacagaatcctgcgaagaggatggcattccctgtggatatgctggaaaattgcagccatgaggaattggaaaattctgctgaagattacatgtcagatttaaggtgtggggaccctgaaaatccagagtgtttttctcttctcaatattacgattcctattagcctgtcaaatgtaggctttgtacctctttatggtggagatcagacccagaaaattcttgctctctttgcacctgaagattcactgacagctgtggcactttaccttgctgatcagtggtgggctattgatgatattgtgaaaacatctgttccttcaagagaggggcttaagcaggtgagcactcttggggagagagtggttctgtatgttctgaatcgaattatttatagaaaacaggaaatggagagaaatgagatcccattcctgtgtcatagcagtactgattatgctaagattctgtggaagaaaggagaggccattgggttttattcagttaagcctacaggaagcatatgtgcctcttttcttacccaaagttaccaattgccagttcttgatacaatgtttctaagaaagaaatacagaggtaaagattttgggcttcacatgctggaggactttgttgattcctttacagaagatgcgcttggcttgcggtatccactgtcttctctcatgtatacagcttgcaagcaatactttgagaagtatccaggagaccatgaactcctttgggaagttgaaggtgttggacactggtaccagcgaataccagtcaccagagcattacaaagagaagcacttaaaattctagcactttctcaaaatgaacctaaaagacctatgtctggagaatatggtcctgcatctgttccagaatacgaagcaagaactgaagacaatcagtctagtgagatgcagctaactattgattctctaaaagatgcctttgcaagcacttccgaaggtcatgataaaacatctgtttccactcatactcgaagtggtaatctaaagcggccaaagattggaaagcggtttcaggattctgaatttagcagttctcaaggtgaagatgaaaagacctcccagacttcacttacagcttcaataaacaaattggagtctactgcacgcccatcagagagctcagaagaattcctggaagaagaacctgaacagagagggattgaatttgaggatgaaagcagtgatagagatgcacggccagcactggaaacccagccacagcaagagaagcaagatggtgaaaaggaatctgaattagagcctatgaatggtgagataatggacgattctcttaagacctcacttataacagaagaggaagactccactagtgaagttttagatgaagaattaaaattgcagccttttaattccagtgaagactctacaaatcttgttccactggtggtagaatcttcaaaaccccctgaggtagatgcaccagataagaccccacgtatacctgactcagaaatgttgatggatgaaggcacatctgatgaaaaggggcacatggaagagaaattgtccctacttccaagaaagaaagcacatcttgggagttcagacaatgttgctactatgtcaaatgaagaacgatctgatggtggttttccaaactctgtgatagctgaattttccgaagaaccggtctctgagaatttgtctcctaatactacttcctcattggaagaccagggtgaggagggggtatctgagccccaggaaacatctactgctcttcctcagagttctttgatagaggttgaacttgaagacgtgccattttcacagaatgcaggacagaagaatcagtcagaggagcagtctgaagcatcttccgagcaactggatcagtttacacaatcggcagaaaaagctgtggatagcagctcagaggaaatagaagtggaagtgcctgtggtagacaggcggaatttaagaagaaaggccaaagggcataaaggacctgctaagaagaaagctaagctgacctgaaggaagaagaaagtggatgataaatcctcttctttgtaacatagttgttgtttttaaaatatggtaattaataaacagcatggggcacaggacaaaaatttccaaaatttcaatttgaacttacttactatgcagttttttgcttccctttagaacgtagaattcaccattgtttttaattttccaggctatttttggtaaatgcaattttttatttttattaaccatgtttcaattttgggaaaccagatcatattatattttctttatcaggtggtacatctgaccattatttcaaaaatataattaaaaagctgtgaaagtagtaggatttccattacttataaggatcacagaaatcttttatactaagggttttaatagtaaaacttggtgagggttctagaagttttaaatttcaaaactaatcaccaattttttaaaatgtaggcatgcctaaacaaaaataagtgtcaataaattagaaaaaatataacttcaagtaaatgagagcacaaaaacagaaacttacggtcaaaggttcatgaagatattttggttttggcctcttaatcctagatatagatgcagttttttcctttgacttcactatctatggaaaggtacacataaaatctgtttctgattcattctatcatctgatgttaacagtactgtcagggatttaactgtggcatgtggggactaattatttaaaatttcatttgaagtattagtttgctgtaattttttttgtctgcatatgtgcagacgcctagaagtttagactttcacctttaatcaggtaaaaatcacaactatactttggagacatggtttaatttggacttctggtcctgatcagatagataaattaagctggagattttacttttatcccaacccagttaacatctatatttcagaagtatgaggctccttcctaaggcatctccttaaatcttgccacctccctaattctacagtcttatttatattcccccacagctttcatctacttctgtaactcatggagtgattctccaatcaacagatcttcctgcctgccggcttatgcccttgatgtccatttttgggtaggtttggaggtgcaccccacaatgttagacctatatggcaggagtaaaactgcccccagtgttagacctatatggcaggggtaaactgcctttgggggagctgtggttacaagggcttcaatcatattggaggcttcaatcatcctttgatttgtactgagtactggttgcaagctggcctgttaagtatatattgtgttgccataacaaaggcctaggaaaatttgaagaaaaaaaacactgaactgttattttttgtaatttatttaaaaatggacaaaatggttattagaatccaaagataatctaaaaacagttctactctttggaaatattatgtgtactcaaatttgcacttaagttggagaatgttttgagaccatttaaattgttttaaaaatagcttgatcttgatccttatgcaaaagaaactaagactttgtgtcattatttgaggtagctaaggactgatgttgaaagtgtattcagtctatagtaagctgatgtcaggtcagtaaattttgtttggggatgttggtattttcgatcaagttaaaatcttaaagcagacaaaaatagtaaacgctcctatttgtgttagattttgaacaattgtattaccctatattttctttaattagtcaaaggtaagccagattatttcattctaaatgaaaattaaagcactttggccatttattttttcaacaaatgctaatactaagtaaaaaaaaaaaagtatgactactattagtgaatctaccaaacatttatgctgttttatacattttatgagaaacttctgtcaatatcacaaagggaaatactctgttaagattcagtaaattcttaatctttacatgtttcatttcttagatttgaaaacacttgtagatattttatttttacttggatttgtttaaaatactttcttttcaaattattttaaacatggaaacgcttcatgaatttgtgtcatccttgcacaggggccatgctaattttccctgtattgttctaattttagtatatgtgctgccgaagtgagcactaaaagactttctttagacaagtgtagttttttaaagattgagctcactggctcaactcttgatgtgtgaatatagttgagtttacaaaaaatgtttattaatcatatatgaccattgggggctaacagtataaacttattcttgttaaacttgtttgggttaaatagtaagtgaattgtaaacaatttagaagttttttgttcagcacacaagaacacttctgttacagattctctctgacagaaattgttattttggggtttatagattatagagggaaaagttagatcacttggaaaaacctaactctcatgttcagtaacttgagtatagaatttataccacaatttatcttcaataaggaacctacatgaacttaatcagttatctgtagtttttgcaaggcattagaaaaaatttcacaattacagaggactgaaaatgtgatttcaaccggctagtctagttgttgaatgtccagtcacattacacatagtcctttgtgaacttatttgtgaagggagttcactttttatgtacatacgtgtatatttccttgtgtaatataaagcagatggttattagtattttagttctttcaagtttaaattattcaattgctagacatcacagaaattagtatatttaagaatttattataaagctcctctacaacttttaaaggtgagagggtctattatgatttttttataaaatcaaacagcatgatttagaacgtcagtcttctacttaaaatgtgtctatattcatggtatttccattcagtgtagatggtaaggaaaacatctagtcattaaagatttacttatagcagactccagaacactacctacaatggggtttcagtgactagaaatcttgaaggtttatgattgcatcaaattgagcctgtactaatatctaaatatctgctcttatgttctgctttatcccttgggattaccttctaaggtttggtcacaccagcaaactgaaacagatcttaatgtacataaaaaatttatactaatattactcatctgtgttacagtattttgaaaaatgtttcaggtgtcatctagtcgtctttcatgggtgtgattagttacaaatgttatgcttatgttttcatacttaatatcaagctttctttgtaccttacaagatagtatttttggttctaaaaaaaacaagcaaacttcatttttgtagtatccagaaattacctggagtcagtatttttattcgccttctagaacttgtgatccacacatcacccatttatattagtggtaaaattatctgctaaaatctaattgtaagaaaggcttaccttctgtcatcaagtgattgtatcatcctggatcgtcatttccaaggaactagcctttcttttcctaagcgtctgtatgtgttctaaaacttccagtatatatttatagaacttagaaaaaatgttacattattcagagtagcaagtcttactggagtacctatgtttgttttcttggtttttatttttttttaagtttaaaagtagtaattaaacctatattttgtgattgtttcctggtctgtgtttttaaattcctttccttcagttttcctcatgaagatgtttcagatactgaatttgtttagacattgaatgactttgttaaaggcacaattaatcacattggttgtactctgaagacagacttctttaaaaaaaaaataaacaatttaaaacaa

SEQ ID NO: 32235 - DNA, 2181 bp, Homo Sapiens
atgtttcaggacccagtggcctttgatgatgttgctgtgaacttcacccaggaggagtgggctttgctggatatttcccagaggaaactctacaaggaagtgatgctggaaactttcaggaacctgacctctgtaggaaaaagttggaaagaccagaacattgaatatgagtaccaaaaccccaggagaaacttcaggagtctcatagaaaagaaagtcaatgaaattaaagatgacagtcattgtggagaaacttttacccaggttccagatgacaggctgaacttccaggagaagaaagcttctcctgaaataaaatcatgtgacagctttgtgtgtggagaagttggcctaggtaactcatcttttaatatgaacatcagaggtgacattggacacaaggcctatgagtatcaggaatatggaccgaagccatgtaagtgtcaacaacctaaaaaagccttcagatatcacccctcctttagaacaccacaaagggatcacactggagagaaaccctatgcttgtaaagaatgtggaaaaacttttatttcccattcaagcattcaaagacacgtggtaatgcacagtggggatggaccttataaatgtaaattttgtgggaaagccttccattgtctcagtttatatcttatccatgaaagaattcacactggagagaaaccatatgaatgtaaacaatgtggtaaatcctttagttattctgctacccttcgaatacacgaaagaactcacactggagaaaagccttatgaatgtcagcaatgtgggaaagcatttcatagtcccagatgctatcgtagacatgaaaggattcacacgggagagaaggcttatcaatgtaaggaatgtggaaaagcattcacgtgtccccagtatgttcgtatacatgaaaggacccactctaggaaaaaaccctatgaatgtacgcagtgtgggaaagcattatcctctcttacaagttttcaaacacacataagaatgcactctggagaaagaccttatgaatgtaagatatgtgggaaaggcttttgttctgccaattcatttcaaagacatgaaaaaactcacagtggagagaaaccctataaatgcaagcaatgtggtaaagccttcattcattccagttcccttcgttatcatgaaaggattcacactggagagaaaccctatgagtgtaagcaatgtgggaaggccttcagatcttcctcacaccttcaattgcatggtaggactcacactggagagaagccctatgaatgtcaggaatgtgggaaagccttcagatctatgaagaaccttcaaagtcatgaaaggacacaaacacacgtaagaatacactctggagaaagaccttataaatgtaagctatgtgggaaaggcttttattgtcccaaatcattgcaaagacatgaaaaaactcacactggagagaaactctatgaatgcaagcaatgtggtgaagccttcagtagttccagttcctttcgataccatgaaaggactcacactggagagaaaccctataaatgcaagcaatgtgggaaagccttcagagctgcctcagtccttcgaatgcatggtaggactcaccctgaagataaaccctatgagtgcttttattctgccaagtcatttcaaatacatgaaaaatcttacactggagagaaaccctatgagtgtaagcaatgtggtaaagcctttgtttctttcacttcctttccatatcatgaaaggactcacactggagagaaaccctatgaacatgaaaagacattggaaggaaaccctatgaaggcaagcaatgtggcaaagctttcacttcttccagttcttttcaatatcatgaaagaattcacactggggagaaaccctatcagtaaaccctatgagtgtatgccatgtgggaaagccttcatttttctagttgctttcgatgtcatgaaaggactcacactggagagaagccctatgaatgtaagcaatgcaggaaagccttcagatcagcctcacaccttcaaatgtatggaaggactcacactggagagaaaccctatgaatgatgcaagcacagtgttggaatggccaatgacaatgacaatgaaagtgcaggctgagggtgatgaacaggacacactggagagcctgacattggcctag

SEQ ID NO: 32236 - DNA, 3123 bp, Homo Sapiens
gggagtgctgagagtgaggcagcatggaggagaggaagcatgagaccatgaacccagctcatgtcctctttgaccggtttgtccaggccaccacctgcaagggaaccctcaaggctttccaggagctctgtgaccacctggaactaaagccaaaggactaccgctccttctatcacaagctcaagtccaagcttaactactggaaagccaaagccctctgggcaaaattggacaaacggggcagtcacaaagactacaaaaagggaaaagcgtgcactaacaccaagtgtctcatcattggggctggcccctgtggtctccgtacagccatcgacttatccttactgggggccaaggtggttgttattgagaaacgagatgccttctcccgcaacaacgtcttgcatctctggccattcaccatacatgatctacgaggtctgggtgccaagaagttctatggcaagttctgtgctggagccatcgaccatatcagtatccgtcagctccaactaatacttttgaaagtagccttgatcctaggcattgaaatccacgtcaatgtggaattccaaggacttatacagcctcctgaggaccaagagaatgaacggataggctggcgggcactggtgcaccccaagactcatcctgtgtcagagtatgaatttgaagtgatcatcggtggggatggtcggaggaacaccttggaagggtttcgtcggaaagaattccgtggcaaactggccatcgccatcacggcaaattttatcaaccgaaatacaacagcagaagctaaagtggaagagatcagtggtgtggcttttatattcaaccaaaaatttttccaggaactgagggaagccacaggtattgacttggagaacatcgtttactacaaagatgacacacactatttcgttatgacagccaaaaagcagagtttgctggacaaaggagtgatactacatgactacgccgacacagagctcctgctttcccgagaaaacgtggaccaggaggctctgctcagctatgccagggaggcggcagacttctctacccagcagcagctgccgtctctggattttgccatcaatcactatgggcagcccgatgtggccatgtttgacttcacttgtatgtatgcctccgagaacgccgccttggtgcgggagcagaacggacaccagttactagtggctctggtcggggacagcctcctagagcctttctggccaatgggaacaggaatagcccggggctttctagctgctatggactctgcctggatggtccgaagttggtctctaggaacgagccctttggaagtgctggcagagagggaaagtatttacaggttgctgcctcagaccacccctgagaatgtgagtaagaacttcagccagtacagtatcgaccctgtcactcggtatcccaatatcaacgtcaacttcctccggccaagccaggtgcgccatttatatgatactggcgaaacaaaagatattcacctggaaatggagagcctggtgaattcccgaaccacccccaaattgactcgcaatgagtctgtagctcgttcaagcaaactgctgggttggtgccagaggcagacagatggctatgcaggggtaaacgtgacagatctcaccatgtcctggaaaagtggcttggccctttgtgcaattatccatagataccgccctgacctgatagattttgattctttggatgagcaaaatgtggagaagaataaccaactggcctttgacattgctgagaaggaattgggcatttctcccatcatgacaggcaaagaaatggcctccgtgggggagcctgataagctgtccatggtgatgtacctgactcagttctacgagatgtttaaggactccctcccctctagcgacaccttggacctaaatgccgaggagaaagcagtcctgatagccagcaccagatcccctatctccttcctaagcaaacttggccagaccatctctcggaagcgttctcccaaggataaaaaggaaaaggacttggatggtgctgggaagaggagaaagaccagtcaatcagaggaggaggaagctcctcggggccacagaggagaaagaccgaccctggtgagcactctgacagacaggaggatggacgttgccgttgggaaccagaacaaagtgaagtacatggcgacccagctgctggccaaatttgaagagaatgcgcccgcacagtccatcggcatacggagacagctgacacaagagcgtggggccagccagccgtcctgctgcctgcctgggcaggttcgccctgcccccaccccccggtggaaacagggctccatgaagaaggagttcccgcagaacctgggaggcagcgacacatgctacttctgccagaagcgggtctacgtgatggagaggctgagtgccgagggcaagttcttccaccggagctgcttcaagtgcgagtactgcgccaccaccctgcgcctctcggcctacgcctacgacatcgaggatggtaaattctactgtaagccacactactgctatcgactctctggctacgcacaaaggaagagaccggcagtggctcccctgtctggaaaggaggccaaaggacccctgcaggatggcgccaccacagatgcaaacggacgggccaacgccgtggccagctccactgagagaaccccaggttcaggcgtgaacggcctggaggagcccagcatcgccaagcgactgaggggcaccccagagcggatcgagctggagaactaccgcctgtccctgaggcaggctgaggcactgcaggaggtaccggaggagactcaggccgagcacaacctgagcagcgtgctggacacgggcgccgaggaggacgtcgccagcagagactgggtctccccatggttgcccaggatggtctcaaactcctgggctcaaatgatccacccacctcagcctcccacagtgctgggatcacagatgtgagctactgggcccagctgagcataagagtcttttctgtgtcacctttgtgttccctacagtgtctagcaagtgcgttgtgaggggaagataattgaataaattttatccaggtaaa

SEQ ID NO: 32237 - DNA, 5641 bp, Homo Sapiens
atgacatttacaaccaaagtgctgtctgcacccacattaagccctctggacaatggccaagaaccccccactcatgggccagagcctacaccgagcagagaccaggcagcagaaggccctaacctgaccccagaagccagtccagatcctcttcctgagcctcccctggcctcagttgaggtcccagacaaaccctcaggaagccctggccaacccccttctccagccccatctccagtccctgaacctgatgcccaagctgaagacgtagctcctccgcccaccatggctgaggaggaagaggggaccactggggagctccgctctgcagagccagctccagctgactctcgccaccctctgacctatcggaaaaccaccaactttgccctggacaagtttctcgaccctgcccggccctataagtgcactgtgtgtaaggagtccttcacccagaagaatattctgttggttcattataattctgtctcccaccttcacaagatgaagaaggctgccattgacccctctgcccctgcacggggagaggccggtgccccacccaccaccactgctgccacagacaagccctttaagtgcacagtctgcagagtctcctacaaccagagctccaccctggagatccacatgcggtcagttctgcatcagactcgctctcggggaaccaagactgattccaagattgaagggccagaacgcagccaagaagagcccaaggaaggcgagacagagggggaggtgggcactgagaagaagggccctgacaccagtggcttcatatctggattgcctttcctgtcccctcccccacctcccttggacctgcaccgattcccagcccctctcttcaccccaccagtcctgccccccttccctctggtgcccgaatcactgcttaagctccagcagcagcagctgctcctgcccttctacctccacgatctcaaggtggggcccaagctgacactagctgggcctgcacctgtgctgtccctgccagctgccacccctcctcctccaccccaacctcccaaggctgagctggctgagcgggagtgggagcggccccccatggccaaagagggtaatgaggcagggccttcctcaccccccgacccattgcccaacgaggctgcccgcactgcagccaaagcccttctagaaaactttggctttgagctggtgatccagtacaatgaagggaagcaagctgtgccccctccccctaccccacccccacctgaggccctcgggggtggggacaagctggcctgtggggcctgtgggaaactcttctccaatatgcttatcctcaagacacacgaggaacatgtccaccgccgctttctgccctttgaagccctgagccgttatgctgctcagtttcgaaagagctatgacagcctatacccgccccttgcagagcctcccaaacctcctgatgggtctctggattcacctgttccccatctgggcccacccttcctggtcccagagcctgaggcaggggggacccgtgcccctgaagagcgaagtcgagcagggggacactggcccatagaagaggaagaaagctccagagggaatcttcctcccctggtgcctgccggccgccggttctccagaaccaagttcacagagttccagacccaagccctgcagtctttctttgagactagcgcctaccccaaagacggagaggtggagcgactcgcaagtctgttgggtctggctagccgtgtggtggtggtgtggttccagaatgcccgccagaaagcacgcaaaaatgcctgtgagggtgggtccatgccaaccggaggaggcactgggggagcctccggctgcaggcgttgccacgccactttctcctgtgtttttgagttggtgcgccacctcaagaagtgctatgatgaccagacccttgaagaggaggaggaagaggcagagagaggggaagaggaggaagaggtggaagaagaagaagtagaggaggaacagggccttgaacctccagcagggcctgagggcccattaccagagcctccagatggggaggagctgagccaagcagaggcaacaaaggcaggaggcaaagagcctgaagagaaggctactccatcaccttccccagcccatacctgtgaccagtgtgccatttctttctccagccaggacctcctgaccagtcaccgccgactacatttcctgccatctctgcagcccagtgctcccccccaactcctagatctgcccttgctggtgtttggggagagaaaccccctggtggcagccacctcaccaatgccaggtccacctctcaaacggaagcatgaggacggcagcttgtctcccacaggcagtgaagcagggggaggaggggagggcgagccccccagggacaagcgcctgcgcaccaccatcttgcctgagcagctagagatcctgtaccgttggtacatgcaggattccaacccaacacgcaagatgctcgactgcatctccgaggaggtggggctcaaaaagcgagtggtacaggtctggttccagaataccagggcccgggagaggaaaggccagtttcgaagcacccctgggggggtgcctagtccagcagtgaaaccgcctgccacagccacccctgcatccttgcccaagttcaacctcttattaggcaaggtagatgatggcactgggagggaagccccaaagagggaagcacctgcttttccctaccccactgccacgcttgcttctgggccccagcctttcctaccacctgggaaagaggccaccaccccaacaccagagccacctctacctctcctacctccccctccacccagtgaggaagagggcccagaggaaccacctaaagcttctccagagagtgaggcttgcagtctctctgcaggagatctgagtgattcatctgcttccagcctagctgaaccagaatcccctggggctggagggaccagtgggggacctggaggtgggactggggttccagatggaatggggcagcggcgctacaggacccagatgagcagcctgcagctgaagatcatgaaagcctgctatgaagcttaccgcacccccaccatgcaggagtgtgaggtgctgggagaggagattgggctgcccaagagagtcatccaggtctggttccagaatgctcgtgccaaggaaaagaaggccaaactacaggggacagccgctgggagcactgggggcagcagtgagggcctcttagcagcccagcgcactgactgcccctattgtgatgtcaagtatgatttctatgtctcctgccgaggccatctcttttcccgtcagcacctggccaagctcaaggaggcggttcgagcccagctgaagagtgaaagcaagtgctacgacttggccccagcacctgaggctcccccagctctcaaggccccacctgccaccacacctgcctccatgcccctcggggctgccccaaccttgcctcgcctggcgccggtcctcttatctggcccagctctggctcagcccccgctgggcaacttagctcctttcaattcaggcccggcagcctcctcaggcctcctcggcctcgccacttcggtcctgcctaccaccacagtggtccagactgctggcccaggccgccccttacctcagagacccatgcccgaccaaaccaacacctccacagcaggcaccactgaccctgtcccaggccctcctactgagcccttgggggacaaggtctccagtgagcgaaagccagttgcaggccccaccagctcctccaatgatgccctcaagaacctcaaagcattgaagaccactgtcccagccctgttggggggccagttcctgccctttccattgccccctgctgggggaacagcaccgccagctgtctttggcccccagctacagggggcctacttccaacagctctatggcatgaagaaggggctatttcccatgaaccccatgatacctcagaccctcattgggctgctccccaatgccctcctccagccgccaccccagccccctgagcccacagccacagcacctccaaagcctcctgaactgcctgctccaggggagggggaagctggtgaggttgatgagctgctgacaggcagcactggcatctccaccgtggatgtaacccatcgctacctgtgccgccagtgcaagatggcatttgacggggaggccccggctactgcccaccagagatccttctgcttctttgggcggggctctgggggctccatgccacccccattgcgggtgcccatctgcacctaccactgcctggcatgtgaggtgctgctgagtgggcgtgaagccctagcctcccacctgcgctcctcggcccacaggcgcaaggcagccccacctcaagggggcccacccatctccatcaccaacgccgccactgctgcctcggctgctgtggcttttgccaaagaggaagcaagattacctcacacggactccaacccaaaaactacgactacctctacacttctagctttataaacagattaaccaagatggggagaggggagggcctcagggctccctcttttaccccaaggggtgttcggtgggagctcaaatccctcaccccaccccctggccccgcccacctcacaggaactgttcagttcccaccctcagtgggcaccacacaccccacttccagcagagtcctgcctcctcccaatccccacagacacacacattgatcctcctcctcagctccttgcagatgtagcccttgcccatcttcacagacacatacacccatcttggcaccctgattattcatacatgtctgcctaccacacacaaaatatatccttggttctatcttccttttcctcactgaattcccagctccccatccccataaatgcatacacatacatgcacacacacacgttatcccatgatgttccactgagaaaacaccaaaaaattttgaaaaagaagataaaaagaagaaacgaaaaagaaagcccaaggcaaagaagggggaaggaaaacaaacttcgccactctctcttctccttcctaaccctttgtctagagcaccacaccgctcacaaactctttccaaatgctcagttggctcccaaagttggagcctggcatgggcagggagcccacaaaactctaaccaaactggaggctggcatgggagaagtgcttctggttcactcttcctaccctctccctcctaaccctctccttgcctgacaggggagcccctgtggcctggactctaggggatgccgccaccagaaacccctctgccaatccctaccttgcaccctgggaactgcagtaacttattctcaaaggctttaaacacagagatcctctcagcggccgtgggcctgccccttgtcctagccctgccacgtgagggtccagcctccagggacaggcactgcccaccaacggcaaatccaaagttctttcaaaaaaaaaaactgaaacacaaccaaaaaagcaagagcgagagagagtacgtgcacacgcgcacaaaagagagaaacggacaccagaggaatgaactaaagaaaaacgtaaacttggaaaatac

SEQ ID NO: 32238 - DNA, 4495 bp, Homo Sapiens
cacgctcagagcagaccgctagcaggaggcaggatgtgatagtctaagaccctggaagctgacggccagagggagggaagggtggtcacagaggagaggcaaagcaacgggaggtggaggatcctggaggtgtctgcaaggagaatacacagcagcgaggggctgcagaagcggacccagcgacttctgcgctgacgcggggcgggcgggagagaggaagagaggggagcgcggtggcgctgcgagctggccccgccggggaaggggctgccatgtcccgtgagcggcccccgggcaccgacattccccgcaacctgagcttcatcgccgcgctaacggagcgcgcctactaccgtagccagcggcccagcctcgaggaggagccggaggaggagccaggcgagggcgggacgcggttcggggcccgatcccgcgctcacgcaccgagtcggggccgccgggcccgatctgcaccagccggaggcggcggggcccgggcgccccgcagccgtagcccagacacccgcaagagagtgcgtttcgccgacgcactggggttggagctggctgtcgtgcgccgcttccgtcccggtgagctgccccgggtgccccgccacgtgcagatccaattgcagagggacgccctccgccacttcgcgccctgccagccccgcgcccgcggcctccaggaggcgcgcgccgccctggagccggccagcgagcccggcttcgccgcccgcttgctgacgcagcgcatctgcctggaacgcgccgaggcgggcccgctgggcgtggccgggagcgcgcgcgtggtggacctggcctacgagaagcgcgtgagcgtgcgctggagcgccgacggctggcggagccaacgcgaggcgccagccgcctacgccggtccggccccgcccccgccgcgcgccgaccgcttcgccttccgcctgcccgcgccgccgattgggggcgccctgctcttcgccttgcgctaccgtgtgacaggtcacgagttctgggacaacaacggcggccgtgactatgctctacgtgggcccgagcacccgggcagtggcggagctccggagccgcagggctggatccactttatctgagacgaggcgcctgcggccgacggcggaaaacaccaaaggcacccgggggcggggcgacccgatgtggcggggaggagtaggagagaccaggattggcgggagcggtccaagggagtcaagccggggagggcgaaaagggaacctggccactgctccttggtccttggcattatgacgggattcccttgtcacctctgacagttcctggctgcggtgtccgcggactggctggggagtgatgacagaagggatggaaaccctattttcttttctccaagaccatggttggtctgcttccctcactcgggctccttgacagtcttctagaagagagaaggaggaaaagaagcagttcctgatgttacaaatgaacaaggatctcccagccttagtctttgagaaaagatggctgaaagagaggaactctccaagtcattccgcaaacaaatgcccatttaaacatcatccttgtcttgtgaagaaaacaggaagaatgtcatgtaccatgtggatcaccttcagttcaaagttgcagcaaagtgaagaaagaaactactggaagccacccagcaatgcactgtttagtcatcaattaggagcccatgggaggataatagggagactgggtggaggctcagtgtgtaataatctcttgtctaatgtatgtgtgtcactgccatgttgtatgaacaatagtgagggctcacatttacttaacacttgtgtgcgcaaatctgggtttttcttcctttccagaactatgactcgatcataaaatctgttttgtttgcatgcatgcccaaaacaaccctgtaagtagaacattgtcattatctctgttttagagatgaggaaacaggctcagagaagctcagaaatttgttcaagatcgcacagctagtaaatggcagaagtaggattgtgaacccagggaatctccagagcctctgtgtaaccatgatgttatattttttttcctctttaaaaacaaaatttaaaaccttgctataatctcttattaggaaatgatcatagtttctgactgtgctctgccttcccatcctgccaatctcctggactggcttggagaagacagggggcccccgagcttcatctgtgactcgaaggagtttgctgctgtctcctgtgtcagtgtcccatctatgcaggatcagcacaggacccccctcaccttcccacttacactctagcctttccatacattggaattctctcctggccctagccagcgctccacacctgttggtgtgccacctccctccctcttcccccactggccttgaacaggcaaaccccctaatgtcgccactaggttgggtccgtgactaggacacctgctagagggtctgtgcttgggccttttctaggaatcccgatgttactgggtaagtgccaactctgtgggcagaatgctaatgataatcctgttccctgacctctttctcagaagtaccctggctcactctccccaatctcagctttatagaacaacattttggtcttgattattcccatatcaagctgccccagggcttcggtaagctgttagttgccccactgcctcaaggctgggtctggctgagctacttcttaggcacacaaatagtgggtgtctccttggaacctgacacaaaactatcagtgctaccaagccttgtaaaatagggaggaaactaatatttcttgagtggcttctgagtgcctggtgctttcgcggctctctggagagattccttgccctgatggctttggtgtgtactcctctcccaggacttcagcactgagattttcccaaccccctggcttttcctcaccttgggttgagttgatccggcactaccacaaaccccaccatctgcaaaccaaccaagattaggcagtatgccctttccgtcttgcactgctcttccaaaacttccatctgtatttctcacaccctcagtaagcaaagctgagtgtgcatggacagagctgcatccactgctttctcccagcgggtgcagtctaatctgacacggggaacactaggagtttagcggaatcttcagccaccctattaatgtgttacgcattaggcattgtagtggaaactcctctgatggctcatgactatatgaacaggagcaatttggaatataacatgtcagctgtggactgggaagtgccgtgagagaaaacactacctgggtcataggcttgggtccctgaggcaacccagcagggacactgttgcccattcctctcatccagactgcaggtgtcttcctacacctccctgtcccatagcctccgtcctgttttttgtttgtttgtttttctttgtgaatgtagaaaaacatttcatcatgagccctagctcctcagttttccacctaacacccacattcccttgtttctaactgccgtgtttttctggagcctgctgggatctttgcagtttgcaggtcatagaatcagacatgaaaaggcttctcttccgacgtcattggttcctggctcctttacagatgagaacacaggtccagaggtgagaaatgactctagcagggtcatagaatttgttagtgcagctcaagatgggacttaaactcaggcctcctgatcacccattcccaggctaggaaacaggtctctgctcggtgtggtggttcatacctgtaatcgcaacactttgggaggctgaggcaggagcattgcttgagcccaggagttcgagaccagtctgagcaacatagtgggaccctgtctctacaaaaacttttaaaattagctgggcatggtggcacacatctgtattcccagctactcaggaagctgagacaggaggatcgcttgagcccaggagttggaggttactgagctatgatcgcaccactgcactccagcttggtgacagtgagaccctcaaaaaaaaaaagaaaagaaagaggtctctacacaagcccgtgattcttcatggcaagggataacatcagaaatgtttcattttctgctattagtttccattcctttccccatccaggcataaagagaaacaaaagacaatgatggtattctctgtgtcctcagctttggcacttttgttgatgttgctaaggagcagtgaccttgctaaaaagactgaataatccacccactgaatagctaacctggggaggaaatgaaaatttcctttgtggatctccccaaatccattgttgtcaccaggccctcccagaacctcctcagttccttcacagtgcaaccctgtgtacttggcccgcaacccaatagtattgtgcctcacttcaccttccatgggcaactgccctcccttctggacataaaacctcatattttaaataaagttgaaatatgaaaag

SEQ ID NO: 32239 - DNA, 3450 bp, Homo Sapiens
atggaccaaaacctgaacattcttcctatggctcctgaatctgaaaggaagcagatgaatcccagcctaaactgcgcatcctgctcgttggttgcacaaggagccgaaggctggtcccttgcccgggaaggccgcctggccggacgcgcgggtcccgccggggttcccgccttagctccggccggagcatcaggtggggcccaagacacccgcagactaggctgccgcggcctctcccggatccgacgggtctcccgcagcttgtccacactctggttggtggtcccagcacatttgcaggctccagcgggtggagacggcttggtgggggagatctctagggcgcacgccgtgccccacttcccccttacgggaaaggctttccagcgcgcggacccaggagactctcacctaggctcggccccaggctccaggggacacgcagaggcccgccgggcaccagccccgagccccccgacactgccgtcccggtcccccaacgcgcggactacaagtcccagcagtccccgcagctggcacctcccgcctcgccgcggagacccccggccgtccaagcggcggggctccggctgcgctcgtggccgggccgggcggggaggccggtcccgcgggcgggggcaggggcggctccgcggcttctcccgccgccgccgccaaggggagtttccaggaagtggccatattggatccattcagccgcagccgcccgggcggagcgcgtcccgcagccggctggtccctgtcgctgcccctgcgctcgtcccagcccacccgcccggtgcggagctcgccatggcggccaccgacctggagcgcttctcgaatgcagagccagagccccggagcctctccctgggcggccatgtgggtttcgacagcctccccgaccagctggtcagcaagtcggtcactcagggcttcagcttcaacatcctctgtgtgggggagaccggcattggcaaatccacactgatgaacacactcttcaacacgaccttcgagactgaggaagccagtcaccatgaggcatgcgtgcgcctgcggccccagacctatgacctccaggagagcaacgtgcagctcaagctgaccattgtggatgccgtgggctttggggatcagatcaataaggatgagaggcccatagttgactacatcgatgcgcagtttgaaaattatctgcaggaggagctgaagatccgccgctcgctcttcgactaccatgacacaaggatccacgtttgcctctacttcatcacgcccacagggcactccctgaagtctctagatctagtgaccatgaagaaactagacagcaaggtgaacattattcccatcatcgccaaggctgacaccatctccaagagcgagctccacaagttcaagatcaagatcatgggcgagttggtcagcaatggggtccagatctaccagttccccacggatgatgaggctgttgcagagattaacgcagtcatgaatgcacatctgccctttgccgtggtgggcagcaccgaggaggtgaaggtggggaacaagctggtccgagcacggcagtacccctggggagtggtgcaggtggagaatgagaatcactgcgacttcgtgaagctgcgggagatgttgatccgggtgaacatggaagacctccgcgagcagacccacagccggcactacgagctctaccggcgctgcaagttggaggagatgggctttcaggacagcgatggtgacagccagcccttcagcctacaagagacatacgaggccaagaggaaggagttcctaagtgagctgcagaggaaggaggaagagatgaggcagatgtttgtcaacaaagtgaaggagacagagctggagctgaaggagaaggaaagggagctccatgagaagtttgagcacctgaagcgggtccaccaggaggagaagcgcaaggtggaggaaaagcgccgggaactggaggaggagaccaacgccttcaatcgccggaaggctgcggtggaggccctgcagtcgcaggccttgcacgccacctcgcagcagcccctgaggaaggacaaggacaagaagaacagatcagatataggagcacaccagccgggcatgagcctctccagctctaaggtgatgatgaccaaggccagtgtggagcccttgaactgcagcagctggtggcccgccatacagtgctgcagctgcctggtcagggatgcgacgtggagggaaggattcctctgaggcagcagctccaacacatggggccagctcaggaccaccagggcatggaactggagaccatggtttttaatgttagaacagaaaacgccatacttttcctatatcaatgatcaaaagtgcaaacaatttaaatttccatcagggaacatcaaatgttgcccaacccttttcattcctatccatggctccgtaaggggcttgaggcttaatgcccatcctgtggccaagctgagcttccactccgggaccaaaaaaaaaaaaaagtctgctttgtgacatcatcgttatgagcggaaagtacctagatgacaatgtttccattctgaaaaatagaaacatactattcaagaccaaggtagcagaaaagttacttgtatctgcttatcataagacgaaactctgcaacttggcaacggtggccagttttcgtaatgaaacagtctttagtaatttaatcttcatgcttcataacaaaccaaaaccccatgagatttccacattgcataattttgccttactaacagaatcatatccttaaggatgaccatcattcccccaactaaaacaaatacaaactaatgtatgatatttttttaagtgccagatcaatatggtctaaagcttcaataaggattgtgtgtaggtgaataaagacagctaagtgaatgtgtgtaaagtgtagcaaaagcagacagatatttatgtacagtattcatagaatggaaagttaaatatttttgcagtgtgtatttaaaagagaaactcaccataatagtgccgtctaaaaatctttgtaaagttaatttaatgtcctttagaagtgggagtctggtggaactgtgttggatttaagataccttttcactcttccgtatgtcatgagccttgtgcgtcacctcactgtggtgcatgtgcaagggcgtgtgcacgcctgtgctttgccatcccatgttgtaaacagctgttccaaaggcacaaacgagtttagggtagactctgtaaacacctccttactcactatagtcaagaagtccagcggcgtcccaatatagaggtcccagtgcagtctgtccagaatagccagctccatcctcagcagctcattcggggaatagtcagagccatagtgctttgtgaagtcttttacttgtggaataaactgtaaaaagaaaataaagaggccaaagccct

SEQ ID NO: 32240 - DNA, 5046 bp, Homo Sapiens
atgaagaggaccgtgataggctgcagggcagggtatacattaaacagtttgaaggaagataaacaaaaaagagggaaaagaggagttggagacactggagggatggcagaattccgggaaactcagagaggggcccagttcaagaggaggcaccagcgagctgcactctgcactcgctctccctggtccacccctacactgcccggacccgaggggactggccctgcgggcgccgccaaggcgactgagagcgcggcgcgcacccagagccccgagtcgctgctggacatcgcggcgcgcagggtggcggagaagtggccgttccagcgcgtggaggagcgctttgagcgcatcccggagccgacgcggctgcctttccgccggggcatcgcgctgttggaaagcggctgcgtagacaacgtcctgcaagtcggtgagtcacggggcagccgcgagccgtctgtccgtccgtcagtccctggtctccaagcggcgcagaggagaggtggcggcggaccggactccgtctccggagggacatctcgccccaccatggggaagcgggacaatcgggtggcctatatgaacccaatagcaatggcgagatcaaggggtccaatccagtcttcagggccaacaatacaggattatctgaatcgaccaaggcctacctgggaagaagtaaaagagcaactagaaaaggaaaagaaaggctccaaggctttggctgaatttgaagaaaaaatgaatgagaactggaagaaagaactggaaaaacacagagagaaattgttaagtggaagtgagagctcatccaaaaaaagacagagaaagaaaaaagaaaagaagaaatctggtaggtattcatcttcttcttcatcaagctctgattcttccagcagttcttctgattctgaagatgaggataagaaacaaggaaaacagagaaagaaaaagaagaaccgttcacataaatcttctgaaagctccatgtcagaaactgaatcagacagtaaggatagtttaaaaaagaaaaagaagtcaaaagatggaactgagaaagaaaaggatattaaaggactcagcaaaaagagaaagatgtattctgaagataaacctttatcatctgagtccttgtcagaatcagagtatattgaggagtggacaaaggcccccagagggtggcttgtcagacaggtcatagtcagtggaggcattgttcttgatcagtttgctgtccctgacaaagtatccctggctgatcttatagatcttgttgatctcagtgctgtgacagtaacctttctgccaaatgcatgccacaggtacctgctgctcaagcctctcgtgggcccagtccagcttcttggccatggtgcctccctttacctggatctccatcaggtgggccttcctctggtgcagaggaagcaggcacatctgggtgtaggcaatgatgcagatgacttggcggtacttcttcatgctgctgaagtccttctccagctgcttcttgccatcctcatcctgacatttcttgcagtacttggtaaaggccttcttcttagatttatgccggtttttatagaaatgtctcttgcatgcatcgctgatgtgctcagcgaagacagtattgaaggtctggaggcctcgaggggtttccacgaagcccacaatggccacaaccaccatgggtggtatctccacaatggtcacagcctctatcacttccttcttgttcaccttggatcctggcctgtcgacttcccgcatgatgttggtcatgccagccttgtatcccaggaaggctgtgaggtggaccagcttggaagggtcatccttaggaaagctcttcaccttcccatgatgcttcctgctgcgctgctgaggcaggaagccgagggacccatgtctgggagcggagaaccttctgtgagacatcatgccatcaaatcctgccggatagccttcctatgcaatgtagggaaagagagcatggaggagttgtcctctggccaagctggtcaggactacctggtgggcactggtggtggaaggcagtttgcagttgatagtttccacttgagcggcacagtgacagaacctgcaatacaatcggagccagaaactgtttgcaacgtggccatcagctttgatcgttgcaagattacctcagtgacctgcagctgtggaaacaaggacatattttattgtgcccatgttgtggcactgtctttataccgcatccgcaagccagatcaggtcaaactgcatcttcctatttcagagactctctttcaaatgaatagagaccaactgcaaaagtttgtacagtatttgatcacagtgcaccacacagaagttttgccaactgctcaaaaattagcagatgaaattctttcccaaaattcagaaatcaaccaagttcatggtgctcctgatccaacagcaggtgctagtatagatgatgaaaactgctggcacttagatgaagagcaggttcaagaacaggttaaactgttcctttcccagggcgggtaccacggatcagggaagcagcttaatttgctctttgcaaaggtgcgggagatgttaaagatgagggactccaatggggcccgcatgttgaccttgataacagagcaattcatggctgaccctcgcctgtcactttggcggcaacaaggcactgcaatgactgacaaatacaggcagctctgggatgagctgggtgctctgtggatgtgtatagttttaaacccccactgcaagttggagcaaaaggccagttggctaaaacagctgaagaaatggaatagtgttgatgtctgtccatgggaagatggaaatcatggcagtgaattacccaacttaaccaatgctctgcctcagggtgcaaatgccaaccaagattcatcgaacaggccacatcggacagtgttcacccgagccatcgaggcatgcgatctccactggcaggatagccacttgcagcacattatcagcagtgacctatacaccaactactgttaccatgacgacactgaaaactccctcttcgactcccgcgggtggcccctctggcatgaacatgttcctacagcctgtgcaagagtggacgcattacgttctcatgggtaccccagagaagcactgagactagcaatagctattgttaatacattaagacgacagcagcagaaacagttggaaatgttccgaacccaaaaaaaagagctaccccataaaaacataacctcgataaccaatctggagggctgggttggacatcccctggaccctgtgggcactctcttcagtagccttatggaagcctgccgcattgatgatgagaacctctctgggttctcagattttacagagaatatgggacagtgcaagtctctggaataccagcatctacctgcacacaaattcttagaagaaggggaatcctatttaacgctggctgtggaagtagccctgatagggctaggacagcagcgtatcatgcctgatgggctgtacacacaagagaaagtttgccggaatgaggagcagctcatttctaagcttcaggaaattgaattggatgacacactggtgaaaatttttcgcaagcaagcagtcttcctattagaagccggaccatatagtggtttaggtgaaataatccatcgggagagcgttccaatgcacacatttgccaagtatctcttcacctctctcctacctcacgatgctgaattggcatacaaaattgcactgagagcaatgcggttactagtattggaatctactgctccatcaggagacctcacccgcccacaccacattgcatcagttgttcccaaccgctaccctcgctggttcactctaagccacattgagtcccagcagtgtgagctggcatccaccatgctaactgcagccaaaggcgatgttcggaggctggaaacagtattagaatccatccagaaaaacattcactcctcatcacacatcttcaagcttgcccaagatgcatttaaaatagcaactctcatggacagtttgccagacatcactcttttgaaagtgtctctggagctgggcctgcaggttatgcgaatgacactgtcaaccttaaattggcgacggcgggagatggtgaggtggctggtaacgtgtgctactgaagtcggggtttatgccctggacagcatcatgcagacctggtttacactctttactcccaccgaggccacaagtatagttgcaactaccgtgatgtccaacagcaccatcgtccgcctccacctggactgccaccagcaggaaaagctggccagcagcgcccggacacttgcactgcagtgtgccatgaaggatccacagaactgtgccctctctgcgctaaccctttgtgaaaaggatcacatagcttttgagacggcgtaccaaattgttctcgacgctgctacgactggcatgagctatacacagctctttacaatagcacggtacatggagcaccgcgggtaccccatgagggcctacaagctggccaccctggccatgacccatctcaacctgagctacaatcaggacacacaccctgccattaatgatgttttgtgggcctgtgcgcttagccactcccttggtaaaaatgagcttgcagctataatacctctggtggtcaagagtgtcaagtgtgcaacggtactgtcagacattttgcgcagatgcactctgaccactcctggcatggtgggacttcatgggaggaggaactctggtaagctcatgtcactggacaaagcccccttgaggcaactcttggatgccacgatcggggcctacatcaacacaacgcactcacggctcacacacatcagtcctcggcactatagtgagtttatagagttcctcagcaaagcccgagagaccttcttaatggcgcatgatggacacattcagtttacacagtttattgacaacctgaaacaaatctacaaaggcaaaaagaaactgatgatgttggttcgggagaggtttggttga

SEQ ID NO: 32241 - DNA, 4257 bp, Homo Sapiens
atggccactctggagcccccgtctcgccaggtatgttgggagcagcagctgaggccaggaggcccaggccccccagccgccccacccccagcgctggatgccctatccccgttccttcggaagaaggcccagattctggaggtgctgagagccctggaagagactgaccccttgcttctctgctcacctgccaccccctggcggcctccaggccaggggcctggctccccagagcccatcaacggcgagctgtgtggcccgcctcagcctgaaccctcaccctgggcgccctgcctgctgctaggccctggcaacctgggaggcctgctgcactgggagcgcctcttggggggtctgggaggggaagaggacactgggcggccctggggtcctagcaggggacctcctcaggcccagggcaccagctctggcccaaactgtgccccaggcagcagctcctcctcctcttctgatgaggcaggtgaccccaatgaggcacccagccccgacaccctgctcggtgccctggcccgcagacagttgaacctgggccagctccttgaggacacagagtcttacctacaggccttcctggccggggctgcaggcccactcaatggggaccacccaggtcctgggcagtcatcctccccagaccaggcgcccccacagctgtctaagtccaaaggcctccccaagtcagcttggggtgggggtaccccagaggcccacaggccaggcttcggtgctacctcagagggccaggggcccctccccttccttagcatgttcatgggtgctggggatgccccactgggctctcggcctggccacccccattcctcatctcaggtgaaaagcaagctccaaattggccccccttctcctggggaagctcagggaccccttctgccctctccagctaggggtctcaagtttctaaagctgcctccaacctcggagaagagccccagcccaggaggcccgcagctcagtccccagctcccccggaactcgcgaatcccctgtcggaacagtggctcagacggcagcccctccccactgttggcccgaaggggtctgggtggaggagagctgtccccagagggggcgcaaggcctgcccaccagcccttcaccctgctacacaaccccagactccacacagctcagacccccgcagtcagccttgtccaccacgctgtccccaggcccagtggtgtctccctgctatgagaacattctggacctttctcggagcacctttagggggccttccccagagccacctccatccccactgcaggtgcccacctacccacagctaactctggaggtaccacaggcccctgaggtcctcagaagccctggagtaccccccagtccttgcctcccagaatcgtacccctatgggagcccccaagagaagagtttggacaaggcaggctcggagtctccccatcccggccgcaggaccccaggcaactcatccaagaagcccagccaggggtcaggacggcgacctggggatcctggcagcacacctctgcgggacagactggcggccctggggaagctgaagacaggccccgagggggccctgggctcagagaagaatggggtgccagccaggcctggcaccgaaaagacccggggacctgggaagtcaggggagagtgctggagacatggtgccctccatccacaggccactggagcagctagaagccaagggggggatacggggggcagtggccttgggcacaaacagcctgaagcagcaggaacctggacttatgggggatcccggggcccgagtctactcctctcactccatgggggcccgggtggacctggagcctgtctcaccaaggagctgcctcaccaaagtggagctggccaagagccggctggcaggggccctgtgcccccaggtaccccgtacccctgccaaagtgccaacctcagccccaagcctgggcaagcccaataagagccctcacagcagccccaccaagctcccttccaagtcaccaaccaaggtggtgcctcgacctggggctccgctagtcaccaaggagtcccccaagcctgacaaagggaagggccctccctgggcagactgtggtagtaccacggcccagtccacacccctagtacctggccccactgacccaagtcagggccctgaggggctggccccacactcagccatcgaggagaaggtgatgaagggcattgaggagaacgtgctgcggctccagggccaggagcgagcccctggcgccgaggtcaagcaccgcaacaccagcagcatcgccagctggttcggccttaagaagagcaagctgccagcgctgaaccgccgcacagaggccaccaagaacaaggagggggctggcgggggctccccgctccggagggaagtcaagatggaagcccggaagctggaggccgagagcctcaacatctccaagctgatggccaaggcggaagacctgcgtcgggcactggaagaggagaaggcctacctaagcagccgggcccggccacggcctggtggcccagccccagggcccaacacggggctggggcaggtgcagggccagctggctggcatgtaccaaggtgcagacaccttcatgcagcagctgctaaacagggtggatggcaaggagctgccatccaagagctggcgggagcccaagcctgagtacggggatttccagccggtgtcttctgaccccaagagcccctggccagcctgtgggccccggaatggcctggtgggccctcttcagggctgcggaaaacctcctggaaagccgagcagcgagccagggaggcgggaagagatgccctcggaggacagcctggccgagccagtgcccacctcacacttcacagcctgtggctccttgactcgaaccttggacagtggcattgggaccttcccacccccagaccatggtagcagtgggacccccagcaagaatcttcctaagaccaagccaccgcggctggatcccccacctggggtacccccagctcggcccccaccccttaccaaagtcccccgccgcgcccacacactggagcgggaggtgccaggcatagaggagctgctggtgagtgggcggcaccccagcatgccagccttccctgcactgctacccgctgctccgggccaccggggccatgagacctgtcctgatgatccctgtgaagacccaggccccacccctcctgtccagctggccaagaactggaccttccccaatactagggcagccggcagctcctcggaccctctcatgtgcccaccccgacaactggaggggctgcccaggacccccatggccctgcccgtggaccggaagcgaagccaggagcccagccgcccgtcccctacgccccagggcccacctttcgggggtagccgcacccccagcacttcggacatggccgaggaaggcagagtggccagcgggggccccccagggctggagacctcggagtctctcagtgactcactctacgactcgctgtcctcttgtgggagtcagggctgaggggctgcgccacgccacggccccgctggagctggggaccacagactggaccggctctcttcatgcccagcccccggagacggggacccctccctgaagggaccaaggaggcaggtggataagaaggtgaaaagggggtccctggcacaccccaccacccactgcttcggcggatgagatgaccgtgctcagctcagggagagaccccgcccttggtcccttctctcacccagagtaaggctcttcctggaagggactgggggttaaaggccactgtgtcgcagccctccagtccctacttcaggctgagccatcttgtggtgctgggcttcctgcccaccagccgtgccatctctgcccaacccggctgctcctctgccccgaagccctcgcgaggccctcctggaggcccccgtgctggtggagtttgggggccagggggacaagttgccttctctctctgccctggtcctccctgctgtctggatggtgctgccctcctctgccccatgcctttggggtctgttcgtccgtcttttttgttgttgtttttatatattgaagcgcctggcccagcccccagcccccagccccgcactgcggttaatttatgtgttgtttaaaatgcggctgctctgcttcctgcctctgcttctgccgtatccctaataaaatgtggaggccccc

SEQ ID NO: 32242 - DNA, 7053 bp, Homo Sapiens
ggagatgtagtgtgcacttttcggcccccgtcgcgggagccgcttcgggccttctgggcatgtctgccatatggctccaggtttgtttttctccccggcactctgacggggagggctcccggcatctcctggcgtccgggtagaggacgcggagggtcgcagcttcattgcctgatgtcttcgggaagtattttgaagtcatcgtggctgtggattggggaatttcttgtttccactgacctgtgaggccgcgcacgcggagggaggcaccccaggccctccggcactgtccagcctcgcctgtgtccccattagcaccagtgggcattttcagagggtccagctcatggctcaagtgacaggaagatgtaggagctttctgtcttgaatgaggattcgaaccaaagggcttaggcccagctgtcttggagcaaagcagctgttgtgggacccccacaggctgggagctttgtgcccattcagatgtgggggcagaagagggcaaggccgaaggagcagacagcaccgcttcttggggagttgtgaaggcatcatgcggagggaagagcttagcagccaagtggaggacagcaccctccatgcctggattcgttactcgctcgttctagatgctgagctgctggcgcactgcagcacaactagagatgtacggatgcccccatcttgatcttacagaatcagaggtacagccgcgagaaaggtctagtcaagaacagacagagtcgcttgaggactcaggagggtgtttgctgcgttgacaacagactacaccctcacagtttgctctgctcttccaacaccagtggaagatgatcacatcccagggatcagtgtcgtttagggatgtgactgtgggcttcactcaagaggagtggcagcatctggaccctgctcagaggaccctgtacagggatgtgatgctggagaactacagccaccttgtctcagtagggtattgcattcctaaaccagaagtgattctcaagttggagaaaggcgaggagccatggatattagaggaaaaatttccaagccagagtcatctggaattaattaataccagtagaaactattcaataatgaagttcaatgagtttaacaaaggtggaaaatgtttctgtgatgaaaagcatgaaataattcattctgaagaggaaccttctgaatataataaaaatgggaacagcttctggctgaatgaagacctcatttggcatcagaaaattaaaaattgggaacaatcttttgaatacaatgaatgtgggaaagctttccctgagaattcactcttccttgtacataagagaggttacacaggacagaaaacctgcaaatatactgaacatgggaaaacctgtgatatgtcatttttcatcactcatcagcaaacacatccaagagaaaaccactatggtaatgaatgtggagaaaatatctttgaggaatccattctccttgaacatcagagtgtttacccattcagccagaagttaaatctcactccaattcagagaacccactcaattaacaatattattgaatataatgagtgtggaacatttttcagtgaaaaattagtccttcatttacaacagagaacacatacaggagaaaaaccttatgaatgtcatgaatgtggaaaaaccttcacccagaagtcagcccacacaagacatcagagaacacacacagggggaaaaccctatgaatgtcatgaatgtgggaagaccttctataagaattcagacctcattaaacatcaaagaattcatacaggggagagaccttatggatgtcatgaatgtgggaaatccttcagtgaaaagtcaacccttactcaacatcaaagaacgcacacaggggagaaaccatatgaatgtcatgaatgtgggaaaaccttctcatttaagtcagtccttactgtgcatcagaaaacacacacaggggagaagccctatgaatgctatgcatgtgggaaagcctttctcagaaaatcagacctcattaaacatcaaagaatacacacaggtgaaaaaccttatgaatgtaatgaatgtgggaagtcattctctgagaagtcaacccttactaaacatctaagaactcacacaggtgagaaaccttatgaatgtattcagtgtggaaaatttttctgctactactccggtttcacagaacatctgagaagacacacaggggagaaaccttttggatgtaatgaatgtgggaaaaccttccgtcagaagtcagccctaattgttcaccagagaactcatataagacagaaaccctatggatgtaatcaatgtggaaaatcattctgtgtgaagtcaaaactcattgcacatcatagaacacacacaggggagaaaccctatgaatgtaatgtttgtggaaaatcattctatgttaagtcaaaactaactgtacatcagagaatacacttggggagaaaccctataaatgtagtaaacgagggaaattactctgggtgaagtcagaactttgtagaacacagaacataaagggtgagagaaatctgttaatataatgataatgagaacacctttgccctgaagtcagttctcacagtatagaagagaacttaaagagggaaaaaacaatatgaagatagggaatgcaggaaaacattattctggaatttggaccatacactatgttacaaaactaaaagtggaaaaaacttattggtgaatgaatataggaaacattttgcccaatgccactcttcattaaacatcagagaattcacacggggtgaaacctgggtcagcatccctaggttgagaagggatgcatttttctgctactactacagtttcacagaatacctgagaagacacacttggagaaaccttttgggtgtaatgaatgtgggaaaacctttcatcagaagtcagctctaattgttcaccacagaactcatataagacagaaaccctatgggtgtaatgaatgtggaaaatcattctgtgtgaagtcaagaggccagagaaaatgcacaaactgtaggaaactataggaaagcatttactatgaggttatattttatggagtatatgtaataagaagtagcttctcagtgaacatcagatagtagagaaagtatttttaactgtatccaatgtgtggatgttttaagttaaaatctaaatttaatatagaacagaggtgttgagttgcaggatatctagcaatttaagaaaatgtggaaaaaatatttttattgagaaatagcattttactttgttaatatctagtttagttcattgtcaagactgctattttctaagagacttctaaagacgccactcaagccaatggctataagtagttcaaaggtttattgcttagccatatgaaaaataagggaagattttttagcaaggggacccacaaacaagagtgctcttgtatgtccagaagaaagagaaagaccatcaatcaggggccatagtacaggagcccaccagcaggatttttgaataatcctagggcagactaaattcagacgacccatctcagaatggtggatcaaagcagcaagtcaatttgccttgtatgcaacttatgaggattagtagaagagagtgggtccagatttctggtggtttctgccctgcagatgtctaacacataagccaggacattctgctgtgagtgacttattgtacccaactctatttctctccatactgaaacatgtctttcataggtgatacaactttttaaaatgtatgtgtagatataacttaaatatggagctttcaaaaagcacaaataggctggacatggtggctcatgcctgtaatcccagtactttgggaggctgaggtgggcaaatcacctgaggtcaggagttccagaccagcctggccaacatgatgaaaccctgtctctactaaaaatacaaaaattagccgggcatggtggtgcacatcggtagtcctggctactagagaggttgaggtgggaggatcacttgaacctgggaggtgggggtttcagtgagctgagatcatgccactgcactccagcctgagtgacagagagagattcaaaaaacaaaaaaaaagcaaaaatatactttgctattgggtaaggtatagtagttggcagcagaatggacccattgaggataactataaaattacagaaaatatttaaatgcaacttattgctatagaagcaaagaggactaaagggcaaaattctagagagtggtaaatctcagaaagcacaagcataaaatgcagctctgggggccctttccacttctggctatagggaagaacctgaatactgaacttgattcaggcagaggaccataacctgggggtcaggggaaggcatgggggggaccagaaaccagaagaacaatcaagactgcaatgaaaaaaatggatacattaggagcttcaaacacatataatttctcaagaaatttccagatgtctcatgctgcatagggcaggagcctgaaaagctaatttgagaagataataagtaggatttttgttttgttttgcattttgcagtacaaaggagaaatgattagaacttaggaagtgccagtgggttggtgaacatgccatcagtaaaagccctggaaacaaggtcatactagagattggttgtgccttgtcacaactgcaaacaatacctgagtggagtattcaaaaacttgcttagaaagaaaactctaggaacagatggcttcactgaagttattccaaatatttaagaaataataccaggcttttataaacttttctagaagaaaaaagatggaacttttccaattcagtttttgaggccagtacaaccttgataacaaaacctaaaaaaaaaacaacaaaaaaacccataaagctatagaccaaagtctcatagatttagatgcaaaatcctaaaattgaaaaaaacatctagccatatccataaactatatcatcaccaagagatgtttattagggcaatcaaaagatttattattttaaaaaaatcagtgtggacttccattcctctttcttttgattcccccctttgacttttcatgtatctctcctgccttccttccccagagtggaggagttagacttgcctcgtgggatgagaggagttgtggctttgtgtctgctggcaccaagagggctgagggtgaggtgtggaagggacagggggaggagatgggcagcattgttgagagattggtaacactgagcaaataaatatgttgagaatgatgacagcaagatttctccattagagaaggtatttataaaaataggaatgaggagagctagaaaacctggagtgtggcattagaatagaactcatatcttttaaatatataggaacaaataaataaattgttgtgtgtgcacatatgcatatattttgtgttcattctactgagaggacctaaacacaatgacacctcagtaacagtaagcacaccaactgccaagttattagttcctaaatactatccacaaaaaaggggaacagggatgattcctagtcagagattgggagaaatacaagatgagcctgaatcatctcatgtacctgacagtaagaaaatactctggctggtctcagtggctcatgtctgtaattctagcatgttagaaggtcaaggtgggtgggttgcttgagctcaggagtttgagaccagcctgggcaacatggcacaattgtctctacaaaaaatacaaaaattagccaggcatggtggcatgcacctgtagtccgaggtactcaggaggcagagacgtgggaggatcgcttgagcctgggagattgaggctgcactgagctgtgatcgtgccactgtactctagcctggaagacagagtgagaccccatctcaggaaaaaagaaaaaaaaaaagatgtcattcagcaggttaatggataaactgtggaacatccagaaaactttaacattcttcaaagaaatagaaaacacaatcctaaaatttatatgggaaccacaaaagacttagaatagtcagctatcctgagcaaaaggaatcaaactggaggaatcatattacctgacttccaattattcaacagagctacagtaaccaaaacagcatgatactggcataacaacagacacataggaacagtatagacaacccagaaacaaattcatacatctatggtgaccacttttgacaaaggaatgaagaacatacactggggaaaagataatgtctttaataaatggtgctgggaaaactggatatccatatgcagaagaatgaaactagacccccatctcttagcatatacaaaaatcaaaattaattaaaaagttaaatctaagacctcaaactatgaaacagctaaaagaaaacatcggggaatctctccaggacattggagtgggcaaagatttcttgtgtaatacctgacaaacaggcaaccaaagcaaaagtggacaaatgggatcacatcaagttaaaaatcttctgcattgcaaaggaaataacaaagtgaagagacaacccatagaatgtgagataatatttgcaaactatccatctgtattaggccatttttgaagtactacaaagaaatacttgagactgagtaatttataaagaagaggtttaattggctcacggttttgcaggctgtacaggaagcatggtgctaacatctgatcagcttgtagggaggcatcaggaagtttccaaccatggtggaaggcaaaaggggaataagtatctcacatggcaggtgcagggcaaagagaggggggaagggaagtgccacacaaccagatcttgtgagtactcagattttgtgaggggtgcttgaggtcatggatacccatttaccctgatgtgtttatacacatttcatacctgtattaaaatatctcatgtaccccataaacatatacacctactttgtacccacaaaaatttaaaaataaagttaatttcaatgtttaaagacttgaagaaataaaaaaaatgaaattaaacaacaa

SEQ ID NO: 32243 - DNA, 7074 bp, Homo Sapiens
catttctacttcatatgatcattttaattgtatttacctcatcttaccaaaaagatcatggttgaatcttgcctactcacgtttagggcctttttttggtggattgctttaataaagatggatctgtcagaccttggagaagccgcagccttcctcagaagaagtgaagctgagctgcttctactacaggccacagccttggatgggaagaagaaatgctggattcctgatggtgagaatgcttatatcgaggctgaggtaaaagggagtgaagatgatggaacagtaattgttgagacagcagatggagagagtctgagcataaaggaggacaaaatccagcagatgaatcctccagagtttgaaatgattgaagacatggcaatgctgactcacctcaatgaggcatccgtgctgcataccctgaagcggcgctatggccagtggatgatctatacatattcaggtctcttctgtgtgaccataaacccttacaaatggcttcccgtgtatcagaaagaagtcatggccgcctacaaagggaagaggcgatcagaggctccccctcacatctttgctgttgccaataacgcctttcaggacatgcttcacaatcgagaaaatcagtctatactcttcacaggagaatctggtgctggaaagactgtgaacagcaaacatattatccagtattttgccaccatagcagccatgattgaatccaggaaaaagcagggggcgttagaagatcaaatcatgcaagcgaatactatcttggaagcatttggaaatgctaaaaccctgagaaatgacaactcctctcgttttggcaaattcatcaggatgcactttggtgccagaggcatgctgtcatctgtggacattgatatctatttgcttgaaaagtccagggtgattttccagcaggctggagagaggaactaccacatattctatcaaattctatctggacaaaaagagcttcatgacctgctcctggtatctgcaaatccctcagacttccacttttgctcctgtggagcagttactgtggagagcttggatgatgctgaagaattgctggccacagaacaagccatggacatcttgggctttcttcctgatgagaagtatggatgctataaactcactggagccatcatgcactttggaaatatgaaatttaaacagaaacctagagaagagcaactggaagcagatggcacagaaaatgctgacaaagctgctttcctcatgggcattaactcctctgagttggtaaagtgcttgatccatcctagaatcaaagttggtaacgaatatgttaccagaggtcaaactatagaacaggtaacctgtgctgtcggtgccctgtccaagtcaatgtatgaaaggatgtttaagtggctagtggcacggatcaacagggccctggatgccaagctgtcaaggcagttcttcattggcattcttgacatcactggttttgaaatccttgagtataatagccttgagcaactttgcattaattttaccaatgaaaaattacaacaattcttcaattggcacatgtttgttctggagcaagaggaatataagaaagaaagcattgaatgggtgtctattggctttggtctggatttgcaagcttgcatagatctcattgagaagccaatgggcatcctttccatccttgaagaagagtgtatgtttcctaaggctacagacctgactttcaagaccaaactctttgacaaccattttggaaagtcggttcatctccagaagcccaagcctgataagaagaaatttgaagctcattttgaacttgtccattatgcaggagtggtaccttataatatcagtggttggctggaaaagaacaaagacctccttaatgaaacagtggtagctgtatttcagaagtcttccaacagactcctggcgagcctttttgaaaattacatgagtactgacagtgctataccatttggggagaagaaacgaaagaaaggagcttcattccaaacggttgcatctctgcataaagaaaacctgaataaattgatgactaatctgaaatcaacagcacctcattttgtgagatgcataaatcccaatgtgaacaaaataccaggtatactggacccttacttggttctacagcagttgcgctgtaatggtgtcttggaagggactaggatatgccgtgaaggttttccaaaccgactgcagtatgctgattttaaacaaaggtactgcattctgaatccaaggacctttccaaagagcaagtttgtgagcagcagaaaagcagctgaagaattacttggctccttggagatagaccatacccagtaccgatttggaatcactaaggtgttttttaaagctgggtttctgggccaactggaagcaataagagatgagagactatctaaagtcttcacattgttccaagccagagcacagggcaaactgatgcgaatcaaattccagaagattctggaagaaagggatgcacttattttgatccaatggaacataagagctttcatggctgtgaagaactggccctggatgaggctcttcttcaagatcaagcctcttgttaaatcttcagaagtaggagaagaagtagctggactgaaggaagagtgtgcacaattacagaaagccttggagaaatcagagtttcagagggaggaactgaaagcaaagcaagtatccctcactcaggaaaaaaatgacctgattcttcagcttcaggctgagcaagagacactggcaaatgttgaagagcagtgcgagtggctgattaaatccaagatccagctggaggccagagtaaaggagctgtcggagagggtggaggaagaagaggagataaattctgagctgactgccagggggcggaaactcgaagatgaatgttttgagttgaagaaagaaatcgatgacctggaaacaatgttggtgaagtcagagaaggagaagcgtactacagagcacaaggtcaagaacttgactgaggaagtagagtttctaaatgaggatatcagcaaacttaacagagcagccaaggttgtgcaggaggcccatcagcagaccctggatgacctgcacatggaggaggagaagctcagcagcctgagcaaagcaaatctgaagctggaacagcaagttgatgagcttgagggtgcccttgagcaggagagaaaagcgagaatgaactgtgaaagggaactgcacaaactggagggcaatttaaagctgaatcgggaaagtatggagaacctggaaagcagccagcgacacctggcagaagagctgaggaaaaaagaattagaattgagtcagatgaattcaaaagtggagaatgagaaaggcctggtagctcagcttcagaagacggttaaagagcttcagactcaaataaaggatttgaaagagaaactagaagctgaaaggaccactcgagccaagatggaaagggagagagctgacctcacccaagacctggctgacttgaatgagaggctggaggaggtaggaggatccagtttggctcagctggaaataactaagaaacaggaaaccaaattccagaagctgcaccgagacatggaagaggccactctgcactttgagacaacttctgcatctttgaagaagagacatgcagacagcctggctgagctcgagggccaggtagaaaatctacagcaggtcaagcagaaactggaaaaagacaagagtgacttgcagctagaagtagatgacctcctgacccgtgttgagcagatgacaagagctaaggcaaatgctgagaaactctgtactctatatgaagagcgcttgcatgaagcaactgcaaagctagataaggtgactcagttggcaaatgacctggcagcacaaaagacaaagctgtggagtgagagtggcgagttcctacggaggcttgaagagaaggaggctctgataaaccaactttccagggaaaagagcaacttcactcggcagattgaagacctgagagggcagctggaaaaggagaccaaatcccagagtgccctggcccatgccctgcagaaggctcagcgtgactgtgaccttctacgagagcagtatgaggaagaacaagaggtcaaggctgagctgcaccggaccttatccaaagtcaatgctgaaatggtgcaatggagaatgaagtatgaaaacaatgtcatccagagaacagaagacttggaggatgccaagaaggaactggcaattagattgcaggaggcagccgaagccatgggggtggccaatgccagaaatgcctccttggagagagccaggcaccagctgcagctggagctcggggacgccctgtctgacctcgggaaggtccgctctgcagcagccaggctggaccagaagcagctgcagtctggcaaggcccttgccgactggaagcagaagcacgaggagtcccaggcgttgctggatgcctctcagaaggaagttcaggctctcagtacagagctcctcaagctcaagaacacctatgaggagagcatcgtgggccaggagacactcaggagggagaacaagaacctccaagaagagatttctaatctgacaaaccaggttagagaagggaccaagaacttaactgaaatggaaaaggtcaagaaactaattgaagaagagaagacagaagtccaggtgacactggaagaaacagagggagccctggaacgtaatgaaagcaagattcttcatttccagcttgaactcttggaagctaaagcagaacttgaaagaaagctttcagagaaagatgaagaaatagaaaattttaggaggaagcagcagtgtaccattgactccctgcagtctagtctggattctgaagctaagagcagaattgaggttacccggctgaagaagaagatggaagaggacctcaatgagatggaactccagcttagctgtgccaaccggcaggtgtcagaagcaaccaaatccctgggccagcttcagattcaaatcaaggaccttcaaatgcagctggatgacagcacacaactgaacagtgatctgaaggagcaggtggctgtggctgagcggcgcaactctcttcttcagtctgaactagaggatctaaggtccctgcaagagcagacagagcgtggccgcaggctgtcagaagaagagctcctggaagcaacagaaagaatcaatcttttctatacccagaacacaagcctcctcagccagaagaagaaactggaggctgatgttgcccggatgcagaaagaagctgaagaggtggtgcaggagtgtcaaaatgcagaagagaaggccaagaaggcagccattgaggcagcaaacttgtcagaagaactgaagaagaagcaagacaccattgcccacttggaaaggacaagagaaaatatggagcagacaattacagacttacagaaaaggctggctgaagctgaacagatggccctgatggggagtagaaagcaaatccagaaactagaatccagggttcgtgaactggaaggtgaactggagggtgaaatccgtcgcagtgcagaggcccagaggggagcccgcagacttgagcgatgcatcaaagagctgacctatcaggcagaggaagacaagaagaatctgagcaggatgcaaactcagatggataaacttcagctaaaagtgcaaaattacaagcagcaagtcgaggtggcggaaacacaagccaatcaatacctttccaagtataagaaacagcaacatgagttgaatgaagtgaaggaaagggcagaggtggcagaatctcaagtcaataaactcaaaattaaagcaagagagtttgggaaaaaggttcaagaagaatagcatcccctgctttgaaaggacaacagctggagaagtacaaggaaggtgctgtttcatggccaaaaacttaggttgcatggaaacatttttaaaaacatgtttaaattgcttttcacaccatataaacaaggcaattagaaaaataattaaagggaatatcattgcttccacagttaatggggattttttgatcctcaaatgcaagtaaactaccttctaatgcttcacatgacagattaaataaatggaagaaccttttcaattctgatgtttaaaaaatgaataaatacttgatcctttgtccatatttcctcttaatgggtaggactcatagaagatgtccttagaccagtcacgcttcatggggactagggcatgttggtgaatggtttttactaaagttaggcaactttggcttgattcacccctaaatctatgaatgtatattgtgagccagcagtggtagaatggaagtcataagatctcctcagcattgtgatataaatatagctatagttaggcaatttgaacatgtaggcaaaactctcctaatcaacacacatgtaggctatatgctggtacatgctttaaacatggaggtaaccccacacgagacattcagtgacaggtaatatgctggatttgtgcagtaccgatttggctcagctggaggaacatgtcccggaattcctctctctcatggttctggattggagtaggtcataaagaaatttgcattaatttgatcagcagctattttatactcataaggtcagtgtacagacccaagcatggtgacagcttgaaaatatgactccaggccaaaaaggggagctagaagagaccagagacagctccctggacccagagctcttccagctcctgccagcctcctccttcagctttgcaaagtactggccaggtgtgtgtgcagctccatggcaaccagcatcagcttttcctgagatcacacacagcattgcagtggaggccgtgagacagacatgggttctgtttgttcttatggacttcccttcatccttgctgcattcacagtcgacctacagtgacttcaggcccagaaccagatgcagagggaacagcctggcctagacttctccaccagcacccacaattgtgtaaggctgaagctctataataaatctttattctgtc

SEQ ID NO: 32244 - DNA, 5310 bp, Homo Sapiens
atgcagctgagccgcgccgccgccgccgccgccgccgcccctgcggagcccccggagccgctgtcccccgcgccggccccggccccggccccccccggccccctcccgcgcagcgcggccgacggggctccggcgggggggaagggggggccggggcgccgcgcgcggaggcggggccccgggaagcccggcccctggggcggggcttcggccgcgaagtgcctgcgcctggacccggccgcgcccgtgtgggccgccaagcagcgcgtgctctgcgccctcaaccacagcctccaggacgcgctcaactatgggcttttccagccgccctcccggggccgcgccggcaagttcctggatgaggagcggctcctgcaggagtacccgcccaacctggacacgcccctgccctacctggagtttcgatacaagcggcgagtttatgcccagaacctcatcgatgataagcagtttgcaaagcttcacacaaaggcgaacctgaagaagttcatggactacgtccagctgcatagcacggacaaggtggcacgcctgttggacaaggggctggaccccaacttccatgaccctgactcaggagagtgccccctgagcctcgcagcccagctggacaacgccacggacctgctaaaggtgctgaagaatggtggtgcccacctggacttccgcactcgcgatgggctcactgccgtgcactgtgccacacgccagcggaatgcggcagcactgacgaccctgctggacctgggggcttcacctgactacaaggacagccgcggcttgacacccctctaccacagcgccctggggggtggggatgccctctgctgtgagctgcttctccacgaccacgctcagctggggatcaccgacgagaatggctggcaggagatccaccaggcctgccgctttgggcacgtgcagcatctggagcacctgctgttctatggggcagacatgggggcccagaacgcctcggggaacacagccctgcacatctgtgccctctacaaccaggagagctgtgctcgtgtcctgctcttccgtggagctaacagggatgtccgcaactacaacagccagacagccttccaggtggccatcatcgcagggaactttgagcttgcagaggttatcaagacccacaaagactcggatgttgtaccattcagggaaacccccagctatgcgaagcggcggcgactggctggccccagtggcttggcatcccctcggcctctgcagcgctcagccagcgatatcaacctgaagggggaggcacagccagcagcttctcctggaccctcgctgagaagcctcccccaccagctgctgctccagcggctgcaagaggagaaagatcgtgaccgggatgccgaccaggagagcaacatcagtggccctttagcaggcagggccggccaaagcaagatcaggagctgtattcgaattcgagctcggttccccgcgccccctgcgccccccgcaccgccgccccggggcccgaagcggaaactttacagcgccgtccccggccgcaagttcatcgccgtgaaggcgcacagcccgcagggtgaaggcgagatcccgctgcaccgcggcgaggccgtgaaggtgctcagcattggggagggcggtttctgggagggaaccgtgaaaggccgcacgggctggttcccggccgactgcgtggaggaagtgcagatgaggcagcatgacacacggcctgaaacgcgggaggaccggacgaagcggctctttcggcactacacagtgggctcctacgacagcctcacctcacacagcgattatgtcattgatgacaaagtggctgtcctgcagaaacgggaccacgagggctttggttttgtgctccggggagccaaagcagagacccccatcgaggagttcacgcccacgccagccttcccggcgctgcagtatctcgagtcggtggacgtggagggtgtggcctggagggccgggctgcgcacgggagacttcctcatcgaggtgaacggggtgaacgtggtgaaggtcggacacaagcaggtggtggctctgattcgccagggtggcaaccgcctcgtcatgaaggttgtgtctgtgacaaggaagccagaagaggacggggctcggcgcagagccccaccgccccccaagagggcccccagcaccacactgaccctgcgctccaagtccatgacagctgagctcgaggaacttgagaagctggacgagatgctggcagccgccgcagagccaacgctgcggccagacatcgcagacgcagactccagagccgccaccgtcaaacagaggcccaccagtcggaggatcacacccgccgagattagctcattgtttgaacgccagggcctcccaggcccagagaagctgccgggctccttgcggaaggggattccacggaccaagtctgtaggggaggacgagaagctggcgtccctgctggaagggcgcttcccgcggagcacctcgatgcaagacccggtgcgcgagggtcgcggcatcccgcccccgccgcagaccgcgccgcctcccccgcccgcgccctactacttcgactcggggccgcccccggccttctcgccgccgcccccgccgggccgcgcctacgacacggtgcgctccagcttcaagcccggcctggaggcgcgcctgggcgcgggcgctgccggcctgtacgagccgggcgcggccctcggcccgctgccgtatcccgagcggcagaagcgcgcgcgctccatgatcatcctgcaggactcggcgcccgagtcgggcgacgcccctcgacccccgcccgcggccaccccgcccgagcgacccaagcgccggccgcggccgcccggccccgacagcccctacgccaacctgggcgccttcagcgccagcctcttcgctccgtccaagccgcagcgccgcaagagccccctggtgaagcagctgcaggtggaggacgcgcaggagcgcgcggccctggccgtgggcagccccggtcccggcggcggcagcttcgcccgcgagccctccccgacccaccgcggtccgcgcccgggtggcctcgactacggcgcgggcgatggcccggggctcgcgttcggcggcccgggcccggccaaggaccggcggctggaggagcggcgccgctccactgtgttcctgtccgtgggggccatcgagggcagcgcccccggcgcggatctgccatccctacagccctcccgctccatcgacgagcgcctcctggggaccggccccaccgccggccgcgacctgctgctgccctccccggtgtctgccctgaagccgttggtcagcggcccgagcctggggccctcgggttccaccttcatccacccactcaccggcaaacccctggaccccagctcacccctggcccttgccctggctgcccgagagcgagctctggcctcccaggcgccctcccggtcccccacacccgtgcacagtcccgacgccgaccgccccggacccctgtttgtggatgtacaggcccgggacccagagcgagggtccctggcttccccggctttctccccacggagcccagcctggattcctgtgcctgctcgcagggaggcagagaaggtcccccgggaggagcggaagtcacccgaggacaagaagtccatgatcctcagcgtcctggacacatccctgcagcggccagctggcctcatcgttgtgcacgccaccagcaacgggcaggagcccagcaggctggggggggccgaagaggagcgcccgggcaccccggagttggccccggcccccatgcagtcagcggctgtggcagagcccctgcccagcccccgggcccagccccctggtggcaccccggcagacgccgggccaggccagggcagctcagaggaagagccagagctggtgtttgctgtgaacctgccacctgcccagctgtcgtccagcgatgaggagaccagggaggagctggcccgaattgggttggtgccaccccctgaagagtttgccaacggggtcctgctggccaccccactcgctggcccgggcccctcgcccaccacggtgcccagcccggcctcagggaagcccagcagtgagccaccccctgcccctgagtctgcagccgactctggggtggaggaggctgacacacgcagctccagcgacccccacctggagaccacaagcaccatctccacggtgtccagcatgtccaccttgagctcggagagcggggaactcactgacacccacacctccttcgctgacggacacacttttctactcgagaagccaccagtgcctcccaagcccaagctcaagtccccgctggggaaggggccggtgaccttcagggacccgctgctgaagcagtcctcggacagcgagctcatggcccagcagcaccacgccgcctctgccgggctggcctctgccgccgggcctgcccgccctcgctacctcttccagagaaggtccaagctatggggggaccccgtggagagccgggggctccctgggcctgaagacgacaaaccaactgtgatcagtgagctcagctcccgcctgcagcagctgaacaaggacacgcgttccctgggggaggaaccagttggtggcctgggcagcctgctggaccctgccaagaagtcgcccatcgcagcagctcggctcttcagcagcctcggtgagctgagctccatttcagcgcagcgcagccccgggggcccgggcggcggggcctcgtactcggtgaggcccagtggccgctaccccgtggcgagacgcgccccgagcccggtgaagcccgcgtcgctggagcgggtggaggggctgggggcgggcgcggggggcgcagggcggcccttcggcctcacgccccccaccatcctcaagtcgtccagcctctccatcccgcacgagcccaaggaggtgcgcttcgtggtgcgcagcgtgagcgcgcgcagtcgctccccctcgccgtcgccgctgccctcgcccgcgtccggccccggccccggcgcccccggcccacgccgacccttccagcagaagccgctgcagctctggagcaagttcgacgtgggcgactggctggagagcatccacctaggcgagcaccgcgaccgcttcgaggaccatgagatagaaggcgcgcacctacccgcgcttaccaaggacgacttcgtggagctgggcgtcacgcgcgtgggccaccgcatgaacatcgagcgcgcgctcaggcagctggacggcagctga

SEQ ID NO: 32245 - DNA, 5850 bp, Homo Sapiens
atggaacagcccctgtggatggggaaaggcctgcagctggactcaaccactccagaggagaaccgcgttggccgccttcccagggagcgccagattcccctttgccctgaggcagggacacgtgcttcagcaggttgggttaacggcatggagaacagtcaccccccccaccaccaccaccagcagcccccgccgcagcccggcccttcgggcgagaggaggaaccaccattggagaagttacaagttgatgattgacccggctctgaaaaaggggcatcataaactgtaccgctacgatgggcagcatttcagcctggcgatgtccagcaaccgcccggtggaaattgtcgaagatccccgggtcgtcgggatctggaccaaaaacaaggagctggagctgtcggtgcccaaattcaagatcgatgagttctacgtgggcccggtgcctccgaagcaggtgacatttgccaagctgaatgataacatccgtgaaaacttcctgagggacatgtgcaagaagtatggggaggtggaggaggtggagattttgtacaaccccaagaccaagaagcacctgggcatcgccaaggtggtctttgccacggtccggggagccaaggatgccgttcagcacttgcacagcacttccgtcatgggcaacattatccacgtggagctggacaccaaaggggaaacccgaatgcggttctatgaactgttggtcactggccgatacaccccccagaccctcccagtgggcgagctggacgctgtctctccaatcgtgaatgagaccctgcagctgtcagatgccctgaagcgcctcaaggatggaggcctgtctgcaggctgtggctccggctcctcctctgtcacccccaatagcggtgggacacccttctcccaggacacagcttattccagctgccgcctggacacacccaactcctatggacagggcaccccgctcacaccgcgcctgggcacccctttctcacaggactccagctactccagccgccagcccacaccctcatacctcttcagccaggaccctgcagtgaccttcaaggcccggcgccacgagagcaagttcacggacgcctacaaccgccgccacgaacatcattatgtacacaattctcccgcggtcactgcggtggccggggccacagccgctttccggggttcctcggacctcccgttcggagcagtcggcggcactgggggcagcagcggtcccccgttcaaggctcaaccacaggattcagccacatttgcccacactccaccacccgcccaagcaacccctgctcctggattcaagtctgctttctctccgtatcagaccccagtggcccacttccctccacccccggaagagcccaccgccacagccgcttttggggcccgcgacagtggggagttccggagggcaccggcgcccccacccctgccacctgctgagcctctggccaaggagaagccaggcacgccacccggcccgccgccccccgacaccaacagcatggagctgggcggccggcccaccttcggctggagtcctgagccctgtgacagccctggcacgcccacgctggagtcgtcccctgcagggccagagaaaccccacgacagcctggactcgcgcatcgagatgctgctgaaggagcagcgcaccaagctgctcttcctgagggagccggactcggacaccgagctgcagatggagggcagccccatctcctcctcctcctcccagctctccccactggccccctttggcaccaactcccagccaggcttccggggccccacgcccccctcgtcacgcccctccagcaccggcctggaggatatcagcccaacacccctcccagactccgacgaggacgaggagctcgacctgggccttgggcctcggcctccacctgagccaggccccccggaccctgctgggcttctgagccagacagctgaggtggccttggacctggttggagacagaaccccgacctcagagaagatggatgagggccagcagtcctcaggcgaggacatggagatctcggatgacgagatgccctcggcccccatcaccagcgctgactgccccaagcccatggtggtggacatgagccacgtgctgggtggccagtggggcggcatgcccatgtccttccagatgcaaacgcaggtgctcagccggctgatgacgggccagggcgcctgcccctacccgcccttcatggccgctgcggccgccgctgcctcagctgggctccagtttgtcaacctgccgccctaccggggccccttctccctgagcaactccggcccaggccgcgggcagcactggccaccactgcccaagtttgacccgtcagtgcctccaccaggctacatgccacgccaggaggacccacacaaagccacggtggatggcgtcctgctggtggtcctcaaagaactcaaggccatcatgaagcgtgacctgaaccgcaagatggtggaagtggtggctttccgggcctttgacgagtggtgggacaagaaggagcggatggccaaggcctcgctgaccccggtgaagtcgggcgagcacaaggacgaggacaggccgaagcccaaggaccgcatcgcctcgtgcctgctggagtcatggggcaagggcgagggcctgggctacgagggcctgggcctgggcattgggctgcgtggggccattcgcctgccctccttcaaggtcaagaggaaggagccaccagacaccacctcatctggcgaccagaagcggctgcggccctcgacctctgtggatgaggaagatgaagagtccgagcgagagcgagaccgggatatggcagacaccccctgtgagctcgccaagcgggaccccaagggcgtgggtgtgcggcggcggccggcgcggcctctggagctggacagtggtggggaggaggacgagaaggagtcattgtcggcgtcctcgtcctcatccgcgtcatcatcctcggggtcctcaaccacctcaccctcgtcctcggcctccgacaaggaggaggaacaggagagcaccgaggaggaagaggaggcggaggaggaggaggaggaggaagtccccaggagccagctctcctcctcctcaacctcatccacatcagataaggatgacgacgatgacgacagtgatgaccgggacgagtctgagaacgatgacgaggacacagccctgtcagaggcgagtgagaaggacgaaggggactcggatgaagaggagacagtgagcattgtaacctccaaggccgaagccacgtcgtccagtgagagttccgagtcttctgagtttgagtcaagctccgagtcctcgccctcatcctcggaggatgaggaggaggtagtggccagggaagaggaggaagaagaggaggaggaggagatggtggccgaggaaagcatggcttctgcaggccctgaggactttgagcaggacggggaggaagcggctctggccccgggggcacctgcagtggactcgttgggcatggaagaggaggtggacatcgagactgaggctgtggcccctgaggagcggccctccatgctggacgagccccccttgcctgtgggtgttgaagagccagcggactccagggagccgcctgaggaaccaggcctgagccaggaaggggccatgttgctgtctccagagccccctgccaaggaggtggaggctcgacccccattgtcccctgagcgagctccagaacatgacctggaagtggagccggagccccctatgatgctccccttgccgctgcaaccaccattgccgcccccacgaccaccccggccacccagcccaccgccggagcctgagaccacagatgcctcacacccatctgtccctccggagccccttgccgaggaccaccccccgcatactccaggcctctgtggcagcctggccaagtcgcagagcacagagacggtgccagccacaccaggcggggagcccccgctatcagggggcagcagtggcctgtccctgagctctccgcaagtgcccggcagccccttctcctacccagccccgtcccctagcttgagcagtgggggcctccctcggacacctggccgggacttcagcttcacacccaccttctccgagcccagcgggcccttgctcctgcccgtctgcccactccccactggccgacgcgatgaacgctccgggcccctggcctccccggtgctcctggagacgggcctgcccctccctctgccccttcccctgcccttgcccttggcattgcccgccgtcttgcgggcccaggctcgtgcgcccaccccgctgccacccctgctgcccgcccccctggcctcttgccctcccccaatgaagaggaagccgggccggccccggcgatccccaccatctatgctctccttggatgggcccttggtccgaccaccagcaggggccgcccttggaagggaactcctgctcctgccgggccagccacagacccccgtcttccccagcacccatgacccccggacggtgaccctggacttccggaacgcggggatcccagcccctccaccaccccttcccccccagccacccccacccccacctcccccacctgtagagcccaccaagctgccctttaaggagctagacaaccagtggccctccgaggccattcctccgggcccccgtgggcgcgatgaggtcactgaggaatacatggagttggccaagagccgggggccgtggcgccggccacctaagaagcgccatgaggacctggtgccacctgcgggctcgcccgaactctcgccaccccagcccctcttccggccccgctcggagtttgaggagatgaccatcctgtatgacatctggaacggtggcatcgatgaggaggacatccgcttcctgtgtgtcacctacgagcgactgctacagcaggacaatggcatggactggcttaacgacacgctctgggtctaccatccctatatcctgctggcatggggggctctgcaccttctgggatgcaggaagtccctgctcacctctctgggccccaccacccagtctgtagcagcccgcggtgcccatgaagctaagaagaagaaacgggacgatggcatccgcgagcacgtgacgggctgtgcccgcagtgagggcttctacaccatcgacaagaaggacaagctcagatacctcaacagcagccgtgccagcaccgatgagccccccgcagacacccagggcatgagcatcccagcacagccccacgcctccacccgggcaggctcggagcggcgttcggagcagcgccgcctgctgtcctccttcactggcagctgtgacagtgacctgctcaagttcaaccagctcaagttccggaagaaaaagctcaagttctgcaagagccacattcacgactggggcttgttcgccatggagcccatcgcggctgacgagatggtcatcgagtacgtgggccagaatatccgtcaggtgatcgcagacatgcgggagaagcgttatgaggacgagggcatcgggagcagctacatgttccgggtggaccatgacaccatcatcgacgccaccaagtgcggcaacttcgcgcgcttcatcaaccacagctgcaaccccaactgctatgccaaggtgatcacggtggagtcacagaagaagatagtcatctactcgaagcagcacattaacgtcaatgaggagattacctatgactataagttccccatcgaggacgtcaagatcccctgcctctgtggctccgagaactgccgggggaccctcaactag

SEQ ID NO: 32246 - DNA, 5888 bp, Homo Sapiens
atggacgagtcgagcctcctgcggcgccgcgggctccagaaggagctgagcctgccacgccgaggacgtggctgccgcagcgggaaccgcaagagcttggtggtaggaacgccctccccgaccctctcccggcccctgtcgccattgtcggtcccaacggcaggcagcagccccttggatagtcctcggaatttctcggctgcctctgccctaaatttcccctttgcccggagggcagacggcagaagatggtccctcgcgtctctcccatcttccggctatggaaccaacacacccagctccaccctctcgtcaagctcatcctcccgggaacgtctccaccagcttcccttccagccgacgccggacgagctgcacttcctgtccaagcacttccgcagctcagagaatgtgcttgatgaggaaggcggccggtcaccccgcctccgaccccgctctcgcagtctcagcccgggccgtgcaacggggaccttcgacaatgagattgtcatgatgaatcacgtgtaccgggagaggttccccaaggccacagcacagatggagggccgtctgcaggagttcctgacggcctacgcgcccggcgcccggctggcgctggctgatggcgtcttgggcttcatccaccaccagatcgtcgagctggcccgagactgcttggccaagtctggcgagaacctcgtcacctcccgctacttcctagagatgcaggagaagctggagcggcttctgcaggatgcccatgagcgttcggacagtgaggaggtcagcttcatcgtccagcttgtccggaaactgctgatcatcatctcacggccagctcggctgctggagtgtctggagtttgaccctgaggaattttaccacctgctggaggcggctgagggccatgcgcgggagggccaaggcattaagactgaccttccacagtacatcattgggcagctgggcctggccaaggaccccctggaggagatggtgccactgagtcacctcgaagaagaacagcccccagcacctgagtccccagagagccgcgccctggtcggccagtcacggaggaagccatgcgaaagcgactttgagaccatcaaactcattagcaacggagcctatggggccgtctacctggtgcggcaccgtgacacacggcagcgctttgccatcaagaagatcaacaaacagaacttgatcctgcgtaaccagatccagcaggtctttgtggagcgtgacattctcacctttgccgagaacccctttgtggtcagcatgttctgctcctttgagacccggcgccacctatgtatggtcatggaatacgtggaaggcggcgactgcgccacgctcctgaagaacatgggcccgctgcccgtggacatggcccgcctgtacttcgccgagacggtgttggcgctggagtacctgcataactatggcatcgtgcaccgtgacctcaaaccagacaatctgctcatcacctcgcttggccacatcaagctcacggacttcggcctgtccaagatcggcctcatgagcatggccaccaacctctatgagggccacatcgagaaggacgcccgagagttcatcgacaagcaggtgtgtgggacgccggagtacatagcccccgaggtgatcttccgccagggctatgggaagccagtggactggtgggccatgggcgtcgtcctctatgagtttctggtgggctgcgtgcctttctttggagatacccccgaggaactcttcggtcaggtggtcagcgatgagatcatgtggccagagggagatgaggcccttccagcagacgcccaggacctcatcaccaggttgctccggcagagcccgctggaccgtctgggcactggtggcacccacgaagtgaagcagcacccctttttcctggccctggactgggcagggcttctccgacacaaagccgagttcgtgccccagctcgaagctgaggatgataccagctactttgacacacgttcggaacgttaccgccatctgggctccgaggacgacgagaccaatgatgaagaatcgtccacagagatcccccagttctcctcctgctcccaccggttcagcaaggtctacagcagctctgagttcctggccgtccagcccactcctaccttcgctgaaaggagcttcagtgaagaccgggaggaggggtgggagcgcagcgaagtggactatggccgccggctgagtgctgacatccggctgaggtcctggacatcctctggatcctcctgtcagtcatcttcgtcccagcccgagcggggtcccagcccatctctcctgaataccatcagcctggacacaatgcccaagtttgccttctcatcagaggatgagggggtaggcccaggccctgcaggccccaagaggcccgtcttcattctaggggagcctgaccccccaccagcggccaccccagtgatgcccaagccctcgagcctttctgccgacacagctgctctcagccacgcccgcctacggagcaatagcatcggcgcccgacactccacaccaaggcctctggatgccggccggggccgccgccttgggggcccaagagacccagcccctgagaagtccagagcctcctccagcggtggcagtggtggcggcagtgggggccgcgtgcccaagtcagcctctgtctctgccctgtccctcatcatcacggcagatgatggcagcggcggccccctcatgagccccctttccccgcgctctctgtcctcgaacccgtcgtcccgtgactcttcgccgagccgagacccgtcccccgtgtgtggcagcctgcggccccccatcgttatccacagctctggcaagaagtacggcttcagcctgcgggcgatccgcgtctacatgggtgatagcgacgtctacactgtgcaccacgtcgtctggagtgtggaggacggaagccccgcccaggaggcgggcctgcgggctggggacctcatcacccacatcaacggggagtcagtgctggggctggtgcacatggacgtcgtggagctgctgctgaagagcggcaacaagatatccctgcggaccacagccctggagaacacctccatcaaggtgggccccgcccggaagaatgtggccaagggccgcatggcacgcaggagcaagaggagccgtcggcgggagacccaggatcggcggaagtcacttttcaagaagatctccaagcagacctccgtgctgcacaccagccgcagcttctcctccggactccaccactcactgtcatccagtgagagcctccccggctcgcccacccacagcctctcccccagccccaccactccctgccgaagcccagcccctgatgtcccagcagataccactgcatccccacccagcgcatccccgagctccagcagccccgcctccccagctgctgctggccacacccgccccagctccctgcacggcctggctgccaagcttgggccaccccgccccaagactggccgccgcaagtccaccagcagcatcccgccctccccgctggcctgcccgcccatctccgcgcccccaccccgctcgccctcgcccctgcccgggcacccgcccgcacctgcccgatccccgcggctgcgccggggccagtcagctgacaagctgggcacaggggagcggctggatggggaggcggggcggcgcactcgtgggccagaggccgagctcgtggtcatgcggcggctgcacctgtccgagcgccgagactccttcaagaagcaggaggccgtgcaggaggttagcttcgatgagccgcaggaggaggccactgggctgcccacctcagtgccacagatcgccgtggagggcgaggaagccgtgccagtagctctcgggcccaccggaagagactgatcccctgccaggtctctccctggcatcaaagttacgcgttttcttgtgcaatgttttttccgtaaagtcatgcctggatggggactgagccaccagcctgacacccagaaggcgagaagccatctcggtccttgctggaaggtggagacatcgcttgtgttctggtgtcaatcggggctggatggggcaagaatgggggacaagggtggctttgtaaatagcagcaaatccctgcaactaatttattactttttttttctttttttttttttttttttgagacagagtctcactctgttgcccgggctggagtgcagcggcgtgatctcagctcactgcaacctccgcctcccaagttcaagcgattgtcctgcctcagcttcccaagtggctgggattacaggcgcccaccactatgcccagctaattttttgtatttttagtacagacggggtttcaccatgttggtcaggctggtctcgaactcctgacctcatgatttgcctgcctttgcctcccaaagtgctgggattacaggcgtgagccactgggcccagcctaatttattactttttataagcgatagccgtactgagccgccccctgaaggcggctgccaggtcttgccccaggcacctgggactctgtttgcaggccctgccctctgggctgagaaggatgcactttggacaagtcatctgtgtttgtgttttccagtttttctgtactttttaagtgttttgtgttacctggtctcattcccctccccacacctacccatttgaggggatggagttgaagtcacctggtcacctgtaccggcccagttcggctacaacctggagtgtccgtaaacaattcctctcacccacaaaacaatgtaatcccagcgatggactggattctgaaggccacttcccaccatcatagctgccatgcccaggcagtgcctgctctatatatagagtctgcctccaatcctgctggcttcagcctggagaagggatatgggagctggagctttgatggatgaataggtgttcaccggatctgggcagaggggtcatccgctccccaggtgggcactgataaaggaaggtacaggcctcacctggaactgccaaggcagcctccagaaatgctcggctgtctcggggcacgctccagtatgccagtcctgcgggattacgtccagctacttccagaaacactcagtgtcccctcccctcaggctctgccttggcctggccttgtccagtctaccctggacaagatgccgtgtgtttgaggcccagcagagtaagcccttggccgtgatgtgtctgaaacacctgttaggggttccctccatatgtcagagcctctctgggatgaagttcaagccagaaaacccagtcgaggctcaagtttgaatttcagcttcactgtgtggctctgggaaaatggctttcccactctgtgcctcagtttccttgtgtttacaagactaatcccattgactgtttattaagcacctactgtgtgccaagcgcttttacgtggcttctccctcagccagccttgagaaggctggaggtggtgtcatcacctccattttacagacaaagcagctgagaccccagcgaggggcggagacctgtcccacgatcacccagcaggagtcgtggcagaacggagcatcagccagaccctgttgtgggcgttgtcatcaagggagcttgaatggagggtctggtgtcagatacagccgactccagccccagctcatcccccatgatgctgtgtgacccactgggcactctggtgagggagctttccagacatcaacagcccactctgcttccctttctgagtcccctgtccagcactgcctagtgttggagggtagaccaaggctgtgcatgattcaccccctccttccatcctggagctggcagtgaataaaagcccgtatttac

SEQ ID NO: 32247 - DNA, 5831 bp, Homo Sapiens
agcctcggtgccgcctgccagcccgcggagggaagcggtccccgacccggccccggcccccacgttctggggcgcgagtcctgagaaggcgcctaacgtgtagcgcgcctggaccctctcgagatgctgcccttagagtgggatgaaagtctggggaggaacgccttgtcaccggcaaaaacagcctttctcttggtcttcgtctgcatcctccttttcaaaatatcttgatttcccccgcgcacccctgacccggctgcagcaccggccctccgagcgggaagagccccgtgaaggctccgcagagcgatctaccccgcgctcttgtccgtgcccagaaagcgggttccacttggcagggattattttaaactgctaccagcaattcattcacctgacacccgacaccggcagcccagcccgccggaggcgagacaggattgtccggtgcccgctagaggtcgccaaacggagtccttttgcgctggttcttaagtggattcctagtgaaaaggcagacaactgaaaatattatgtctactttgagaattcctccagcaacccatacctaataagaaggatagaagaactcaacaagactgcaagtggcaacgtggaagcaaaagtagtatgcttttatagacgacgtgatatttccaacacacttataatgctcgcagataagcatgctaaagaaattgaggaagaatctgaaacaacagttgaggctgacttgaccgataagcagaaacatcagttgaaacatagggaactctttttgtcacgccagtatgaatctctgcccgcaacacatatcaggggaaagtgcagtgttgcccttctgaatgagacagaatcagtattgtcatatcttgataaggaggataccttcttctactcattggtctatgacccctcattgaaaacactattagctgacaaaggtgaaatcagagtgggacctagatatcaagcagacattccagaaatgctgttagaaggagaatcagatgagagggaacaatcaaaattggaagttaaagtttgggatccaaatagcccacttacggatcgacagattgaccagtttttagttgtagcacgtgctgttgggacattcgccagagccctggattgcagcagttctgtgaggcagcctagtttgcatatgagtgctgctgcagcttcccgagacatcaccttgtttcacgctatggatacattgtatagacacagctatgatttgagcagtgccattagtgtcttagtaccactcggaggacctgttttatgcagagatgaaatggaggaatggtcagcctctgaagctagcttatttgaagaggcactggaaaaatatggcaaagacttcaatgacatacggcaagattttcttccttggaaatcattgactagcatcattgaatattattacatgtggaaaactactgacagatatgtgcaacagaaacgtctaaaagcagcagaagctgagagtaaactgaaacaagtatatatcccaacctacaaaccaaatcccaaccaaatatccactagtaatgggaagcctggtgctgtgaatggagctgtggggaccacgttccagcctcagaatcctctcttagggagagcctgtgagagctgctatgctacacagtctcaccagtggtattcttggggcccacctaatatgcagtgtagattatgtgcaatttgttggctttattggaaaaaatatggaggcttgaaaatgcccacccagtcagaagaagagaagttatctcctagcccaactacagaggaccctcgtgttagaagtcacgtgtcccgccaggccatgcagggaatgccagtccgaaacactgggagtccaaagtctgcagtgaagacccgccaagctttcttccttcatactacatatttcacaaaatttgctcgtcaggtctgcaaaaataccctccggctgcggcaggcagcaagacggccgtttgttgctattaattatgctgccattagggcagaatatgcagacagacatgctgaactatctggaagtccactgaaaagcaaaagcactaggaagcctttggcatgtatcattgggtatttagagatccatcctgcaaagaaacctaatgtaattcgatctacaccaagcctgcaaaccccaactaccaagcggatgctaacaactccaaatcacacatctctgagcattctggggaaaagaaactacagtcatcacaatggtctggatgaactcacgtgctgtgtgtcagactgagctttccctgattcattctacaatccaagacttgctgcactgtcctgctgatgttcacagccgtgcctgggaagaaggcagccccactcccagtacatttcagtgggagacctctgcgtgcatccatggagacgcaatggggcggggaaggaactgtgggagtgcacgttccaaatcctgtgtctccacgtgtggatcagcagcacctcgctttcttgtcagagacctcgctgttacggagcgagacctgctgagaattgaggggctgagggaacccctccacctcctcccttctgcagcgccctgcgccccacccagcaacagcggccacttggcagtggggctgctgcaagctcagagccgctgccaccctgcatgtgtccgctcagctcggtcttatgctgtatagttactaaatatgtacaggagggccatggcatctttctgaatggatttttcttaagaaatgcgccagtgtttatgaggttcaaggtatttccctgtccttgctgttaccgtcactcagctttttctcgataggcttcatccttgtttttttgaaatgggggaatttgctgtttaccctctgcattcctatatgtgaccctccctcctactcctccaaggaacagaattaccgaggttctgacaaaagataagcctgtaaactcatcatctgtgttttgtggttggagagaaactggtgttctgcccggctctgcttggtcacagacagctccagcaagagcagttgttaaaagtgccaagcgtgtgtatcactgtgacaagccgtttgcttactgccctgttcccttgcagccaaaccagctgatgaagaactgctgccaggtgggtcctacagcaggtcacaaatgacctagtttcattttaagcagacagactctgtttggcctagaggtgtggagtgagagaactgtgtttgtgggtatgagtctgtgtggccaaccccatgacccccacccctccagcccaacatcttgtgagcacatgtgacctaggccccgggggacctgcctgctcctttggcttgggctcttcgtgtttcccacctgccctcggcacgagcccttggtggcatcacagttggccactcagctgtgctgagtagctgtgctacttgtgctggcagctgcaaggataggaatagctcagcgcccgatgagctccctgagcagatgtgaggctggcaactcccctgccctctgtttgcaggcacagggtcacagtcccaagaaagacaactggagtctgatctcccagccatctctggggttactaggaggcagctggatggcagatacgagaggcccaaatagccaagctgttgcaagacagagtggctacaattgaattgacaccctgggaagcacgaggtaacttggtaaggataatgatgctgtagatgtctgtgtcctcggaggctgagctccgcttggcagagagagcgtgctgtgtgaggtggagggcggttttgcagacatctcagcttcttttctgaggaggagttggttctcatcttaggcttctgcaagggcgagcatgggatgtctccaccaccacccactcttggagctgtgctgggtcttggcttggggcgctgagggtggggcctgtgtcagaagcatttggtgagaggggtggaggtggcaggcaggggttctcctcagggttcccactgaggggtcccttcagcaaagacctgggaggaggtgccgcatcacgtggatgtttcttccctaaagaaaaagacacaggaaagctgtctgtctgtaccctgctctggatttattgtcgtacttggacccagaaggggaaatgattccctcaccctttcactttctctctgaacccctactaagtggtgactgcagattctggaaacaattagctgcccgtgactcagctgccagcttcattttctctgccttttgggagaggccctctcacccaggcccaagagatttggagacaggagtcaggccaggtctgaagcaggagaagggaggcccctcctatctacccagttgacatttggctttgggaaaagcgcagcttgttcgagccacgtgtgccaagcaggcttttccttcctcttgtaagtaaagctcgtggttctgtagtccagtcatcctaggagggtgatgttgactgagacttcacgctctccctttgtctctggaaactgccccctcgttctgacagaatcccccaggcaatggaggaagggtgccgaggcgcctctagtctgtgcctttgccgttggaagcatttggtgctgagagggtttcccagccacccgctccctttctggggccatggtgtccctgctgtgtgtcagtggcatgtcactgtggttcagtgagcacatgggtggacgtgcagagactgtctgcgcagcccccagcagacatgcccctggggtgaggacacaggctctgcaggctatctccccctctggctcagtcatcgcctgcccacccttcacttcttaaaggtgcgcaagagaggagggccgactggagggtgtcgccggaaggtttcagcctgcccttcacaattccccttgtgcacagcccagtttccatctctcagggcccacccaggaaaatggatttcaagtgggggttttcatccagagatttgtttaacacaaaacaagaaaagctgagaggcaaaacaggggagtgaggggcaacccagaggtggggaacaacaacagcaagccgcccccatcctgagactggctgggcaccaggggaggacgcgtcaccagagcctggggccaaggccactgggggacctgccacactgtggacctgtctggtgggggctggagcctcgagaagccatgattcttgtcagaaacatttccccaggcagagagagggggccccagcctctcccctcctcttggcctccagagtcctgcaggtgcctcacagtagtgaaacccagttggaagcagctgccctgggagcctgggacaggcgacccaccgggtcagtcccctgccactcagagcagagcagggggctgagggcaagcaggtggggctgtgcgtggcctcagtgcactcggtgtcatgtctgagcctggtgtttatgccccactgctgtcctaagtccctggcgaggggaggtggaggagctgccccgtgggtgtttggagattctgttttactctgcctagagaggaaacggctttggggagggagggggaagcctttattctttactgttgtccctgttttcctttgggggaatttactcagttagcagcccctcctcaccattccccccaggaaggccatgtcccagttttctgtccacccctcctgttcctctgcactatgtctctgattttccctgccagggaagctaacccagagcacgcacctgtgctcatgagtgtttccgcaggataattcgttctgagcatgataccacagtgtggattgtctgtctgtaaggagatgccatctactaaccaatttgtattgtgtttccaataaattcctggaaatttt

SEQ ID NO: 32248 - DNA, 7320 bp, Homo Sapiens
atggatgtcctcaacctggacctcggcagggagctaagtgcaggagcctggcttcagctatcagaggtcaaaaaagccaagtttgatggtgcccaagagaaattcaacacgtacgtgaccctgaaagtgcagaatgtcaagagcacgaccatcgcggtgcggggcagccagcccagctgggagcaggatttcatgttcgagattaaccgtctggatttgggactgacggtggaggtgtggaataagggtctcatctgggacacaatggtgggcactgtgtggatcccactgaggaccatccgccagtccaatgagattcctgacccacacacctcctcccccaacccccaggagggccctggagagtggctgacgctggactcccaggtcatcatggcagacagtgagatctgtggcaccaaggaccccaccttccaccgcatcctcctggacacgcgctttgagctacccttagacattcctgaagaggaggctcgctactgggccaagaagctggagcagctcaatgctatgcgggaccaggatgaatattcgttccaagatgagcaagacaagcctctgcctgtccccagcaaccagtgctgcaactggaattattttggctggggtgagcagcacaacgatgaccccgacagtgcagtggatgatcgtgacagtgactaccgcagtgaaacgagcaacagcatcccgccgccctattatactacgtcacaacccaacgcctcagtccaccaatattctgttcgcccaccacccctgggctcccgggagtcctacagtgactccatgcacagttacgaggagttctctgagccacaagccctcagccccacgggtagcagccgctatgcctcttccggggagctgagccagggaagctctcagctgagcgaggacttcgaccctgacgagcacagcctgcagggctccgacatggaggatgagcgggaccgggactcctaccactcctgccacagctcggtcagctaccacaaagactcgcctcgctgggaccaggatgaggaagagctggaggaggacctggaggacttcctggaggaggaggagctgcctgaagatgaggaggagctggaggaggaggaggaggaggaggacaaggccccagtggcacccaccgaggcccccgacatggccaaggtggcccccaagccagccacgcccgacaaggtgcctgcagctgagcagatccctgaggctgagccacccaaggacgaggagaggccgagagaggatgaggaaggccaggaggggcaggactccatgtccagggccaaggccaactggctgcgtgccttcaacaaggtgcggatgcagctgcaggaggcccggggagaaggagagatgtctaaatccctatggttcaaaggcggcccagggggcggtctcatcatcatcgacagcatgccagacatccgcaagaggaaacctatcccactcgtgagcgacttgtccctggtccagtccaggaaagcgggcatcacctcggccttggcctccagcacgttgaacaacgaggagctgaaaaaccacgtttacaagaagaccctgcaagccttaatctaccccatctcgtgcacgacgccacacaacttcgaagtgtggacggccaccacgcccacctactgctacgagtgcgaggggctgctgtggggcatcgcgaggcagggcatgcgctgcaccgagtgcggtgtcaagtgccacgagaagtgccaggacctgctcaacgccgactgcctgcagcgggctgcggagaagagctccaagcacggggcggaggaccggacacagaacatcatcatggtgctcaaggaccgcatgaagatccgggagcgcaacaagcccgagatcttcgagctcatccaggagatcttcgcggtgaccaagacggcgcacacgcagcagatgaaggcggtcaagcagagcgtgctggacggcacgtccaagtggtccgccaagatcagcatcaccgtggtctgcgcccagggcttgcaggcaaaggacaagacaggatccagtgacccctatgtcaccgtccaggtcgggaagaccaagaaacggacaaaaaccatctatgggaacctcaacccggtgtgggaggagaatttccactttgaatgtcacaattcctccgaccgcatcaaggtgcgcgtctgggacgaggatgacgacatcaaatcccgcgtgaaacagaggttcaagagggaatctgacgatttcctggggcagacgatcattgaggtgcggacgctcagcggcgagatggacgtgtggtacaacctggacaagcgaactgacaaatctgccgtgtcgggtgccatccggctccacatcagtgtggagatcaaaggcgaggagaaggtggccccgtaccatgtccagtacacctgtctgcatgagaacctgttccacttcgtgaccgacgtgcagaacaatggggtcgtgaagatcccagatgccaagggtgacgatgcctggaaggtttactacgatgagacagcccaggagattgtggacgagtttgccatgcgctacggcgtcgagtccatctaccaagccatgacccactttgcctgcctctcctccaagtatatgtgcccaggggtgcctgccgtcatgagcaccctgctcgccaacatcaatgcctactacgcacacaccaccgcctccaccaacgtgtctgcctccgaccgcttcgccgcctccaactttgggaaagagcgcttcgtgaaactcctggaccagctgcataactccctgcggattgacctctccatgtaccggaataacttcccagccagcagcccggagagactccaggacctcaaatccactgtggaccttctcaccagcatcaccttctttcggatgaaggtacaagaactccagagcccgccccgagccagccaggtggtaaaggactgtgtgaaagcctgccttaattctacctacgagtacatcttcaataactgccatgaactgtacagccgggagtaccagacagacccggccaagaagggggaagttctcccagaggaacaggggcccagcatcaagaacctcgacttctggtccaagctgattaccctcatagtgtccatcattgaggaagacaagaattcctacactccctgcctcaaccagtttccccaggagctgaatgtgggtaaaatcagcgctgaagtgatgtggaatctgtttgcccaagacatgaagtacgccatggaggagcacgacaagcatcgtctatgcaagagtgccgactacatgaacctccacttcaaggtgaaatggctctacaatgagtatgtgacggaacttcccgccttcaaggaccgcgtgcctgagtaccctgcatggtttgaacccttcgtcatccagtggctggatgagaatgaggaggtgtcccgggatttcctgcacggtgccctggagcgagacaagaaggatgggttccagcagacctcagagcatgccctattctcctgctccgtggtggatgttttctcccaactcaaccagagctttgaaatcatcaagaaactcgagtgtcccgaccctcagatcgtggggcactacatgaggcgctttgccaagaccatcagtaatgtgctcctccagtatgcagacatcatctccaaggactttgcctcctactgctccaaggagaaggagaaagtgccctgcattctcatgaataacactcaacagctacgagttcagctggagaagatgttcgaagccatgggaggaaaggagctggatgctgaagccagtgacatcctgaaggagcttcaggtgaaactcaataacgtcttggatgagctcagccgggtgtttgctaccagcttccagccgcacattgaagagtgtgtcaaacagatgggtgacatccttagccaggttaagggcacaggcaatgtgccagccagtgcctgcagcagcgtggcccaggacgcggacaatgtgttgcagcccatcatggacctgctggacagcaacctgaccctctttgccaaaatctgtgagaagactgtgctgaagcgagtgctgaaggagctgtggaagctggttatgaacaccatggagaaaaccatcgtcctgccgcccctcactgaccagacgatgatcgggaacctcttgagaaaacatggcaagggattagaaaagggcagggtgaaattgccaagccactcagacggaacccagatgatcttcaatgcagccaaggagctgggtcagctgtccaaactcaaggatcacatggtacgagaagaagccaagagcttgaccccaaagcagtgcgcggttgttgagttggccctggacaccatcaagcaatatttccacgcgggtggcgtgggcctcaagaagaccttcctggagaagagcccggacctgcaatccttgcgctatgccctgtcgctctacacgcaggccaccgacctgctaatcaagacctttgtacagacgcaatcggcccagggcttgggtgtagaagaccctgtgggtgaagtctctgtccatgttgagctgttcactcatccaggaactggggaacacaaggtcacagtgaaagtggtggctgccaatgacctcaagtggcagacttctggcatcttccggccgttcatcgaggtcaacatcattgggccccagctcagcgacaagaaacgcaagtttgcgaccaaatccaagaacaatagctgggctcccaagtacaatgagagcttccagttcacgctgagcgccgacgcgggtcccgagtgctatgagctgcaggtgtgcgtcaaggactactgcttcgcgcgcgaggaccgcacggtggggctggccgtgctgcagctgcgtgagctggcccagcgcgggagcgccgcctgctggctgccgctcggccgccgcatccacatggacgacacgggcctcacggtgctgcgaatcctctcgcagcgcagcaacgacgaggtggccaaggagttcgtgaagctcaagtcggacacgcgctccgccgaggagggcggtgccgcgcctgcgccttagcgcgggcggtcggccgagcggcactgcgcctgcgcggagggcgctgggcggggagggacggggcttgcgccttggtgggacctccccaggggcggggctcggggggctccacgccaagggtgggctgcgcctacgcccttgactcagctttcccttttggggaattaggaatggaggatgccccgccctctcgggaggccacgcccaagggcgcgacgaaggaaggagccacatccccaacttgaggccacgcccccagcacctagggggcattttgagctgggatgggggaaacctcgtccctatggaggaggccacatcccggggctctggtaccgggaggcaccacctcatgtcccctggaaaagccataagatgggacccagacccctgggaccccagaccaattgccaagtatggaaatctcagctccctcgagggggggccctgggcaaggggtagggctctctggagcgcccctctaggtggcctggggactggagggaccaggatgctggttggagggccccggaataccggagtccctttagatatttgtgcaaaaaataaatggggggaggggggaggatgggatttcaaaagcacatgcgcccttgggcgcccaaaccctgggggccgaggggacggctctggttccccacgctgcccctacttccctttgggagtttgcctctccctctcccccaacaaacccagtcctcatatcatagagttcaacacacccatttgacagatggcaaaactgaggcttaaagagctgcttgagacttggccaaggttccaggtgccataccctctgtgcccctcccttaggcctgtgtgccccatggaagggtgggctgagatcgggatgacctgacacagctccctattgctgctaattccccctcggcctcctccaaggggtgggaattccaggccaagacccctacttcgcctttccttctccggctgccaagcaggacctttgccctcagccctttctcctgggatctccatgggggatgccatgagggcctcccaccacaaaagagaatttgggatcccctggtcccaggtttctccatcccttcttccttttccagaattttccaaataggaaagaacagaaggagaccagaaactctaggggggagaaagagaatgagagaaagagaatgagagagagagaaacacaaacacagtgacacagtgagagcttagtctccaagagcctattcattgattcaaacacccaagccacaggatacctcagatggccctcttgccagctggaagctctttctccaatgagcaaagttacagtgacctggctggagttacctggtgcacataggaccttaggggaaagttcagcgtggactacacttgctctgggatctgcttttccacatgtgtgtatggcacgcctttttctgctggattgggaaggacaagattttgctgtgctagggagaaatgaaaacggggtgagctgagtagctgggtttctggaggatagaacatcagatggggaggctttccgaggtgaagaatgagagggaaccacttactagagagaaaagagctccaggcctggggaacagcacgtgcgaaggccaggagagaagaactgttgaaacaacgagaagggtggcacggctggagctgagccagcaagggggatcgtgaggagccttggggttggggagatctgcagaagcatcagaccaggcagggcctcgtacgcagtcctgaggagttttacttttattctaagacagttggggagctccaggagctgttttaagttggggagagactggattccagcctgcaaaagctgttttgtgaagactaaaaccagtgaggagaggtggaggtgctttggggacactgaaatggattcttggaaagattctgaaggctgtgttgaaaagacacctatagctgtggggacatgactataatcccagcatttggggagaccgaggctggcagatcacttaaggtcaggagtttgagaccagcctggccaacatggcgaaaccccatctctgctaaaaatacaaaaattagctgggtgcagtggtgcatgcctgtagtcccagctactcaggagactgaggcgggagaattgtttgaaccctggaggcagaggttgtagtgagtcgtgatcacacaactgcactccagcctgggcaacagaacaatactccattccctcccctctaccccacc

SEQ ID NO: 32249 - DNA, 5363 bp, Homo Sapiens
atgtcctggctcctctccaagatccaaaaaggaaggctaccatccccagccccgctgtgcactcgcgcaactcaggcgctggcccacacccatctcgtcccccaccgccatctccgctatcagctcggagactcgggagccgccagtcactgtgccctgtccctctccggaggccgccagtcactgtgccctgtccctctccggaggctcttcttcctctttagcctgggatccccacctcgggcagggtccgtcgccaccaagtccagggccgcgcgccacccacgtgtccaagagcgcagtgcccgcccaccgcaaaccccccaaggccggcagctcctagccgcggaagctctccccttgcacacgaaacctgcactggctggggaactgcagactgatcgccagcggcacgtgcggggcgccgacgcctcgccgcagggtgcgggtgcccgcggagccagccagccagagaaccagcaggagaggaaaaaggggagaaaacgagagagtctgagtgctgggcgcgttttagcgatggcttctgctctcaacagcaaaattaacccgcccggcacttgccagggctccaaagccgacggtggcgccggctggagaatggactgtgatccccagatgcacgtgaaaatgtgcaagaagatcgcccagctcaccaaggtgatttatgccctgaacacccgccaggatgaggctgaggccagcatggaggcgctgcgggaagcgcaccaggaggagctccagaatgcggtggcagagaccaaggccaggctcctgcaggaacagggctgcgcagaggaggaagcccttctacagcgcatccaggccctggagagcgccctggagctgcaaaagaggctgacggaggaggcgctggctgagtcggcctcgtgcaggctggagacgaaggagagagagctgagggtggaggcagagcacgccgagcgagtcctcacgctctccagggaaatgctggagctcaaggctgactacgagaggaggctccagcacctgacgagccacgaggctaccccgcagggccggctgccccaggagagccctgaaaccaagtcggagccaggccagggcccggagatgcaggaggtcctgctagaggtgcagcggctgcgagtggagaaccagcagctgagcaaggactacgcccgcaaggccgaggagctgcaggccacctacgagagggaaaacgaggccatccggcaggccatgcagcagtcggtgagccaggccctgtggcagtggcaggagaaggagtcggacctccgcaagaacttccaggtccaggagtcagccctgcaggctcaggtccggaagctggaaggagacctggagcacagaggccgcaagataagtgacctgaagaagtacgcccagaagctgaaggagaggattcaggacctggatgtgcagcttaaggaggctcgacaggagaattcagagttgaaaggcactgcaaaaaaacttggggagaagctggctgttgccaaagacagaatgatgctgcaggagtgtcgtgggacacagcagacagatgccatgaagactgagttagtttcagagaacaaagtcctgcgggaagagaatgacttggaagccggcaatcttcatcctcagcaggatcaaagctgtctcaaggagtgcccttgcatgaaaggaggcacagatatgcagaccaagaaagaggcaagtgctgagacagaatatatgaagcaacaatatgaagaagaccttcgtaaaatcaaacatcagacagaagaggagaagaaacatctcaaagaccagctagtgaagcgactagaagacttggtaaagaagcacaccgtggaaatcaaatccgttcgctcgtccgtggaggctgaaagaaagaaactgcagagggaagtagaagcacagttggaggaagtgaggaagaaatcagaaaaggagataaagcagctggaagaagagaaagcagccctcaatgtgaagcttcagaattctctgcttgaggttttaaggctggaagaatttatccaacaaaataagacacgccccacaggagctgaggaaagtccccaggaattaggccgccagcactgcagcattctggagacccaggatccatgcttgaagctggatgaaacttcgccgagaggagaggagtatcaagataagttagcagctgaagaaggaaccagcagtgatgaagaagaaaggaccaaagtgcttctcaaggagggaagtgacccacaacctccactgggctctttgttgaaggagaaaacatccaaaatccagcgtctagaggaggactggcaaagccagaaggccaaattgcaagcccaggtctcacagatgcagcaggctctggagcagtgcaccagcaactacagggaggacctgcaggcactcaagcagctctcggacctggagagggagaagctgcagcgtgagctccaggagaccactcagcagaaccacgccatgaaagcccagctcgaggcttcccaccagagagccctgcgcatgctggagaaggccagacatcaggaactcaaggccacagaggaacgcttgaagaaggaatccagccacagcctccagatccaacaccagacacaccgactggagctccaggccttggaggaaaaggccaggcaagagctgcaggaggagcgtgagaggatgcaggcacagcaggccctgctgctagagtcgctcagacaggagctgtcggagcagcaagctgcctgttctgggcaccagaaggacttggaggcactgcaggccgagctgagggctctgggcagacagcaagccagcagccagtgtccaggagacagcaaggatcacataatcgccacagaggagcggggcggcccgggccaggccggctccccaccgggcgctgctgggcagggttccggcgagggatgcgggctctgggaggagaacgcgcagctccaggacgcggtgcggcggctgcgcgcggaggtggagcagcatcagcaggaggcgcagaagctccgagaccagcgcaggttcctggaggagactcagcaagcccagcgggccagggaggtggagacactgcgccaggaacaccggaaggagatgcaggccatggtggcagatttcagtagtgcccaggcccagctccaggcccggctggctgccctggaagccgaactgaaagattccggagagaagccagggaagggagcgtccaggcccgaggaccttcagctcattggccgcctgcagacccgcctgaaggagagagaggacatcatcaagcagctcacggaagagagaagatttcactacgcagcattccccagtgccatgtcccaccggaatcggtctttctctttcaatcctcacccgggatatttgaccccttccatgaagaaaaagaaggtggaggacgtgcccagccgcgtggtcagcgtgccgaacctcgcctcctatgcaaagaactttctgagtggcgatctgagttccaggattaatgcccctccaataactacatcacccagcttggacccaagccccagctgtggccggacctacaaacccaaccagtctacagatgcaaaaactgccacaaggaccccagatggtgaaacggcccaagccaaagaagtccagcagaaacagggctctccgcaccaggaatggttcaccaagtacttttctttctaagctaacctttgggatacatcacagaggatacttgaaaaacatttattttaaatcatccgattgaaggaatgaactaacaccaaccaaccaaataatatgcttatgatttatatatgatagctaaaacaaattttggcgttaacacttcatactgttctgccaggcacagcagctcacgcctgtaatcccatcactttgggaggctgaggcagatggactgcttgagtccaggaatttgagaccagcctggccaatatggtgaaaccccatctctacaaaatatacaaaaattagccaggcatggtggcgtgtgcctgtggtcccaggtacttgggggactgaggcgggaggatcacttgaacctaggaggcagaggttgcagtgagccaagttcgaactcctgcattccaaccagcctgggtgacagagggagaccctgtctccaaaaaaaaaaaaaaaaaaaaaaaaaaaaaaaaaaaaaaaaaaaattgacattaaaccagtgttattaaaagtcatctataggaaaatgttattagcgttactaatgacccataccttgtatttctagtgtccataacatcatactccattttgtggaacatcagactttgtgatttccatgatctatttcaaaagtggttgtacttgtccttaggatgctagtcaactccactggaaagctgtttctatgtaaaatgatgcaattccaaaatgcacatctaacctcaataggaagacaaataacagttaaacaggaaagccaactaaaaacaaaccaaacctaccagaaatggatggtagcatgcttggactgaatactttcacttccttggtctaagacaagcagcagattatagatgggataacacccacctctaaaagggctttgcaaggattaagcaagataacataaattaacatgaattggaattaagtaccacaaggtttttctgtaaataaccaatcctagcccagttataggtctcagtgtaatgaccatagtgccaacatgatcacttgtgaaggtctctagattatctgttctttgaagtcaaagatcttctagactgggcacatggctcatgcctgtaatcccaacactttgggaggctgagatgggaggagagcttgaggccaggaatttgagaccagcctgggcaacacagcgagacctccatctctacaaaaaaataattagcccaaagaaaacccagctacttggaagtctgaggtaggacagcatgagcccaagagttcgagaccagcctgggcaagatagtgagatcccatctctacagattaaaaaaatatatatatatatcccctgaacctctggtctttgggtttgagccatttgcctcatggtgtgttgcttcttcactgcatgaattcccagtgggttaaaggaaccgcaatggctgttcacggtgctgaccttgctctcagtccacactgatttgtcttaccttctgacagagcaatgtgatttgacaagactcaataacaacttttagggggcaaaatattttttcagtctttggtgctggcccagaaggtggcccacaaaccaatgttaattctatgcattgtcaaatctttgctctttgaataaaactttgaataactgggcaataaaaatg

SEQ ID NO: 32250 - DNA, 2544 bp, Homo Sapiens
ggcgcgcccaagatggcggcctccatgtgcgacgtgttctccttctgcgtgggcgtggcgggccgcgcgcgggtctccgtggaagtccgtttcgtgagcagcgccaagggaaaggggctgtttgccacacagctcatccggaagggggagaccatcttcgtagaacggcccctggtggctgcacagtttctctggaatgcactttatcgctaccgagcctgtgaccactgccttagggcactagagaaggcagaggagaatgcccagaggctgaccgggaaaccaggccaggttctgcctcacccagagctgtgcactgtgcgcaaagacctccaccagaactgtccccattgccaagtgatgtactgcagtgcagaatgtcggttggcagccactgagcaataccaccaggtcctgtgcccaggcccctcccaggatgaccccttgcatcctctcaataagcttcaggaggcatggaggagtattcactacccacctgagactgcaagcatcatgttgatggctaggatggtggccacagtgaagcaggcgaaggacaaggaccgttggatcagactcttttcccagttttgtaacaaaacagccaatgaagaggaggaaattgtccataaacttctgggagacaaattcaagggccaactggaacttctgcggagactcttcacagaggccctctatgaggaagcagtcagccagtggttcactccagatggattccggtctctctttgctcttgttgggaccaatggccaaggaatcgggaccagctccctaagccagtgggtccatgcctgtgacactctggagttgaagcctcaggaccgtgagcagcttgacgccttcattgaccagctatacaaggacatcgaggcagcaactggagagtttcttaactgtgaaggatctggcctctttgtgcttcagagctgctgcaaccacagttgtgtgcccaatgcagagacctcctttccagaaaacaacttccttttgcatgtcactgctctggaggatattaagccaggagaggaaatttgtatcagctacttggactgctgtcagcgggagcgcagccgccacagccgccacaagatcctcagggagaactatctatttgtctgttcctgtcccaaatgcctggcagaggctgatgaacccaatgtgacctcagaagaggaagaggaagaggaggaggaggaggaaggagagccagaagatgcagagctgggggatgagatgactgatgtgtgatgttgccctgcccagaaagggccctgccctagaccctgccagaaaagggggctcttcccccagagaagtggcttggagggaacttcccactcccattgcctgctttccccattccagccctctctgctagagggtaggagagagcctggatctctggccccaacccccaccagacctcatgccctggacactgctgctgagttggctcagactctgcactggcactgagcctttcacaactggcctccccttgaggttcctccactctagggtttgaggggctggaatcagggccagggcctaacagtgtttcttcccctcggccccacggcccatactcaccccttcacctgaggcttctcccctctcaacttgctgttgatttcttttgaggggtaaaagaaagaccgagttcattgaagcagagatgggaggtggtgaggcgtcctcacctccccccaccacagctgtggctggtaaggcaactgcttgaccactggcccagcaagcagaggcgggcaggaggatctgggcatcctgagccccttccctgaggctgtctcctgggaatgctggaccagggggattacttcccccacccacacccccatttggacatctggggaagtggagattaacccctcccccagactcgtgccttgcctctcaggacctggcacagtggctggccttatggagtatggaaaaggcctctgccttcctcaggagggacacatagtgggtcatcaccctttctcacacctgcttcccaatgagcactcagcagcatggctgagacctggggcttgacaggcctgcgctccttagattaggatgctctggtattcctggggccagttaaaatgggtcagtgaggggctctcctggcctcaatctccatctttagggtctccacagactaacattgaagtcttccagaaacctcgaggagctgggctagatacttcgagagtagccctgtcttgtcccctcctacccccagattagcaccacccctctcactcttgggttggatgctatgggaattacaacccatcactcccaatgcctccctttcctggaggagcctgctgcattctcctgctgagggatcccagagagggcaggtgcccaccccacaggccctttcctggaccatggagccaggtgaaacctgtctggccccttacccattgggttcttactccttcacaacggtcagcactcctctcccagcccccctgcccactgttctcaataaaatgtgagtggtga

SEQ ID NO: 32251 - DNA, 8123 bp, Homo Sapiens
cctgcggcgctggagccttgacgcacggagctcgagagcgagaacgggagagaaaggggtagaaatggcggctccgctcggctcccgctgaggagggcgaagccggcggagtgtctgtgctgccggtctgcagcaccgcccccgcttcccgcacgccgcctgctcacgccgacttcccttcctctgcccggctctctcttgtgctcgtctgcgctccgcacgctccgggccggctcgtctctcattgcccggctcggctccgctggccctgactgaccggccggcgggccggccttgctcggctctcccgggcgcggcgtggactccgtccccctggctggaccatggtgaacacccggaagagctctctccgccttctcgggtccaagtctcctggtcccgggcctgggcctggggccggagcagagcctggggcgaccggaggcagcagccatttcatctcctctcggacccgctcctccaagacccgcgccgccagctgccccgccgccaaagccgggggaagcggtggcgccggcgtcactctggatgaggccaggaaagttgaagttgatggtagtttaagtgatagccacgtatctcctccagccaaacgcactttgaaacaacctgattctgtttgcaaagacaaatcaaaatcacgaagtactggtcagcgagaggaatggaacttatcaactggacaggccaggttaacttctcagcctggtgctacattaccaaatggacatagtggcttatcccttcgaagccatccccttcgaggggaaaagaagggagatggggacctttcttgtataaatggtgacatggaagtcagaaaaagttgtcgttccaggaaaaacagatttgaaagtgtgaaccagagtttgttatttgatcaactagtaaatagcactgctgaagctgtactacaggaaatggacaacattaacatccgacagaatcgtcgatcaggagaagtagaacgacttcgaatgtggacagatacagaatttgaaaacatggatatgtattcaagagtgaaaaggcgaagaaagtcactaagaagaaatagttatgggatacaaaatcatcatgaagtttctactgagggtgaagaagaagctagaacctctaaattgcttcctttggagaaaatcagtatagaatctcaagaggaggatggagatatagaagttgaagaggcagaaggagaagaaaatgatagaccatataatttgagacagagaaaaacagtggatcgataccaagcacctccaatagtaccagctcatcaaaaaaagagggaaaacacgctgtttgatattcatagatctccagcaagaagaagccatattaggagaaagaagcatgccattcatagtagtgacacaacttcttctgatgaggaacgctttgaaagaaggaaatcaaagagcatggcaagagcaagaaatagatgtttgcctatgaacttcagagcagaggacttagctagcggtattctccgagaacgagtgaaagtgggtgcaagcttggctgatgttgatccaatgaacattgataaatcagtacggtttgatagcataggtggattgagccatcatattcatgcgctaaaggaaatggtagtattcccacttttatatccagaaatttttgaaaagtttaaaattcagcctccaaggggctgtttgttttatggccctcctggcacaggtaaaaccttggttgccagagcattagctaatgaatgcagccaaggagacaaaaaagtggctttttttatgcgaaaaggagcagattgtttgagcaagtgggttggtgaatctgaaaggcaacttaggcttctttttgatcaggcatatttgatgagaccttctataatattttttgatgaaatagatggattagctccagttcgctctagcagacaagatcagatccacagctctatagtatcaaccctccttgctcttatggatggattagataataggggtgaaattgttgttattggtgctacaaacagacttgactctatagatcctgcactcaggagacctggtcgttttgacagagaattcctcttcaacctgcctgatcaaaaggcaagaaaacacatcttacagatccataccagggactggaatccaaaattgtcagatgcatttttaggtgaattggctgaaaaatgtgttggctactgtggagccgatatcaaggccctgtgcactgaagccgccctgattgcactgcggaggcgttatccccagatctatgctagcagtcataaactgcagctggatgtttcctcaatagtgcttagtgcccaagatttttaccatgcaatgcagaatatcgtgcctgcttcccaacgtgctgtgatgtcttcagggcatgcactatcccccatcataagaccactgctggaaagaagcttcaacaacatcctagcagtcttgcaaaaagtgtttcctcatgctgaaattagccagagtgacaaaaaagaagatatagaaactttaattttagaggatagtgaagatgaaaatgctttatcaatttttgagaccaattgtcactcaggatcaccaaagaaacagtcatcatctgctgctatacataaaccctaccttcattttacaatgtcaccatatcatcagccaacctcttacaggccacgcttattgctctctggagaacggggctcaggtcaaacttctcaccttgctccagcacttttgcacactctagaaagattctctgtgcatagactagatctcccagcactttattcagttagtgccaaaacacctgaggaatcatgtgcacagatttttcgtgaagctcgaagaacagtacctagtattgtttacatgcctcacattggggattggtgggaagctgtcagtgaaactgtgagagcaacttttctgacattgctacaagatataccatcattttcacctatatttttattgtctacctctgaaaccatgtacagtgaactgcctgaagaggttaaatgtatctttagaatacagtatgaagaggtcttgtatattcaaaggcctattgaagaagacagaagaaaattttttcaagaattgattctcaatcaggcatcaatggctccaccacgaaggaaacatgctgctctttgtgctatggaagtgcttcctcttgcactaccttctccacctcgtcaattatcagaatcagaaaaaagtcgaatggaggaccaggaggaaaatactttaagagagttgcggttgtttctcagggatgtaaccaagaggctggccacagataaacgctttaacatcttcagcaaaccggtttcagattatcttgaagtaatcaaggaaccaatggacttatcaacagtaataactaaaattgataaacataattacctgactgcaaaggatttcctgaaagatattgacctcatctgtagcaatgctttagagtataatccagataaggacccaggagataaaataattaggcacagggcttgtaccctgaaggacactgcacatgctatcattgcagctgaattagatccagaatttaataaactttgtgaggaaattaaggaagcaagaataaaaagaggcttatcagtaacatcagaacaaataaatcctcatagtactggagctcggaagacagaaactagagtcgaagaggcatttcggcacaaacaaagaaatccaatggatgtgtggcacaactctgcaaataaatgtgcatttcgggttcggagaaaatcaaggcggagatcacagtggggtaaaggaattattaagaaaaggaaagttaataatttaaaaaaagatgaagaagacaccaaatttgcagactatgagaaccatacggaggacaggaaattattagagaatggagagtttgaggtaagcactgactgccatgaggaaaatggagaagagactggagacttatctatgaccaatgatgaatcatcctgtgacatcatggacttggaccaggggcagaggcttaacaatggagcaggcacaaaagagaactttgcatctactgaggaggaaagttcaaatgaatctctactggtcaacagcagcagttccttaaacccggagcagacctccaggaaagagactttccttaaaggaaattgtctaaatggtgaggcttccactgacagttttgaaggaataccagttctggaatgtcagaatggcaagcttgaagtagtttctttctgtgatagtggagataaatgtagttctgaacaaaagattcttctggaggaccagtcaaaagaaaaaccagaaacttcgactgaaaatcatggagatgatcttgagaaactagaggcactggaatgtagcaataatgagaagttagaacctggctctgatgtggaggttaaagatgcagaactggataaagaaggtgcttctaaagtaaagaaataccgtaaattaattttagagcaggcaaaaacgacaagcctggaactggttccagaagagccatctgagcctgtgcctcctcttatagttgatcgtgagagattgaagaaattgcttgatttgttggtggataaaagcaacaatctggcagttgatcagcttgagagattatattctcttcttagtcagtgtatctaccgtcatcgtaaagattatgacaaatcacaacttgtagaggagatggaaagaacagttcatatgtttgagacattcctatgaacttttcaagatgagtggtttatcctctccaatctgctcctcacagagcagtcttctgagccattcaatttcaaattgcaccaattatgtgcagagccttggtgtaaagtgctctctcactcattctttctctctgttgaatttggtgctattgtctcaggtacctgaaaccaaccagcctacaagaaccaaacagaacttcagaaacatgttgtattttccacaaataaaaaatacaaccccacagcttggagattttggtgctacagaaactgctctcgcttctgctcctctttttgtgcactctcttttggagactcctctcttagggagcagaccagcaaacaggaggaaactggatgggggcagttctaactgtgttgaattgtttaaacagtgggcaacttgttatttttttttcctccattttacccctttaatcatatttttcccccatctgggtaatggactgaaacctgttttagagttggctatggtctgttctggtgggaagctgaagaaactggatgaaattaggtcaggctctttagaactgcctttaacgtgcctttttattcatttgaggaagataaggctaaaaggatgggctgtttgaagcaaataaattagaaatatttctttggtcacaaccttgaaaataagttttgatactctatgtcattaagagacaaccagtgtttgggtatgaaatgcctgtcttattctcaaagctcaatcaagacacccagtaagccacataatatactaaaatggtaagttttcttgtaaggtctgttttggtttaagaaacatgaataacaacaaagaataatacacagtccacacacaaaaaaacaaaaaacaaaactgcacacgttttggtattgccaacaatgatgactagaaaataaatagatagtggccattttttcttctgtcagtggcaatttaatagttattcatgtttgagttcccagagaaaaatggttttcatatgtagtaaattgttgttttgttttaaagccaggacttgccaaatggacagaaaagagaggaattcatcagaagctccataaaattcattttctgtatgcttaattgcaaacgagctctggtatggtccttgaataacagtattaatgtttaaatcccatctcctaagcttaccttcacaactcttctttttgattggaaaccattttgaatcttgttgagtgatttctgtgaattgtatgtatctgaaattaattatgggttactagttttacaaaaactttctacaaatttggagacacagtctaggcagttgcaatgaggcaaaggatgcagtgactttttttatcagatgatttttaaacaaaaagaaaattttgccagcaagttggcttggtatcttcattcattgtagccgttagctgcaggtgtgtctttccaatatatgcaacacatgtagtttgggttttaattagggcgaatggtcttggactactgcagagattctgagctacctcagctttttgtattttagttaccaacagtgtttacagagtcttgtaatcactttgccaccgtttacatcctgaagctaaggtacttgtctccttgtctttggctctttgtagtgtgcagaaagcatactttggccatagcctactgcagtaatccaaagtgcttctttgcatttacatttacatctaacgccttctaattctagcttaatttttttttaaatgccacgtgttttctttgtacctagtctgtgaagtttctgtaatatccagttagtcatacaagtcaagatgctacccatgtagacacactgtatttttaaggtgggcaagtgcgattaacgatgaaccattttaaaggggaggttatttgaaacctctaatttgattattgggaggattttcatgctttctttagtatttattaccatcataccgattcaaactattttattgtctaatacattagcattttgtattttgatggaaattgttacagaatttaaagatttgatgaaataagatgtagcagattttttgtagcaagtttctggtaaaagggttttttgcaagtctcaggttcttgctgcactatttttttttaaatatttattccagttattctaattcagaagcattcttttcaagtaacagcagcacttgtgaaaggaaaaaaaaatgcacatgtttcttagtaggttactaaatttgtacaattaattaagattttagccatcagtgagtttgaaaagggaaatgtatttattttcagcattaaaatgcttccaaaagatcaagttgcttttgtttgtttgtttttttaaccgtaatgtagatggagaaattggaggcaacctcagtataggaactgccactttgaacagtttaggtcttaaagagaaagtcaatctaatgccaaggggagaacaatgagctgaaattgtaccaactcctctggccctccttccctcaattaaaaaaacacacttaccagttttgcttattttacagatatctggtggttctatagtttaaagcagcttgtgaaattaaaaaagtggactcaattttgtttacctttctgtaagtttttcatttttgctgtatagcattggcaaaaatatgtacaaattgacctctgttcttatttcctattgtgagcattataaagataagctcctatgtaaaaccttgctctcagatgagtaaaatatgtatcacagcatagctcagcaataattcatgctcagctgtggggaccctgggggctttttgaagatgatggaaccgcactagggttgaaactgatggctgtggagttaattgtgttttcgagcttgaatctcacctgtgattttttttttttaatgttgtttcatgacttgatttttctcataagccaatgtatttgtaggtttactggattttatttttagggagtgggtaatttcttcccttttttgattaagttggttcagctatggtgctattcagtaggtatcttcagtgtcaggtcccgtagctgaatgccattgttattataattattatttgtaatcacattgtaagcttgaatttgggcttgtacctgcatcttttgtattctgtacatctggttacttagactttgggagtccaatttggtttcagtcatgtatgtctactttgtagtttaagtagacttcatcaactatggtctattttgggtttgtagttttaatttagaattgtgttaaattgatgttttgcatttgacttcatttgacattagttgaagtaaattatttaatttttgaattctggaatttgaacatttactgtaatttgtaatataactgctgtgaaatacttgaataaagatgacaag

SEQ ID NO: 32252 - DNA, 3918 bp, Homo Sapiens
atggtagaggaaagagtatgggtcacggcaggtgcagagctggaattcaagtcggcgctggggctcagctggagaggatcctggcggcaaagcttgcgaattacacatataaatcagggagaggaaaagcaagcggacttcctgcagcccttgggggttgggagtgggcccacgcagcctggacagaactggaggaggggtgcacctgcagctctcagcgccccggctgacctcgaggaccccagcagtgcccagcaacccgagcggaggcggccgctgcagcccggcgctgaatgggctggcggcgcccggctccgtcctgcccgcggccggcccccgcgtctgctccctccccgcccgggcccctgtcggccgccgccagtccccgccccgactgtgaatgaaaggcgggcgccgccgagggctggctgggaacgccgcagcgacgccggcctctcgagaggcgcgcgccccgccgagatgtacggtgtgtgtggctgctgtggtgccctacgccccaggtacaaaaggctggttgacaacatcttccctgaggatcccgaggatggtctggtgaagaccaacatggagaagctgaccttctatgccctctcagctccagaaaaacttgatcgtattggcgcctacctctctgagaggctcatccgtgacgtgggtcgccatcgatatgggtacgtgtgcattgctatggaggctttggaccagctgctcatggcctgccactgccagagcatcaacctcttcgtggagagcttcctcaagatggtggccaagctgctggagtcagagaaacccaacctgcagatcctcggcaccaactcgtttgtgaagtttgccaacatcgaggaggacaccccgtcctatcaccggagctatgacttctttgtgtcccgattcagtgaaatgtgccactcgagccatgatgacttagaaatcaagaccaaaattcgaatgtcaggcatcaaaggcctgcaaggggtggtgaggaagacggtgaatgatgaactgcaggccaatatctgggacccacagcacatggataagatcgttccatcactgcttttcaatctacagcatgtagaggaggcagagagccggtctccctcacccctccaagcacctgagaaggagaaagagagccccgcggagctggctgagaggtgtcttcgggagctgctgggccgggctgcctttggcaacatcaaaaacgccatcaagcctgttctcatccatctggataaccattctctttgggaacccaaggtgtttgccatccgttgctttaaaatcatcatgtactcaattcagccgcagcactcacacctggtcatccagcagctcctgggccacctggacgccaacagccgcagcgctgcgacggtgcgcgcgggcatcgtggaagtcttgtcggaagccgcggtcatcgctgccaccggctctgtggggcccacagtactggagatgttcaacacgctgctgaggcagctgcggctcagcatcgactacgcgctgaccgggagctacgacggggcggtcagcctcggcaccaagatcatcaaggagcacgaggagcgcatgttccaggaggccgtcatcaagaccgtgggctcctttgccagcacgctgcccacctaccagcgctccgaggtgatcctcttcatcatgagcaaggtcccgcggccatccctgcaccaggcggtggacacaggcaggacgggggagaataggaaccgtctgacccagattatgctgctaaaatccctcctgcaggtatccacaggtttccagtgcaacaacatgatgtcagccctgcctagcaacttcctggaccgccttctctccaccgccctcatggaggatgcagaaattcgactctttgttctagagattctcatcagtttcattgatcgtcatggcaaccgccacaagttctctaccatcagtaccctcagtgacatctctgtcctgaagctgaaagtggacaagtgctctcgacaggacaccgtcttcatgaagaagcactcccagcagctctacagacacatctacctgagctgcaaggaggaaacaaacgtgcagaaacactacgaggcgctctatggcttgctggccctcatcagcatcgagctggctaacgaggaggtggtggtggacctcatccgtctggtgctggctgttcaggacgtggcccaagtcaatgaggagaacttgcctgtctacaaccgctgtgccctctatgctctgggcgcagcctacctgaacctcatcagtcagctcacaacagtgcctgccttctgccagcacatccatgaggtgatagagaccaggaagaaagaggctccatacatgctccccgaggatgtgtttgtggagaggcccaggctgtctcagaatcttgatggggtggtcattgagctcctcttccgccagagcaagatcagtgaagtcctgggaggcagtggctacaactcggaccggctctgcctgccctacattcctcagctgacagatgaggatcgtttatccaagaggaggagcattggagagaccatctccctgcaggtggaggtagaatcgaggaacagtccggagaaggaggagcgagtgcctgccgaggagatcacctatgagacactgaagaaagccattgtggacagcgtagcagtggaggagcaggagcgtgagcggcggcggcaggtggtggagaagttccagaaggcacccttcgaggagattgctgcacactgcggggcccgggcatcgctgctccagagcaaactcaatcagatctttgaaatcaccatccggcccccaccaagcccatcaggaaccatcactgcagcctacggtcagccgcagaaccactccatccccgtctatgaaatgaagtttcccgatctgtgtgtatactgaattccaagagcctgagctcctcaaggagatggggtctgaggaggggctcacctcacgcccaccccgaccacatggagatctggctgtgatctctgagaaaacatcaccttagatggcagcgcctcccaggctaagccaaggtggagactctctggtccttcttggccctcctacctcctcctcgtcttccctgagggaggtctcaccaatcagcatctcacctgtgccctctttgtcttctcttgtgtcagccaggggcagagaatcatggggtgtctctcaggagaagccggggggagggggctgagaagctcctacttggtgttttgagtgaagggcatgtcctccccagaggacggagctggatggagacttggttggtgagaggaagctaaggactctactccccctgctccccgcccatgtccctgctgtgtctctcactctcttgctcatctcccagttgtctgttcatgtttctttctactattaatgaatgctgagcccttataacaggagctggggtggagacatcacgaggggtcgggggacagcaaagggcaggaagcaggatgcagggctggcaggaggtgggcctgtggcatcagcaggcccagcgggcgagtgtggtccctgcagcagcttcccacctcctttgttcataaggagcttgtgttggcctcccacagtcctgtctgctggacgtttttcagagttgggttctctctctttgatgtctttcttctgagggtcccaaggtgttcctggagcttctgggttgaggaaaggcagagcaagataatcttggaggggaactacagggtccccaagatttgcccacatcacctcctatggaaaaggctcccagcctgacctgggttgtaggagagtggggagggtgggatgagtggtgttttggggctcaaggatatcagaagccaactttttggatgttccgtttgaagaaagaaggatctaacacct

SEQ ID NO: 32253 - DNA, 5803 bp, Homo Sapiens
ataacagccaatgcagccgccatccacgcacaagcaaagaagcatgtcccatttaaatacacccacgcagccccagcgcccttagccgatcggggcgctcagcccacacgcaccgctgctcggggcttggagatccgcgcaggctgggctcccggacccggcggaccgacgcgcggaggatcgggatccggcgctgtggggctggggtgggcgggggaggctgggcccggggcctctggcgcgacacccgcatgaggacgcgagtgaaatagaccaaggtggaatttccaagggaaaagcttcggggtggttttggtccatttctccagcgaagaagtagacatggcgagcgactccccggctcgaagcctggatgaaatagatctctcggctctgagggaccccgcagggatctttgaattggtggaacttgttggaaatggaacatacgggcaagtttataagggtcgtcatgtcaaaacgggccagcttgcagccatcaaggttatggatgtcacaggggatgaagaggaagaaatcaaacaagaaattaacatgttgaagaaatattctcatcaccggaatattgctacatactatggtgcttttatcaaaaagaacccaccaggcatggatgaccaactttggttggtgatggagttttgtggtgctggctctgtcaccgacctgatcaagaacacaaaaggtaacacgttgaaagaggagtggattgcatacatctgcagggaaatcttacgggggctgagtcacctgcaccagcataaagtgattcatcgagatattaaagggcaaaatgtcttgctgactgaaaatgcagaagttaaactagtggactttggagtcagtgctcagcttgatcgaacagtgggcaggaggaatactttcattggaactccctactggatggcaccagaagttattgcctgtgatgaaaacccagatgccacatatgatttcaagagtgacttgtggtctttgggtatcaccgccattgaaatggcagaaggtgctccccctctctgtgacatgcaccccatgagagctctcttcctcatcccccggaacccagcgcctcggctgaagtctaagaagtggtcaaaaaaattccagtcatttattgagagctgcttggtaaagaatcacagccagcgaccagcaacagaacaattgatgaagcatccatttatacgagaccaacctaatgagcgacaggtccgcattcaactcaaggaccatattgatagaacaaagaagaagcgaggagaaaaagatgagacagagtatgagtacagtggaagtgaggaagaagaggaggagaatgactcaggagagcccagctccatcctgaatctgccaggggagtcgacgctgcggagggactttctgaggctgcagctggccaacaaggagcgttctgaggccctacggaggcagcagctggagcagcagcagcgggagaatgaggagcacaagcggcagctgctggccgagcgtcagaagcgcatcgaggagcagaaagagcagaggcggcggctggaggagcaacaaaggcgagagaaggagctgcggaagcagcaggagagggagcagcgccggcactatgaggagcagatgcgccgggaggaggagaggaggcgtgcggagcatgaacaggaatacatcaggcgacagttagaggaggagcagagacagttagagatcttgcagcagcagctactgcatgaacaagctctacttctggaatataagcgcaaacaattggaagaacagagacaagcagaaagactgcagaggcagctaaagcaagaaagagactacttagtttcccttcagcatcagcggcaggagcagaggcctgtggagaagaagccactgtaccattacaaagaaggaatgagtcctagtgagaagccagcatgggccaaggaggtagaagaacggtcaaggctcaaccggcaaagttcccctgccatgcctcacaaggttgccaacaggatatctgaccccaacctgcccccaaggtcggagtccttcagcattagtggagttcagcctgctcgaacaccccccatgctcagaccagtcgatccccagatcccacatctggtagctgtaaaatcccagggacctgccttgaccgcctcccagtcagtgcacgagcagcccacaaagggcctctctgggtttcaggaggctctgaacgtgacctcccaccgcgtggagatgccacgccagaactcagatcccacctcggaaaatcctcctctccccactcgcattgaaaagtttgaccgaagctcttggttacgacaggaagaagacattccaccaaaggtgcctcaaagaacaacttctatatccccagcattagccagaaagaattctcctgggaatggtagtgctctgggacccagactaggatctcaacccatcagagcaagcaaccctgatctccggagaactgagcccatcttggagagccccttgcagaggaccagcagtggcagttcctccagctccagcacccctagctcccagcccagctcccaaggaggctcccagcctggatcacaagcaggatccagtgaacgcaccagagttcgagccaacagtaagtcagaaggatcacctgtgctcccccatgagcctgcgaaggtgaaaccagaagaatccagggacattacccggcccagtcgaccagctagctacaaaaaagctatagatgaggatctgacggcattagccaaagaactaagagaactccggattgaagaaacaaaccgcccaatgaagaaggtgactgattactcctcctccagtgaggagtcagaaagtagcgaggaagaggaggaagatggagagagcgagacccatgatgggacagtggctgtcagcgacatacccagactgataccaacaggagctccaggcagcaacgagcagtacaatgtgggaatggtggggacgcatgggctggagacctctcatgcggacagtttcagcggcagtatttcaagagaaggaaccttgatgattagagagacgtctggagagaagaagcgatctggccacagtgacagcaatggctttgctggccacatcaacctccctgacctggtgcagcagagccattctccagctggaaccccgactgagggactggggcgcgtctcaacccattcccaggagatggactctgggactgaatatggcatggggagcagcaccaaagcctccttcaccccctttgtggaccccagagtataccagacgtctcccactgatgaagatgaagaggatgaggaatcatcagccgcagctctgtttactagcgaacttcttaggcaagaacaggccaaactcaatgaagcaagaaagatttcggtggtaaatgtaaacccaaccaacattcggcctcatagcgacacaccagaaatcagaaaatacaagaaacgattcaactcagaaatactttgtgcagctctgtggggtgtaaaccttctggtggggactgaaaatggcctgatgcttttggaccgaagtgggcaaggcaaagtctataatctgatcaaccggaggcgatttcagcagatggatgtgctagagggactgaatgtccttgtgacaatttcaggaaagaagaataagctacgagtttactatctttcatggttaagaaacagaatactacataatgacccagaagtagaaaagaaacaaggctggatcactgttggggacttggaaggctgtatacattataaagttgttaaatatgaaaggatcaaatttttggtgattgccttaaagaatgctgtggaaatatatgcttgggctcctaaaccgtatcataaattcatggcatttaagtcttttgcagatctccagcacaagcctctgctagttgatctcacggtagaagaaggtcaaagattaaaggttatttttggttcacacactggtttccatgtaattgatgttgattcaggaaactcttatgatatctacataccatctcatattcagggcaatatcactcctcatgctattgtcatcttgcctaaaacagatggaatggaaatgcttgtttgctatgaggatgagggggtgtatgtaaacacctatggccggataactaaggatgtggtgctccaatggggagaaatgcccacgtctgtggcctacattcattccaatcagataatgggctggggcgagaaagctattgagatccggtcagtggaaacaggacatttggatggagtatttatgcataagcgagctcaaaggttaaagtttctatgtgaaagaaatgataaggtattttttgcatccgtgcgatctggaggaagtagccaagtgtttttcatgaccctcaacagaaattccatgatgaactggtaacagaagagcacttggcacttatcttcatggcgttatttctaatttaaaagaacataactcatgtggacttatgccagtctagaggcagaatcagaaggcttggttgaacatatcgctttccctttttcctctccctccgcccctcccagtacagtccatctttcaatgttgcagcctggttgagaaggagagaaaaaggtggcaggaatttccaggagatccccaagaatgctgccttgtctgtggacaaagatggaccatgtgcccttcggaattagggatagaaacaaatattgtgtgctcttaacgattaagctgtgttatggtgggttttcaggtttttaccttttttctttacccctttactctgcaagaatggggaaagaatgcatactgcgaaaatgagtcttttaaattctgtctgcctactagttttaagtatatggtatgttgtaaaatttccaatgatgagagacagcacaataaatgtaccttatctccttaggctgaaggccataactacatagtggagtaatttaagaactctcttgccttcaccaacccaaaaggttgctttttgatagcaactggctaatgaatttttaaaaagagaagaaaaatactagttttcccctcttttgggaaatagattttaaatggctaaactactagccttaaaactactagtctaataaaatcaactaccacttttgtgaatctgacaggccacatttttatatggccctttacagaatggagtgtgttgaacaggatactaacgccattgagttgagctggcctagcgatggagggacactctaacacaactttccctcagctattatgcaacagatcagggaaaaagatgggatgacagatggggtcagacagaaagagcttctgggaaacaagcttacatagtcttttttaaaatgcacaaagcctcccagctaagaggtcacttggtttgggcttcattaggactgagactttgttgagttctttctgggacttggagagtggatgatattcaggctctgaacattcccagcgctctcccgagggtgccactttctcaagatgaaaactgtgactgaaaaaattaataataaatgtttctgagctgcctgtgttctccctgtgtgggtgagagaagggactagactcctaagcctgcctcagatacaagaggcatcattggctccaattttagagaacttgaaagcaaggctttggacaaaattttgagaccctaatcactttaccttcctccaaattacccaacatacggtaaacaacatttgtgcagaagtatgtatgtatttagttcaggttgacttgtgtccttataaactcttactcaaatgatttgaacttt

SEQ ID NO: 32254 - DNA, 5292 bp, Homo Sapiens
atgatacagtttacacaattggatgagattgcctttgatcatcagattatttcattaacaaggtttttgagaatttatcacaagcagattattgcgaatagggagctccactataccatgaaaaacctgtatggctacctacatcctgaggttagcattacacttctcccagtggagcccatgacttctgatcaggacgctaaggttgtggctgaaccgcagacgcagagagtccaggagggcaaggacagcgctcatctgatgaatggtcctatatctcaaaccacttctcagacaagttccatcccacctttgagtcagctctcaaacatgggctgctgcttcagcagagaactaagtagtgacaatgacagtgaaaaaactggcctgttacaaaaatctgtggaggaaaaggaaccagaaaacaagataagtaaaactttgtcttcattatttgataccgtcaaaggtgaggaggttcaccgtactggcagtggagccagcagtgtagctggcgttagcgcgcggacaaggattttcgcagggtctgggcacaaacagggtcatagacccaagcagtcattgaaccctctttcctcttttatatatacattctcaacaaggtatgaaaacttgggtgagaatgacaagaattcagatattgttgttaatgagcagaattctgagggggtctgtgatctactgtgtgtgggtaacggcagccgacaaggttgttgggaagatgaggagcttttctcatgtgtgctggtgccttctgaccgaggcctgcaggaggaagcctttgtgagtggccatctgcactgttacccagctacttgtaaaaactctttagtagagaaagaaatggtggtcagcgttcacctcagcagtggtgatgagagtaagtctttagacctatccgatagggagaggaaagatggaaaccctgttggtattgatgatcagcaatgtcaggattcaggagagtgcaagtttcacagcatttgtgttgccgactctgcctgcccaagcgtggcagaggagctgggcacctgggtagacacagtagctgcaagaggagagtgttgctcttcagtgccttcagcctcgcgtgccatgtcaggggcgggcgagccagagccacggcaggaagaactctcgccttgggacacgctgggtccaggtgaaaggacaggggaatgcagtgggaaagccaagccttgccctgagcctgtggcgttcagccatgcaccttgtgaagcaaacactgataacgtgcagatggaggctttacaggcagaagcttgcactgaattccctaaaaattacgcagaaagtagtgcactacatggtattgacctactccctgaattaaataacaacatggacagtgactcactaagtcatgcgtgtgtcctgggagaaagtgagagctgtaactcaggagtaggaagtgagatggatcatccacctggtggcttccgtactgacactgcacattcacctggtagcttttgtactgacactgcatgtgttgcagggagtgatgacccggaggtggtaacagttgttgtcgaccagagtttacattctaaaaaggagagagaaaataactctatcacaccactaagagacaacgatgatttctacttggacgttaacaaagcagatagtatccttcctgttggtctagatagaattgatttaagtcctaagaggcctatcactgcagtaagatttggaagtgggtgtctctcaggtcacgctaattcaagagaagcagccccaagccagcttgatgactgctgggagccggaacctgtccccagacaagtcaggaaggcacagcgcagaggggactgcagcctggaggccagaagtcccctgctgccagacagaggtgaggtgtctctgcaatctgaaaatagtgccttttaccaagaagaggacagaattggcgtttggaaggctgagggtcatggtgtaagggcttttgagtcaaaatcttggtgtcaagcagatgaggctgcaacacagacctgtgaccaaacttgtgtggagcgtgtggtggacacgcaggggacggtgcagaggacagatggcctaaagcttagcatggcacaaggagtgccccccgatggcaagtctcccagtcactccagatctcttcacagtaactgtgtttcctccgcatttattttcacctgcacagaggaagaagagagggaaacaagcccaggtgacaaaacagagggtgaaatatgtgtgaagagttcagtcagtgtgtcacgagaccagctgagtgaccctcaaaggttagaaggtagtgaaaaagaatcactgcaagcaaagtatagtgagacaagtgaagatgacatagagactgtcaagtcagattctaaaacaacctatgagtgggaaacaggtacacaaagacatgaggcagtgccaagtcaggatgtactctcctgtgttagttctagtgcaacagagaacgctgattttgaaactaatcaaatagaaaaaagttatgaaacacaccgagtatacgactgcaaatataatgttcttagtgtgttaccacatttcagtccaagtgttaatccagttatacagaagtcagaaatagtagagaattctgttagtggtggtaaaagcccaaaatggaagggaatttcctctgaatcaattgaagaagcttctggtatctttggtaataatacatcagggttgagtaaaccaaaactaacatgtaaagaagaggaagagagactttatttggagaaagatagtattgaccccagaattactgactgcctgggtccatgtgggacgagtgaacgtgcacaccatttcaaagaaggaaacgccaagtccactcttacacagtcgactttaaatggtgaaatgggttttatgggaaatgctaaggtgaggtttagcccatgttccacagctgtccatggcagctttggcctcagccccagtgatctgagagtccgttgtccagaacactggactagcagcttcatggtcacctgtggattttctttcaaggtgatactgaagctctattgggaatgggaacaggtaccagcaactaaggtttcagagctgaaccctaatgcagaagtgtggggggctcctgtgttacatctggaagcaagcagtgctgctgacggtgtgagtgctgcatgggaggaggtggctggccaccacgcagaccgtggcccgcagggatcggatgccaatggtgatggtgaccagggccatgagaatgccgcattgccagacccgcaggagtcggacccagcagacatgaacgctctcgctctgggtccctcagaatatgactctctgcctgaaaatagcgagacaggaggaaatgagtctcaaccagacagccaggaagacccccgagaagtacttaaaaaaacattggaattctgcttatctagggagaaccttgctagtgacatgtatcttatatcacagatggatagtgaccagtatgtgccaatcacaacggtggctaacctcgaccacatcaagaagctcagcactgatgtggacttgattgtggaagtgctaagatctttacctttagtccaagtggatgaaaagggagaaaaagtaaggccaaatcaaaatcgctgcatagtaatattgcgtgaaatatctgaatctacccccgtggaagaagtagaagcactatttaaaggagataatttaccaaaatttataaactgtgaatttgcatataatgataattggtttattacatttgaaacagaagctgatgcacaacaggcttacaaataccttcgagaagaagtcaaaacttttcaaggaaaaccaattaaggcacggataaaagcaaaggcaatagctataaacacatttttgccaaagaatggatttagacccctggacgtgagcctgtatgcccagcagcgctacgcgacgtcgttctacttccctcccatgtacagcccccagcagcagttccccctgtacagcctgatcactccccagacgtggtcagcaacgcacagctatcttgacccacccttggttgagcttttcaggttaagtatgagtttttcagaaggaatcaaagagaagtttcatgaacagaagatggtcgtagattcatgggtgtctgagctgaagcgtacaccgggtggcagggagttggggaacgagctggcagtttccaggcctaactgcgcagcgttcaagcctgcggcgtctcctctgacttctctcagacagtatcctcctcgaagcaggcaagttccggggcggaatcctagtaaatctcatctgcggcatgcgattcctagtgcagagaggggacctgggttattagaaagtccttcaatatttaacttcactgcagatcgattaattaatggtgtccggagtccacaaacaaggcaagcaggtcaaactagaacacggattcaaaacccttcagcatatgccaagagagaggctgggcctgggcgtgtggagccaggcagtctcgaatcctctcctggtttagggaggggaaggaagaattcctttggctaccggaagaaaagggaggagaagtttacaagcagccagacacagtctccaacgccaccaaagcctccgtcgccaagcttcgagctggggctgtccagcttccctccattacctggagctgccggcaatttgaagacagaggacttgtttgaaaacaggctatctagcttgataataggaccatccaaagaaaggaccctcagtgcagacgcaagcgtgaacacccttcctgtagtggtctccagagagccctcggtgccggcttcttgtgctgtatcagcaacgtacgagcgatccccctccccagctcatttacccgatgatcccaaggtggcggagaaacagagggaaacccacagtgtggacagacttccttccgccctcactgcgaccgcgtgtaaatcggtgcaggtgaacggagccgccacggaattgcgaaagcccagctacgcagagatttgtcagagaacgagtaaagagcctccttcttccccattgcaaccccaaaaagaacaaaagccaaacactgttggttgtgggaaggaggaaaagaagctggcagagcccgcagagagataccgggagcccccagccctcaagtccacacctggagcccccagagaccagaggcggccggcggggggccggccctcgccctcggccatggggaagcgtctcagccgagagcagagcactccccccaagtctcctcagtga

SEQ ID NO: 32255 - DNA, 6268 bp, Homo Sapiens
gtttcaactcttgcttgaatcaagaacagaagcctctctttagacaggacttatccagagggggctgcaggcgagcactctcgtgccccgccggagcgacccggctcgtgccgggagcggctgctcgtagacgtccgaggagcctgccgagtgccgtcccggcgcccgaccgcccacccatcggcccgctggcccggttcttcctgatgcagactgccgtccactagaggctggacaggaccccccgaggtgattcatggcaggggacgtggaaggattctgttcctccatccacgacaccagtgtctctgctgggttcagagcactgtatgaggagggattgcttcttgatgtcactctggttattgaagatcatcagttccaggcccataaagcactcttggccacccagagtgattacttcagaattatgtttactgcagacatgagggaacgagatcaggacaaaattcatttaaaaggtctaacagctaccggtttcagccatgtcctgcaatttatgtactatggaactatagagctgagtatgaataccgttcatgagattcttcaggctgccatgtatgttcaacttatagaagtggtgaagttctgctgctcttttctcttagcgaagatctgcctagaaaattgtgcagaaattatgagactcttagatgatttcggcgtaaacatcgagggagtcagggagaagttagacacctttctgctagacaactttgtgccactcatgtctaggcctgactttctgtcctatctgagctttgagaagctcatgtcttacttggataatgatcatctgagcaggttcccagagatagagctgtacgaggctgtgcagtcttggctgcggcatgatagaagacgctggagacataccgataccatcattcagaatatccggttttgcttgatgaccccaaccagcgtttttgagaaggttaagacatcagaattttatagatactcccgacagctccgttacgaagttgaccaagcattgaattactttcagaatgttcaccagcagcctttgttggatatgaagtcaagccgcatccgttctgcaaaaccgcaaactacagtatttcgaggaatgattggacatagcatggttaacagtaaaatacttctcttaaagaaaccaagagtctggtgggagctagaaggcccacaagtacctctgcgacctgactgccttgctatcgtcaataattttgtgttcctgttaggcggggaagagctgggcccggatggtgaattccatgcttcttccaaagtattcaggtatgacccgagacagaactcctggctgcagatggcagatatgtctgtaccacgctctgaatttgctgtaggtgttattgggaagtttatttacgccgtagcaggcagaaccagagatgagactttctattcaactgagagatatgacatcaccaacgataaatgggaatttgtggatccttatccagttaacaaatatggacatgaggggacagtgctcaataacaaattgtttatcaccggtggaatcacctcatcttccacctccaagcaagtgtgcgtgtttgaccccagcaaagaagggaccatagaacaacggaccaggagaactcaagtggttaccaactgttgggagaataagagcaagatgaattacgcgagatgctttcacaagatgatttcttacaatggcaagctttatgtcttcggtggtgtctgtgtgatcttgagggcctctttcgaatctcagggatgcccttctacagaagtatacaacccagagactgatcagtggaccatcttggcatccatgccgattggtagaagtggccatggtgtgactgtgctggacaaacaaataatggttcttggaggcctttgttataatggtcattacagcgattccatcctcacttttgatccggatgaaaacaagtggaaggaagatgagtaccctcggatgccctgcaagctggatggtttacaagtatgcaacctgcattttccggactatgtactggatgaggtcaggcgttgcaactaatgacatcctcctccctaaaaaaagaggcaaacaaagtatttgtttgcacagagtaattaattaaaacatataaagaaaaacctcaccagttttactatcaaagccattggtctaacattgtaagaatttttcattctgtgctagcatcctttttttcttttcagtggcctcaaactcatgcaataagttaattctaagtgctagctcttgaaactacttccagaagcagttgaatagaatgctccacttatctgggatattgattttctgctttaaacatttctttcagatgttagcgtaggagtcatgtgtcttctaagagaagacccgataagtgtcactggatgtgatttcagtctctgtctctatctgaaacctttttgaagatttatttcagtgtatttcagtctgttatactttttagttttattatttaaaagtttaaaactcttgacctttttgcatggctttttgctgaaaatgcaaaaatataaattttctacaaaattaactttttatattcaaaacactatttctaagctgccttctcttatccgcattgtgttagtgaaagcatattcatactcgcatacaacctataaatacacaaggcacatcccttttatgcgtggttaggattctatatttttaagctagtgcacttacttgcacacacagttcgccatacttgttgaattttagatgtaacgtcttttcacatattaacatttttagaaagttgaaataactggagtcctcatttgctatcaaagtagcctatcttcagtccatactgattcagtaatatttgaactccttatatttctgaaacatgtatggttatgaaaactaacactttatattttattttcaaaagtaaatgttagtgttctttgtcgatgtatgtcttttctttttgaaaatgtttttctttgcagtctgtttaacgttaccctgtttttagtgagaatcggagtggtatatgacaagttctggccctgcagcatgcaagcacttttaaagagcatttaggtaataccagactcctaaatcaaggccccttaaaagtaagtgcaactcccattttttacattcagtaaggctgctgcatttgttattgaatggaaggtagaaactcttagaaaatttgacctcagttttgacttagaggtaagaaatagaattataatgttactggttttatctacttgtttattttgtacaaaatacccagcgacactagggatgtaagccctcagtttttgttttatttactgaaagctattagcatgaaggatagtaaccacaaagttcagaatggatcaagaatagctgtttaaaagcatttataataagtgttttaggattagctgcacctttcaactctttaaatgcagaggaaaaaacatagttgacaaagttaagcaagaataacctgggagtggatcattgaaattgatgccatttgcgcatgagtagtctatatctgatacagactagatctatactggcaaaacttgccagatcttagaatattggtgcaatattgcaatgccttctatatggctgctgatgtataaattttctagtttcactttgtttggtgttttttgtttttttgtttgtttgtttgtttttttgctgctgccaccattgaacataaaatggaagtgtgaagtcatggaaatgtgaagactttggtttttgggggttttttgggcagttattagacatactatgagattaaacctgatcttcaaactccagaattggaggcatttgggtttaagaaaccaggtacataagtagcttttgaaaaaaccattggcattgatttcaaaaatcaataataatcttattttatatatgagacttatattttcattaactagtcctgtcatttacttacagtttccaaacatgaaatttggtatcttgtttcccatggtaatatgggtaaaagtctttttctacatttaaaaaatacattattttatttttgaaagttaggaataagttagccatttaatttttttctacattagtttagtggctttgtatgtgtgctattttgctttaaagaaaataacgtcttcattattttcctcattgatgtcttttgctagaaaagaccaagaaagagccatcaggccaggtatccacatcaaagcctttacactatagtggtggttctctttaattgcttagatatgacttcatgaccctagtcagggtgacatctgggcaaacatttgagtattcttggtcttccattttaaagacagaggccaagatcaaagttcatgttttgtaaaattcgtaaaatcttaacttgaactaactctgggttcagctttacgtaagtcacgtcggacctgatgttagctgtaatcagttttgagctttaaggatagttgctgttgcttgggttctgaatgtatgagaaaactccctgtttatatgtagttctaatttaggttattttaaatccatgattaacttacattcccttttaaaattatggttttattgctgcaagagatttatttttgttatactaaactatggaaaagtttttcatagcatttttttcaagtttattttttgtgtgcttcatttggagtttttgtttatatacattgcgctcaaaaaagtagttttttgaaaaattcagtaagatttgaatctatacagtttaactgttatgacctttatgcgtgttgttttcactttatatctcaaatgccagagttcacaaaaatagctgatcttcattaattacatcttaattagaaccatttgttctcttccgtgtctttgaccttctaagttttgattttaaagaaattccttgcactacagccttttcttaaaatgcaagattctcactttgaaggttttgtgttggaagaaatgctactggtttttaaaaagcaaagcttaactaatagaattattagcttttcttgagacagctttctgtgtcctcattactctgctctgtgtgagtgttactagaatttgtgaaatactgactgagcccttcacttatcttttctaaagcagcacctttggacacctcattctgggaagcctgctcgagtcatagtaaaggacacacgctttatgtggggagaagtggtaaaaatggagttttgtcttaattacatgaaactaagctttaaaatattttataacagattatttgagctgcataatctaaacatgtcaaacgttcagtgggactatttttatatatgtatatgtgggtgtaggtcataacatttcagtttataatataaattgttatttcagtttataagctatctctcagaggagactagctcttttgagaattcataatttaaagttttagactgaagtaaaatgcaacatagataatagtgtaaatcagatataattgagggctatatggcagtaaaactgctagtgccagttttcttgtttgcctgttatacatttttgatttttgtttttgtattctgaacattttgagagatcatatgtttgttcaattacatttagagttggtttgggaataaatatcttctaaaaagagatttatcttaaaaatggaagtcctaaaaattagtttatccagagtttataaagtcaaatattcagtaggcatagactggaatagataaattcatggaaatcatatcctttcagtacaccgtataacttcaatattacacaagtaacattgaggagaatgccatcagctttgttctcccttaaattctttggttttctttttacattttgggaacaactgcatttaaaatgttattagtcagtatatagtaaggattaggtgtttgctttctgaaggaatggtccagtgaggtgattgggagaggttattttctacctaacttgtatatgccctatacctcttgggcatactttgtctatagaaaaatattttgacctttaggtacattttgggccagtagtcaaataatcctagggccgatataaaaatcttagaataatttaaggtttgccttttatacctgttttgaaagcctttacatttttgtcaggtaatttttcccaagccgtggatataatctattcaaacatgtttatgctatccattctgtttttaaattgaaaaaaatgttaaaagtgtttatgaagaaaagtttaaataaaatatttttaatcttt

SEQ ID NO: 32256 - DNA, 4625 bp, Homo Sapiens
cttacttttccatctcctcccacccagctataccctcccactggcggcgcggatggcacgccggcggagccagcgagtctgcgcgagcggtccgagcatgctcaatagcgcgcgcggcgccccggagcttctccgcggaaccgcgaccaacgcggaggtctcggcggccgctgcgggagccacaggaagtgaagagcttccgccgggagaccgcggctgcaggaacggaggcggaaggggccctgcggcgacgacgtcgtcgacgggggtggccgtgggagctgagcacggagaagactccctctctcggaagccggatcccgagccgggcaggatggatcaccaccagccggggactgggcgctaccaggtgcttcttaatgaagaggataactcagaatcatcggctatagagcagccacctacttcaaacccagcaccgcagattgtgcaggctgcgtcttcagcaccagcacttgaaactgactcttcccctccaccatatagtagtattactgtggaagtacctacaacttcagatacagaagtttacggtgagttttatcccgtgccacctccctatagcgttgctacctctcttcctacatacgatgaagctgagaaggctaaagctgctgcaatggcagctgcagcagcagaaacatctcaaagaattcaggaggaagagtgtccaccaagagatgacttcagtgatgcagaccagctcagagtggggaatgatggcattttcatgctggcatttttcatggcatttattttcaactggcttggattttgtttatccttctgtatcaccaataccatagctggaaggtatggtgctatctgcggatttggcctttccttgatcaaatggatccttattgtcaggttttctgattattttactggatatttcaatggacagtattggctttggtggatatttcttgtacttggcctgctccttttcttcagaggatttgttaattatctaaaagtcagaaacatgtctgaaagtatggcagctgctcatagaacaaggtatttcttcttattgtagagactgcatcaacccgacattcctttcttataccaatgtgaaatttccagatcatctgtaaacctacaactttaatagaagactactaataacagaagacaaattagtgaagaaaagacggagtttcgaaattgaatggcagggtggtttttgcttacaagccatttctgttcattctttaagtatctatatttcatttgttttgcacatatgcatatgtgcccatttaagatatttgcatatacttgatagaaaccataaagttgtagcagttaagtccagtcacatttggttaatcagtgtttgatataattgaaagagttgagtggataaacagtcttccagcttgtaaatgccattgacttctgacctgacatttagtataataaaaatgaaattcttaaccatgtcaaatgatttagtttctggctcttagactcatctggcagttctacacatgaaacatcttttgttatataaggtgtattgaaacctgcagtgctgattattagaaaggatttgtcagatttttgaacatgatatttacattattatttaggaaaactcttcctgtaaataaccatgcataacttactttctgcaatgttttcttagaaattgtgtccagatagctttcactaattttaaattaagtgaactaaatatatatgtgtatatgtatacacatatatatacacacacacatatatatatttagaaacgtgagtgttaaagatagaatttgttttaggacaaattttaagaaaatgtgggaataccaaatgtcctttataagaaaaataaattttattttaagggacatactagttttagggattttcagatgggaagctgcatttttaggattgcccatcttaagagatcttgcaggaagagattgtattagatattatatttatttcatttaagataattttcaaagttaattttctaaataagataattctcatttgtgtttgtcttttaaaaggccaataaaatatctttcagtatcattgtaataattttttagagtttaatttgtaaagcttagcaaataaaatcttgtactatgaatagcttcttgctttatgactttaggattaacttgtaaaaaacatatcctgaactgagatatgcaaaatactcattttcaagttatggaaatgtgtttgtggcatataggactgtggggtctgtgtgtgtagtgagagtgtgtagccactattataactggaatttaatttacattcataaactactatatttcccatcttgcaaatcattttatgtctcatctgtttttcctttcggttatatctttggttttgaataccaacatttaaaatgatggtattttatcttttaaacttaaaaattatttaatacagctatatggaccttataaaattgatttcttatttattattagacattactactaaaaggtacatctaactattcagggacatttttccatttccaaaaaataaaatttattatgctttataacctcttctgtattttctaattttttcattgtctttgataaataaaacagttttgttttgctaatatagcctattttttgttttgtctcattcagtttactttcctgcgtagaatttttattgttatattaaaatttttattgttgtattaaagtacctgtgttacaccccttgaagtaagacagtagcatggggtaaagaaaaaatatttagtttagttgcctaatttggaagttaattaaaattaaactgtactaataacatattcaaactcatgctggatctctttcatattaatttcttatagacctgtactttattctttcaataatttttaaatgaaattaagctttgctacatggtaattaaataattactaggaagcttagctatcaaacatcgacttactaaaatttcattttagcttttatggtatatgtgcttgttttctgaatatggatacatgttacttttgatccagcatcaaaacttcactttttgttttgacttttccccccaaatctgtaaggttcaagtatacatattactgaatcctctataattggcataattcaatggtagccttaaatctcatcatgtaagcaggggaatcagaatgttattttcaagaacttaatgttcccttcagatatataaaatcctgcatacttcatttcctgtgagcttgaacagctgctgttgtgttttggggatgcttgatcatctttgcactctgccttaaagattgaaaaatcaaaactcttgttagggtatctaaacatttttgagtgtgaactggggattggaagttaatacaaaaaaatttcaaattatttctattgtaaatgaataagctagtcatggctaggataatccattttcatgtatttatgcaataaactgaattttaaggcaaaaacaacacttttctatatagtgtatgcaggacagattttagaaacttagattaaaatacaaatcccattacatttggttaaaatgaaaatctctgcttaatggaaaaaatactaatctttagcctattttgagtctataagatatatttcattttagacatgccttctaagttgttcacagatttttacctgctaaaacaatattatttccagtaaaacctctcctaacaggaaaagtggagttcaaaatatccaattggagaaaaattcagagttccttcattaaatataatttttttcatctagtatgtactatttcaagaagtgcaaaaagtaatgatagtgaatgtgataccatacttaactaaggtaatatatatccttagtttgctcaaaagagtcctggttattcctgttttctcagcttaatagtgcctcatcgtactctcaaaagtgttctaatttggaggataagttatatgatcatcctgtgtataattgtagactgtaccaagaagcaactaccttagctccactgccctttgagggatggaactggggtaagggcaggagccagttattattgccacagtgttttctaatgaaccatttggcctgtagaagaggaatagtattttttttaatagttgtatttgaatgattccagcttatcgtaaatactaaactgaatggcttttatatttttaactgctgttaaatgttattttagcatttattagttgtttattatttaattcttcaaatagtcatatgaaaacatatatttgataaaggtcaattgttagatgataatgtgccattcattatcataggaatgtccttgcccatatataaaacatgctggcatgtattttacttgttaataaagttgtatagatgtggaagtgtgaacctgtgatgcatccttttcaaaatcagtttaagattcgcatattatcatgactgtgacctcactaaactgtttatgtgacaaacctttcaagattggagatgaaaacaacacttgtgaaattaggttggggttgcaacatcttttaacttctcagttatttgtatgtcaggagacagattgtggtttaattttaataaacaaaatatcatctttttgaaaat

SEQ ID NO: 32257 - DNA, 8292 bp, Homo Sapiens
gcacaggggtatagatctaaagaagggcagaggggagatctggaaacaggctggctgactccaaatttggcccattggcaacaaaactactatcactgcgagaacgaaaagaaaaacaaaacaaagaaaagaaaagaagttaacttttaaaagtttttttctgaatcagccttgcaaataaatcataaaccgggtcacaggccatattactgcttgaagcagagcaccgaattctgataattttgctccaggaggaggcaagggaattaaaacatggctgggaggtgagcggacgttttgtacgaggttgggttgaatttgcttaagaaggtcgcacgcatctctgataaggaagagaaaaggccttgccaagagaaatatgaaacgcaatgggagcagaaattgtttgaataggagaagtaggtttggttctcgagaaagagactggctaagagaagatgtaaagagaggctgtgtttacctttatggagcagacactaccactgccactacaaccaccaccacctcctcttcctcttcctcctcctcctcttcctctgacttacatctcgtcctttgcactgtagagacaccagcatcagaaatatgtgctggagagggaagagaaagtctttatttacagcttcatggagacctggtcaggagactggaacctactgaacgacctcttcagatcgtttatgattacttatccaggctgggatttgatgatcctgtgcgcatacaggaggaggctacaaatcctgacctcggctgtatgattcgattttatggtgaaaaaccatgccacatggatcgtttggatcgaatcctattgtctggcatctataatgtacgcaagggaaagacccagctgcataagtgggctgagcgcctagttgtcctctgtggtacctgccttatcgtttcctcagtgaaggattgtcaaactggaaagatgcacattttgcctctggttggtggaaagatagaagaagtgaagcgacggcaatactcccttgctttcagctcagcaggagcccaagctcagacctatcatgtcagcttcgagactttggccgagtaccagcgatggcaacggcaagcatccaaggtggtgtcccagcgaatcagtaccgtggatctctcgtgttacagcctcgaggaggttcctgagcatctcttctatagtcaagatattacctacctcaacttgcgacacaacttcatgcagttagaaagacccggaggcctcgatacactctacaaattttctcaactgaagggcctgaacttgtcccataataaacttgggttgtttcctatattgttatgcgagatctctaccctgactgagctcaacctttcctgtaatggatttcatgacctaccaagtcaaattggcaatctgctaaatcttcaaaccctctgtcttgatggcaactttctgactactttacctgaagaattgggaaatctacaacagctttcctccttgggaatttccttcaacaactttagtcaaattcctgaggtttatgagaaactcactatgttagatagagtggttatggcaggaaattgcctggaagtcctgaacttaggggtgctgaataggatgaaccatatcaagcatgtggatttaaggatgaaccatttgaaaaccatggttattgaaaatctggagggaaataaacacatcacccacgtggatctgcgggacaaccgactgactgacttggatcttagctccttatgcagcttggaacagctgcactgtgggcggaatcagctgagggagctaacactcagtggcttttcccttcggaccctctatgccagttccaacaggctgacagcagtgaacgtctatccagtacccagcctgctcactttcttggatctctcccgaaacctgctagagtgtgtccctgactgggcctgtgaagcaaagaagatagaagtattagatgtgagctataatcttctcacagaggttcccgtgagaattctgagtagcttgagtcttagaaaactgatgctgggacacaatcatgtgcaaaaccttccaacactggtagagcacatccccctcgaggtgctggatcttcagcataatgcactcacgaggctgccagacaccctcttctccaaggccttaaatctcagatacttgaatgcatctgcaaatagtctggagtctttaccatccgcctgcactggagaggagagtttgagtatgctgcagctgctttatctgaccaacaatctcctgacggatcagtgcatacctgtcctggtagggcacctgcacctgcgaatcttgcaccttgcaaacaatcagttacagacctttcctgcaagcaaactaaataaattggagcaattggaggaactgaacctaagtggcaacaagcttaaaaccattcccacaaccatagcaaactgtaaaaggctgcacacccttgttgcacactccaacaacatcagcattttcccagaaatactgcagttgcctcagatccagtttgtagacctaagttgcaacgacttgacagaaatcctgattccagaggctttgcctgctacattacaagaccttgacctgactggaaatacaaatctggttctggaacacaagacactggacatatttagccatatcacaaccctgaaaattgatcagaaacctttgccaaccacagattctacagttacgtcaaccttctggagccatggactggctgagatggcagggcagagaaataagctgtgtgtctcagcacttgctatggatagctttgcagagggggtgggagctgtgtatggcatgtttgatggagaccgaaatgaggagctcccgcgcctgctgcagtgtacgatggcagatgtgcttttagaagaggtacagcagtcaactaatgacacagttttcatggctaacaccttcttggtatctcacaggaaattaggaatggctggccagaagttgggctcctccgctctcctgtgctacatccgccctgacactgccgatccagcaagtagctttagcttgactgtagccaatgttggcacgtgccaagcagtcctgtgccgaggtgggaagccagtgcccctctctaaagtcttcagcctggagcaggacccagaggaggctcaaagggtgaaggaccaaaaagccatcatcacagaggacaacaaagtgaatggggtaacctgctgtacccggatgctgggctgtacatacctctacccttggatcctccccaagccccacatatcttccactccgctgaccattcaagatgagttgctgattctgggaaacaaagcattgtgggaacacttgtcctacacagaagctgtcaatgctgtacgtcacgtacaagacccattagcagctgctaagaagctgtgcacattagcgcagagctatggctgtcaggacaatgtaggggcgatggtagtttatttgaatattggtgaggaaggctgcacttgtgaaatgaatgggctcaccctcccaggtcctgtgggatttgcttcaaccaccactatcaaggatgcccctaagccagccactccatcctctagcagtgggattgcctctgagttcagcagtgagatgtccacctcagaggtgagcagtgaagtggggtccactgcttctgatgagcataatgctgggggcctggacactgccttgcttccgaggccagagcggcgctgcagcctccacccaacacccacctctgggctgtttcagcgccagccttcttctgctaccttctccagtaaccagtctgacaacggcctggacagtgatgatgaccagcccgttgagggggtcataaccaatggcagcaaggtagaggtggaagtagacatccactgctgcagggggagggatctggagaactcaccccctctcatagagagttctcctaccctgtgttctgaggaacatgctagagggtcgtgttttgggatccgaagacagaacagtgtgaatagtggcatgctcctgccaatgagcaaggacaggatggagttacagaagtctccctccacctcctgcctctatgggaagaaactctccaatggctctattgtgcccctagaggacagcctgaacctcattgaagtggccacagaagtgcccaagaggaaaactggctattttgctgcccccactcagatggaaccagaggaccagtttgttgtgcctcatgacctggaagaagaagtgaaggaacaaatgaaacagcaccaggacagccggctcgagcctgagccccatgaagaggatcggaccgagcccccggaggagttcgacacagcactatgactgccccactgggcacagtgtgggaggaggctgtgcagggttggggtagggacttgctagaggcattctgcctctacatttctttttgtttgttcgttttttttttgtttgtttgttttgagacggagtcttgctcagtcgctcaggctggagtgcaatggtggggtctcgggtcactgcagcctctgtccctgggttcaagccattctcctgtctcagcctcccgagtagctgggattacaggcacctgccattatgcccggctaagttttattttttttttttagagacggggtttcaccatgttggccaggctggtgttgaactcttgacctcaggtgatccaccctcctctgcctcccaaagtgctgtgattacaggcctcagccaccatgcccagccctgcgtctacatttctaaaccatagctgtgtggggttgaactcggagccaaaaagtgtgagagccatcaggggctggctctggataaactggtagccactatcagtgttaagtttcacatttaacctgcattggaattcccaggggtactgggaagaaagcagctgttctgtatcagtcctaccacctgccattaaccctttctctcctaggatcattttgagaatttgcctgcctgggcaggaaagggactatttctgtggaggaaaaaagtgaagattgattctctttactagttgctgctgatggatctctgtgacagagaaatcaccttatctcagactaatggggtgtgatgtgactagtcacatggcttttcattcttctctacgagaatacagcctatcaaaatgatgtctgttggaaatgtagaaccaatcaaacagataatttatgtatgtaatgtaatgagagcacttttcattgactgtgaactttttatttttgaatctgcactcgagccaatcttcttagaggcagcccggcaccttcatccataggcagagagagaactgggtgttggagacttattcgagggtataggaagggccctgtgaagttgatttaacttttggatgtcagactgtgaaagctcctgagaaacttggggtaataggatcttcttttggggatgaaaatggggaaggcgtgaggacctagactacttctccctagatcagaaaaagagaattaccccttgacaaatatgatacctgctaggtatttcccagggaaatttagggattggcgtctttccctagcatgtggaggaattggcagacagcttcctaagggcggggagcgggggcccaaggctgacactgcttgcatccacgtgaccttaagttatggcagatgactctgaaacggactgaggccaatgagaacagatggatggagcactcaggttagacttgttccttctcctatgctggaggagagggatggttctctagaatgttggaggtgagttgagagctcgcctcttgaatgttgaacagtgtactcttctgaaaactgcatattcactttatgtggtttcagaatactgggctcaatactaacataagaaagacacttcattgagaaattcttaagcttacagaaaacctatactctttgcacattccacataaccctagcaaaatgcagtttcttcatacttctgtcactttttccattggaagatttgcttaggaaaattaattcctatttattcccacaaaatgttggcattgcttgattttacccaatggggaatgtgctttgaatttttggaacacttttacaattaaaaataaagtagggccatttttaatttgtttcatcagaaactatgttaaagagagggttaaatataaatatattttcgtgtgtatttttgggaagatttttgttcaaagcaatagtcaaaatcagatgacctgtccataataattatgtgtcttcatcttctcagaggccccatgctcatatgcacgtgtcattgggatacactcttgggggatttggtacactctaatggatgtctaatgttcaacccctcgagaatctgaacttgagtccccagattgtcaaactactggtcagctattgagaattttagaactcaggtctttgatttgaagtagggaacatagtggctcacacagagtttaggtgctgttagaaagatgggaacaagagtgttttgccaccttatttttatatgggaaattttttttaatgaagaaaaaatgaaaatgaaataacaggatgatagtgatgagtgatgtaaaacatcttacttagatggcagaaccttcgggttgtagaatagtgatgtctaaaaattaaagttattttgggaatacaccactttaatagtatagtcttataaaaattattcattatggtgaacccttcttgtctgctattcgtttcccaacctacttattggaaccacctcaaaacccagttctgaaatgaccttaccaaaagtaaatgtatttattttttagtcagcagaactctgtaattccaaatgttgttctgtgtggtagaattttttttcaggaaccattaggttgtattgaaaatctttgttataggcgataccaaaactgattattcttttttgcagtctgctttaattcatgtccttctgcagttgctctgtattaaaacagggtaaaaaggccatagcccattatgaaaaatataatacaaaactctttgacctatgaggtaacttacagacattgtgttttctaaacaggctgtcagtgaaagcccgtatctgtctccaggtgaatgtaatttacttccgagtactttacccagaggatgtgttccccaggtgggcagagtacagttgatctctagcacagacagagattctggcctctgcatattctcaggtctctgtgtgtacctcccattgagtagagaagcttaagataatttctgagagaagaacactgctgattgtgggagcagtttaggagtccatggaagaaagaaaaatacatgtgtcttggcagccatggtgtatttttgtccaaatggattggaaggatatttgaatatttgaatgttggtatgacataaagctgcagtgcactatagagtcaagtcattgaattaccactcctgatacagggctttattgtactactgtgaagtgtatgtgtgcaatacattggtgagttcatttactggtgtacggaagagccagcaggagcagcgtggtcattgctgggtgctattacagttgcttgtagtgagtgctgttttccaggagatggagccagttgggtgtggcagatctactgaatatcaaatgatgctcttcttcccatgtagaccttcagcaaaagccggtacttggaagccacaggctcaccttctctatctatccaataattattaatgaagagacctccataagggagcagctggctgttatcgataaatgtaccaattattaaataattagtctccaagccattcagtgatgtcttcagcatcactataggactgtctagtgtcactttttacttccttctgggtggaggctttccgactcccaatcatgaaggcaagttaatctttccagttagtgacttttgccccatagttggggtaagcacttcctagattgagaaaaagcagctacagtcaatcctgctctgtttgcctcatttggtgatcagtcagtcacacataagttccttgtattctaaatttcatgcacttctcccagatgctatagggttttctctcactgttgccagtggatgtcatccagacagtgggctcatatcttacggttttgtgcaatcattgtcgtattgtagtcttaagactcattatagtgtatttttgatatttttgaaatgtgttaaattttttaattcaataatatgagccagagcatgttgcagcaaatctattgtttgtaaaaataacaataacaataataaataaaataaagtggaa

SEQ ID NO: 32258 - DNA, 6299 bp, Homo Sapiens
atgcacagctgggctccgctgaaggtgctgcacaatgactccgacatcctcttccctgtcagtggcgtgggctcctacagcccagcagcaagtgtgtccagggaacgtagctccccatcagcctctagagtccttgcagatttcctgtggtcccacacccggctgtcagctcgcagagtcagctccatcttctcactgctgatgggacccgagctccagctgatgtcgaatgcactctctggagatgacgtgtgccggcgtcagccagcatttcccttctctgcagtaacgatgctgtcagggggctttgtggaagccagctctccaggccacggaagtcctctgagcagcctgttaccttctgcctcagtgccagagtccatgacaattagcacggtcaatacgtgcttcaacgaggacgaaccatggaaacaggagtggtcaatacgtgcttcaatgcggatgaaccatggaaacaggcgtggtcaatacgtgcttcagtgcggacgaaccatggaaacaggcgtgttcaatacgtgcttcaatgcggacgaaccatggaaacaggcgtggtcaatacgtgcttcagtgcggacgaaccatggaaacaggcgtggtcaatacgtgcttcagtgcggacgaaccatggaaacaggcacggtcaatacgtgcttcaacgcggatgaaccgtggaaacaggcatggtcaatacgtgcttcaatgcggacgaaccgtggaaacaggcgtggtcaatacgtgcttcaacgcggacgaaccgtggaaacaggcgtggtcaatacgtgcttcaatgcggacgaaccgtggaaacaggcgtggtcaatacgtgcttcagtgcggacgaaccgtggaaacaggcgtggtgaactgcgccaggccactgtggccatgatgaacaggaaggatgagctggaggaggagaacagatcactgcgaaacctgctcgacggtgagatggagcactcagccgcgctccggcaagaggtggacaccttgaaaaggaaggtggctgaacaggaggagcggcagggcatgaaggtccaggcgctggccagagagaacgaggtgctcaaagtccaactgaagaaatatgtaggagctgtccagatgctgaaaagagaaggtcaaacagctgaagtgccaaatctttggagtgttgatggagaagttacagtagctgaacagaagccgggagaaattgctgaagaactcgcaagctcctacgaaagaaagctcatcgaggtggcagagatgcatggcgagctgattgagttcaacgagcgcctgcacagggccctggtagccaaggaagccctcgtgtcccagatgaggcaggagctcatcgatctccggggaccggtgcctggagatttgagtcaaacgtccgaagaccagagtttgtcggattttgaaatatcaaaccgggcgctgatcaacgtctggatcccctcagtgtttctccggggcaaagcagcaaatgcattccacgtgtatcaggtctacatccggataaaagacgatgaatggaatatttatcgccggtatacagagttcaggagtttgcaccacaagttacaaaacaagtaccctcaagtgagggcctacaacttcccacccaaaaaggccattggaaacaaggatgccaagtttgtggaggaacggagaaagcagctccagaattacctgcgcagcgtcatgaacaaagtcatccagatggtccccgagttcgctgccagccccaagaaggagaccctcatccagctgatgcccttcttcgtcgacatcaccccgcccggagagcctgtgaacagccggcccaaagcagcttcccgcttccccaaactgtcccggggtcagccccgggagacccgcaacgtggagccccagagcggtgacctctgacctcgacaaaaccgcagccacgggccctgtgcgtggcaccagctgcgtccaccccagccactgccgctggcccctcacctcagcgtgacaaccacgtccacctggtgatcctgagagcacacgattcccaacagttacacaacaccccgattaaactaatcagtcttcgagccgcatgataccgtgacccgagagaccaaggcagcacctcgctggagagactgggacacacagtccttctgcttctggggtctaccctgggctgcaagggctgttcctccacctttctgtagttcagggctggcaggagggtgggcaccaggtcaggctgggtgcgccatggttgagaggcaaaggtgatcccctatataggaaggttcatgcagagccagcctctccactctttcccacgtggggactagaatgactattagcctctccttttgctttttaaggttattacctggcctaacctagggatggctggctttgcgggggggggggggggggggggcatggttcctttcactgcattttccaccaacagtcattagacacctggcactgtcacagctcacttttccagagggatattcctgtggctttggcaaggagccattagtgatgtgcaacttgagttcagagaacttcccctacctcccccatggctggcttcaggaaggaccagtgccctccatagcctgaggccacctaggccctcgccaggcttggagtggggggactcagacatctggcccagccatcagcagcaacctagtaacccggcgtcatccagcgtgtccaaagtagcattggccctacagtcatgagagacttgggtcagggaaccactgcagaaggttccagggttttcaaaccaggctccatgactatgaagttggacccagtgtggacacttaacagatcatgtgtctctccactaaaaacattttccatcccgtctgcccccgacattgtccttgataacagaactctgcatcccctaagacagagtcctctgttcctcccatgtcaggtggctctcagagtacagggaccttggcaggtggagaggaggatggggaccagcagctgggcagcccccagggctcctcctccagtgagctcacatcagagcacctcacagagcaatagccgtcctcagatgctcagcaaagttgtggcagtttgcatttctagggtaaactaactaggaaggatgtcgtgaaatggactatgcaagagtaagtttgtgtgtttcgccttaatctgaggcagagacacagcagaacctgaggagaaaagcaggtggaaggtgacggttagatggtaagccatgggcttgtcctggaactgcttcaactcagtggcttaaaatgagaactgcccaggtgagcatggagcatctcctaggctcgaggacatctctggagaatcatctggaaggtttatactgtgccttcccctcgtagcaaaaaggaagattgttcatggcctttaaggaaggctgagatcactcacacacagcgcccccccaccccagagaaaccgagtcagcctacatgacttccaaggggacctggggccagataagccctgccccggtgagaccaaatgagctggagcatgtatggaggtgcggaccctgcagtcagtttgcgagtgtggaggacccgagacatcctgtaaaggcaacttggtctccctcccactcacctgccaacattgctgcaatacacatggtttatctgaaattccaaggccagagtgcacatcagctcacatgactggcaactctaaatagagagccctaatggactgaggcaggaaacgtctaaaagctcaatctgctgtatgtcatgaccccttaggttgggtttatgccacatcggtcattttgaagtaggtgtttgatgccagctcagagactgtctcaggagtgcctccctggcctgggtagctaccctggaggtcatctccctgttctctgttggataaaggaacctcccccatctgtgacattcccttgggcccaggcttatgacctgcaccttttctgacacctgcccccaaagcacaggatgtgaattggtctctctccagataccccacgaggaagcaccttggacattctgcacatgataataatgcaacagtcccccattgctgagagatactaacccgtgagaaacaagtatgctctcagctggtattgaactggtgggagaaactgcctcctacttttataatactgaattattcacaaaaaacctggtctgctctccaaaatgagagcatgttcctgggagccacatggggaccatccccagctgcctgctcctggtacctcccccatgatcatgcacagaccgtagagtcgagtcatctcgcagatccagaccatctcctctcattctcactctaaaaatgctggtggcccgcacatgacagcaactccccgaagccttccctttggaatcccatagaatgttctgcaatgattgggtccatcttgctgctcagaagaatcccgtcctgctctctagtgtggtgggatgaacttcaggcaacaaacaactggcagggttcccagttcctggagttatggagcagaaacacccaggcctagcagaattgtggctgaaacctggtgcccaaattccacaccctggaaatgtgtcaactgcctgtcagcctggattcaattctgagggctaagccacgaccttatccatgagtggcgaagacacccctgaggaaaggattgcttgcacctcacatctgtcttcttctaagattactcggagattttcaaacaacatctgagaacagaagccccctcccctactcagagaggaacgagggtggcccacctctcaagggccttggattcctgggaccaccctttgctgggaggaagaatccacaccgaatccttctgtcttcatggcctgctgtgctgaaacagaacagcaggttccatctttcacatctttttttctcccccagatgaaagacgactcaggaacggtagggctgggcagaggtgtctctccttgagagacaacaaaagcttctaagggagggagcttaaaggctgctagaaacctagcccaaccatccactcctgatctgagacagaaccttctccgccactcttcctgcaatcagtgtgaaattccagcttctttgattcccacttagcagtatgctccaatcacgttgctggcaaggcattttagagtttggagctgaggttcaaagccccctgcatttctctactggcaggccctggtgaaggaagacactttcagggaagaggctcttacagtctatggtggtagccatcttcacatccagtcaccagttgcatctagggagctgctggctataaaagggatcatccagtggagttgtaaacaagggaaccatcttgcaagatctaggaagaggaaggggagggatgtggactgggtctgatcacagcccttggccctgcttcatactttggagcttattaagatcaattttgataaccatgtaatttcttagaaccatggcaggtagtattgtgctttaaaaaccagaggctcctgaaagtcgtttacaccaggtggattgataccatggctgtagctgatgcaactaacaagtactggggccagtgatcacaatccaggttggaaacaggagtgaagcccaccagcctgcctggttgatggacagcaggctctgccttctggaggcggcttatatcccaacagcctgaggcagggctctgtggcccaggccggcagtggctgcctctcttggttctgcatggtacattttgccaaccctgaggaccagttcttggggttccaggcctcggccttcctgctccacgtgctcaagcccccacagggggctgcgacaccatctggctcctcacagggaggtccagccatgttctctgggctcccagtgagccccctcccctccggctacccccagaatccatccttcattcctccaccaagctcctgtgtgagctgcagcacccacacgggggaagccctgcactccagcagcatcttccagccttggcacagaactgatggcaaaggaagggctgggttttcagcttctgggacccgaggaagaccccacctcactcctccttccccagtacatcagactggttaggaggcatcccagaaggggcagcctcatgcccaggtttcagccctaaaggtaatgattgtcttgactctgccttggcatttcgctcggaatcacggcagacttggagtgtttcttcaaggcaggcatctgcttatgagcaaggtcaaagatttttcaaaatattgtgcattaattcattaaagctactgttaaat

SEQ ID NO: 32259 - DNA, 3585 bp, Homo Sapiens
ataatgccttgagggctttaacgcgctgcacgaagcatgcatgtctcatacccaaagtagccacagcgcctgcattcccacaatagcggcagccccgagcagatgcttccagcgtgcttatctggctgtgcttttcactttgggacaaagttctataatcatatctcatggatttattttctccacactataaagcctgaattgtgaagatctcatcatgccataaagggcagcatgagccaagttctgggggctgctaaggatttctttgccttttttccccccaccctttttggaaatgtgtatcaggaaaaggctttgcctttagagagaaattgtactgctcttgccaataatgtgtaatagtattaaatttaatggcagaccttgaagtgtataaaaacttaagtccagaaaaagttgaaagatgcatgagtgtgatgcagtccgggacacagatgatcaagctgaaacgtggaaccaaagggcttgtccgcctcttttacctggatgagcaccggacacgcctccgatggcgaccctctaggaagagtgagaaggcaaaaatacttattgattccatttacaaagtgactgagggccggcagtctgaaatattccacagacaagctgaggggaacttcgaccccagctgctgcttcaccatctaccatggcaaccacatggagtccctggacctcatcacctccaaccccgaggaggcccgcacctggatcacaggcctcaagtacctgatggctggcatcagtgatgaagactcccttgccaaaaggcagaggacccatgaccaatgggtgaagcagacctttgaggaagctgataagaatggtgacggcttgctgaatattgaagagatacatcagctgatgcataaactgaatgttaatctgccccgaagaaaagtcagacaaatgtttcaggaagccgacacagatgagaatcagggaactttgacatttgaagagttctgtgttttttacaaaatgatgtctttgagacgagacctttatttgttacttttgagctacagtgacaagaaagatcacctaactgtggaagaactggctcagtttttgaaggtggagcaaaagatgaataatgtgacaacggactattgtcttgacatcataaagaagtttgaagtttcagaagaaaataaggtgaaaaatgttcttggcatagaaggcttcacgaacttcatgcgtagtcctgcctgtgacatatttaacccattgcaccatgaagtgtaccaagacatggatcagcccctctgcaactactacattgcttcctctcacaatacatacctgactggagaccagctcctttctcagtccaaagtggatatgtatgcacgggtgctgcaagagggctgtcgctgtgtggaagttgactgttgggatggcccagatggagagccagtagtacatcatggttacactctcacttcaaaaattctcttcagagatgttgtggagaccatcaacaagcatgcctttgtgaagaatgagtttcctgttatattgtctatcgagaatcactgcagtatccagcagcaaaggaagattgctcagtacctgaaaggaatattcggagacaaactggacctgtcatctgttgatacaggggagtgcaagcagcttccaagccctcaaagtttgaaaggcaaaattctagtgaagggtaagaagttgccttatcaccttggggatgatgcagaggaaggggaagtttctgatgaggacagtgcagatgaaattgaagacgagtgcaaattcaagctccattatagtaatgggaccactgagcatcaggtggaatctttcataaggaaaaaactggagtcactgttaaaagaatctcaaattcgagataaagaagatcctgatagtttcacagtgcgggcactactgaaggccacgcatgaaggcttaaatgcacacctgaagcagagtccagatgtaaaggaaagtggaaagaaatcacatggacgatccctcatgaccaactttggaaaacataagaaaactacaaaatcacggtctaaatcttacagtactgatgatgaggaagacacacagcagagtactggcaaggagggtggccagctgtacagattgggtcgccgaaggaaaaccatgaagctctgccgagaactctctgatttggttgtgtacacaaactccgtggccgctcaggacattgtggatgacggaaccacaggaaatgtgttatcattcagtgaaacaagagcacatcaggttgttcagcaaaaatcagagcagttcatgatttataatcaaaagcaactcacgaggatttacccctctgcctaccgcattgattccagtaacttcaaccctctcccctactggaacgcaggctgccagctagtggcactgaattatcaatctgaaggacgaatgatgcagttaaaccgagccaaattcaaggcaaatggcaattgtggctatgtcctcaaaccccagcaaatgtgcaaaggtactttcaaccctttctctggtgaccctcttcctgccaaccccaaaaagcagctcatcctgaaagttatcagtggacagcaactccccaaacctccagactccatgtttggagatcgaggcgagatcattgacccttttgttgaagttgaaattattggattgccagtagattgttgtaaagatcaaacccgtgtggtagatgacaatggatttaaccctgtgtgggaagaaacactgacatttacagtacacatgccagaaatagctttggttcggttccttgtgtgggatcacgatcccattggacgagactttgttggacaaagaactgtgaccttcagcagcttagtgcctggctaccggcatgtctatttggaaggactgacagaagcatccatatttgtacacataaccatcaatgaaatctatggaaagtggagccctttaatactcaaccccagttatactatattgcactttctaggagctacaaagaacagacaactccagggtctgaagggactgttcaataagaatcctaggcacagttcttcagaaaacaattcccattatgtacggaagcgatccattggagatagaattctgcgacgcacagctagcgccccagccaaaggcaggaaaaagagcaaaatgggcttccaagaaatggtggagataaaggattctgtgtccgaggccacaagagatcaagatggcgtgctgaggaggaccacacgcagtttgcaagcacgccctgtctctatgcctgttgacagaaaccttctgggagctttgtcgctgcctgtatctgaaacagcaaaagacattgaaggaaaagaaaactctctagactctagcttttgcaggccgactgagcaggctaaagcagaaatgtgcaaagtgcctttccccagacagttagaatgtgtaatgaagatggaaatttccgagacctgaatccccaaacccagactgatctctcttctcttcttgaatataaaagtaagctggcaagatttaaaaaactgaacccaaataaatattcatcatttttttcttc

SEQ ID NO: 32260 - DNA, 8615 bp, Homo Sapiens
atgtccttgagcagtggagcctccggagggaaaggagtggatgcaaacccggttgagacatacgacagtggggatgaatgggacattggagtagggaatctcatcattgacctggacgccgatctggaaaaggaccagcagaaactggaaatgtcaggctcaaaggaggtggggataccggctcccaatgctgtggccacactaccagacaacatcaagtttgtgaccccagtgccaggtcctcaagggaaggaaggcaaatcaaaatccaaaaggagtaagagtggcaaagacactagcaaacccactccagggacttccctgttcactccaagtgagggggcagctagcaagaaagaggtgcaggggcgctcaggagatggtgccaatgctggaggcctggttgctgctattgctcccaagggctcagagaaggcggctaaggcatcccgcagtgtagccggttccaaaaaggagaaggagaacagctcatctaagagcaagaaggagagaagcgaaggagtggggacttgttcagaaaaggatcctggggtcctccagccagttcccttgggaggacggggtggtcagtatgatggaagtgcaggggtggatacaggagctgtggagccacttgggagtatagctattgagcctggggcagcgctcaatcctttgggaactaaaccggagccagaggaaggggagaatgagtgtcgcctgctaaagaaagtcaagtctgaaaagatggagtcccctgtttccacaccagcagtgctgccaatacaccttttggtgccagtggtcaacaatgacatctcatctccctgtgagcagatcatggttcgtacccgatcagttggggtcaacacatgtgatgtggctctggccacagagcctgagtgcttgggcccctgtgaacctggaactagcgtcaaccttgaaggcatcgtgtggcaggaaacagaagatgggatgttggtggtaaatgtaacgtggaggaacaagacatatgtaggtacactccttgactgcacacgacatgattgggcacccccaaggttctgtgactccccgaccagtgacctggaaatgcgcaatggccggggtagaggcaaacgcatgcgtcccaacagtaatacacctgtcaatgagacagccacagcctctgacagcaaagggaccagtaacagcagcaaaacccgggcaggagccaatagcaaaggccgtcggggcagccagaattcttcagagcaccgcccacctgccagcagcacttctgaggatgtcaaggccagcccttcctcagctaataagcggaaaaacaaacccctttcagacatggagctgaattctagctcagaggactccaaagggagcaagcgtgtccgtactaattccatgggctcagccactggcccccttcctgggacaaaggtagaacccactgttctggacagaaactgcccctcccccgtcctaattgactgtccccacccaaactgcaacaagaagtacaagcacatcaatggacttaagtaccaccaagctcatgcccatacagatgatgacagcaagccggaagcggatggggacagtgagtacggagaggaacctattctccatgcagatcttgggagctgcaacggtgcatctgtctcacaaaaaggttccttgtcccctgcccgctcagctacccccaaagttcgacttgtagagccccatagcccttctccttcaagcaaattcagcacaaaaggcctctgtaagaaaaagttgagtggggaaggggacacagaccttggggccttatccaatgatggctctgatgatggaccctcagtgatggatgaaacaagcaatgatgcctttgattctttagaaaggaagtgtatggaaaaagaaaaatgtaaaaaaccctctagtttaaaacctgaaaagattccttccaagagcctaaagtcagcccgtcccattgcccctgccatccccccacagcaaatctacaccttccagacagccaccttcacagcagcgagcccaggctcttcctcaggcttgaccgccacagtggcacaagccatgcccaacagtccccaactcaagcccattcagcccaagcccactgttatgggagaacctttcacagtcaaccctgccttgactccagccaaggacaagaaaaagaaagacaaaaaaaagaaggaatcttcaaaggaacttgaaagtcctctgacccctgggaaggtgtgtcgagcagaggaaggcaaaagcccattcagggaatcttcaggagatgggatgaaaatggaggggctcctaaatggctcatcagacccccaccaaagccgactggctagcatcaaggctgaagccgacaagatctacagtttcacggacaatgcccccagcccttccattggaggcagtagccgccttgaaaacactacccctactcagcccctgactcccttacatgtggtgacccagaatggagctgaagccagctcagtcaaaaccaacagccctgcatactctgacatctctgatgctggggaggatggggagggcaaggtagacagtgtcaaatcaaaggacgccgaacagttggttaaagaaggggctaagaaaactctttttccccctcagcctcagagcaaagactcaccatattaccaaggctttgagagttactattctccaagttatgcacagtccagccctggggctctgaaccccagcagccaggcaggagtggagagccaggccctgaagacaaaaagggatgaggaacctgagagcatagaagggaaagtgaagaacgatatctgtgaagaaaagaagcccgagctgagcagttccagtcagcagccctcggtcatccagcagcgtcccaatatgtacatgcagtccctgtactacaaccagtatgcctatgtacccccctatggctacagcgaccagagttaccacacccaccttctgagcactaacacggcttaccggcagcagtacgaagaacagcagaaacgccagagcttagagcagcagcagcggggagtggacaagaaggcagagatgggcctgaaggagcgggaggcagcactcaaggaagagtggaagcaaaagccgtcaattccaccaactctcaccaaggcccccagcctgacagacctggtgaaatcaggacctggcaaggccaaggagccaggggctgacccagccaaatcagtcatcattcccaagttagatgactcttcaaaactcccgggccaggcccctgaaggccttaaagtgaagctgagtgatgccagccacctaagcaaggaggcctctgaggccaagacaggtgctgagtgtggtcgacaggcagagatggatccaatactctggtaccgacaggaggcagagccccggatgtggacatatgtttatcctgccaagtactcagacatcaagtcagaggatgagcggtggaaggaggagcgggaccgcaaattgaaggaggaaaggagtcggagtaaggactctgtccccaaggaagatgggaaggaaagcacaagtagtgactgcaagctgcccacgtcagaggagtctcgccttgggagcaaggagccccggccaagtgtccatgtgcctgtgtcctccccacttacccagcaccagtcctacatcccctacatgcacggctattcctacagtcagtcctacgaccccaaccaccccagctaccggagcatgcctgctgtgatgatgcagaactacccaggttcctacctgccttccagctactctttttccccatatggcagcaaggtctcaggtggtgaagatgctgacaaggcacgagccagccccagtgtgacttgtaaatccagctcagagtccaaagccctggacatcttgcagcagcatgccagtcactacaagagcaagtctcccacgataagtgataaaacttctcaggagagagatcgaggaggctgtggggtggttgggggtggtggcagctgtagcagcgtcgggggagcaagtgggggtgaacggagtgttgaccggccccgcacctctccttcccagcgcctgatgtccacacaccaccaccaccaccacttggggtactcattgctcccagcacagtacaacttaccctatgcagcagggctttcttctacagccattgttgccagccaacaaggctcaactccctcactctacccaccccccaggaggtgagaatgacaccaagtgcccggataaagtcagcttcacgggcccggactggcttacccaaggaggtgctgaaggtgccgtttagacatcagttaaatggtgttgatcatcctgtttgccgtttccaccatgactgaaggcagacccttggctatctcacctccaccagacctccggactacctgaccctacctcttcctcaggagctggagagctggtacttagcaaaaatatttattctctcagccacagttatgactattgtggcctctgtggagatgaaggcacgggaagcaaccaggggaacatggcctcagcccagagaagccactgctctgttccccaagcccttggtctgctgctggagcagtaccagcccccccgcccaccagggagggacccccacccccaagcactgggtaaggtctgaagacagcacagcagccatacccctcaccatcattaccaccatcaccagattctgcatctccctagtgctttgcaccctgggaattggcagcatgtggaggaactagaatctcaggaaagaaattgggggttgttttctacataattgtgaaaacaaggtcttcaaatgtggagacttctccccatttacatgagcacatataaacgctcacaacctagcctggaaaggaagaccaaggcatctgccccaacatggccttgagctgcctgtgaggcagggggcaggggttccaacaccagcacagggctccccagggacactgggagcaagctggtgctggagcatgaatgacgtctgtgaagtagaacctgcgtccccactaagtcctgctgcttcttattccccaactccttgcccttttcccttccctcctaaccccttggtgcctttcccagggggatccccacactggtcttgcctcttcttttccactgcttggctcttaagcctcaggcagataaactagtattccccccagcttggggaaccttggagtctgccaggtcaccttagggcaaggcccagaaggcagcccctgggagcacccagcagttcttggagatgtcctgtcatctagccatctgatatcttcctcatttgaggccacagatatatacagcccaattcctctgtctacaagtacatgattttatatagctcagtctataacctccatgtgggccaatataagctgtgtttcttggtaacacatattttgtttgaggggccactggccatgggaggttatttgttccttagaccctggaataacacatccaagccattacttattagagtctcagaatgtactcagtggagctgtgctttgaggcagccaacatttctctgctctccttagaaatgcagtctcccaatggaagctttatactctttgtactgggaaagtgaggatgatttggtagctttattggggtcatgtcttccccaaggtgtggggagcttagcttacttggcttttgaggtatcatccctctgttctcccctcctatctttccatgaccctctggattgagagagagagataaagactgacagacaccagtgtaggctggaaaagggagtgtgtgaccagagtgccaaaagtgactaggagcaggaacttggctccgactcagtttggaaaatgggaaataggggacagtaagcacaatgcccagtagtagttgatttccaaggaccctggaaccctacacttgagaggcttagggtcaccatctgctcaagaggatcccctctgatctacaggccttttccctaggtttctgcctcctcgtttttgttcaagttgggttctgagtcctccccaaaaaccattgttttagacctcttggcagggccccaaaacagcctccctcatacccatcattccctctgccttctgctgccctcatgggcagtgctctgagcagtgacctccctttcctccgtggaagtagctagtgcagacaccgtcatcccaccccacctgagtcaccccaaccaagagggtgactgaatttcagcctgattatgccctcctggggctcctgtgaggtggagccaaggttccctctctgttcctgtttgtttttaaatattgttgtgtgttttgtatctgtggcactggcctgcagcatactctgtatatattgtaaagaaaccgttaggagtaattttcttttgcattgggcaggcatggccctgcattcctgccctttccactcattctgtaacacagaggacgaacttctgtattagctgggcagccttgggttctccagaagagaacaggtttttcttttcctttttaatttttcttcttaaacatttggctctttgatcctcatatccaagtctcccctgaagagtaggagctgctcagaagagcaggtgaaagccaccatggcagatcctgatgcctgccgggcctagtcttccctctgaaataacatgaagcagcagctgtggagattcttgacaagtgctgagtgaaagatttgctgcccacctctacatggggaggagaaacacaggtgggagctacctgtggcatccatgacctagtcagagggatgagatgctcagcaggggtccccatcctatcccaccccacaaacaaaggctggaaaaatttgctaccaagggccaagaccaccagaccaagcctgtttatgagccacccctgcccaggccctcacagacattgctcacggggcttcccatagaggagaagctaaagagggagggggcctcatccccagatagatcaggcaaggcttggagagctgctctttaggatccacatcaactacttcctcattttaaggtatggcagttcccttcatccccttttcctgccttgtacatgtacatgtatgaaatttccttctcttaccgaactctctccacacatcacaaggtcaaagaaccacacgcttagaagggtaagagggcaccctatgaaatgaaatggtgatttcttgagtctcttttttccacgtttaaggggccatggcaggacttagagttgcgagttaagactgcagagggctagagaattatttcatacaggctttgaggccacccatgtcacttatcccgtataccctctcaccatccccttgtctactctgatgcccccaagatgcaactgggcagctagttggccccataattctgggcctttgttgtttgttttaattacttgggcatcccaggaagctttccagtgatctcctaccatgggcccccctcctgggatcaagcccctcccaggccctgtccccagcccctcctgccccagcccacccgcttgccttggtgctcagccctcccattgggagcaggttggggcgagctggaggcccgggctggaggggcagtgttgctgttcatagattttgttccattggcgttgctctgttgaatttaatttcagtcttcctgattcttcccttctgtaaagtgtacattaccaagttccttgtttttttatatatatatataaatatatatatatacaaactgtactctttttgcctttgtacattcaggcaagaagagaaaataaatctttttaagagacaatcacaaatctgtgagggctgctggttatttctcctggagtttgctgctgagctgcctcttccttcctcccaattttcctgttctccctcagctctcctgatcttcctggccctgctccatatgcatcctcagcttcactttccctggctgatggcaagctgttgaatccagtgtccagactacctgccttgtaacccttttctgcccagcattgttttctggcttggccactggcttagcccaggagctttactctgtgccctggcctcccctctcttcacctttagatttccattcaccgaagtggctttggacccctgggtactctgggacctgtttcctggaggccctggcttgggacactcacctgtgaaactatgcagctgggagctctctgcctaagagtttgcactatttaaacctgcctgggagttaggacggatggttttaggaatgaccggaaaactacccctaaaactcccccgacattccagcctctagaatgctctgatccagagctcagtggatgattcccagctggtggactcctgtggctaccccatcagaacaagggctaagggtttatgggtcaagagtatttgatcagaattttaaagggtggtatactctgaaacacagcccaaccaaaccattgtttggccgctttctcttttcctctaccttcctcatccccacttttttccctttctctctacttcctcttcttaattggctttggaattgaaatatatttttaaattatttgttgtatttattgaataaagtttttaatgtccctgttctt

SEQ ID NO: 32261 - DNA, 7751 bp, Homo Sapiens
ggagggagggccaagcagcgtggctcccgagggagttggtgggcagcaggggagacaatagcgaacatgctgtgtgggctcagccgggagacccctggagaggcggacgatgggccctactccaaaggaggcaaggacgcaggaggggccgacgtttccctggcgtgccgcagacagagcattccagaggagttccgagggatcactgtggtggagctgatcaagaaagaaggcagcacgctgggcctgactatctcaggtggcaccgacaaggatggaaagcccagggtctccaacctgagacctgggggacttgcagccaggagtgatctgctgaacattggtgactatattcggtctgtgaacgggatccacctgaccaggctccgccacgatgagatcatcaccctgctcaagaatgtgggcgagcgcgtggtgctggaggtggagtatgagctgcccccgcccgctcctgagaataaccccaggatcatttcaaagacagtggacgtctccctctacaaggagggcaatagctttggctttgtccttagaggaggtgcccatgaagatgggcacaagtcccgcccgcttgtcctgacctacgtgcggcccggtggccctgccgacagggagggctccctgaaggtgggcgacaggctgctcagtgtcgatggaatcccgctgcacggggccagccatgccaccgccctggccaccctgcggcagtgcagccacgaggcactctttcaggtggagtatgatgtggccacccctgacacggtggctaatgcttcgggacccttgatggtggaaatagtcaagacgccagggtctgccctggggatctcgctcaccaccacctccctccggaacaagtcagtcattaccatcgaccgcatcaagccagccagcgtggtggacaggagcggagccctgcaccctggagaccacatcctgtccatcgatggcaccagcatggaacactgctcgctgcttgaggccaccaagctcctggccagcatttcagagaaggtgcggctggagatcctgcctgtgccccagagtcagcggccactgaggcctcagaggcagtgaaagtgcagaggagtgagcagctgcaccgctgggacccctgcgtgccctcctgccacagcccccggcccggccactgcaggatgcccacctgggccacacctgctggccaggaccaaagccgatccttgtcttcaactcccttttcctcgccgaccttgaaccacgccttttcctgcaacaaccccagcacccttccccgtggatcccagcccatgagtcctcgaactacaatggggcggaggaggcagcgaagaagggaacacaagagctcgttgtcgctagcctccagcacggtggggccgggcgggcagattgtgcacacggagaccacggaggtcgtgctctgtggagaccccctcagcggctttggcctccagctccagggcggcatcttcgccaccgagaccctgtcctccccacccctcgtgtgcttcatcgagcctgacagtccggctgagaggtgtgggctgctgcaggtgggggaccgtgtcctgtccatcaatggcattgccaccgaggacgggactatggaggaagccaaccagctcctgcgggacgccgcactggcccacaaggtcgtgctggaggtggagttcgatgtggcggagtccgtcatcccaagcagtggcaccttccacgtgaagctgcccaagaagcgcagcgtggagctgggcatcaccatcagctcggccagcaggaaacgaggggagcccttgatcatctccgacatcaagaaaggcagcgtggcacacaggacgggcaccctggagccaggcgacaagctactggccattgacaatatccgcctggacaactgccccatggaggacgccgtgcaaatcctgcggcagtgcgaggacctggtgaagctgaagatccggaaggacgaggacaactctgatgagctggagaccacaggtgccgtcagttacacagtggagctgaagcgctacgggggtcccctgggcatcaccatttcgggcacggaggaaccttttgaccccattgtcatctcaggcctcaccaagcgtggcctggctgagaggactggtgccatccacgtgggggaccgcattctggccatcaacaacgttagcctcaagggccggccgctgagcgaggccatccacctcctgcaggtggctggagagaccgtcacactgaagatcaagaagcaactagaccgtcccctcctaccccgcaagtcgggcagcctcagtgagaccagtgatgctgatgaggacccagcagatgccctgaaaggaggcctgccagcagcccgcttctcgccggctgtgcccagtgtggacagtgctgtggagtcttgggacagctcggccaccgagggtggctttgggggcccagggtcctatacaccacaggcagcagcccggggcacgaccccccaggagcggaggcctggctggctgaggggcagccccccacccaccgagccccggaggacgagctataccccaaccccagctgacgagagctttccagaggaggaggaggaggatgattgggagccgccaacgagcccagcccctggccctgcccgagaggagggcttctggcgcatgtttggagaagctctcgaagacctggagtcatgtggtcagtcagagctgctgagggaactggaggcatccatcatgacgggcaccgtgcagagggtggccctcgagggcaggcctggccaccggccttggcagaggggccgggaggtacgagcctctcctgcagaaatggaggagctgttgctgcctacacccttggagatgcacaaggtgaccctgcacaaggaccccatgcggcatgactttggtttcagcgtctcagatggcctcctggaaaaaggtgtctatgtccacactgtgcgccctgatgggccagcccaccgtggaggcctccagcccttcgacagggtcctgcaggtcaaccacgtccgtacacgggacttcgactgctgcctggcggtgccactcctggccgaggcgggtgatgtcttggagctgatcatcagccgcaagccgcacacggcacacagcagccgggccccccgatcgccaggccccagcagtccccggatgctctgaagtcagcatgtgggccgaactcctaaggggccacccaggcagatcctggctcccagacacgtagctgggctggagaagcggccacccactcattcatctgttggtctggcagactctgagcctgggatgatgcttggtctctgttccccaggtctgtggtgactggggtgccaggcagggaggtcctgccctagttggagtgacagctggggtctctcgccaagttgggtctccaagatgcccagaggagcctcccttaagaagggttggcacaggctgctcagccgagaggagagaggcctgggggctgtcccaggtctctgtggggcctccttggagaggtcgaagatgtagggagcacttcctcccagcaaagccatggagctggaatgagctgcaaggaggagtgagttctcggtcacaggaggtgagcaggcaggagctggataccccagcgcagtcatgcattggggtatgaggcattcccatgatgcgtgcacacgcgcttgggggttggcttcctgatggggagccacttcatctagagactcggccaccaggaaggatgctgcttcggatgggagcccagctccttcgcttctccagaataggggtttggggcttgctagtcctgagattctgagattcccagaatctggtccccacttatgagactcttaagttggggcgtctgggatcccaggaagtgctggccctttgattctgaaagtgggtgattctttgatttcagcatctcagtctgaagcttctgggacttgagactgtggttctgggcccattgggcaggctctatgggccttgggctctcagccctcctgcttcttctgtaggccgtgtggccactgacccatctgcacgtccgctcagcccaagcccctccatgtgggaggggtcattttggggcaaaagaccctggagcttccattcacctgccatccagtgaaaattgaaaagcgatggacgcaggacctgtgaggcggtagcgctcctctttacagccagatcagtggaggaagaggagaaagagggagggagatgggagagaaatgggccagagaaaaagatgggacactcttgcccagtggagggtgtccaaagtgcttattcaaagaagtctattcccacttgaaatctggaagcaccagcatcccttaaaatcattgtcctcagtgtccacaaatcagagaccctcttcattttgagaagggtgtgggcctcccctggtggtctagtgagtggtgcctgggatggagtgggcgggcaggtgtagccagggctggggatgtgctttgcctggcccagttctcacaggggtctcaggaaaacggggcacccactcccacctccatctgtctccaacctggggtccctggaggccagaaaagtgctcttccatttgagggaacagatgaggagtcaagaggtctgttcttttcaccctgggtctgttacctgtttgctgtgtgaccctgtctgggttggacccccagcccctctggacgatcacgggtggacagtctgagcagacacaggcctcctggtcagggccggaaccatctctgccgacccaccaaggcccccttggggacctgcccacgctgtctcctggaggcctgcctcccttacccctcccctccacttcgctgggctctgccccttggtgccctccctgagggccctgcatgcttgtgcctggggtgctcagcgcctctgctatcttggattcccgtgtactcagcccagagtgaaagggcactgtctacctgtcacagggcaccaagtgaaagccaagagccctcacttttgagggtgagggacagcacagcagaggtgtggcttctggatgcaagcagccatagctgtgtgaccttggacaggtggctcagcctctctggacctctgctaagcaacagggctggacaggacacactctcagggcctctcggcttgggaaaactgcattgactccaggactccaggcgagggaagatgcacccgactctaactaatacccccctccctcctcgggctgaggcctctgccattctcccaaaagtatgcaatcaggcccgcggtgggcctcccagccatgccggcctcctcatatgcaatatttcttctggcttctcatggggatggttcatccccgacttgaaatttcctgacacctttccccagtgagcgccctgcctgcctatgcattttgggaacagcccctgtgacatgtccccttccacctgccctctcccccaaagctgtatttttctctggctgagattagaacacattccttgtaaagtatttttctacatcgggttttcttagggctctcgggaagcacaaggggctgtattgcaaaggccgcttatggtctgtttggggccctcgtctaagtctttgtcccaccaggggttgcagtggcttgggggtaggtgccatggggatgattttttaaaataaaattatttaaatccacctagagtagaagtttgctttttaaaaaaatcatggattggcaagagtcagcttctgtatgggtctggtgacatctcacctgcttttgatgattcattaattcaaaaagtttgccatttgcttccatcatccagcccctgggcaacatgaatcagacagatttaggtcatgtctgcacattctggtggcaggcagacaatcaacaagtaagcaaataaataattatttcaaaaggcatcaagtgcaacaaagaaaacaagggagtaacgggatagagggaccagggtgaggggctttagctcacaatattaggaggggtttctctcaagaggcgacatttgcaatgagacctgaagacaggagccagcctccatggagacctggaggaagagtgtctcaggcagcgggcacagctagtgcaaaggccctgagataggaacgagtttgacggtctcaaggaagagaaagaaggcctgggaggggaatggggctggagactaggttggaggtagcaggaatcagtcgtgaaggcttgggtagggggagcaaatttgattctctgcgcagcagaaagccagaggcaggcagtggtgcctgcatatggagtctctttagcccaggttgggaaggtagtggcaggagggcagcctcaggtctggctgctgccctggagtgtccagagagtgtctagggcaggtgagctacagggtctgggacccagaggccagggccaggccccactggggaggccacagttctgtgagcagaggaagagcttctttccaggaagcgagtactctgtcttgggagtggtgtaggcagggggaaggccaagggaggcagcaggccttgctctaagcgctttgcaagagcttgctggatcctcccaatagcctttggaggtgggctctattcctgtcccatcattacagatgaggaaacaggcacagagaggttacgtaatttgcccaagtccacacaggtagtaagggatggaaccagggcttgaacacaagccacatggcccagtacacatagagagaggcaggcaggtaggcataggctgtcagaaagagccagaaaatgggggtagggtggtcttctattctaacattgtctataaatgagttactgagaattttgtctggttagttgggcaaagggctcaactgactcccgagtttgtccatcccaaagggtggggggcgctgttggcaggaaggctgccccaaacatggacctgttgtgaccccagagagcccctaactgggtattaatgagcgcctgcacctgacggtgggggagtgggagaagggcaatcaggtttgctccccctctaccctttcccccactccgccacccgctttctgcccttctggcaggtcagcccaaggctaaagaggagggactgaaagccgcagcaggtgagcacctaaggccaagagcatcacctccaatcatcctggtggccttgatggggacaatggtttattccagatggggaaactgaggctcaggtgactgctgccagatctcccagctgtacagggctgggcatgtagcaggtagaatcagtagagccagtagagccaagagctcatgggcccgggtgcgaatccaggttctttcatggacttgctgtgtacccctgagtgagcaagctgcttcctctgtgagcctccatgtgggaacctctaacctgggaaaatacctacctttgaggagcgtcctgggattggacgggaagccctttataaaatgtaaagcgtttggcaaacgttgagggggaaatacctcaccagaacacaacccacacatgttggatgttaaaaaggaaatgtttattttcatgttataaggtgattacaaactcctctaaaaaaagcaaagatgaatttaaaatattgatatacatatttatctaaaaagcaaaagagaaaaaaacccctgcaaaatacagggaatcatatcataaaacatttatacacaaaagcttgtatactgcaagactgaactacacaccaaggatcttgttcaaatacaaatgttcctcctcag

SEQ ID NO: 32262 - DNA, 6055 bp, Homo Sapiens
aggttccccccagggcaacatgccagccccgtagcactgcccaccccacccactgtggtctgttgtaccccactgctggggtggtggttccaatgagacagggcacaccaaactccatctggctgttactgaggcggagacacgggtgatgattggctttctggggagagaggaagtcctgtgattggccagatctctggagcttgccgacgcggtgtgaggacgctcccacggaggccggaattggctgtgaaaggactgaggcagccatctgggggtagcgggcactcttatcagagcggctggagccggaccatcgtcccagagagctggggcagggggccgtgcccaatctccagggctcctggggccactgctgacctggctggatgcatcgggcagtggaccctccaggggcccgcgctgcacgggaagcctttgcccttgggggcctgagctgtgctggggcctggagctcctgcccgcctcatccccctcctcgtagcgcatggctgcctggaggcagatgctcagccagcattgggcagcccccgcttcctgctcccctacccccttcacatggcagtagttctgggcaccccagcaaaccatattatgctccaggggcgcccactccaagacccctccatgggaagctggaatccctgcatggctgtgtgcaggcattgctccgggagccagcccagccagggctttgggaacagcttgggcaactgtacgagtcagagcacgatagtgaggaggccacacgctgctaccacagcgcccttcgatacggaggaagcttcgctgagctggggccccgcattggccgactgcagcaggcccagctctggaactttcatactggctcctgccagcaccgagccaaggtcctgcccccactggagcaagtgtggaacttgctacaccttgagcacaaacggaactatggagccaagcggggaggtcccccggtgaagcgagctgctgaacccccagtggtgcagcctgtgcctcctgcagcactctcaggcccctcaggggaggagggcctcagccctggaggcaagcgaaggagaggctgcaactctgaacagactggccttcccccagggctgccactgcctccaccaccattaccaccaccaccaccaccaccaccaccaccaccaccacccctgcctggcctggctaccagccccccatttcagctaaccaagccagggctgtggagtaccctgcatggagatgcctggggcccagagcgcaagggttcagcacccccagagcgccaggagcagcggcactcgctgcctcacccatatccatacccagctccagcgtacaccgcgcacccccctggccaccggctggtcccggctgctcccccaggcccaggcccccgccccccaggagcagagagccatggctgcctgcctgccacccgtccccccggaagtgaccttagagagagcagagttcagaggtcgcggatggactccagcgtttcaccagcagcaaccaccgcctgcgtgccttacgccccttcccggccccctggcctccccggcaccaccaccagcagcagcagtagcagcagcagcaacactggtctccggggcgtggagccgaacccaggcattcccggcgctgaccattaccaaactcccgcgctggaggtctctcaccatggccgcctggggccctcggcacacagcagtcggaaaccgttcttgggggctcccgctgccactccccacctatccctgccacctggaccttcctcaccccctccacccccctgtccccgcctcttacgccccccaccaccccctgcctggttgaagggtccggcctgccgggcagcccgagaggatggagagatcttagaagagctcttctttgggactgagggacccccccgccctgccccaccacccctcccccatcgcgagggcttcttggggcctccggcctcccgcttttctgtgggcactcaggattctcacacccctcccactcccccaaccccaaccaccagcagtagcaacagcaacagtggcagccacagcagcagccctgctgggcctgtgtcctttcccccaccaccctatctggccagaagtatagacccccttccccggcctcccagcccagcacagaacccccaggacccacctcttgtacccctgactcttgccctgcctccagcccctccttcctcctgccaccaaaatacctcaggaagcttcaggcgcccggagagcccccggcccagggtctccttcccaaagacccccgaggtggggccggggccacccccaggccccctgagtaaagccccccagcctgtgccgcccggggttggggagctgcctgcccgaggccctcgactctttgattttccccccactccgctggaggaccagtttgaggagccagccgaattcaagatcctacctgatgggctggccaacatcatgaagatgctggacgaatccattcgcaaggaagaggaacagcaacaacacgaagcaggcgtggccccccaacccccgctgaaggagccctttgcatctctgcagtctcctttccccaccgacacagcccccaccactactgctcctgctgtcgccgtcaccaccaccaccaccaccaccaccaccaccacggccacccaggaagaggagaagaagccaccaccagccctaccaccaccaccgcctctagccaagttccctccaccctctcagccacagccaccaccacccccaccccccagcccggccagcctgctcaaatccttggcctccgtgctggagggacaaaagtactgttatcgggggactggagcagctgtttccacccggcctgggcccttgcccaccactcagtattcccctggccccccatcaggtgctaccgccctgccgcccacctcagcggcccctagcgcccagggctccccacagccctctgcttcctcgtcatctcagttctctacctcaggcgggccctgggcccgggagcgcagggcgggcgaagagccagtcccgggccccatgacccccacccaaccgcccccacccctatctctgccccctgctcgctctgagtctgaggtgctagaagagatcagccgggcttgcgagacccttgtggagcgggtgggccggagtgccactgacccagccgacccagtggacacagcagagccagcggacagtgggactgagcgactgctgccccccgcacaggccaaggaggaggctggcggggtggcggcagtgtcaggcagctgtaagcggcgacagaaggagcatcagaaggagcatcggcggcacaggcgggcctgtaaggacagtgtgggtcgtcggccccgtgagggcagggcaaaggccaaggccaaggtccccaaagaaaagagccgccgggtgctggggaacctggacctgcagagcgaggagatccagggtcgtgagaagtcccggcccgatcttggcggggcctccaaggccaagccacccacagctccagcccctccatcagctcctgcaccttctgcccagcccacacccccgtcagcctctgtccctggaaagaaggctcgggaggaagccccagggccaccgggtgtcagccgggccgacatgctgaagctgcgctcacttagtgaggggccccccaaggagctgaagatccggctcatcaaggtagagagtggtgacaaggagacctttatcgcctctgaggtggaagagcggcggctgcgcatggcagacctcaccatcagccactgtgctgctgacgtcgtgcgcgccagcaggaatgccaaggtgaaagggaagtttcgagagtcctacctttcccctgcccagtctgtgaaaccgaagatcaacactgaggagaagctgccccgggaaaaactcaacccccctacacccagcatctatctggagagcaaacgggatgccttctcacctgtcctgctgcagttctgtacagaccctcgaaatcccatcacagtgatccggggcctggcgggctccctgcggctcaacttgggcctcttctccaccaagaccctggtggaagcgagtggcgaacacaccgtggaagttcgcacccaggtgcagcagccctcagatgagaactgggatctgacaggcactcggcagatctggccttgtgagagctcccgttcccacaccaccattgccaagtacgcacagtaccaggcctcatccttccaggagtctctgcaggaggagaaggagagtgaggatgaggagtcagaggagccagacagcaccactggaacccctcctagcagcgcaccagacccgaagaaccatcacatcatcaagtttggcaccaacatcgacttgtctgatgctaagcggtggaagccccagctgcaggagctgctgaagctgcccgccttcatgcgggtaacatccacgggcaacatgctgagccacgtgggccacaccatcctgggcatgaacacggtgcagctgtacatgaaggtgcccggcagccgaacgccaggccaccaggagaataacaacttctgctccgtcaacatcaacattggcccaggcgactgcgagtggttcgcggtgcacgagcactactgggagaccatcagcgctttctgtgatcggcacggcgtggactacttgacgggttcctggtggccaatcctggatgatctctatgcatccaatattcctgtgtaccgcttcgtgcagcgacccggagacctcgtgtggattaatgcggggactgtgcactgggtgcaggccaccggctggtgcaacaacattgcctggaacgtggggcccctcaccgcctatcagtaccagctggccctggaacgatacgagtggaatgaggtgaagaacgtcaaatccatcgtgcccatgattcacgtgtcatggaacgtggctcgcacggtcaaaatcagcgaccccgacttgttcaagatgatcaagttctgcctgctgcagtccatgaagcactgccaggtgcaacgcgagagcctggtgcgggcagggaagaaaatcgcttaccagggccgtgtcaaggacgagccagcctactactgcaacgagtgcgatgtggaggtgtttaacatcctgttcgtgacaagtgagaatggcagccgcaacacgtacctggtacactgcgagggctgtgcccggcgccgcagcgcaggcctgcagggcgtggtggtgctggagcagtaccgcactgaggagctggctcaggcctacgacgccttcacgctggccccagccagcacgtcgcgatgaggccggacgccccgcccgcctgcctgcccgcgcaaggcgccgcggggccaccagcacatgcctgggctggacctaggtcccgcctgtggccgagaagggggtcgggcccagcccttccaccccattggcagctcccctcacttaatttattaagaaaaactttttttttttttttagcaaatatgaggaaaaaaggaaaaaaaatgggagacgggggagggggctggcagcccctcgcccaccagcgcctcccctcaccgactttggcctttttagcaacagacacaaggaccaggctccggcggcggcgggggtcacatacgggttccctcaccctgccagccgcccgcccgcccggcgcagatgcacgcggctcgtgtatgtacatagacgttacggcagccgaggtttttaatgagattctttctatgggctttacccctcccccggaacctccttttttacttccaatgctagctgtgacccctgtacatgtctctttattcacttggttatgatttgtattttttgttcttttcttgtttttttgtttttaatttataacagtcccactcacctctatttattcatttttgggaaaacccgctcccctcccctacgtcctgcactttctcggaccagtccccccactcccgacccgaccccagccccacctgagggtgagcaactcctgtactgtaggggaagaagtgggaactgaaatggtattttgt

SEQ ID NO: 32263 - DNA, 6925 bp, Homo Sapiens
atgattggaatggaaaatgaaagcagtaaggtgcaggccaaattgggatggtttgaagcaaaggccgataatgaaccgagctgttcgccggcagctcaagaactgttgacaaggctgggatttttactgggagaagggatcccaagtgccacacacataaccattgaagacaaaaatgaaaccatgtgcacagctctgagtcaaggcatcagtccttgctccacactaacaagcagcaccgcatctcctagcaccgatagcccctgctcaaccttgaatagctgtgtcagcaagacggcagccaacaaaagtccctgtgagaccattagcagccctagttccaccctggaaagcaaggacagtggaattatagccacaattacaagttcatccgaaaatgatgaccggagtggctccagtttggaatggaataaagatggaaacctaagattaggggttcagaagggagtgcttcatgaccgcagggcagataactgctccccagtggcagaagaggagaccaccgggtcagcagagagcacgctgcccaaagcagaatcctcagctggagatggtccagtcccttattctcagggctccagctcactaataatgccacggcccaactcagttgcagcaacaagctcaaccaaattggaagatctgagttatttagacgggcagagaaatgctcctctacggacgtcaattagattaccatggcacaatacggccggaggtagggcacaggaagttaaagcacgatttgctccctacaagccacaagacattttgttgaaacccttgttgtttgaagtaccaagcataacaacagactctgtgtttgtgggaagggattggctctttcaccagatagaagaaaacttgaggaacacagaactggcagaaaacagaggcgcggtggtggttggcaatgtgggatttgggaagacggcaatcatttccaagttggtggccctgagctgccacggaagccgcatgaggcagattgcttccaacagcccgggttcatcacctaaaacctctgaccccactcaggatcttcatttcactccgttgctttcaccgagttcttccacaagtgcttccagcacagctaaaacacctcttgggtctatcagtgctgaaaaccagagaccaagagaggatgcagtgaaatatcttgcttctaaggtggtggcctaccactactgccaggctgacaacacgtacacttgcctggtgcccgagtttgtgcacagcatcgcagctttgctctgccggtcccatcagctggccgcctacagagaccttctgataaaggagccccaactacagagcatgctgagcctccgatcctgtgtgcaggacccggtggcagctttcaagaggggagtgctggagccactcacaaacctgagaaatgagcagaaaattcctgaagaagaatacattattttgatagatggcttaaatgaagctgagtttcataaacctgattatggagatacgctttcttcatttattaccaaaattatttctaaatttcctgcctggttgaagttgattgtgactgtaagagcaaattttcaggaaatcataagtgcgctgccatttgtcaagctttccttagatgacttcccagacaacaaagacatccacagtgacctgcacgcctacgtccagcacagggtgcacagcagccaggacatcctcagcaacatctccctgaatggcaaggccgatgccacactcattggaaaagtgagcagccacctggtgctgcggagcctcggctcctacctgtacctcaagctcaccctggaccttttccagaggggccacttggtcattaagagtgccagctacaaggtggtgcccgtgtctctctctgagctctatttgcttcagtgcaacatgaagttcatgacccagtccgcctttgagagggcacttccgattctcaacgtggccctcgcatccctccaccccatgacagacgagcagatctttcaggctattaatgctggccacatccagggggagcagggatgggaagactttcagcagaggatggacgccctctcctgcttcctcattaagaggcgagacaaaacccgcatgttctgccacccgtccttcagggagtggcttgtatggagagcagacggggaaaacacggccttcctgtgtgagcccaggaacgggcacgcgctcttggcattcatgttctcgcgtcaggagggcaagttgaaccgccagcagaccatggagcttggccaccacatcctgaaggcgcacattttcaagggcctcagtaagaagacgggaatttcttcaagccatctccaagccctgtggatcggctacagcaccgaggggctgtccgccgccctggcctctctcaggaatctctatactcccaacgtgaaggtgagccgtctcctgattttgggaggggccaacgtgaactacaggacagaagtgttaaataatgccccaatcctgtgcgtccagtctcaccttggccacgaggaagttgtcactctgctcctggaatttggtgcctgcctggacggaacgtcagagaacggcatgactgccctctgttacgcagcagctgctggccacatgaagctggtgtgtctgctgaccaagaagggagtgagagtggaccacttggataagaagggccagtgtgcgcttgtccacagtgccctacggggccacggtgacattctccagtacctgctgacttgtgagtggtcgccgggtcctccccagccaggcaccctgaggaagagccacgccctgcagcaggcgctgaccgcggcggccagcatgggccacagctcggtggtccagtgcttgctggggatggagaaggaacatgaagtagaagtcaatggcaccgacacattgtggggagaaacagccctgactgccgccgcaggaagagggaagctggaggtctgtgagctgctgctggggcatggagctgctgtgtcgcggacaaacaggagaggggttccacctttgttttgtgcagcacgccaggggcattggcagattgttagactgctgttggaacgcggctgtgatgtgaacctaagtgacaagcaaggccggacgcccctcatggtggctgcttgtgaagggcacttgagcaccgtggaattcctcctttcaaaaggtgcagccctttcttctctagacaaagagggtctgtcagcattaagctgggcttgtctgaaaggtcacagggcagtggtccagtatctggttgaagaaggagctgcaatagaccagacagacaagaatggccgcacacccttggacctggctgccttctatggcgatgccgagactgtgctgtacctggtggagaagggagccgtgatcgagcatgtggaccacagcgggatgcggcccttggacagagccatcggctgccggaacacatctgtagtggtggcgctactcagaaagggagccaagttaggaaatgctgcttgggcgatggccacttccaaacctgatatcttgattatacttttacagaaattaatggaggaaggaaatgtgatgtacaaaaaagggaaaatgaaagaggcagcccagaggtaccagtatgccttaagaaagtttcctcgagaaggattcggagaggacatgagacccttcaatgaattaagggtttccctctatctcaatttgtcgcgatgccgaagaaaaacaaatgactttggcatggcagaggaatttgcttccaaggctctcgaattgaagcccaagtcctatgaagccttttatgccagagcaagagcgaagagaaatagcaggcaattcgtggcagctctggctgacctgcaagaggctgtgaaactctgtcccaccaatcaggaagtcaagaggcttctggcccgcgtagaagaggagtgcaaacaactccagaggagtcaacagcaaaaacagcagggcccgctaccagctccactcaacgactccgagaacgaagaggacaccccaacccctggcttaagtgaccactttcactctgaggagactgaagaggaagaaacttctccccaggaagaatctgtttccccaactcccaggtcccagccatcctcatctgtcccttcctcatacatccgaaaccttcaagaagggttacagtccaaaggaaggccggtatcgccacagagcagggcaggaatcggcaagtccctgagagagcctgtggcccagccagggctgctcctgcagccctccaagcaggcccagatcgtgaaaaccagccagcacctgggctctggccagtcggcagtgagaaatggcagtatgaaagttcagatctcttctcagaaccctcctccaagtcccatgccagggagaatcgctgccactcctgctgggagcagaacccagcatttagagggaacaggtactttcactacaagagctggttgtggccactttggggatcggctgggccccagccagaatgtccgcctgcagtgtggtgagaatggccctgcacaccctttaccaagtaagacgaaaaccacagagaggcttctgtctcattcctccgtggctgtggacgcagcccctccaaaccaaggtgggctggcgacctgcagcgacgtgcgacacccagcttccctcaccagctcaggctcttctggttctccatccagcagcataaagatgtcaagttcaaccagtagtttgacttcgagcagcagtttttcagatggcttcaaggtccaaggaccagatactagaattaaagacaaggttgtaacccacgttcagagcggtacagctgagcacagaccccgcaacacgccgttcatgggcatcatggataagactgcgaggttccaacagcagagcaatcctccaagccgcagctggcactgtccggcaccagaggggctgctgacaaacacgtcttctgcagctggcctgcagtctgctaacactgagaagccctctctcatgcaagtgggaggatataataaccaagccaaaacctgttctgtttctaccctgagtgcaagtgtccacaatggggcacaagtgaaggagctagaagaaagcaagtgccaaattccagtccactctcaagagaacaggataactaagactgtttctcatctgtaccaggaaagtatctccaaacagcagcctcatattagtaatgaagcccacaggagccacctcactgcagccaaaccaaagcgatcatttatagagtcaaatgtgtgaaccttaagaaatccccatttgtggaatttggaaacgtgtgttgactcctggtggtaaattaaatagtttttttcatcagaaaaattattttttagccattttttttctttggggtggatctgatgccattgatatatctaaaatgtgggataaaacttctttaatagctagaaatcaccataaataagaatgctaaacagaattgaaaattatatcaacttaaaattttaagacagcccagaagacattaatgactctcacttatgaaattgtttggcttttgccactttcttccttgcctttgctatatggtagaatcacagaacttacttagagaataaatatgtctattgttcaagagtaacaggtttaactcatgaccaagtgatgtacatccaagtgatgtattctggaaacgatggaattttacagttacagttccattgagtcaaatcccattttatatatacataaaaattaagttctgagtgagttctagctaaatataagtgcgactgtaaacgcagccaatttttttaagcagaatatgagaacacctaagtattctcttcatagcagttcctataaagggattaaacacttatttctgtgttatggttcttattcatatatttttatagcacttttggaacctatatttgtgcttgaaggtgtttttgatatttggaaacagtataagccatttggagtcatgattggtggtcaagtggattcaagctaaaatactaagaccagcattcttagtggcgcttataaattagctctcacctggtttccaaactgcttttaacaatggtagtgctcctggaacaatccttccaagctcctctaaggacaatatttaattcagatactaaaggtaagactggttgttacttttgttttgttgtacaattagtactttatagtcacatgttgtatatattaaatagcccagttttattcagacttgtaaatagaactatttcaatgtagttaatctaaaaacaaaaaagaaaaccccagtcacgatttgcatgttctctgtaagcttcatccatgctggttattgcactgaatgatatattattagggcatgttaacagtataccagtaacagcactttatctcatttatatgaacacctttgaggtgctacttaagtccaagctctgatgtattattcatttgtaaagataaggtacaggaatgaaccttggtttaaaggtatttttatatgaaaatggtgtgttattggaagatgttaaaatgctaatttgagagaagtaggagtgtatctgttttatatgttgggatgtgaaatttattttctaaaattgaggagaaggaagttatatatttgcagaatgttttaaagtgaattgttgtaatgaagttcctgtgaacatcattatggttttgtacaaataggaacctctgatgtcattcttcaacgtttgttcctgtgtgtacaattgtactttgtatgaacagctttatcatttttataggctttccatgagttttgctgtaactactatggcttatttattttctttaatatttgtgaaagtcttactcctttgttagttttgtttctgcacaactactgtacttttccatatggaataaagactattaatagaat

SEQ ID NO: 32264 - DNA, 6897 bp, Homo Sapiens
acatgccttctggtttgactggagtaatcctggtagaatccacgtagctctgaagacttacaagagcagtgattcccaggctttctcagcaatgtaccccatttcctgacatttacagctgaaggtgaagtttcccttttgcaaggagaaaattttggtggagaattatccaacaagaaaaagacctgtggctattaagatagacaagaagaagggaggcaaattccagccttttaaaaagttgtttggcaaaaggaaaaagaaagacccttcgttgttccgggtgccgtcgttggggaagaagagttactctcaccagagtgtcagcaatgggaccttctcttcggatgaggagaccctggaagacaatctaaggtccttcaactattctatgggaacccgggcattttcccatgacagtatttttatccctgatgggggagcagaaagtgagcagacagttcaagcaatgtcacaggacaacatcctgggcaaagtcaaaactcttcagcaacagttgggcaagaatatcaagtttgggcagcggtcacccaatgccattcccatgaataaggcaaacagtggagaggctagcttagaagaggatctgttcctgaccagtcccatggaaattgtgactcagcaggacatcgtcctctcagacgcagagaacaagtccagtgatacgccaagttctctaagtcctctgaatctccctggagctggaagtgagatggaagagaaggttgctcccgttaaaccgtctcggccaaaaaggcacttctcttctgctggcaccatcgaaagtgtcaacttagatgccatccccctggccatcgctcgcctggacaacagtgccgccaagcacaagctggctgttaagccaaaaaaacagagggtgtcaaagaagcacaggcgccttgcccaggatccacaacatgagcaaggcggccttgagagtcggccctgcctggaccagaacggacacccaggcgaggacaagccaacgtggcacgaagaggaacccaatccgctggattccgaggaagagagaagacgccaagaagactactggcgagaactggaggccaagtgcaagcggcaaaaggcggaagcagccgagaagagacgcctagaggagcagaggctgcaggcgctggagaggaggctttgggaagagaacagaaggcaggagctcttggaggaggagggcgaggggcaggagccgcctctagaggcggaaagggcgccgcgggaagagcagcagcggagcctggaagcgccaggttgggaggacgcggagcggagggagcgtgaggagcgcgagcgcctggaggcggaggaggagcgaaggcgtctgcaggcccaggcccaagcggaggagaggcggcggctggaggaggacgccaggctggaggagcggaggcggcaggaggaggaggaaggaagatgcgcggaggagctcaaaaggcaggaggaggaggaggctgagggatgggaagagctggaacagcaggaggcggaggtgcaggggccgcccgaggcgttggaggagactggggagggccggcggggcgcggaggaggaggatctgggggaagaggaggaggagggccaggcgcacctggaggactggagggggcagctcagtgagcttctgaacgactttgaggagaggctcgaagaccaggaacgcctgaaacccgaaggacaaagagaacactccgaggagccaggtatttgcgaggagcagaacccagaggccgagcggcgaagagagcagcagggaaggagcggggatttccagggggccgatcgtcctgggcccgaggaaaagagagaagaaggggacacggagcctctcctgaaacaagaggggccggtggaagccgcgcagcctccggtggagaggaaagaagccgccgcccttgaacaaggccgcaaggtggaggagctgcggtggcaggaggtggacgagagacagaccatgccccggccctacacgttccaggtgtcctccggagggaagcagattctctttcccaaagtcaacctgagccccgtgacgcccgcaaaggacacggggctcaccgctgctccccaggaaccaaaggcccccaaagccagcccagtccagcacgccctaccgtcgtccctgagcgttccccacaccgccattctggtcacgggcgcgcagctctgtggcccggcagtcaacctgagccagatcaaggacaccgcgtgcaagtccctcctgggcttggaggagaagaagcacgcggaagccccagctggggagaaccctccccgaggccccggcgacgcgagggcgggcagcgggaaggctaagccccgccaggagtctcccagcagcgcgtccgcactcgcagaatgggcttccattcggtccagaatcctgaagaacgcagagagtgacccgcgcagcagcgagagggaccagttgaggcccggtgatgagtccactcccaggggccggtgtgattcccgcgggaaccaacggaagactccgccagtcaatgcaaagttctctattatgcctgcctggcagaaattttccgatggtggcacggagacctccaaacagagcacggaagctgaaagcatacgaaaaagacccatgctgggacccagcgaagagacagccccccagcctcctcctgctggtgttcgcgagctcgggaagggtccggagaagtcggagatgcaccgggagcccgcagacaccaccgagggatgcaaatttgccaaagacctcccgtctttccttgtcccaagccttccttaccctccgcagaaagtggtggcccacacagagttcacgacctcgtcggacagcgagactgcaaacgggatagcaaagccagaccctgtgatgccaggtggagaggaaaaagcctcaccgtttggaataaaattgagaaggaccaactattccttgcgcttcaactgcgaccaacaggcagaacagaagaagaagaagaggcacagcagcaccggagacagcgcggatgcagggccgcctgcagcggggagcgctcgtggagagaaagagatggagggtgtggccctcaagcatggtccatccctcccccaagagcggaagcaagccccttccacccggagggactccgctgaaccttccagcagccgctctgttcctgtggcccaccctgggcctccaccggccagcagccagaccccggctccggagcacgacaaggcagcaaacaaaatgccactggcacaaaagccagcactggctcccaagcccaccagtcagaccccaccagcatccccactttccaaactgagcaggccctacttggtagagctgctgtctcgccgagcggggaggccggacccagagccaagtgagccgtccaaggaggaccaggagagcagtgaccgccggccaccctcgcccccaggccccgaggaaaggaagggacagaagagggacgaggaggaagaggcgacagagaggaaacctgcttccccacctctgcctgccactcagcaagagaaaccttctcaaacacccgaggccgggaggaaagagaagccgatgcttcagagcagacactccttagatggctccaaacttacagagaaagtggaaactgctcagccgctgtggataacgttagcactgcaaaagcaaaaggggtttcgggagcagcaggcgacgcgggaggagagaaagcaagccagagaggccaaacaggcagaaaagctctccaaagaaaatgtcagtgtcagcgtgcagcctggaagcagcagtgtcagcagagcaggttccctgcacaagtccactgctctgccagaagagaagaggcccgagactgcagtgtccaggcttgagcgcagagaacagctgaaaaaggccaatactcttcctacgtctgtgacagtggagatctccgactcggctcccccagcgccgctggtaaaagaagtcaccaagaggttttccaccccggatgctgcccccgtgtcaacagaaccagcctggctggctttggccaaaaggaaagcaaaggcttggagcgactgtccacagattattaagtaaagagtgactctcacccatccctactgccagttattggctcctctcttgccctttttatttatttattttttatatggggtaaagaaatcaagctagggaaaagaagcatgttttataggctccaaaataatgtttagaaactgaactggtggtgttcattgtaaagagtggatttgcacaaccctaggtcctggtgcctcgagctcctcctagttctcaagagaaaattccgtccacaggaccacatgaagcaaaatctctaagctaagaactcgtgagagcctgccatgcccatttcatggccttgcacacacacccacccacacaccattcagaacatgtacttttgccaacctttggtaatggttttttgattctatgcactaattttctttgtccaaaacatttactctaccatatgtctgggaatgtttatcctttctacagtaatggtgaaaggatcatatctagctaaaagcaagaacacccattctcctgaatgcagtgagtaattgggaatcacaaggaacattctggcacccaactgtgcccatcttagttttcatgagttttccccactctgaagctgtaacccagaaggcacatccattcacatttttaccgcactgtggattcatagtgtggggccctgttattccaataccctccttaaggacatgtgaagcatttggcccagttggctcccagggaacattttaatttaatgtagtgaagaaagacaattctagatcagagctacaagttcactttctgtctctgagaatctccatctagggcagtagttcttatgatgtgtaggctccctcctagggcctactcaatcagagcctgtggggactgggccaggaatatgtattctggcaaaaactcttcaggtcagttctgatagatcccaaaggttaagaactgtgagaaacactgatcctaatgcaatctaatttttcagacttcgaaggggaggctcattcactcaaaaagcaacagtgagacaggaaaaataataaaacaaccccccaagccagccatttattacaagaagcaacaggttattgacattacatgtttgaaaattccctttggtctttagggaaaataaacaggaagccaagatttggagcctttgtaataaggacttcctgcagaaagtcttttctttactataattgagtaattcatatttagagtcacatgtccagtagcatttctaattttgagcattcaccttgctacctttaaaaaacatctgagttttaagtggcctttttatcatcatacacatgtgcatacaaagaagggacttggcagtttaaaagccacatatattcacttttattgccctaaatttacatgaaacagacatactggcaaactcacatattgctggtgctaaccttatatttcatagtgttggcatattccccttttcttagattcttactccgaaatataggtacacatcctttgctctgtgcagagggaattacatcctttttcctctcctacaaaaacatgctttattaagtatccatcattactttcctttatgctcgctcaatatgcaatgtgctgttattctaccatgtaccttaaataaaggatgatggcaaagttatttaccatgtagaaaccattttctttctagaaacaatagctcagcctcactgtagcagctggcatgtgtggtcaagtggatagttgtactcttgcaagttggatttaatatcatatatactggaccttcagactgttaaaaatcaatgtaacctttttttattgctatggcaagcaattagtatttcactgcacgtcttccatactaatgttcatttctaaatcttatatgtaggcatttgttagttccaatgatttcctcactaatataacactttttaatgggaatctttccacctacagccctggaatgataatgctacagtaattcttctgaattgactttttctttcatcctgtcagctttggacaatatcccaattatggcagggaacaggtggggaactaagatcagttacaaaaagttgtagatgtgtcaactttgtattggctgggatatcactgtgcccaaacaaaacaggcgaaatacctcagttaaaatttttccatcaaagtctttaaaagaagagtatactgaagaaagggcagtcacaatacttacttctaacagcttctaaagggtacatgtttaacatttcatttcaaaatcaccccaaatttgcactaaataccaatgaagtgttattttgctttagtagtcttctgagcaacaaactatggggaattctgtaaaaacatataaaaagttcaagactttttttttaaatgaatgatcactatgttaaatgcaaacttttttttttttttatttaaacaaacatacacttctcctggcaaggttatagatgattaacctctgttcatagacttatatataaaactagagggttttttgtttacttttttaatttttcaagtgcaattgtttcttacacagacattattactattaaattatcatttagccagttatctgcaaatatatagtatgtattgtctcttcttgtgacgtttagtttaattgcttattttaaagcagaaacattagttacaagtgtcttacaatatttttaccaacagtaaagtagagacttaatgaaaataccttagtgtgattttaatataatttgcatattttagttgtataaagttttaatgtaaaatgtccattattgaagggaaaagatctttcaataaaaaatacccacgag

SEQ ID NO: 32265 - DNA, 7066 bp, Homo Sapiens
gcaggacgcagggaagccaacaggcgagtggcgaaggtggcggcagcggcggcgggggcagtcaccggctagggcgacggctccgaggccgagtggcggtccgacagagtcctccgtgtcctcccccgcatgacccccttggggtaagtgtactggagagagttggttatacattctaggaatctcaaagggtctggctctgtcacccaggctggagtgcagtgacacgatctcagctcactgtaacctccgcctcccgggttcaagcgatcctcccatctgaccctcccaagtagctggcattcagtgatcagcctttgagcctttcccacattgaagatggtgaaactagatattcatactctggctcatcacctcaagcaggaacgcttatatgtaaactctgagaaacagctcattcagaggctcaatgcagatgtacttaagacagctgaaaagttgtatcgtacagcatggattgcgaagcaacagagaatcaatttggatcggcttatcataaccagtgctgaagcttcccctgctgaatgttgccaacatgccaaaattttggaagatacacaatttgttgatgggtataagcaattgggatttcaggagactgcttatggagaattcttgagtcgattgagggaaaatcctcgtcttattgcctcctctttggttgctggagagaaacttaatcaggagaacacacaaagtgttatttacacagtttttacctccctgtatggcaattgcatcatgcaagaagatgaaagctacctccttcaggttttgcgatacttgattgaatttgaacttaaagaaagtgacaaccctaggcgacttttgaggagaggaacttgtgccttcagcatcttatttaaacttttttctgaaggactgttttctgccaaacttttcctcacagccactttacatgagccaattatgcaactgcttgttgaagatgaagatcacctggaaacagatccaaacaagctaattgagaggttctctccatctcagcaggaaaaactctttggagagaagggctcagatagattcaggcaaaaagttcaagaaatggtggagtccaatgaagcaaagctagtggctttggtgaacaaatttattggttatctcaaacagaacacatattgttttccacatagtttaaggtggatcgtgtctcagatgtacaaaaccctctcctgtgtagataggctggaagttggggaggtcagggcaatgtgtactgatctcctgttggcctgcttcatttgtcctgcagttgtcaatccagaacaatatggaataatttccgatgctcctattaatgaagtagcacgatttaatctgatgcaggtaggccgccttttgcagcagttagcaatgactggctctgaagagggagatccccgaacaaagagcagccttggaaagtttgacaaaagctgtgttgccgctttccttgatgttgtgattgggggccgtgcagtggagacccctccattgtcttccgtcaatcttctggaaggattgagcagaactgtggtttatataacctacagtcagcttattactctggtgaattttatgaagagtgtgatgtctggagatcaactgagagaagatagaatggctcttgacaatttattggcaaacctacccccggccaagccaggaaaaagtagcagtttagaaatgactccctacaatacacctcagctatctccagcaaccactccagcaaataaaaagaatcgattacctatagcaactcggagcagaagccgcaccaatatgctaatggacctacatatggaccatgaaggatcatctcaagaaaccattcaggaggtgcaaccagaagaggtgttggtcatttccttaggtacaggtccccagcttactccagggatgatgtcagaaaatgaggtcctaaacatgcagctttcggatggaggacaaggagatgtccctgttgatgaaaacaaactccatggtaaacctgataaaaccttgcgcttttccctctgcagtgataatctggaaggaatatctgaaggtccttcaaatcgctccaattcagtgtcctccctagacctagaaggagagtctgtgtcagaacttggagcaggaccttctggcagtaatggagttgaagctctacagctgttagaacatgagcaagctacaacacaggataaccttgatgataagctaaggaagtttgaaattcgtgacatgatgggattaacagatgatagggacatatcagaaacagtgagtgagacctggagtacagacgtcttgggaagtgactttgaccctaatattgatgaagatcgcttgcaagaaattgcaggtgctgcagcagagaacatgttaggcagtttgctgtgcctcccaggttcagggtcagtgcttcttgacccctgcactggttctaccatatcagagacaacaagtgaagcttggagtgtagaggtattgccaagtgactcagaggccccagacctaaagcaggaggagcgtctgcaagaactggagagctgttctggactgggtagcacatctgatgatacggatgtcagggaggtcagttcccgccccagcacaccaggcctcagtgttgtgtccggcataagtgcaacctctgaggatattcccaataagattgaagacctgagatctgagtgcagctctgattttgggggtaaagattctgtcactagtccagacatggatgaaataactcacgattttctttatatacttcagccaaaacaacattttcaacacattgaagcagaagcagacatgagaatccagctgtcttctagtgcccaccagctgacctctcctccttctcagtcagagtctctgctggccatgtttgatccactgtcttcacatgaaggggcttctgctgtggtaaggccaaaggttcactatgctaggccatcgcatccaccaccagatcccccaatcctggaaggagctgtgggaggaaatgaggccaggttgccaaactttggttcccatgttttaactccagctgaaatggaggcattcaagcaaaggcattcttaccctgagagactagttcgaagcaggagctctgatatagtatcttctgtccggagacccatgagtgaccccagctggaaccggcgtccaggaaatgaagagcgagaactccctccagctgcagccattggtgctacttctttggtggctgcacctcattcatcatcttcatccccgagtaaggactcctcaagaggagagactgaagaacgcaaagatagcgatgatgagaaatcagacaggaacagaccttggtggagaaaacgttttgtttcagccatgcctaaagctcctataccatttagaaagaaagaaaaacaagaaaaagacaaagatgatctggggcctgacagattctcaacactcacagatgatcccagccctagactcagtgcacaagctcaggtggctgaggatattctggacaaatacaggaatgccattaaacggaccagccccagtgatggagcaatggcaaactatgaaagtacagaggttatgggtgatggtgaaagtgcacatgattctccccgtgacgaagcactgcagaacatctcggctgatgatctcccagactctgcaagccaagcagcccacccgcaggattcagctttctcttacagagatgcaaaaaagaaactgaggcttgctctttgctctgcggactctgttgccttcccagtgctgacccattcaacaaggaatggtttaccagaccacacagacccagaagacaatgaaattgtatgcttcttaaaagttcaaatagctgaagcaattaatttacaagataagaatctaatggctcaacttcaagaaacaatgcgctgtgtgtgccgttttgataataggacttgtaggaaactgctggcttcgattgctgaggactacagaaaaagagccccatatattgcttatctcactcgttgtcgacaaggactacagaccacacaggctcacctggaaaggctattgcaaagagttttgcgggacaaagaagtggccaatcgatactttaccactgtctgtgtgagattactgcttgagagcaaagaaaagaagatcagggaattcattcaagactttcagaaactcaccgcagctgacgataaaactgctcaggtagaagattttctgcagtttctttatggtgcaatggcccaggatgtcatatggcaaaacgcgagtgaagaacagcttcaagatgcacagctggccattgagcgaagcgtgatgaaccggattttcaagctcgccttctaccctaatcaagatggggacatacttcgcgaccaggttcttcatgaacatatccagagattgtctaaagtagtgactgcaaatcacagagctcttcagataccagaggtttatcttcgagaagcaccatggccatctgcacaatcagaaatcaggacaataagtgcttataaaaccccccgggacaaagtgcagtgcatcctgagaatgtgctctacgattatgaacctcctgagcctggccaatgaggactctgtccctggagcggatgactttgttcctgtgttggtgtttgtgttgataaaggcaaatccaccctgtttgctgtctactgtgcagtatatcagtagcttttatgctagctgtctgtctggagaggagtcctattggtggatgcagttcacagcagcagtagaattcattaaaaccatcgatgaccgaaagtgaccaagaccaaggcccaccaaggcagcagactgttaatcagacaaacagatctctgagaaggtgcatcagctgctttgaaggctgaagattgttttgtatgatactgcacagcatcaggcattttaaagcagatctttactaaacaggttaatgagctaacaagcaggttctctcgtctttgggctctttcctttctgagttgcatattctattttcttgtccccaagtagagactagtactacaaaaagggaccacatttttcaagtatttctaagtataaaaaacaaaacaaaaatctcttaggaaatgtctagacctccattcttggattccctttctttccttttattttaaaaaagaacagtacccctcttttaagatgctgtcttacattaatgagcatctaatggaaagaaggtatgagttgcactgaggattagaatagtggtgcgttagtggcattatctataaatacactcacctaaattgaaagctaagaaggaaatgtaaatataatatatatttatatttgatgtaatatggacatctgcagattctaataaacaaggactattgctgatagtaggctgtgacatactgtcttgtgaaatggtttccttgacaaaatttaagctgagcttaaaagcaaaaaacaaaaagtacacagaaatatttattaaaatgtaatacagtttattgaactttctaggtatggagtttgatggacagggctgcctttaatgagtgtgaaggtcactaagtcacttagacatctcaccgtggaagtttgtgagcctgcattaggagatagactgattaccatacatgacataaaaaggaacagtggatagctcatactttatggtggttcttctcctccgaaataatatactgcagaaatcccagacagagctccttacaaacctttaattgtaatatatttttgatgattattcacattgaatgcacagaccaagaattcagtgaatgtcattttttaaaaaactaatttgtattgtctgctctagtgatacaagttttactagtgataaactattttaatcaaccatactattcttatggaaaaaaatatctattttggcaggtttctgtgcctttatttccctcttctgaaaaaaagtctgtgttttcatagtttggtttgcattgtatatcaataattaatcaggaatgggttttggtgcctgaaaaattggccatggaggcacaccaaagcttcaagcacaagtcttgtacatgggccatcactgtctggtttcacttcgtgtgtttcctaaacacatttagctgcttttttaacaaactcagccccatacttgagtcccttgttgttgggagcatttccaggcatcttttaagggaactgtgacaaacagcctcgggcagatgaacacggaggctctctgttgtctgtctctgagatctttgtgtctgggaatgcctaaagattttatttttttttctttgtttttattttattttattttatttttttgagacagagtctcaccctgttgcccaggctggagtgcaatggtgcgatcttggctcactgcaacctccacctcccagttcaagtgattcccctgcctcagcctcgcgagtagctaggactacaggcgcatgtcaccaagcccggctaatttttgtatttttagtagaaacggggtttcaccatgttggccaggatgatcctcaatctcctgacctcgtgatccacccgccttggcctcccaaagtgcgggattacaagcgtgaaccaccctgcccagccagaaactagattttctttatgcctccaccccttcttattcatttactttacaataccaaaataacaaattgcataggagtgtgggatgtggtttctgccttctagagagagatcagaattaaactagtactatgaaatgtccttttgaatgttaggtcaagaaatccatgtacagagtcgtgcacttcattggctgtaactgtcaaacttgccttgtattagaagttaaatcccatcgtaaatacatcacgaggccagctgtgtgatttctgagacctagatgagagtccatttacttcagcctttgattcagtaaatgttaagcagcagaagacttcgaatggttgaaattcattgttacaggatttaactcataaaccaatgagagattttttttttctctgcaatggttgctaagtctattccatgttaacactgtggaaataaatatgaagatgtggacattg

SEQ ID NO: 32266 - DNA, 4137 bp, Homo Sapiens
aaccggcgcgcgcgtaggggctgggaggccggcgcgcagatctggcggtgagcgctgccgccccggggcccccagccatgtcggccgaggagatggtgcagatccgcctggaggaccgctgctacccggtgagcaagaggaagctcatcgagcagagcgactacttccgcgccctctaccgctccggcatgcgcgaggccctgagccaggaggccggcggcccggaggtgcagcagctgcgcggcctcagcgcgccgggcctgcggctggtgctggacttcatcaacgccggcggggcccgcgaaggctggctcctgggcccgcgcggggaaaagggcggcggggtggacgaggacgaggagatggatgaggtgagcctgctgtccgagctggtggaggcggcctccttcctgcaggtcacgtccctgctgcagctgctgctgtcccaggtgcggctcaataactgcctggagatgtaccgcctggcgcaggtgtacgggctgcccgacctgcaggaggcctgcctgcgcttcatggtcgtccacttccacgaggtgctgtgcaagccccagttccacctcctggggtctcctccccaagctccaggggatgtcagcctgaagcagaggctgagggaggcccggatgactgggactcctgtcctcgtggccctcggggacttcctggggggacccctggcccctcacccctaccagggggagcccccgtccatgctcaggtacgaggagatgactgagcgttggttcccgctggccaacaaccttcctcccgacctggtcaatgtcaggggctatgggtctgccatcctggacaactacctcttcatagtgggcgggtacaggatcactagccaggagatctccgctgcgcattcctacaaccccagcaccaacgagtggctccaggtggcctccatgaaccagaagaggtctaacttcaaacttgtggctgttaattcaaaactctatgccatcggagggcaggccgtttctaacgttgagtgttacaaccccgagcaggatgcgtggaattttgtggcgcccttacccaatcctctggctgagttctctgcctgtgagtgtaagggaaaaatttatgtcattggaggatacactaccagagaccggaacatgaacattttgcagtactgcccctcttccgacatgtggacgctctttgaaacatgtgacgtccacattcgcaagcagcagatggtgtctgtggaagagaccatctacatcgtgggggggtgtctccacgagctggggcccaaccgcaggagcagccagagcgaggacatgctcaccgtgcagtcctacaacaccgtcacccgccagtggctctacctcaaggagaacacgtccaaatcgggtcttaacttgacttgtgcgctccataacgacggcatctacatcatgagcagagacgtcaccctgtcgaccagcttggaacaccgagtgttcctcaagtacaacatcttttcagatagttgggaagcatttcggcgttttccagcttttggacataacttgctggtttcttctctttatctgcccaataaagcagaaacatgactgaattgaattggtagatgaaaaaaacctggttcaagttttttttaaaatgtggtgtcccattccaagggagaccaattcctaaagggtaaagaagggttaaagtaggtcacatatatacagtagcagctgtaaataagcttacttgaactaattacttgaaaactggtggaaaaaagagaccaactttgttattttttaaattattgatttttaaattatgggagcaaatccatctccaaacatgatactcttgggccaatgacggatcatcaaaatgtagattcattgtgtctgtgtggtaaagggccaaagtcaataattgggacaaatggtaaagatgattttaaaatctgttgtatttaggtcccttgacatatcattagcaccttaagtgagaggttttctttttcttatcagtgtccttgacaagcattcatattaacatattcattctctcttctccatcacccatacccacacatacatctagtatgtttagggttctgtgttcagatattttgtttgcacactactttttaggaaacttataatgatggagccctacagtgaatccttaccagtgttcagtcctccccaaaacttgcataaaaatattcttagctatttttccagccttttttgcagttacaaatgctggataaatagactgataaaacctcttattttatttatgtggcaggttgcatatttatgtggacacataggttgcactgctaggcattctgtattgttttaaagaggatatattatttagaaaaatggacatatgaatattattaaaaattgagtcttaaatttaaatgggaagggaagaaaacaccaaataagaaaaaaatttgcctttaagagttacttttgttgaatgtatttgacttagttcttattttaaggctaaaaaaactttgtcatatttaagtcggcagctttctaatttaatcttagctttgtaattcatgttttgcttttgtggactaaggtaaggacagcatttaaatatttgtgctggagtgaggggaagaagctgttacagaagtggaatggtttctggtggtatttctgaagttaggtaaagtgctttacttgccttggttgttaattgaaatagaattcagctcaagcagttgttttcagtgagtgagttaacaataaaagcttctgccaatcatagatcaacattcctcaaaaatacatacactcatacttatggaaattttattttgattgaaaacactctgaaattatctgatattttgtaatggcatcagttaaactgtgagctggattccatctttctgcagtaacagcgggcagaaccatttcagttagcatgtgcctcactttaagaaagtcctgtaggggaaaaaaaaaactgtcagagcgaattcatgcattcaacaaacacttatgagtgcctggagtatgccgtccactgtgcagatgtaggacaggggctaatcacttagagttcttcagtttattagaggagtgactacaggttttctttacaaccatggcctctagtatacttaaaataagcgtccagttataaaaagcctatttgcacaactttttgggaatacttctattaactaaaatgaggtaagccattattttggacatagaaacagatctttgtatcttgtcaccaaataatcttacctctagtctacttacaactttgtaagggtttctaagctatgcccatttattcccaaatattaagcccttaaaaaaataaaacctctgaaccaaaatcttcccaggaatagtacttaatagattttaatgttaatttatattcattgtagaattgaatttccagtgacctgtaatttcattacatatattttaaaatctatttattttagatggtgttaacttttcgttgctgaagagcttaactttttaaaggctttgtcctatacatttagaagatgagtcagttgaattagtactggacaaacagttggagattagtttgcaaataagcatatcatatcaaatacaatattccagccaaccagttaattctcttcctggttacattcattgggtctatttgcctaatgttgacaattagattcttggaccaagtgagggtgtactctgatccacaaagctcttttataaaccaggtttgaggttgtgtgtgtgtgtgggggtgtgtgtgtgtgtgtgtgtgtatgtttgcatattatagctctctttaagacagacatctaaaaagattttggttattctgggctgccagcagtacgtgggaaaggtggaatgtgcaataggaacagatctgtgcattttgtgacatcgtccttcctgctgtgcacatcagctgtgatgacattttgagggtagttttaatttagctcggttctcttgttggtgccagtattacattgaagactacctatgatagaggcaatgttgctttgaaaatctcccttcaggcggaggttgcagtgagccgagattgtgccattgcactccagcctgggcgacagtgcaagactctgtctcc

SEQ ID NO: 32267 - DNA, 8668 bp, Homo Sapiens
cagccccggcaggatggcggcggacacgcaggtttccgagacactaaagcgttttgcagggaaggtgacaacagccagtgtaaaggaacggagagaaatcctcagtgaacttgggaagtgtgttgctggaaaagatcttccagagggagcagtgaaggggctctgcaaattgttctgcttgactctgcatcgatatagagatgcagcctcccgcagggccttgcaggcagccatccagcagttggctgaggcccagccagaagccactgctaagaaccttctacactctctgcagtcttctggtataggctccaaagcaggtgttcccagtaagagcagtggctctgccgccttgctggccttgacctggacctgcctcctggtgcgcattgtctttccatcgagagccaagcgacaaggagacatctggaacaaactggtggaagtgcagtgcctgctcttgctggaggtgctgggtggctcccacaagcacgccgtggatggtgctgtgaagaaactcacgaagctgtggaaagagaaccccgggctggtggaacagtacttgtcagccattctcagcctagagcccaaccagaactatgctggcatgctggggctgctggtgcagttctgcacgagtcacaaggagatggacgtggtcagtcagcacaagagcgccctactggacttttacatgaagaacatcctgatgagcaaagtcaagcctccgaagtacctgttggatagctgtgcccctctgctccgatacctgtcccactcagaatttaaggatctgatactgcccaccatacagaagtccttactgaggagtccagagaatgttattgaaactatttctagtctgctggcatcagtgacgcttgacctcagccagtatgccatggacatcgtgaaaggactggctggtcacctgaaatccaacagtccccgcctgatggatgaagctgtgctggcactgcggaacctggcacgccagtgcagtgactcttcggccatggaatccctgaccaagcacctatttgctatcctcggaggctcggaaggaaaactaactgttgtagcccagaagatgagcgtcctctcagggattgggagcgtcagtcatcacgtggtgtctggaccttccagtcaggtcctgaatgggatcgtggctgagctgttcatcccgttccttcagcaggaagttcatgaagggaccttggtacacgctgtctcagtcctggctctctggtgtaaccgattcactatggaagtgcccaagaagctcactgaatggttcaaaaaagctttcagccttaaaacctccacatctgcggtgaggcatgcctacctgcagtgcatgttggcctcttaccggggtgacacgctgttgcaggccctggacttactgcccttgctcatccagacagtggagaaggcagcctcccaaagcactcaggttcccaccatcactgaaggggttgccgcagccttgttgctcttaaagttgtcagtggctgactcacaggctgaggccaaactgagcagtttctggcagttgattgtggatgagaaaaagcaggttttcacttctgagaaattcctggtcatggcttcagaggatgccctgtgtactgtgttgcatctgacagagagacttttccttgaccacccgcatagactcactggcaacaaagttcagcagtaccaccgggctctggtggcggtgctcctgagccgcacctggcacgtccgcaggcaggctcagcagacagttcggaagctgctgtcctctcttgggggctttaagctggcgcacggactcttggaggagctgaagactgtcctcagttctcacaaggtgctgcccttagaggctttggtgactgatgctggagaggtgactgaggcaggcaaggcctacgtgcctccacgggtcctgcaggaggctctgtgtgtcatctccggtgtgccagggctcaagggtgatgtcaccgacactgaacaactggcccaggaaatgctgatcatctcccaccacccatccttagttgccgtgcagtctggactttggccagcacttcttgccaggatgaagatcgatcctgaagcctttatcaccaggcacctggatcagatcattcccaggatgaccacacagagtcccctaaaccagtcctccatgaatgccatgggctccctttccgtcctgtcgccggaccgggtcctcccacagctcatcagcaccatcactgcctccgtgcagaaccctgcactgcgcctggtgacgcgggaggagtttgccattatgcagacccctgctggggagctgtatgacaaatccatcattcagagtgcccagcaggacagcataaaaaaggccaacatgaagcgagagaacaaagcttattccttcaaagagcagatcatcgagctggagctgaaggaggagataaagaagaagaaaggcatcaaagaggaggtgcagctgaccagcaagcagaaggagatgctgcaggcccagctagacagggaggcgcaggtccggaggcggctgcaggagctggatggggagctggaggcggcgcttggactgctggacatcatcctggccaagaacccgtccggcctgacccagtacatccctgttttggtcgactcttttctgcccttgctgaagtctcccctggctgctcccaggatcaagaaccccttcttgtccttggctgcctgtgtcatgccctctaggctcaaggctttgggcactttggtgagccacgtgaccctgcgcctgctgaagccagagtgtgtcctggataagtcctggtgccaggaagagctgtcggtggctgtgaagagggcggtgatgctgctgcacacccacaccatcaccagcagggtgggcaagggggagccaggtgctgcgcccttgtccgcgccagccttctccttagtcttcccgtttctgaagatggtgctgacggagatgccccaccacagtgaggaggaggaggagtggatggcccagattcttcagatcctcactgtccaagcccagctgagggcctcccccaacaccccacccgggcgggtggacgagaatggcccggagttgctgcctcgcgtggccatgctgcgtcttctgacttgggtgatcgggacgggctcgcctcgcttacaggttctggcttcagacaccctgaccaccctgtgtgccagcagcagtggtgatgatggctgtgcctttgcagagcaggaggaggtggacgtgctgctctgtgccttgcagtccccgtgtgccagcgtgcgggaaaccgtgctccgggggctgatggaactccacatggtattgccagcacctgatactgatgagaagaatggcctgaaccttctgcggagactctgggtggtcaagtttgacaaggaggaggagatccggaagctggctgagaggctctggtcaatgatgggcctagacctgcagccagacctctgctccttgctgattgacgacgtgatctatcatgaggcggctgtaaggcaggcaggggccgaagccctctcccaagcagtggcacgttaccagcggcaggcggcggaggttatgggcaggctcatggagatttaccaggaaaagctctaccggccgcccccagtgctggatgctttgggacgagttatttcagaatctcctccagatcagtgggaagccaggtgtggcttggcgttggccctcaacaagctctcccagtatttggacagctctcaggtgaagccactctttcagttttttgtccctgatgccctcaatgaccgacacccagatgtccggaagtgcatgttggatgcagccctcgcaacgctcaacactcatgggaaggagaacgtcaactcgctgttgccagtattcgaggagttcctgaagaacgcgcccaatgatgccagctatgatgctgtgcgacagagtgtggtggtcctgatgggctctctggccaagcacctggacaagagtgaccccaaagtgaagcccattgttgccaagctcatcgctgccctctccaccccctcccagcaggtccaggagtccgtagccagctgcttgccaccccttgtgccagccatcaaggaggatgctggagggatgatccagaggcttatgcagcagctgctggagtcagacaagtacgcagagcgcaaaggggccgcctatggcctggcgggcctggtgaagggcctgggcatcctctcgctgaagcaacaggagatgatggcggcactgactgatgccatccaagataagaagaacttccgccggcgagagggagccctctttgccttcgagatgctctgcaccatgctggggaaactttttgagccgtatgtggttcacgtgctgccccatctgctcctgtgctttggggatggaaaccagtatgtgcgtgaggctgcagatgactgtgccaaggctgtgatgagcaacttgagtgctcacggggtgaagctggtgctcccctccttactggctgccctggaggaggaatcgtggcggaccaaagctgggtcagtggagcttcttggggcaatggcgtactgtgctcctaagcagctgtcatcctgtctacccaacattgtgcccaagcttacggaggtgctgaccgactcccatgtcaaagtccagaaggctggacagcaggcgctcaggcagatcggctccgttatcaggaacccggagatcctggccattgctccagtcctcctggatgccctgacggatccctccaggaagacccagaagtgcttgcagaccctgctggacaccaagtttgtccacttcattgatgccccatccctggccctcatcatgcccattgtccagagagccttccaggaccgttccacggacacgcggaagatggcagcccagattattggcaacatgtactccctgacagaccagaaggacttggctccgtacctgcccagcgtgacgcctggcctgaaagcatcgcttttggaccctgtgcctgaggtgcggaccgtatctgcaaaggcccttggggccatggtgaagggcatgggggagtcgtgctttgaggacttgctgccgtggctgatggagacactgacctatgagcagagctctgtggatcgctcaggcgctgcacaggggttggctgaggtcatggccggtttgggggtggagaagttggagaagttgatgccagaaatcgtggctacagccagcaaagtggacattgcaccccatgtccgagatggctacattatgatgtttaactacctgcccatcacctttggagacaagtttactccttatgtggggcccatcatcccctgtatcctcaaagctcttgctgatgagaatgagtttgtgcgtgacaccgccctgcgcgcgggccagcgggttatctccatgtacgctgagacagccatcgccctgctgctgccccagctagagcaaggcctctttgatgacctttggagaatcaggttcagctctgttcagctccttggggatctcctgtttcacatctcaggagtcactgggaagatgaccacagaaactgcctctgaggatgataactttggaactgcccagtccaacaaggcgatcatcactgccctgggggtagagcggcggaaccgggtgttggcagggctgtacatgggccgctcagacacccagctggtggtgcggcaggcgtccctgcatgtctggaagattgttgtctccaataccccccgcaccttgcgtgagatcctacccactctctttgggctcctgctgggtttcctggccagcacgtgtgcagataagagaacgattgcagcgagaacattgggagatcttgtgcggaagttaggggagaaaatcctccccgagatcatccccatccttgaggaaggcctgaggtctcagaagagcgatgagaggcagggtgtgtgcattggcctaagtgagatcatgaagtccaccagccgggatgccgtgctgtatttctctgaatccctcgtgcccacggcaaggaaggctttgtgtgacccactggaggaggtcagagaggcggcagccaagactttcgagcagctgcattccaccatcggccaccaggctctggaggacattctcccatttttactaaagcagctggatgacgaggaggtgtcagagtttgccttggatggtctgaagcaagtcatggctattaagagtcgtgtggtgctgccctaccttgtgcccaagctgacaacgccacctgtcaacacccgggtgctggctttcctttcgtcagtggctggtgatgccctcacccgtcatcttggcgtgatcctcccagcggtcatgctggccctgaaggaaaagcttgggaccccagatgagcagctggagatggccaattgtcaggctgtgatcctctccgtagaggatgacacagggcaccggatcatcatcgagtatctgctggaggccacccgcagccctgaggtgggcatgaggcaagctgctgccatcatcctcaacatctactgttcccgctcaaaggctgactacaccagccacctgcggagcctggtctcgggcctgatccgcctcttcaatgactccagccctgtggttctggaggagagctgggatgccctaaatgccatcactaagaagctggatgctggcaaccagttggcactcattgaagagctgcacaaggaaatccggctcatagggaacgagagcaaaggcgagcatgtgccaggattctgcctcccgaagaagggagtgacctccatccttccagtgttgcgggaaggagtcctgactggcagccctgagcagaaggaggaggcagccaaagccttaggcttggtaatccgcctgacctcggctgacgccctgaggccctccgtggtcagcatcactggccctctgatccgcatcctgggggacaggttcagctggaatgtgaaggcggctctgctcgagacactcagcctcttgttggctaaggttgggattgccctgaagcccttcctgccccagctgcagaccactttcaccaaagccctgcaggactccaaccggggggtgcgcctgaaggccgcagatgctctggggaagctcatttccatccacattaaggtggaccccctcttcacagagctgctcaatggcatccgcgccatggaggacccaggtgtcagggacaccatgctgcaggccctgaggtttgtgattcagggagcaggggccaaagtggatgccgtcatccggaaaaacatcgtctcactcctgctgagcatgctgggacacgatgaggacaacactcgcatctcctcagccgggtgcctaggggaactgtgtgcctttttgactgaagaggagcttagtgccgttctacagcagtgcttgctggcggacgtgtccggcattgactggatggttcggcacgggcggagcctggcactttccgtggctgtgaatgtggctcctggcagactttgtgccggcagatatagcagtgatgttcaggaaatgatcctgagcagtgccacggcggacaggatccccattgcggtgagcggggtccggggcatgggctttctcatgagacaccacatcgagacaggcggagggcagttgccggccaaactttccagcctgttcgttaagtgtctgcagaacccatccagcgacatcaggctggtggctgagaagatgatctggtgggcaaataaggacccactgcctcccctggacccccaggccatcaagcccatcctgaaggctcttcttgacaacaccaaggataagaacaccgtggtcagggcctacagcgaccaggcaattgtcaacctcctcaagatgcggcagggtgaagaggtgtttcagtccctctccaagatcctggatgtggccagtttggaggtgctgaacgaggttaaccgaaggtccctgaagaagctggccagccaggccgactccacggagcaggtggacgacaccatcctgacatgagaggcctgggccagcagcagcattgccgctccacatctttgctcaatgttttcatttttgaaaatacatttgttccaatggggagcttggaagatggcgttcccagaaagtattttaatatcaatagaccacagccaaagccttaaatcaaacccacacacaactgaaaattgcctcctccatctctcaccttttcctgtggagaagagaaggaaaagcacacgcatgcgcctcagcaaatggcagcccaggagctgtttgtccagtttagcatggctaggtctggaactataatagcagggtcagactgtgggttcctcttctcctgtgcttgagctctggtttgagagctggcgctaccaacctttttcctatatcccgagtggggcacagacggtggatctctgcccagtgtggtgtgtctggcttggcttttcaatattgtgaggtctgaatggatctgacccctgtcagatgaaaatgattcacagctctggcagttcccaagtctggggaggggtataggtttgaaaggctgtttgaaagaggaatgtttaataaaggctttgatttaatcttgatataaacagatttttaaaaatctccacccattaaacatgaagcttcctgcatcaggaa

SEQ ID NO: 32268 - DNA, 5574 bp, Homo Sapiens
cgcggccaattcatggacaggaactaccccagcgccggcttcggggacccgctcggcgccggggcgggatggagttacgagaggtcagcgaaagctagcttggtttatggcagctccaggacctcgcaccccgagacggacatcttacaccgccaggcctatgcggccccccacccactgcaaagctatgccaccaaccaccacccggcaggcctctctggactcttcgacactggcctccaccacgcgggctcagcagggcccgacgcctccgtcatgaaccttatctcggccctggaatcccggggcccccagcctggcccctccgcctcctctctcctctcccagttccgcagtccttcctggcaaacagccatgcacacgccaggccccacggagctcttcatctcgggtgccctgccgggttccagcacctttccgtcctcatctgccctgtcggcttaccaacacccggcttccttcggcagccgccccttcccagtgccctcgtccctcagcctccaggaccccccattcagccctccagctaacgggctcctgtcccctcatgacgtgctgcacctgaagccctcgcaggcacccacggtgccctcttcactgggcttcgagcgcctggcagggggcggtgtcttggggccagctggtctcggtccagcccagacccccccttaccgccctggccccccagacccaccaccacctcctcgccacctcccaactcagttcaacctgctggcttcctcttccgctgccgccgccgctgccgagcagtcctccccacagctctataacttctcgggtgctgccccgggcccaccgccgcctgagcgggccctgccacgccaggacacggtcatcaagcactaccagcggccagccagtgcccagcccccaccacccccgccaccagcccatgcgctccagcactatctgagctgtggaggcagctacccctccatgggccaccgggccaacctggcctgcagccccctggcggagccacggctggggcatctggccgggccacgggccctgaggcagcagggggcggtggggctgggggtggtggtggaggttaccgccccatcattcagtcgcctgggtacaagacgggcaaaggtggttatggagcagctgccgggggtgccaccaggccccccccaccccgttcgaccgccacccccgcctccaccacccatgcccctgcagctcgaggcccacctccgcagccatggcctggagcccgcggcccccagcccccgcctgcgacccgaggagagcctggatccgccaggcgccatgcaggaattgctcggggctctggagccgctgcccccggcgcctggggatactggcgtaggcccaccaaactcggagggcaaggatcccgcaggcgcctaccgcagccccagcccgcaaggcaccaaggcgccgcgtttcgtgccgctcacctccatctgcttccctgactccttgctccaagacgaggagcgcagcttcttccccaccatggaggagatgttcggtggaggggccgcggacgactacggcaaggccgggccacctgaggacgagggggaccccaaggctggcgctgggccaccccccggcccccctgcttatgatccctatgggccctactgtcctggccgggcgtcgggagccgggcccgagacaccgggcctgggcctggaccccaacaaaccgcctgaactgccctccacggtcaacgccgagccgctgggcctgatccagagtggcccccaccaggcggcgccaccacccccgcctccgccaccgccgcctcccgcgccggcctccgaacccaagggtggcctcacctcgcccatcttctgctctaccaagccaaagaagctgctcaagacatcctccttccacctgctgcggcgccgcgacccacccttccagacccccaagaagctgtacgcccaggagtacgagttcgaggcggacgaggacaaggccgatgttcccgccgacatccgcctcaacccccggcgcttgcctgacctggtctccagctgccgctcccgtccggccctctcgccactgggggacatcgacttctgcccacccaacccaggacccgatggcccccggcgccgtggccgcaagcccacgaaggcgaaacgtgatgggccaccccggccacgggggaggccccggatccgccccctggaggtcccgaccactgcggggcccgcctcggcctccacgcccaccgatggcgccaagaaaccccggggccggggccgaggccggggtcgaaaggctgaggaggcagggggcacccggttggagcccctgaagccacttaagatcaagctgtctgtgcccaaggctggcgagggtctgggaacctcatcgggtgatgccatatcaggcactgaccacaacagcctggactcgagcctgactcgggagaagatcgaggccaagattaaggaggtggaggagaagcagccggagatgaagtcgggtttcatggcctccttcttggacttcctcaagtcaggcaagcgccacccaccactctaccaggcgggcctgacgcctccgctcagccctcccaagagtgtgccaccctctgtgccagcccgaggcctgcagccccagccccctgccacccctgctgtgccacatcccccaccttccggagcctttgggcttgggggcgccctggaggctgcagagagtgagggtctggggcttggctgcccttcaccctgcaagcggcttgatgaggagctgaagcggaacctcgagacgctgccctccttctcctcggatgaggaagactctgtcgccaagaaccgagacctgcaggagagcatctcctccgccatctctgccctcgatgacccaccccttgctgggccaaaagacacttccaccccagatgggccgcccttggcccccgcggctgcagttccagggccaccccctcttccggggctccccagtgccaacagcaatggcactcccgagcccccgctgctggaggagaaacccccacccactccacctcctgccccgactcctcagcctcagcctccgccaccccctccgccgccacagccagccctgccctcgccacccccgctggtggcccccacgcccagctcaccaccgccaccgccgctgccgccgccacctccaccagccatgccctcgcctccaccaccacccccaccagccgctgccccactggctgctcctcctgaggagcccgccgccccgtctcccgaagaccccgagctgccggacacccggcccctgcatctggccaaaaagcaggagacggcggcagtgtgtggggagacggacgaggaggccggcgagagtggcggagagggcatcttccgggaacgggacgagttcgtcatccgtgctgaggacatcccttccctcaagctggcgttgcagacggggcgtgaacccccacccatctggcgagtccagaaggcccttctgcagaaattcactccggagatcaaggacggccagaggcagttttgtgccaccagtaattatttggggtattttggggatgcaaaaaatcggtaccagcgcctctatgtaaagttcctggaaaatgtcaataagaaggactacgtgagggtctgtgctcggaaaccctggcatcggcccccagtgccagtcagacgctctgggcaggccaagaaccccgtatctgctgggggtagctctgcacctccccctaaggccccagcaccacctcccaagcctgagacccctgaaaagacgacatctgagaagcccccagagcagactcctgagacggccatgcctgagccccctgcccccgagaagccctccctcctgcggcctgttgagaaggaaaaggagaaggagaagcagacacggccagagcggagtctcgccacgggacaacctgccacatcccggctgcccaaagcccggcctaccaaggtgaaggctgaaccgccccctaagaagaggaagaaatggctgaaggaggcaggcggcaacgctacagcaggcgggggcccaccaggcagctcctcggactcggagtcctcccctggagcccccagcgaggacgagcgggcagtacctgggcgtctgctcaaaaccagggcgatgcgggagatgtaccggagctacgtggagatgttggtgagcacagcacttgacccagacatgatccaggccctggaggacacgcatgacgagctgtacctgccccccatgcggaagatagacggcctgctgaatgagcacaagaagaaagtcctgaagcggctgtcgctaagcccagccctgcaggatgctctgcacacgttcccacagctgcaagtggagcagagtggggagggctctccggaagagggggctgtgcggctgcggcctgctggggaaccctacaaccgcaagacgctcagcaagctcaagaggagcgtggtcagagcccaggagttcaaggttgagctggaaaagtcgggatactatacactctaccattcgctccaccactataaataccacaccttcctgcgctgccgggaccagaccctggccatcgagggcggcgccgaggacctgggccaggaggaggtggtccagcagtgcatgcggaaccagccgtggctggaacagctctttgactccttcagtgacctgctggcccaagcacaggcccacagccgctgcgggtgaccccgccccagcttgtgaggggggcgcctcctccatgaaccgagaattgggacagaaccgtgtcctcaggagctaacacctgggctccatcgccggggaaagggggtcatgggtcagggtgtgtctgtgctgccccctccagggcagggttcaaagtccgactccccccctctcccaagccccctccactccctccccattcctcccactgttcggtgtacagagaaattatttatatatatgtataaatgtctatttagtaacggtttccctctccccttgccccgaccccccctccacagccacagcccccgccccctccaccttgtacataatgtataggaaaagtctatgtatggctggggggggtggggtggcttcagagagctgggggaccccttccccccaagtcccccctgcaggccaagatctttgctaaaggccattccctccgcagggcatttggcgtcgggtgggaggggaaaacgcatcttgttaattatttttaatcttatttattgtacatacctggggcaggggcttggggaggtggaggggggagaagggtcccctctctctgcccctcccactccttttctacggcgatttgtctgtgtctggcccccacccactgcccatcccccattgttgtctggatgtggttctattttttatcggtctcctttcccctcctccccgttctcgcccccgccccaccccctgctcccactaccctttgtctcttgctctttcttgggcttctgtacaactcaacttgtatacactgtgtacacacaaccagccaaacgaaaacccaacggcaaacacttt

SEQ ID NO: 32269 - DNA, 5933 bp, Homo Sapiens
atgaaagacctaattcagattggaggctgtttgcgcctggagcgcgccgcgggcccgcgctcgctcccgcctgtcttcgcgtccgcggcggccaggacaccgcgcgccgcctcacgctaccctgcaggccgcccgcgtctgccctcgcggcgcgctcccgggcccggccgcggttccccactcgggccggctggctcgcgggttctctcgccccgcccccctcggcgccaccgctgggcgcttgcgcggggcgcgtggccgtggccagggtctccgccgcagcccgagcagccgccgccgcctcagtcagtcagtcagtccccagcaatggcggacggaggtgagcgagaggagctgctctcgccgtcaccggtctctccggctaagcggcagtgttcgtggcccagcccgcaggctcatcaccctcgcggttcgcctggggcagccggcggaggggcagggggcgtcggcagcagctgcctggtcctcggggcccgcccccacctgcagccggattccttactggactgcgccgccaagacggtggcggaaaagtgggcatacgaacgggtggaggagcgcttcgagcggatcccggagcccgtgcagcgccgcatcgtctactggtccttcccgcggaatgagcgggagatctgcatgtactccagcttccagtaccggggcggccccggcgccggcgctgctggcggcgccgcgggggcttcgccggccgaggaggggccgcagccaccccccggggccgccgctccggccggctccgcccccgggggcgtcgcggctggggcatcccccgggctgggcgcaggggccggcgcggccggctgcggtggcgaggggctcccgttccgccggggcatccgtctgctggacagcggctccgtggagaacgtgctgcaagtcggctttcatctgagtggcacagtaactgagctggccactgcctctgaaccagcagtgacttataaagttgcaatcagttttgatcgatgcaaaatcacctcagtgacatgtggctgtgggaacaaggacatattctactgtgcccatgtggtagcactctcactctacaggatccgtaaaccagaccaagtcaaattgcgtcttcctatctccgaaacccttttccagatgaatagggaccagctacaaaagtttattcaatatttaatcacggcacaccacactgaagttcttcctactgcacagaaactggcagatgagattctatcctccaactcagaaatcaaccaagtgaatggtgcccctgaccccacagctggggccagcattgacgatgagaactgttggcatttggatgaagaacaggtgaaagaacaagtgaagctttttctctcccagggcggttactgtggctctggaaagcaactcaactcaatgtttgccaaggttcgagaaatgctgcggatgagagattccaatggagcaaggatgctgacactaataactgagcagtttgtggctgacccacgactcacactctggaggcagcaaggaacaaacatgacagacaagtgcaggcagctctgggatgagctaggggctttatgggtgtgcataattttaaatccacactgcaaactggaggagaaatcctgctggctgcagcagctgcagaagtggagcgacctggatgtctgtcccctggaggatggaaactatggacatgagctgcccaacatcaccaatgcacttccccagagtgccattcacagcccagactccttatccagaccaagacgaacagtattcactagagccattgaggggcgtgaattacattggcaggatagccacctacagcgaataatcagcagtgatgtttatacagctcctgcctgccagcgggaaagtgaaagactactctttaattcccaaggccagccactgtggcttgagcatgtgcctacagcctgtgctcgagttgacgccctgcgttcccatggttatccaaaagaggccctcagactcacagtggccattattaatactctgaggttgcagcagcagcggcaactggaaatctacaagcatcagaagaaagaactgttgcagagaggaaccacaaccatcacaaacctggagggctgggtgggccaccccctggatcccatcgactgcctgtttctcactttgactgaggcctgccgcctgaatgatgatggctatctggagatgtcagatatgaatgaaagcagaccccctgtgtaccagcatgtacctgtggctgcaggctccccaaacagcagtgagtcctacctgtcattggccctggaagttgcactgatgggcctgggtcaacagaggttaatgcctgaaggcctctacgcacaggacaaggtatgccgtaatgaggagcagctcctgagccaactccaagagctgcagctggacgatgagctagtgcaaacactgcaaaaacaatgcatcttactgctggaaggaggtcctttcagcggtctgggagaagtcatccaccgagagagtgttcccatgcatacctttgccaagtatttgttctcagctctgctgcctcatgatccagacctgtcctataaattagccttacgtgccatgaggttacctgttttagaaaactcagcttctgcaggcgacacatcccaccctcaccatatggtgtctgtggtgcccagccgttatcctcgctggttcacgcttggacacttggaatcacagcagtgtgaactggcctccaccatgctgactgctgccaaaggagacactttgagactccgaacaattctggaagcaatacagaagcacattcattcttcctccctcatcttcaaactggcccaagatgcattcaagattgctactcccaccgacagtagtactgacagcaccctgctcaacgttgccctggaacttgggttacaggtgatgcggatgaccttatcaacccttaactggagacgcagggagatggtacgatggttggtgacctgtgctacagaagtgggtgtgcgggccctggtgagcatcttgcagagctggtacacactcttcacccctactgaggctactagtattgtagctgccacagccgtatcccacaccactatcctgcgcctcagtcttgactatccacagcgggaggaactggctagctgtgctcgcacactggctctacagtgtgctatgaaggatccacagagctgtgccctgtcagcccttacactctgtgagaaagaccacattgcctttgaggcagcctaccagattgccattgatgctgctgctggtggtatgacccattcacagctgttcaccatcgcccgctacatggagctccgtggctacccgctacgtgccttcaagctggcctcattggccatgagccatcttaacctggcctacaaccaggatactcacccagccatcaatgatgtgctctgggcttgtgctctcagccactctctgggcaagaatgagctggcagctctcatccccctggtggtgaagagtgtgcactgtgccacagtgctttcagacatcttacgacgctgcacagtgactgcacctggcctggccggcatcccaggccgccgaagctctggaaagctcatgtccactgacaaagctccattgcgccagttgctggatgccaccatcaatgcctatatcaacactacacactcacgcctaacacacatcagccctcgccactatggagagttcattgagtttctaagcaaggctcgggagaccttcctgctgccccaggatggccacctgcagtttgcccagttcatcgacaacctcaaacagatctacaaaggcaagaaaaagttgatgctgctggtgcgagagcgctttggctgagagagcagatagctcactgccagagcagcctgggttcccaggtagtatcaggtcaggccaagggcactgaaacatttgtccaccctgagagaactctgagcacctgtggatgaggccaaaggaccacagggctaaggatggggaaagtccagctctagtcgataatgcctaccttggcaagcttctgactacagcctactgttcatggaggagctgggccctgcagatcgaccagaaaccccacaacatgccacctcatgcccctatatcctgcgtgtcctgagcattggccctgtctcccttggcaaacacagaacactgttccatctcagggattgcttaaccagagaaacagacacatttgtgggactgtaaatactatatgtgttgctaattattgtaaacttgtaactatttataattctgcttctgatttgatgggcacttgaagtagctgtgggtaggaggatatgcttattttctgaggagactcacaaccatttctcaggtttcccttgcagagtgtttgctggtagcagtggaagagtgggggtgccaaggagaaaaatggccagttaggatcaacccaagtctagtctatgcagaatcccccacctacagacagggcatttatagtccagtggtgagtgagggacagaggccaggactggacttagacttttgcctcacaaaactgtgaggacattgaagctcctgcctcacacagcctcttcaggagcctgctgaacacctgagaaacaagtgcagggagaagatgaaggtctgggaagccgctgagttcataatattcatctactgtggtcacctttgtgttagcaagtgtgtggtttcatctataattgtgtgtgtgtatctttatggctaagtacatgtgtgtatgtacatagatacatctgtgcatgcctgtttgtgcacatatatatttatgtgtatgtgtcagttctatggctgtgtacctgtttgaatatgtgcacactggactgtgagtttctacgtgaggatatacacattttgtgtacatgtgaggatgcacatctttgtgcaaatgcactcatgtttgtgcatgtttagtatgtgtatctgcgtacacgagtgcatgtgtataaacatgtttgtatccatgtgtatgcttgttatccatgcatctgtgtctttatatgtgtaactgagcgtatttctacatgtagggatgtctgtgtattcatgtttgaggatctgcatcaatgtgtcctttttgccagatttctctttcccattcctcttaaatctctctcgccagctaaacgtttgttccccatctctgtgcctcctctattcattctctcaccaaacaagcttctaagcaccaatctccctctgccatcagattggctgctttagctccatagttctcttctcgcctcatacttgctttcttcccctgcctttctacctcaagcttcctcgccggcttttgtcacagtctcattgctcgctgacttggaggctagggctggtctgcacttagcctctcccttcctaatttctagccctagtgggcagtcctgtcttagccctggctgacctccatagtgtatcatgttcctgctaccttcctgacccctgtgctcagcctggaattgttataggaggtagcaagggcactcagaaaagtcagttggaaccagtgtcttggtgtttactgtttcatgtcttagttcctgagttgggggtggggtttgatagggaaggggtggtatagctagaatgtgaactaagaacttctccatctgctttactttttctttcttcgacaaactgtcaccttttttactccaaactgaccaagaagttgtatttgccatttgtggctactcaagtcttactgtccagccaagggcccctacgtctcagcccaatgggttggttaaaaaaaagagagaagccactctcatttctgtatcacagttgcccttttttagcaagtgtgtgaattcacagtgcttttctatgaataaatcatggatcacataaaagatcatttttct

SEQ ID NO: 32270 - DNA, 6766 bp, Homo Sapiens
gcggcgagtggcccgcgcgacacgcgccggcctcgaccctatgctttgattcgcgtggcgcaggcgcctactgccccgccggcggggcccgggcttcctgccgcgggatgttctcccgaaggagccacggggatgtgaagaagtccacccagaaggtgctggacccgaagaaggacgtgctgacccgcctgaagcacctgcgggcgctgctggataatgtggatgcaaatgatcttaagcagttttttgagaccaactattctcagatatatttcatcttctatgaaaattttatagcactggaaaatagtttgaaattaaaagggaataataagtcacaaagggaggagctggactccatcctcttcctttttgaaaaaatactgcagtttctacctgaacgaattttctttcgatggcattaccagagtataggctcaactttaaagaagcttctacacactggaaattctattaagataagatgtgaaggaatcaggctgtttcttctgtggcttcaagcacttcagacaaactgtgcagaagagcaggttctgatttttgcttgcctggtgcctggtttcccagcagtcatgtcatccaggggcccttgcacactggagacactcatcaatcccagccctagtgtagctgatgtaaagatatatccagaagaaatcactccactcctaccagccatatcaggggagaagattgctgaggaccaaacctgcttttttcttcaaatactgttgaagtatatggttattcaggctgcgagcttggagtggaagaataaggagaatcaagatactggttttaaatttctttttacattgtttcgaaagtattatcttcctcatttatttccatcatttactaagttaacaaacatctacaaacctgtacttgacatcccccatttgagaccaaagcctgtgtacattactaccactcgagacaatgagaacatttacagtacaaagattccatatatggcagctcgtgttgtttttattaagtggattgtaaccttctttttggaaaaaaagtatctaactgcaacacaaaacactaaaaatggagttgatgtattgcctaaaatcatccagactgttggtggtggtgctgtgcaggagagagcgcctgagctggatggtggtgggcccacggagcaggacaaaagccattctaacagcagcaccttgtcggaccgaagactcagcaactccagcctctgtagcattgaagaagagcaccgaatggtgtatgaaatggtacagcggattctcttgtcaacacgaggttatgtcaacttcgtgaatgaagtatttcaccaggcatttttgttgccttcctgtgagatagctgtaacaagaaaagtagttcaagtgtacagaaagtggattctccaggacaaacctgtgttcatggaggagccagatagaaaagatgttgcccaagaagatgctgaaaaattaggattttccgagactgatagcaaggaggcctcatctgaaagttctggtcataaacgatcttccagttggggacgcacatactccttcacaagtgcaatgagcagagggtgtgtgacagaggaggaaaatacaaatgtgaaagccggcgtccaggctttgttgcaggtatttttgacgaactctgcaaacatctttttgttggaaccatgtgctgaagttcctgtgctcttgaaagaacaagttgatgcttgtaaagctgttttgattatttttaggcgcatgataatggagcttacaatgaataaaaagacatgggaacagatgttgcaaatactactcaggataacagaagctgtcatgcagaagccaaaggataaacaaataaaggacttgtttgcccagagcttggcagggttactatttaggacgctcatggtagcttggatccgagcaaacctctgtgtgtacatttctcgagagctctgggatgactttcttggtgtgctgtcctccctcacggaatgggaggaacttataaacgagtgggccaacattatggactccttgacagcagtgcttgcaagaaccgtttatggagttgagatgacaaacctacctctggataaattaagtgaacaaaaggaaaagaagcaacgaggcaaaggctgtgttctagatcctcagaaaggaaccaccgtggggaggtccttttctctcagctggcggagccacccagatgtgaccgaaccgatgcgatttaggagtgccaccacgtctggagcaccgggagtggaaaaggcaagaaatattgttcgccaaaaagcaactgaagtggaggagtgtcaacagtcagaaaatgcacctgcagccggatctggccatctcacagtgggacagcagcagcaggtccttcggagcagcagcacctccgacatccccgagccgctgtgctcagattcttctcagggtcaaaaggcagaaaacacacagaattcgagttcttcagagcctcagcctattcaagagaataaaggacatgtgaagagagaacatgaaggaataacaatcttagttcgaagaagcagcagccctgctgaattggatttgaaagatgatttgcagcagacacaaggaaaatgtagggaaagacagaagagtgaaagtaccaacagtgacacaactctgggctgtaccaatgaggcagagctgtccatgggcccatggcagacctgtgaggaagacccagaactgaatactcccacagatgttgtggctgatgctgatgcccgtcattggttacaactgagtcccaccgatgcttcaaatttaacagatagcagcgagtgcctcacagatgactgtagtataatcgccggggggagcctcactggttggcacccagactctgctgctgtgttatggcgaagggtcttggggatcctcggagatgtgaataacatccagtcacccaagatccatgccagagttttctgctatctctatgaactctggtacaaactagcaaagatacgggataatctagcaataagcctggataaccagtcttctccatctcctccagttttgatcccaccactcagaatgtttgcatcatggctgtttaaggcggcgacactgccaaatgaatataaggaaggcaaactacaagcctacaggctgatctgtgccatgatgaccagacgccaggacgttctgccaaactcagatttcctggtgcatttttaccttgtgatgcacctgggattaaccagcgaggatcaggatatcttaaatacgatcataaggcactgtccaccccgctttttctccctgggttttcctggcttctcaatgctggtgggggacttcatcacggccgctgccagggtccttagcacagacattttgacggcgcctcgttcagaggctgtcactgtcctcggctctctggtctgctttccaaatacctaccaggagattcctttactgcagtcagtgccagaagtaaatgaggccattacaggaactgaagatgtcaagcattacctcataaatattttactgaagaatgccacagaagaaccaaatgaatatgcaagatgcattgctgtttgctcccttggggtctggatatgtgaagagcttgcacagtgtacaagccaccctcaggtgaaagaggccatcaatgtgataggagtaactctgaagtttcccaacaaaatcgtggcccaggtagcttgcgatgtccttcagttgctggtttcctactgggagaagcttcagatgtttgaaacctctctgcctcggaaaatggcagaaatcctcgtggccacagttgcttttcttttaccaagtgcagagtactcctcagtggaaacagacaagaagtttattgtgtccttgctactctgcctcttggactggtgcatggcattgcccgtgagtgtccttctccaccccgtgtccacagcagtcctagaggagcagcattcggccagagcccccttgctggattatatctacagggttttgcactgctgtgtgtgtggctcaagcacgtacacccaacagagtcactacatactgaccctggctgacttgtcatccacggattatgaccccttcctgccactggcaaatgtgaagagctctgagccagtccagtatcattcatcagcagaattgggtaacctgctgactgttgaagaggagaagaagagaagaagtttggagttgatccctttgactgctcgaatggtgatggcccacctggtgaaccacctggggcactaccccctcagtgggggccctgccatactgcacagccttgtcagcgagaaccatgacaatgcccatgtggaaggctccgagctgtcctttgaggtgttcagaagtccaaacctgcagctgtttgtatttaatgatagcaccctcatctcctaccttcagacacccacagaaggaccggtagggggatcaccagtgggctctctctctgatgtgagagtaattgtgagggatatctcagggaagtactcttgggatggtaaggttttatatggacctttggaaggctgcttagcacccaatggaagaaatccttcatttctgatttcgagctggcatcgtgacacatttggacctcagaaagactcttctcaagttgaggagggggatgatgttcttgacaaattacttgaaaacattggccatacaagtcctgaatgccttttaccgtcacagctaaatctaaatgaaccttccctaaccccatgtggcatgaactatgaccaagagaaggaaatcattgaggtcattttgcgccaaaatgctcaagaggatgagtatatccagagtcataacttcgattctgcaatgaaagtcaccagccaagggcagccctccccagtggagccccgaggacccttttatttctgcaggttattgcttgatgacttgggaatgaattcttgggacagaaggaagaattttcatctattgaagaaaaattcaaaattattgagagagctgaaaaatttggactcccgccagtgccgtgagacacacaaaatcgcagtgttttacattgctgaaggtcaagaagacaagtgttcaatcctctctaatgaaagaggaagccaagcatatgaagactttgttgctggacttggatgggaggtggatctctccacccactgtgggttcatgggtggccttcagcgcaatggcagcaccgggcagacggccccttactatgctacctcaactgtggaagtgattttccatgtttccactcgaatgccgtcagactcagatgattccctcaccaaaaagcttcgtcacttggggaatgacgaggtccatatcgtctggtctgaacactccagagactaccgcaggggtattatcccaactgcctttggagatgtttcaatcattatttacccaatgaagaatcacatgttcttcatcgcgataacgaagaaacctgaggttccattttttgggcctctgtttgatggagccatagtgagtgggaagctgctgccaagccttgtatgtgccacgtgcatcaacgccagcagggctgtgaagtgcctcatcccactctaccagagcttctatgaagagcgagctctgtatctcgaagcaataattcagaaccaccgcgaagtaatgacattcgaggatttcgcagcccaagtcttttctccctctcccagctactccctcagcggaacgggggccctggcctccagtctgagtgctgacctcgaagagcccctgagtgaggaggagacagaacaccctctcctgcctctgccccgagccactaaacccagaatctccaggaaatttcgttgctgtactagtgccctcagcaggtcttcccattagtggacttctgaagcccatggtgaatcccactaccgtgtctcagatgggactcaaactaggctgtatcatcttgtcctgaaacctcacaaaccttggacttccaaagaagaaaagaaaaagtcaccaaaaaccagagatgaacccactgacacgtgggcactggtgtggctgctctgggcagatgacagcaggaaaagattctgcgctttcagggagggggcagagggcagcttgcttctgcaccccaagttgtttcttctcatttatgaacccaagcatgattcacaaaggggctggcaaaacaattgtctaattgaggaatctgatctgcattgattttgctagttccttttatgttaggatttatggtttactcaaaaatttcatcatcatggaaattggctttccccggggtcttttgcccaggagaagttttacctcagttgtccagtgttttcccacatggtacctgacgcccgctaactaagcagaggctctcctcaccacgcagaggcgcttcaggtcatgacagtgatgcccctatcttagaacactcagaagattccagaaatacagggtcctgtccttgcataagttcctgcaggacaggaagtgtcccaaggctcaaaacaacacagaccacatccacacaaaaggcgcatgccggcttcaggcgctaggctgagacgggtaccccccgaatggccttgtgcctccaaaagcctcacgctgcaactttgctgctcctgtctgttgcccagagaggcctcacacaggcctcagaaatgtttcttgtcacacaaagcttttggtagccgattccaagcgagggatttaatccttacatttttgcccatttggctccaaggaaggcttattagacctgt

SEQ ID NO: 32271 - DNA, 2369 bp, Homo Sapiens
agagtgtgcgccggggtggggggcaacggtcagccgtcaccctgagacgggcggcggcgggatggcaacagcctccggggcctcggacttgtctggctccggagcgcccccgcccggtgtgggagctcaggcggcggcggccgctgaggaggaggagcgagaggtggtgcgggtccgagtcaagaaatgtgagagcttcttgccgccagagttccgctcttttgctgtagatccccagatcacctcgctcgacgtgttgcagcacatcctcatccgagcctttgatttgagtgggaagaagaactttggcatcagctacctgggccgggaccggctaggacaggaagtttacctctcacttctatctgactgggacctcagcacagcctttgccactgcctccaaaccttacctgcaattgcgtgtagatattcggccctcggaggacagcccattgctagaagactgggacataatcagccccaaagatgtcattggctccgacgtgttgctggctgagaaacggtcatcactgacgactgccgccctgccctttacacagtccatcctcactcaggtgggccgtaccttgtctaaggtccaacaagtgctgagctggtcgtatggggaagatgtcaagcccttcaagccacccctgagcgatgctgagtttcacacgtacctgaaccacgagggccagctctcccgacccgaggagttgcgcctgcggatctatcatggcggtgtggagccctcgctgcgaaaggtggtgtggcggtacctgctgaacgtgtatccagatggactgacaggccgagagcggatggactacatgaaacgcaagagccgcgagtatgagcagctcaagagcgagtgggcccagcgagcgaaccctgaggacctggaattcatccgcagcacggtcctcaaggatgtactgcgcactgaccgggcccacccctactatgcggggcctgaggatggcccacatctacgggcgctgcacgacctgctcaccacctatgccgttacccacccacaggtgtcctactgccagggcatgagtgaccttgcctcacccatcctcgctgtcatggaccatgagggccatgcctttgtttgcttttgtggcatcatgaaacgcctggccgccaacttccaccctgacggccgcgccatggccaccaagtttgcacacttgaagctgttgctgcgacacgctgaccctgacttttatcaatacctgcaagaggcaggcgctgatgacctcttcttctgttaccgctggctgctgctggaactcaagcgtgagttcgccttcgacgatgccctccgcatgcttgaggtcacttggagttcgctgccccctgatcctcctgaacatgaggtagagctggttggaccccccagccaagtggcagacgctggttttggtggccacagggggtggcccgtgcgacagaggcacatgctgaggcctgctggtggaggaggtagtacctttgaagatgctgttgaccacctggccacagccagtcaggggcctggtggtggggggcgtctcctgagacaggccagcttggatggcctccagcaactcagggataacatgggctccaggagggaccctctggtccagctgccccacccagctgcccttatcagctccaagtccctctctgagcctttattgaactccccagacccactgctctcctccttttcccaccctgattccccatcttcctcatctccaccatccacccaggaggcctctcccactggtgatatggctgtaggatcccccttgatgcaagaggtaggctccccgaaagaccctggaaagtccctgccacctgtaccaccaatgggcctgcccccaccccaggagtttggccgggggaacccattcatgctgttcctctgcctggccatcctgctggagcaccgcgaccacatcatgcgcaatgggctggattataatgagctggccatgcactttgaccgccttgtgcgaaaacaccacctggggcgcgtcctgcgccgggctagggctctctttgctgattacctgcagtcagaggtgtgggactcagaggagggggctgaggccacagccgcatcttgatcaggctttctcaagccctccatcggccccaccagatctccattctttgccatgagggccaacacatgagaccccacctccctccctgcctgccagccctagacttgttggagcatagagcccttcctccccaggcctaagtatgtggagctctgctttggcactgccccgcagaggccacgcctatttattctgtttctgttgttttgtttttaacaactatactttgcacacatgaagg

SEQ ID NO: 32272 - DNA, 5610 bp, Homo Sapiens
acatccgggcttctgctactagtgagaggaagatggcggccgcggctgtggtggttcccgcagagtggataaagaactgggagaaatcagggagaggcgaatttttgcatttatgtcggatcctcagtgaaaataaaagccatgatagttcaacatacagagatttccagcaagctctctatgagttgtcatatcatgtaattaaaggaaatctaaagcatgaacaggcatctaatgttcttagtgacattagtgaatttcgtgaggatatgccctccattcttgctgatgtattctgcatattagacattgagacaaattgtttagaagaaaaaagcaagagagactattttacacagttggtattagcatgtttgtatttagtttcagacacagttctaaaggaacgcctggatccagaaacactggaatcattagggcttatcaaacaatcacagcaattcaatcaaaagtcagttaaaatcaagacaaaactcttttataagcagcaaaaattcaatttgttaagagaagagaatgaaggttatgccaagctgattgctgaattggggcaagatttatctggaagtattactagtgatttaatcttagaaaatatcaaatctttaataggatgctttaatctggatcccaatagagttttggatgtcattttagaagtgtttgaatgcaggccagaacacgatgacttctttatatctttgttagaatcttacatgagtatgtgtgaaccgcaaacactgtgtcatattcttgggttcaaattcaagttttaccaggaaccaaatggcgagacaccatcatctttatacagagttgcagcagtacttctacaatttaatcttattgatttagatgatctttatgtacatcttcttccggctgataattgcattatggatgaacacaaacgagaaattgcggaagctaagcaaattgttagaaagcttacgatggttgtgttgtcttctgaaaaaatggatgagcgagagaaagaaaaggaaaaagaagaggagaaagtagagaaaccacctgataaccaaaaacttggcttgttggaagccttattaaagattggtgattggcaacatgcacagaacattatggatcagatgcctccatactatgcagcttcacacaagctaatagcccttgctatttgcaagctcattcatataactattgagcctctctaccgaagagttggagttcctaaaggtgctaaaggctcacctgttaatgctttgcaaaacaagagagcaccaaaacaagctgagagctttgaagatttgaggagagacgtgttcaatatgttctgttaccttggtcctcacctttctcacgatcccattttatttgcaaaagtggtgcgcataggcaagtcatttatgaaggagtttcagtctgatggaagcaaacaagaagataaagaaaaaacggaagttatccttagctgtttgcttagcattactgaccaggtactacttccatctctttctttgatggactgcaatgcttgtatgtctgaggaactatggggaatgtttaaaacatttccatatcagcatagatatcgtctgtatggccagtggaagaatgaaacttataacagtcacccacttttagtaaaagttaaagctcaaacaatagacagagccaaatatatcatgaagcgcctaaccaaggaaaatgtgaagccttctggaagacaaattgggaagttgagccacagcaatccaaccattttgtttgattatatcttgtcacaaatacagaagtatgataacttaataacacctgtagtagattcattgaaatacctcacttcactgaattatgatgtcttggcctattgtatcattgaagctttagctaatccagaaaaggaaagaatgaaacatgatgacacaaccatctcaagctggcttcagagtctggctagtttctgtggtgcagtttttcgtaaatatccaattgatcttgctggtcttcttcagtatgttgccaatcagctaaaggcgggcaaaagttttgacctgcttatattgaaagaagtggtacaaaaaatggcaggaatagaaattacagaggaaatgacaatggagcaactagaggctatgactggtggagagcagctaaaagctgagggtggttattttggtcagatcagaaacactaaaaaatcctctcagagattaaaggatgctctattggaccatgatcttgcccttcctctctgtctgcttatggctcagcagagaaatggggtaatctttcaggaaggtggagagaaacatttgaaacttgtgggaaagctctatgaccagtgtcatgataccctggtgcagtttggtgggtttttagcatctaatctgagcacagaagattatataaagcgagtgccttcaattgatgtactctgtaatgaatttcatacaccccatgatgcagcatttttcctgtctaggccaatgtatgcccatcatatttcgtcaaagtatgatgaacttaaaaaatcagaaaagggaagtaaacagcaacataaagttcataagtacattacatcatgtgagatggtgatggcgcctgtccatgaagcagtggtctccttacatgtttccaaagtctgggatgacatcagccctcaattctatgctacattctggtcattgacaatgtatgaccttgcagttccacacaccagctatgaacgagaagtcaataaacttaaagtccagatgaaagcaattgatgacaatcaggaaatgcccccaaataaaaagaaaaaagagaaggagcgctgtactgcccttcaggacaagcttcttgaagaagaaaagaaacagatggaacatgtacagagagttctacagagattgaaactggaaaaggacaactggcttttagcaaaatctaccaaaaatgagaccatcacaaaatttctacagctgtgtatatttcctcgatgtattttttcagcaattgatgctgtttactgtgctcgttttgttgaattggtacatcaacagaaaactccaaatttttccacacttctttgctatgatcgagttttctctgacataatttacacagttgcaagctgtactgaaaatgaagccagtcgatacggaaggtttctttgctgcatgttagagactgtgaccaggtggcatagtgatagagccacatatgaaaaggaatgtggaaactatccaggattccttaccatattacgggcaactggatttgatggtggaaataaggctgatcaattagactatgaaaattttcgacatgttgtacataaatggcattacaaactaaccaaggcatcggtacattgccttgaaacaggcgaatatactcacatcaggaatatcttgattgtgctaacaaaaatacttccttggtacccaaaagttttgaatctgggtcaagctttggaaagaagagtacacaaaatctgccaagaagaaaaagagaagaggccagatctatatgcattggctatgggctactctgggcagttgaaaagtagaaagtcatacatgatacctgaaaatgagtttcatcacaaagacccccctccgaggaatgcagttgccagtgtgcaaaatgggcctggtggtgggccttcttcatcatcaataggaagtgcatctaaatcggatgaaagcagtactgaggagactgataaatcaagggagagatctcagtgtggtgtgaaagctgttaataaagcttctagtaccacacctaaagggaattcaagcaatggaaatagtggctctaacagcaacaaagctgttaaagaaaatgacaaagaaaaagggaaagagaaagaaaaagagaaaaaagaaaagactccagctactactccagaggccagggtacttggtaaagatggtaaagaaaaaccaaaggaagagcggccaaataaagatgaaaaagcaagagagaccaaggaaagaacgccgaagtctgacaaagagaaagaaaaattcaagaaggaagaaaaagctaaagatgagaaatttaagaccactgtccccaacgcagaatcaaaatcaactcaagaaagggaaagagagaaggagccatccagagaaagagatatagcaaaggaaatgaaatcaaaggaaaatgttaaaggaggagaaaaaacaccagtttctgggtccttgaaatcacctgttcccagatcagatattccagagcctgaaagggaacaaaaacgccgcaaaattgatactcacccttctccatcacattcctccacagtaaaggacagtctcatcgaactcaaggaatcttcagcaaagctctacattaatcatactcctccaccactgtccaagagtaaggagagagaaatggacaagaaagatttggacaagtcaagggaaagatccagagaaagagagaaaaaagatgaaaaggacaggaaagagcggaaaagggatcactcaaacaacgaccgtgaagtgccaccggacttaaccaagagacgtaaagaggagaatggaacaatgggggtttcaaaacataaaagtgaaagtccttgtgaatctccttatccaaatgagaaagacaaggaaaaaaataagtcaaaatcttcaggcaaagaaaaaggcagtgattcatttaaatctgagaagatggataaaatctcctccggtggcaaaaaggagtccaggcatgataaagaaaagatagaaaagaaagagaaacgggacagttcaggaggaaaggaagagaagaaacatcataagtcctcggacaagcacagataatgaagactttccatcaaggtgagatcggactggaactgttcggctgcgaccagaaatttattttcctgagtaaattgccgagaattaagaatgaagagggccatttgcatctccttaaattattcagttacctgctttattgctccatgtggaaaacttaaaattgttaagttgtgcattactgtattttaacttgttgcttagtttctacatgtttattttcagtaatggctgaaagtgttaactgttccatacttttagcacaatgtgctgcataaggttacctgtgtacagagttttactttagattaactaaatattgcctgggttcagtttttatttccattctgaaatgcttcctttttattgtttgaaactgaaaataaacaattgttgaacccttttgattttacctcattttaaaactgttttaatttattatttggcttgttcttaatattagtcactaaaagcagtgggagcattgtcttatgaaatgcttaggaatcattttatatagtacatgtacaacattaaacgtgtttaaaaaagaaaaaggtaccagcgatcacttgtcccttgccattttttcttgtaattatgttagacaaatcttggcggcggggggatcaaaacataattgttttaattctacagctgtaggagctttgtattgctgaactttcatctggaaaagtttcacagtgacatttttaaaagagaatttttttatctgccgaattctaccagtgtaaccttttttctaaataaacaatagttttctcaaatggttgta

SEQ ID NO: 32273 - DNA, 9525 bp, Homo Sapiens
atggtagagaatgtggttgtcacaggggtgtgtgtcagtcggtctggtgttcacaccatcaaatctggacaaacagaggatgtgcagatgctcctgcgctttggggcagatcccactttgctggatcgacagtctcggtctgttgtggatgtcctgaagaggaataagaacttcaaagccatcgagaaaatcaacagtcacttagaaaagctagctacgtgttctaaggacctatcaggattcagcaatggtgatggacccactagtgaaaacgacattttcaggaaggtcttggagcagctggtgaagtatatgaactcaggaaaccggttattgcataaaaactttctgaagcaggaagtagttcagaggttcttgcgtctcctttctactctgcaagaaattcctcctgacctggtctgtgatattaatcaagactgtgccaccaccgtcttcaaattcttattggaaaaacagagatggcctgaggtgcttctgctgctgacccgcaaagtaagtggagaaccaccgcttggggattgcctcatcaaagactgcaacttctcagacctcgacatctgtaccatcatcccccatctcagcacctgggaccagcggaagaaacagcttctgggctgcctgatagacagtggagccttgcctgatggtcttcaggagagccaggagaggccagttgtcacgtgcctgaaacatgaggacttcgagttggctttccttctcttgaccaagggcgcagacccccgtgctatttctctcacggaaggtgatactcctttgcatgcagcactccacatctttctagagattaaagctgacattggttttagcttcctcagccatctgttggatctgttttggtccaaccccactgaattcgactacctcaaccccaatgtccaggacagcaatgggaacacgctgatgcacatcctcttccagaagggcatgctaaagcgcgtgaagaagctgttagacctgctggtgaagtttgacatcaacttcaatctgaagaacaaagagggcaaagatgcacggcaccggattaagaagaacgactctctgctcttggcctggaacaaagctctgatggagaacaggaggaggagccggcaggactctgctgcccacctggggaagctctcaaagtccactgcccctggtcacacatctcagctcaagtcccagggttcattcaagtcagtgccatgtggtgccactgccagaacactgcctgaaggaagtgcagtccctgacagctgggagactctcccaggtacccaggtgaccaggaaggagcctggagctctcaggccctgctcgctgagagactgccttatgcaggacatcacagttttgattcagcaggttgaagtggatccgtctttcccagaggactgtcttcagagctctgagcctctggaggcaggagctggcaaagaaggaaagaaagatgacaagccgactctgggtgcaggggcccctgactgtagtgaggtgggggaaggacatgctcaggtgggccttggggccttgcagcttgtgcctgatgataacagggggaaggagggcaatgatgatcaggatgactggagcacgcaggagattgaggcctgcctccaggacttcgataacatgacctgggagatcgagtgcacttcagaaatgctgaagaagctgtctagtaaggtaatgaccaaggtcatcaagaagaaaatcatccttgccattcagcagctgggaaatggcgagtggacccagggcctgcagaagcgactgaagcacctgaaaggaagcatccagctcttcgaagctaagctggacaaaggagcccggatgctctgggagctcgccattgacttctcccctcgatgcagtgagaaccctgagaagatcattgccacggagcagaacacgtgtgcaatggagaaatcagggcggatctacacggaaatcatccggatttgggacatcgtcttagatcactgcaaactggctgattccatcaaggccatctgcaatgcctacaaccggggcttgtcctgtgtcctgcggaagaagctgaaaggtatcaataaaggccaagtgtcagctaacatgaaaattcaaaagcgtatacctcgctgctatgtggaggacacagaggccgagaagggcagggagcatgtcaatcctgagtactttcccccagccagtgcagtggagacagaatataacatcatgaagttccacagcttcagcaccaacatggcctttaacatcctcaatgacacgacagccacagtggagtaccccttccgggtgggtgagcttgagtacgcggtgatcgacctcaatcccaggccactggagcccatcatccttattgggcgaagtggcactgggaagacaacctgctgcttgtacagattgtggaagaaattccacgtttactgggaaaaagctgagcaggcaggaagcccattgctggccaaacaggtctggctgaagagaaggttggaagtggaacccggaaaagagagtccaggtggggaggaagaggaggaggaagaggacgaggaagaggaagattctattgaagtggaaacagtagaaagcatagatgagcaggagtatgaagcctgcgcaggaggagccggtgtggagccagcaggggacggccaagctgcagaagtatgtgcaccagaacatccccaccagctggagcatttacatcagatctttgtgaccaagaaccatgtgctgtgccaggaggtacaaaggaatttcattgagctttccaagtccaccaaggccactagtcattacaaaccactggaccccaacattcacaaactccaggacctgagggacgagaactttcctctgtttgtcacttccaagcagctgcttcttctgcttgatgcttctctgcccaaaccattttttctgagaaacgaagatggaagcttgaaaagaaccatcataggatggtctgcacaggaagagtcaaccattcctagttggcaagaggatgaagaggaggctgaggtggatggggactacagtgaggaggataaagctgtagaaatgcgtacgggtgacagtgacccccgggtgtacgtgacgtttgaggtgttcaaaaatgaaatatggcccaaaatgaccaaagggaggactgcctacaaccctgcactgatttggaaagaaataaaatcttttctaaagggttcttttgaggccctcagctgtccccatgggagactcactgaagaagtatataagaaattagggaggaaacggtgccccaatttcaaggaagaccggagtgagatctacagcctcttcagtctgtatcagcaaatcaggtcccagaaaggttattttgatgaagaggatgttctgtacaacatatcccggaggctgtcgaagctcagggtgctcccatggtccatccacgagctctatggtgatgagattcaagactttacccaggccgagctggcgctgctgatgaaatgcatcaatgaccccaactctatgttcctcacgggggacacggcccagagcatcatgaagggcgtggccttccgcttcagcgatctgcgctctctgttccattatgccagcagaaacaccatagacaagcagtgtgctgtccggaagcccaagaagatccaccagctgtaccagaattacaggtcccactcaggaatcctcaatctggcatctggagtggtggatttacttcagttctatttcccagaatcttttgatcgccttccaagggattctggcctctttgatggtcctaagccaactgttctggagtcttgtagtgtaagcgacttggcaattttgctacgagggaataaaaggaaaactcagcccattgaatttggagcccaccaggtaatccttgtggccaatgaaacggcaaaggagaaaattccagaagagctggggttagcacttgtgctaacaatttatgaagcaaaaggcttagaatttgatgatgtcctcctttacaacttttttactgattctgaggcttataaggaatggaagatcatttcctcattcacacctacctcaactgactccagagaggaaaaccggccattggttgaagtacccctggacaaaccaggctcttctcagggtcgatctctcatggtgaatccagaaatgtacaagctcctcaacggagagctgaagcagctgtacaccgccatcacacgggctcgggtcaacctctggatctttgatgaaaaccgagagaaacgggctcccgcattcaaatatttcattagaagagattttgtccaagttgtaaagacagatgaaaataaagactttgatgatagcatgttcgttaagacctcaactcctgcggagtggattgcacagggagattactacgccaagcaccagtgctggaaggttgcagccaagtgttaccagaaaggaggtgcatttgagaaggagaagttggccctggcccatgacactgccctgagcatgaaatccaagaaagtcagccccaaggaaaagcagttggaatatttggaattggctaagacctatttggagtgcaaagagccaacactgtcccttaagtgtctgagctatgccaaggagttccagctctctgcccagctgtgcgagaggctgggaaagataagagatgctgcctatttctataagcgaagccagtgctacaaagacgctttcagatgctttgagcagattcaggaatttgatctagcactcaaaatgtactgccaagaggagctttttgaagaagctgctattgcagtggaaaagtatgaagaaatgctaaagactaagacccttcccatttccaagctctcctattctgccagtcagttttacttggaagctgcagcaaagtatctgagtgcaaataagatgaaggaaatgatggctgtcctctcaaagctagacatagaagaccagctggtgttcttgaagtctcggaaacgcttagcagaagctgcagacctgctgaacagggaaggtaggagagaagaggctgccctgctgatgaagcaacatggctgcctcctggaggctgccaggctcactgccgacaaggacttccaggcctcatgtctgctgggggccgcccgcctcaatgtggccagggattccgacatagaacacaccaaggacattctgagagaagcacttgatatctgctatcaaactggccagttgtctggcattgcggaggcccacttcctgcaaggggtaatcctgagagactttcagaagctcagggatgccttcttcaagtttgacacgctcaaccactcagctggagtggtggaagcactctacgaagcagccagccagtgtgaggccgagcctgagaagattctgggcctggctccagggggcttggaaatcctcctcagtctggtcagggctctcaaaagagtgaccaacaatgctgagaaggaaatggtcaaatcttgctttgagttttttgggatttcccaggtggatgccaagtattgccagatagctcagaatgaccctgggcccatattaagaataatttttgacctggatttgaacttgagagagaaaaaaacaaaagatcattttttgataatgactgaccaagtgaaattagccctaaacaaacaccttttgggcaggctgtgtcagatcacacggagcctgcttgggaagacctaccgaggagtctgcatgaggtttattgtaggcttaaaatgtgaggatgaaaactgtgaacattttcacaggcctctgcggcgttgtgaagccaagtgtttagttcagtcgaaaatgaacttggtggcaatcaacgggttgcttttggaagccaaaaaagtattccctaaaatcttagcagaagaacttaaagaaattgattatattttgtctacagatatgtatggcctttgcaagtccattctggatgtccttttccctaagcatttccatcagagagtgttgtcagaaaaccccatggcatgcaaagaaatcctcaaaccaaattacaaatccttccggttctacagatttgctttgaaggagtacatccactttctgtttgaaaatgaaagcgcacgcaaccgccgggaatccacagacctgtggctgagtgccatgcaagctttccttctctcttccaactacccggaggagtttgaaaagctgctccaccaggaggaggacaactacaacagggaactcaaagctctagagtctgaaaaggatgaaaggggcagggggagaggcagcaggataaaaggaatagaagggaaatttggcatgctggcacccaacagggatgatgaaaatatggacaagacccacctgtgcttcatccggcttctggagaattgcattgatcaattctacgtgtacaggaacccagaagactacaagaggctctttttccgtttcatgaatgtcctcatcaagaggtgcaaagaaccactcatccccagcattggaaacacagtagccctcctggagttccagttcatccactgtggggtggtgctggcccgcctctggaagaatgtcattctatgcctccccaagagctacattgcactcttgcactactgggagttcctgtttagcaagaaggacaaggagcttggggatgtgttctccatcattcaggaatacaaacccaaggacgtgacaagagccattcaggatttccggttccatctctcctacctcgccaaggtgctatgtggctatgagaatgtgaacttcaacgtcctgcttgatgccttcagtgaaatagactatgtggtctcgggtgaggctgagcggacactggtgctgtgcttggtgatgctagtgaatgctgaggagatcctgcagccatactgcaagcctctcctgtatcgccacttccgggagattgagtcaaggctgcagctcatgagcatggactgccctggccaggttcccgagaggctcctgaaggtggtgaagcgggtcttggtggcagtcaatgtgaagtctgtggctgaggcactgcaggacctgctctttgagcgggatgaagagtacctaatggactgtgactggcggtgggaccctgtgcacaccaaagggtccatagtccgtggcctctattatgaggaggtcagactaaaccgcctgctctgtttggaccctgtggactactttgctgaacctgagtgtgagtttggccaggatgagatggatgaactggcattagaagaccgagaccacgtcctggccaccattctttcccaaaagcaacggaaggcctccatacagcggaagttgaggagggcatgcctggtggtgtctctgtgcatcagttggaggagaagagtgggcacccagatggagcgtgtcagggaggaggccagggagcccagggctgggaacttcaaaaaggcagacgtggacaggacccagtgtgacctatgtggagtgaagtttacccgtggcccagagaactatttcagccccagcaaagcgtttgagggggcagcttccgaggtggcagtcctttccagggctgagctggaaagggaggagtgtcaggagaggaacagcgagtcttacgagcagcatatccatctagaacaccaccagaggcagcaagtggcctaccagaaatactcagaatttttccacgagaaggtggacccggccattgatgaaggcaagctggtggtgcaggacatcgagcaaagtgtatggatccacagtcacgtgggctccaaggagcacagccacatgctgcagaaggtccaggagcacatcaagagggtttcggatatggtggaggacctctacaggcggaaggcctgggctggcgcggaggaggcgatgactcggctggtcaacattctgatcctgtcagtcagggatgcacgagactggttgatgaaaacagagacccgcttaaagaaggaaggtattgttcaggaagatgattatgaaaatgaagttgaagactttggtgagcttcggcctagaaggcgttctcggaaatgtggaaagcagagaaaatactaatgtccacacagctgcagcctcctcatccttcggaacattccattctgacttagaattctgagcgctggggcagaagacaaaaagaatgtgaattagcattttaaaaataggggagtctaacaacaccattgctttttattctcattacttctctttcagtggcttaggatctgattgctccctcacctctaaagtgtttccaagtagagtctggcagtattagtttcccccacaaacaaattcaggtagagaagttgtagtcgaagggaatgttgggactcctcactgcatggtccctggggtgtctggctcatccccatcatgacatgagttggtagcagaggactaggtgttaggacagactctcctcacctcagttgctgctgctctgggccaggaaatctctctatggattccctcatctcctgccacactgctgcagcatcaagtgtgctatgagagctgtatgtgcccaggggtgggccctgccactggccaccccgagcccaggacgcattctggtcatctctgagcccacttgtagtgtagcttcttctgttagagatgttagccttttctctctgtggcgacttttctgccttcccttcttctgttttttgtgatcattcttagctacctgtgccaagtcacagttagactacctcagaatgtagtcaagaattcacccagtgttctttggatgtcccttccctagggggaaaggctggggaatgttgctgggagcattcccagctgcctctccaaagtggtcctaactctgccttggctatggtgcagacattccaaaaagtgttttgtatacagccctgtacatctagttttcttggttctccctggcaagttcgctaccctagcttaggctgacgttctgatgagtctctgcttgctgagctcatcactgtgggatggtgacctgcagagctgcagattggagcaagtggacagaggagggagccagctaagccaaatccgtcactgccacttggctggcaggccttataagagggcggatctgggcccgtttgcaggaggccattgcctaccctctccccacagtgagccagcagccatcagctgatcccacctgggaaaccttcatgcctctctgatggttactgcccacccttaccccacccctcagctcagcctggtatggaaagcaaggtgcacgttggtctttgattgttctgtcctcacagcagagccagctttccccccatgttgctgctgcttttgctgctcatgctgcttgttgttttctcttccttatctttccaaattgtttccttgaaatgcttgtttccaatttttcttagattatgtttctaatttttattccaggtgtttttttttcttacttgacagaaaaaaagaaaaccccaacaatatcttgctgtattatcacattttttataaagttaaagcatttctctt

SEQ ID NO: 32274 - DNA, 2370 bp, Homo Sapiens
atgccggcccgggcttttgtgggcatcggccgtctgggcgcggctgcatggacgcgggtccggcgcgcgggaggcgatgacggccccgccatggcccgggcgggcagctgcggcggcgccgcggcgggcgcagggcggccggagccctgggagctgtccctggaggaggtgctgaaggcctacgagcagccgctcaacgaggagcaggcgtgggccgtgtgcttccagggctgccgcgggctgcggggctcgccgggccggcgcctgcgggataccggggacctcctgctgcgcggggacggctcggtcggggcgcgggagcccgaggccgcggaacctgcaaccatggtcgtgccactagccagctcggaagcccagaccgtgcagtccctcggcttcgccatctaccgcgcgctggactgggggctggacgagagcgaggagcgcgaactcagccctcagctggagcggctcatcgacctcatggccaacaacgacagcgaggacagcggctgcggtgccgccgatgagggctacgggggtcccgaggaggaggaggaggccgagggcgtcccccgcagcgtgcgcacctttgcccaggccatgcggctgtgcgcggcgcggctgaccgacccccggggcgcacaggcgcattaccaggccgtgtgccgcgcgctcttcgtggagacgctggagctgcgggccttcctggccagggtccgggaggccaaggagatgctgcagaagcttcgggaggacgagccgcatctggagacgcctcgggcagagctggacagcctgggtcacacagactgggcccgactgtgggttcagctcatgcgggagctccgccgcggagtgaagctgaagaaggtgcaagagcaggagttcaaccccctccccaccgagttccagctcacgcccttcgagatgctgatgcaggacatccgggcccggaactacaagctgcgcaaggtcatggtggatggggacatcccgccccgggtgaagaaggacgctcacgagctcatcctggactttatccgctcacggcctccactgaagcaggtctctgagaggcggctgcgcccgttgccaccaaagcaaaggtccctgcatgagaagatcctggaggagatcaagcaggagcggaggctgcgcccggtgcggggcgagggctgggctgcccgcgggtttggctctctgccctgcatcctcaacgcctgctccggagatgccaagtccacctcctgcatcaacctgtcagtcacagatgctgggggcagcgcccagcgcccgcggccccgcgtgctgctcaaggcgcctaccttggctgaaatggaagagatgaatacatctgaggaagaagagtctccgtgtggggaggtgacgctgaaacgggaccgctccttctcagagcatgacctggcccagctccgaagtgaggtggcctctggcctgcagtcggccacccaccccccaggagggacggagccaccacggccccgagctggcagtgcgcatgtgtggaggcccggctcccgagaccagggtacctgtcccgcgagtgtctctgaccccagccaccccctactcagcaaccggggctcctcgggggacagacccgaggcctccatgacccccgatgccaaacacctgtggctggagttcagccaccccgtggagagcctggcgctgactgtggaagaggtgatggacgtgcgccgtgtgctggtgaaggccgagatggaaaagtttttgcagaacaaggagctcttcagcagtctgaagaaggggaagatttgctgctgctgccgggccaagttcccgctgttctcgtggccgcccagctgtctcttctgcaagagagccgtctgcacttcctgtagcataaagatgaagatgccttctaagaaatttggacacatccctgtctacacactgggctttgagagtcctcagagggtatcagctgccaaaaccgcgccaatccagagaagagacatctttcagtctctgcaagggccacagtggcagagcgtggaggaggcgttcccccacatctactcccacggctgtgtcctgaaggatgtctgcagtgagtgcaccagctttgtggcagacgtggtgcgttccagccgcaagagcgtggacgtcctcaacactacgccacgacgcagtcgccagacccaatccctctacatccctaacaccaggactcttgacttcaagtgacagccccaggtggccaggcctccaggaggcaccaggcaggccctgtatcaggctaggacgctctgagctgtgcatgtacatatatacatatatagatacatttataatatatacacacagtctatatatttatat

SEQ ID NO: 32275 - DNA, 5227 bp, Homo Sapiens
cacgatttggtgcagccggggtttggtaccgagcggagaggagatgcacacggcactcgagtgtgaggaaaaatagaaatgaaggtacatatgcacacaaaattttgcctcatttgtttgctgacatttatttttcatcattgcaaccattgccatgaagaacatgaccatggccctgaagcgcttcacagacagcatcgtggaatgacagaattggagccaagcaaattttcaaagcaagctgctgaaaatgaaaaaaaatactatattgaaaaactttttgagcgttatggtgaaaatggaagattatccttttttggtttggagaaacttttaacaaacttgggccttggagagagaaaagtagttgagattaatcatgaggatcttggccacgatcatgtttctcatttagatattttggcagttcaagagggaaagcattttcactcacataaccaccagcattcccataatcatttaaattcagaaaatcaaactgtgaccagtgtatccacaaaaagaaaccataaatgtgatccagagaaagagacagttgaagtgtctgtaaaatctgatgataaacatatgcatgaccataatcaccgcctacgtcatcaccatcgtttgcatcatcatcttgatcataacaacactcaccattttcataatgattccattactcccagtgagcgtggggagcctagcaatgaaccttcaacagagaccaataaaacccaggaacaatctgatgttaaactaccgaaaggaaagaggaagaaaaaagggaggaaaagtaatgaaaattctgaggttattacaccaggttttccccctaaccatgatcagggtgaacagtatgagcataatcgggtccacaaacctgatcgtgtacataacccaggtcattctcatgtacatcttccagaacgtaatggtcatgatcctggtcgtggacaccaagatcttgatcctgataatgaaggtgaacttcgacatactagaaagagagaagcaccacatgttaaaaataatgcaataatttctttgagaaaagatctaaatgaagatgaccatcatcatgaatgtttgaacgtcactcagttattaaaatactatggtcatggtgccaactctcccatctcaactgatttatttacatacctttgccctgcattgttatatcaaatcgacagcagactttgtattgagcattttgacaaacttttagttgaagatataaataaggataaaaacctggttcctgaagatgaggcaaatataggggcatcagcctggatttgtggtatcatttctatcactgtcattagcctgctttccttgctaggcgtgatcttggttcctatcattaaccaaggatgcttcaaattccttcttacattccttgttgcattagctgtaggaacaatgagtggagacgcccttcttcatctactgccccattctcagggtggacatgatcacagtcaccaacatgcacatgggcatggacattctcatggacatgaatctaacaagtttttggaagaatatgatgctgtattgaaaggacttgttgctctaggaggcatttacttgctatttatcattgaacactgcattagaatgtttaagcactacaaacaacaaagaggaaaacagaaatggtttatgaaacagaacacagaagaatcaactattggaagaaagctttcagatcacaagttaaacaatacaccagattctgactggcttcaactcaagcctcttgccggaactgatgactcggttgtttctgaagatcgacttaatgaaactgaactgacagatttagaaggccaacaagaatcccctcctaaaaattacctttgtatagaagaggagaaaatcatagaccattctcacagtgatggattacataccattcatgagcatgatctccatgctgctgcacataaccaccacggcgagaacaaaactgtgctgaggaagcataatcaccagtggcaccacaagcattctcatcattcccatggcccctgtcattctggatccgatctgaaagaaacaggaatagctaatatagcctggatggtgatcatgggggatggcatccacaacttcagtgatgggctcgcaattggtgcagctttcagtgctggattgacaggaggaatcagtacttctatagccgtcttctgtcatgaactgccacatgaattaggagattttgcagttcttcttaaagcaggcatgactgtaaagcaagcaattgtatacaacctcctctctgccatgatggcttacataggcatgctcataggcacagctgttggtcagtatgccaataacatcacactttggatctttgcagtcactgcaggcatgttcctctatgtagccttggtggatatgcttccagaaatgttgcatggtgatggtgacaatgaagaacatggcttttgtcctgtggggcaattcatccttcagaatttaggattgctctttggatttgccattatgctggtgattgccctctatgaagataaaattgtgtttgacatccagttttgacctttcccagtaatcactgttgattacgagaatgttaccatgcagctttgcatctgttccttgtactgtatgcacattgctcaaaggaaagtcagtggcttgcactacttacaagtttcatagatttgagcctaaccacaagaggctggtgcttagtactgttttccctgcacgtaggggtcttttaaaaatataaagcttgtgataaagagaggagaatatgggactccatgaaccagtgttgatatgtttgattaagacttttcacaaaataatcatataaaacactagtctctttattagtagaaacttctgtggctatgcagaaatagagatcgaaccaaaaaaaatcatttaaactttaaaaatattttaaatggactttggggagacattttttgtgtgttttaagaatgaattgtagtgctctttaattcagctacatatattcatgtggtgatagggatcaacttgacacaactttgaaactgcataaagtagacataggaactagaggaaagctcaggctgcattagagtatgaatttagcattgggaaaagcccttattcttgaatctagagttactatttttgtatatatttgcatagtgtttaaacctgcagcctaaactactgaaatttgtgattgtatgtttgtgtgagcttcagtttaatgaaagattcataatggttctttgtattattataatacttggtgttggggtgttctttctgttttgttttttactttaattttgttttgattttttttttttttttttggcgggggtaggtgagggtttggagcatgtggtctttttaaaaaattgtaaccctctagaaaatatcaaagaaatgaaccagacgtggtttaaatagttgattttcctattttaacagtaccaactagttaattgggaaatgtaagttctgaatgttcacattgctttaccagtttggcactggaaccaagagcacatgtcgtggctggctacaaggttgtaaagcagaaaatcgaagtttaccatgtctgtaatgtgtacatgaagtgtcaatttagaacagttactaggataaactccattattgccatggctgtcatggtacccaagtgacttggaagatgcatttaaattactcagctgaaatcacttgatcatcttgtgccaagatatgctgttggtgcctgatagggattagtcttttaggtgccctgttctcctaccataattgtgaatgatttgtgagaagtgcaagccatgtttatcctgaatttttacttaataatttgtattactagtcatatgcatgtagctttctgtttacatcctatgccacatggtcttcatttatgccaggtaaactgtatttgaactatgtgcagctagctttgttttaatctgcttggcaaccagtgtagctgctgtaacaatctatcttattgttcaaatatataagagccaaactcttttccattccatctaaaatgttttcatttagtactcttctttcctcctactctatgaacttcaaaacaaaaacaaaactttgagagcagcacatgcatccaggtatttatagattattgccagtgtcttttctgtatgctataagcaagggagcttaggtgttatttctttaatttatgcttgaatctgaaaaattatttctgacttactccatggcctccttataataagtagaagttttatatataattaattttcagcattgggcactgaattaggacagtcctcatctcattgcttggcccttcaagcaacctagctaaaaggtgctgatattttatttagtactgccaacttcaagtgatttagatatctatctatctagatttctgaaccaagatatatttatagttcacttttgggtttttatacccacggtaggattctgcattccagcattaaatctgcttcattttagaacctttataaaagcaatagctggaatatactcccagttttaaaataaatgcctgattgatttaaagcaagtaggttatgctgaagtatataaagaagttttatattctctcaaaaatggtattatctttctttatttgctagattcttacaaatcttttaagagggctgtaacagttgctgctagtattagggttccacatcattctaatgtatagtttcaagtcttaatagacaatctgaattccactacatttcttttggctccaacattccttttagcttgaccagtctaatttaaaatgtgtttgttggaggtcattaacgttacttgtacaatgctgtcactgtgtgacatccatatgaattttggtatatatcaatcaatcaatcaatcacattgcattcaatcaatcagctgtgattgattgattatgcttagaaatactatagtaactagatgcagtgtgaattttttccattaacaaacaaacaagtcagtggcttaaatgtgattatggtcctgcaaggtgattcttgctaaaatatctaaacttttgttttgttttaactgaatcattttttaacttaaaaagctggaaaatatcaaatgctgttttttttttttcattgtcaacagtggtgtgtcattttatgtatgttcctaatgcttatggaactcctccaaaataaagttactcaaagag

SEQ ID NO: 32276 - DNA, 8670 bp, Homo Sapiens
atgggcatgggtgctcgcggcgcggatactgagttccccagagacgcggagtcttttgccccaggggcttattcttgttttctcaatggaacaggtcttcgaatctccccaggaacatctcaaatgtgtttccaggggacaggcgttcttggtgctgaagaggaggagagtcaagtgagacgagatctggtacctcacgcactagatccctcctctccggcctggccaacagcaaatgcagccattgcccgagaccactcagaactctccctgtgccatcctcttggggaacaggaggatatgtccgtagaagacttcgtggactggggaaagccacgccgggatcgggacgccggagagggtcgcccctccctaggctttttcccgtcgcggcgcccacgtgaccgagagcaggccttcaccagcccgcccctttcggccgctgctgcccacttcccgctcggggtaagtgcgtacgcgacggagcggggtgtgaagatggcggacgaagaggccgagcaggagaggttgagttgcggcgaaggcggctgcgtcgcggagctgcagcgcctgggcgagcggctccaggagctggagctacagctgcgggagagccgggtaccggccgtggaagcggccaccgactactgtcagcagctgtgccagacactcctagaatatgcagagaaatggaaaacttcagaagatcctttacctttattggaggtatacacagtggctatccaaagttatgttaaagcccgaccttatcttacctctgaatgtgaaaatgtagccttggttctggaacgcttggcattaagctgtgttgaacttttactgtgtctgcctgttgagttatcagataaacagtgggaacaatttcagacactggtgcaggtagctcatgaaaagctgatggagaatggcagctgtgaattgcattttttagctactctagctcaagagactggggtgtggaaaaacccggtactgtgcactattctttcccaggaaccattggataaggataaagtgaatgaatttttagcttttgagggtcccatcttgttggatatgagaattaaacatctaatcaaaacaaatcagttaagtcaagcaactgctctagcaaagctgtgttctgaccatccagagattggcataaaaggtagttttaagcaaacttaccttgtctgtctttgtacatcatcaccaaatggaaagttaatcgaagagatttcagaagttgattgcaaagatgcactggaaatgatctgtaacttagaatctgagggtgatgaaaaaagcgctcttgttttatgtactgcgtttttgtcacgtcagctccaacaaggagatatgtactgcgcttgggaacttactctcttttggagtaaattacaacaaagagtagaaccatctatacaagtgtaccttgagaggtgtcgtcaactttctttgttaacgaaaacagtatatcacattttcttcctgattaaagttattaattcagagactgaaggggctggacttgctacctgtatagaactgtgtgtaaaggctcttcgcttggagtctacagaaaatactgaagtgaaaatatctatttgcaagaccatttcatgtttgttgcctgatgatctggaagttaaacgtgcttgtcaactgagtgaatttcttattgagcctacagtagatgcgtattatgctgtggaaatgttgtataatcagccagaccagaaatatgatgaagagaatcttccaataccaaattctttacgctgtgagctgttacttgtattgaaaactcaatggccctttgatccagaattctgggattggaaaaccttgaaacgacaatgtcttgcattaatgggagaagaagcatccattgtgtcttcaatagatgaactaaatgacagtgaagtatatgaaaaagtggtagactaccaagaagagagtaaagaaacttctatgaatgggctttctggtggagttggtgctaattctggccttcttaaagacattggtgatgaaaagcagaagaagagagagataaaacagttaagagagaggggatttatatctgctcggtttaggaattggcaagcctacatgcagtattgtgtgttgtgtgacaaagaattccttggtcacagaatagtacgacatgctcagaaacattacaaagatggaatttatagttgccccatatgtgcaaagaactttaattctaaagaaacttttgtccctcatgtcacactgcatgttaaacaatctagtaaagagagactagcagctatgaaaccattaagaagattgggaaggcctccaaagatcacaactaccaatgaaaatcagaagactaatactgtggctaaacaggagcagcgacctataaaaaagaatagtctctattcaacagattttatagtgtttaatgacaatgatggttcagatgatgagaatgatgacaaagataaatcctatgagccagaagtgattccagtccagaaaccagtacctgttaatgaatttaattgccctgtaactttttgtaaaaagggctttaagtactttaaaaatttaattgctcatgtgaaggggcataaagataatgaagacgccaagcgctttcttgaaatgcagagcaaaaaagttatttgccagtactgtaggcggcattttgtgagtgttactcatctcaatgatcacttacagatgcactgtggcagtaaaccatatatctgtatacagatgaaatgtaaagctggttttaatagttacgccgagcttttaacccaccgaaaggagcatcaagtctttagagcaaaatgtatgtttcctaaatgtggaagaattttttcggaagcttatttactatatgatcatgaagcacaacattataatacgtacacttgtaagttcacaggttgtggtaaagtttatcgttctcagggtgagctggaaaagcatctggatgatcacagtactcctcctgaaaaagtgctgcctcctgaagcccaacttaattcatctggagattccattcagccttctgaagtgaatcagaacacagcagagaatattgagaaagaaagatctatgcttccttcagaaaataacattgaaaacagcttactagcagatagaagtgatgcttgggataaaagcaaagcagaatcagctgtgaccaaacaagaccagatttctgcctctgagctcaggcaagctaatggaccattgtcaaatggtttggaaaaccctgctactactcctctacttcaatccagtgaagtagctgtgtccattaaggtgtctctcaatcaggggattgaggataactttggaaagcaagaaaactcaactgtggaaggcagtggtgaagcactggtcacagacttacatacgccagttgaagatacttgtaatgatttgtgtcatccaggtttccaggagagaaaagaacaagattgctttaatgatgcccatgttactcagaattctttagtaaattcagaaactctcaaaataggtgaccttaccccacaaaacttagaaagacaagtgaacaacttgatgaccttttctgtgcaaaatcaggcagcatttcaaaacaatttaccaacttccaaatttgaatgtggagataatgttaaaacatcatccaatctttataatttacctcttaagacattagaaagtattgcatttgttccaccgcagtccgacctaagtaattcattaggaactccatcagtgcctccaaaagctccagttcagaaattcagctgccaggtcgagggatgtactcgaacctataattcttcacagagtattgggaaacacatgaagacagcacaccctgaccaatatgctgcatttaaaatgcagcgcaaaagtaaaaaaggtcagaaagctaacaacttaaatacaccaaataatggaaagtttgtttattttttgccatcaccggtgaacagctcaaatccattttttacatcacagaccaaagccaatgggaatcctgcttgttcggcccagttgcagcatgtctcgccacccatttttccagctcatttagcaagtgtgtcaactccattgttgtcctcaatggaaagtgtcataaatccaaatataacttctcaggataaaaatgaacaaggtggtatgttatgttcccaaatggaaaatttacctagtactgccttgccagcacaaatggaagatctaaccaaaacagttctgcctttgaatattgacagtggctcagatcctttccttcctttacctgcagaaagtagttcaatgtctctcttcccttcaccagcagatagtgggactaattctgttttttcccaactggaaaataatacaaatcattattcctcacagattgaaggaaacactaattcctcctttctaaaggggggtaatggtgaaaatgcagtttttccttcacaagtgaatgttgcaaataacttcagtagcaccaatgcccaacagtctgcacctgaaaaagttaaaaaagaccgtgggcggggcccaaatgggaaggaaagaaaacctaagcacaacaaaagggctaaatggcctgcaattatcagagatgggaaatttatctgtagcaggtgttacagggcttttactaatcccagatcactgggtgggcacttatccaagcgatcttactgtaaaccactggatggagccgaaattgctcaagaacttctacagagtaatggacagccttctcttcttgccagcatgattctctccacaaatgcagtaaatttgcagcagccacaacaatctaccttcaatccagaagcatgttttaaagatccatcatttctacagcttcttgctgaaaatcgctcgccagcatttttaccaaatacatttcctcgatctggtgtgactaactttaataccagtgtcagtcaagaaggtagtgaaattattaaacaggctttggaaactgctggcattcccagtacatttgagggtgccgaaatgctttctcatgtttcaacaggttgtgtctctgatgcatcacaagtaaatgcaacggtgatgccaaatccaactgtaccacccctgttgcacactgtatgccatccaaacaccttgctgaccaaccagaataggacgtcaaactccaaaacttcctccattgaggaatgtagcagcttgcctgtttttccaacgaatgacttactactgaagactgttgaaaatggtttgtgctctagttcatttcctaattctggtgggccatcacaaaattttaccagtaacagttctcgtgtttctgttataagtggtcctcagaacacaagatccagtcatttaaataaaaagggaaacagtgcttctaagagaagaaagaaagttgctcctccactaattgcacctaacgcttcccaaaacttggtaacaagtgacttaacaacaatgggactcatagcaaagagtgttgaaatcccaactactaaccttcattcaaatgtaattccaacttgtgaacctcagagtttggtggaaaatctaacacagaaattaaataatgttaacaatcagttatttatgactgatgtaaaagagaatttcaaaaccagtcttgagtcccatacagtgttagcccctttaacattaaaaactgaaaatggtgattcccaaatgatggctttgaattcatgcacaacttcaataaattctgatttgcagatttctgaagacaatgttatacaaaactttgaaaagactcttgaaattattaaaactgctatgaattctcaaatacttgaggtaaaaagtggatctcagggtgctggtgaaacttcacaaaatgctcaaataaattataacattcagcttccttcagtaaacactgtgcaaaataacaaattacccgattcttctccgttttcctcctttataagtgtcatgccaacaaaaagtaacattcctcagtctgaagtatcacataaggaggatcaaatacaggaaattttagaaggcttacagaaattaaaattagaaaatgacctatccactccagcatcccaatgtgtactgataaatacatcagtgacactgactcccacgcctgttaaatcaactgcagatatcacagttattcagccagtttctgaaatgataaacattcaatttaatgacaaagttaataaaccctttgtgtgtcaaaaccaaggctgtaactacagtgctatgacaaaggatgcactatttaagcactatggtaaaattcatcaatacactccagaaatgattcttgaaattaagaagaatcaattgaaatttgctccctttaaatgtgtagtacctacatgtacaaaaacatttacaagaaattctaacctccgggcacactgtcagttggtgcatcattttacaactgaagaaatggtaaagttaaaaattaaaaggccttatggaagaaaatctcagagtgaaaatgtgccggcctcacgaagtacacaagtgaaaaaacagctagctatgacagaggaaaataaaaaggaatctcagcctgctttagaattgagagcagagacccaaaatacccacagtaatgtagcagtgatcccagaaaaacaacttgtagaaaaaaaaagtcctgacaaaacagaaagttctttacaagtgattacagttacttcagaacaatgtaatacaaatgcactcacaaacacacaaaccaaaggacggaagattaggaggcataaaaaagaaaaggaggagaaaaaacgaaagaagccagtttcccaatcccttgagtttccaacaagatacagtccttacagaccttatcgatgtgttcaccagggatgctttgctgcctttacgatacagcaaaacttgattctccattaccaggctgtacacaaatcagatctacctgcattttcagcagaggtcgaagaggaaagtgaagctggtaaagaaagtgaagaaactgaaactaaacaaactttgaaagaatttcgatgtcaggtaagtgactgttctcgaattttccaagcaattactggcctaatacaacactacatgaaacttcatgaaatgactcctgaagaaattgaaagtatgactgcttcagtggatgttgggaagtttccatgtgaccagttagagtgtaaatcttcatttactacatatttgaactatgttgttcatctagaggcagaccacgggattggactaagggcaagtaaaacagaagaagatggtgtatacaaatgtgattgtgaaggctgtgaccgtatatatgcaacccggtcgaatctcctccgacacatttttaataagcataatgacaaacataaggctcatttgattcgtccaagaagattaacaccaggccaggaaaatatgtcaagcaaggcaaaccaagaaaaatcaaagtctaaacatcgggggaccaagcacagcagatgtggaaaggaaggaataaaaatgcccaagaccaaacgaaagaaaaaaaataatttagaaaacaagaatgcaaagattgtgcagattgaagaaaataagccttattctctgaaacgtgggaagcatgtatattctataaaggctagaaatgatgccctgtctgagtgtacaagcagatttgtaacccagtatccatgtatgataaagggatgtacttcagttgttacaagtgaaagcaatataattagacattataagtgccataaattatctaaggcatttacatcacaacaccgaaatcttcttattgtattcaaacggtgttgcaactcacaagtaaaggaaacgtctgagcaagaaggtgctaagaatgatgtgaaagattctgacacgtgtgtatcagagagcaatgataattcaagaacaacagctacagtttcacaaaaggaagttgaaaaaaatgaaaaagatgaaatggatgaactaacagaattgtttattacaaaattaataaatgaagatagcacaagtgtagagacccaagctaatacttcttcaaatgtaagtaatgattttcaggaagataacctctgccagtcagaaagacaaaaagcaagtaatttgaagagagttaataaggaaaaaaatgtctcacaaaataaaaaaaggaaagttgaaaaagctgaaccagcatcagcagctgagttaagtagcgtgcgtaaagaagaagaaactgctgttgccattcaaaccattgaggagcatcctgcatcttttgactggagctcttttaagccaatgggatttgaagtatcatttctgaagtttcttgaggagtctgcagtgaagcagaagaaaaatactgacaaagaccatccgaatactggaaacaaaaaaggatcccattcaaattcaagaaaaaatattgataagactgctgtgactagtggaaatcatgtatgtccttgtaaagaaagcgaaacgtttgtacagtttgccaatccatcacagcttcagtgcagtgataatgtaaaaattgttttagacaagaatcttaaagattgcactgagcttgtcttaaagcaacttcaggaaatgaaacctaccgtcagtctgaaaaaacttgaagtacattcaaatgatccagatatgtctgttatgaaagatatcagtataggtaaagccacaggcagaggtcagtactga

SEQ ID NO: 32277 - DNA, 7019 bp, Homo Sapiens
gtgcgaaggaaaccgatggggatcggaaccgtagcggttgagctgctgctgctacggatatctgacagaagccttcggtggttgtcggcctaatgagcggacggcaaagaacgctttttcagacgtggggctcaagtatctcccgatcatctgggactccgggttgcagctccggaactgagcgacctcagagccctggcagctccaaggcgcctttgccagcagcagcggaggctcagctggagtcggacgatgatgtgttgcttgtcgcggcgtacgaggctgagcggcagttgtgtctagagaatggcgggttctgcacctccgcgggcgccctgtggatttaccctaccaattgcccagtgcgggactaccagctgcacatttcccgggctgctctgttttgcaatacgctggtgtgtctgcctaccggactgggaaagacctttattgccgccgtggtcatgtacaatttctaccgctggttcccttcaggaaaggtggtcttcatggccccaacgaaacccttggtgacacagcagatcgaggcttgctaccaggtgatgggtatcccgcaatcccacatggccgaaatgacagggtctacacaagcttccaccaggaaggaaatatggtgcagtaagagagtgctttttcttacacctcaggtcatggtaaatgacctttctagaggagcttgtcccgctgctgaaataaagtgtttagttattgatgaagctcataaagctctcggaaactatgcttattgccaggttgtaagagaactagtcaaatatacaaatcactttagaatcttggctctaagtgccacaccaggtagtgatataaaggctgtgcaacaagttattactaacctgctaattgggcagatagagcttcgttctgaagattctccagatattttgacatattctcatgaaagaaaagttgaaaagcttattgttccgcttggtgaagaacttgcagccatccaaaagacctatatccagattttggaatcatttgctcgttctttgattcagaggaatgttttgatgagaagggatatcccaaatctaacaaaatatcagataattctggcaagagatcagtttaggaaaaacccatctccgaatattgtgggaatacaacaaggcataatcgagggagagtttgctatttgtattagtttatatcatggttatgaattattgcagcaaatgggaatgagatcattatatttcttcctttgtggaattatggatggaactaaagggatgacacggtcaaaaaatgaacttggccgaaatgaagacttcatgaaactctataatcatctagagtgtatgtttgcacgtacacgtagtacttcagcaaatggtatttctgctatccaacaaggagataaaaataaaaaatttgtttatagtcatccaaagttaaagaaattagaagaagttgtaattgaacacttcaagtcatggaatgctgaaaacactactgaaaagaaacgtgatgagacccgagttatgatcttctcttcatttcgagatagtgttcaagaaattgcagaaatgctttcacagcatcagccaattattagagtaatgacttttgtcggccatgcctcagggaaaagcacgaagggttttacccagaaggagcaactggagatttataatcagagtcagtccaacaaaagaagtatatataaagctatttcaagtaacaggcaggtccttcatttttaccaaagaagtccacgaatggttcctgatggaatcaacccaaaattacacaaaatgttcatcacacatggtgtctatgaaccagagaagccttctcggaacttgcagcgaaagtcatctatcttttcctatagggatggaatgaggcaaagtagcctaaagaaagattggttcttatcagaagaagaatttaaattatggaacagactttatagattaagggacagtgatgaaattaaagagataacattgcctcaagttcagttttcttctttacaaaatgaggaaaacaaaccagctcaagaatcaaccactggaattcatcaactctctctctctgaatggagactgtggcaagatcatcctttgcctacacatcaagttgatcactcagatcgatgccgccattttataggccttatgcaaatgatagagggaatgagacacgaagagggagaatgcagctatgaattggaagttgaatcttatttacaaatggaagatgttacctcaacatttattgctcccaggaatgaatctaataatcttgccagtgacacctttatcactcacaagaaatcgtcatttataaagaacataaatcaaggcagttcatcctcagtgatagaatctgatgaagaatgtgctgaaattgttaaacaaactcatatcaaacctactaaaattgtttctttaaagaaaaaagtgtctaaagaaataaaaaaagatcagcttaaaaaagaaaataatcacggtattatagattctgtagataatgacagaaattccactgttgaaaatatttttcaagaagacctaccaaatgataaaaggacatcagatacagatgaaattgctgccacatgtactattaatgaaaatgttattaaagaaccgtgtgtgttattaacagagtgtcagtttacaaataaatccactagttcacttgctggaaatgttttagattctggttataacagtttcaatgatgaaaaatctgtttcatctaacttatttcttccattcgaagaagagctttatattgttagaacagatgaccaattttataattgtcactcattgacaaaagaggtactagctaatgtagagagatttttatcttattctcctccgcctctcagtggactctcagacttggaatatgaaattgctaagggtactgcacttgagaatttgcttttcttaccctgtgcagagcatttacgaagtgataaatgcacctgtttgctgtcacattcagctgtgaattctcaacagaatttagaattgaattcacttaaatgtataaattatccatctgaaaaaagttgcctttatgatatacctaatgataatatttctgatgagccaagtctctgtgactgtgatgtacataaacataatcaaaatgaaaatttagtacctaacaatcgtgttcaaatacacagaagccctgcacagaatttagttggagagaacaatcatgatgttgataacagtgacctcccagtattgtccactgatcaagatgaaagtttgctgttatttgaagatgttaatacagagttcgacgatgtgagtctttcacccttgaacagtaaaagcgaatctttacctgtgtcagacaaaactgctattagtgaaacgcctctggtctctcagttcttaatttctgatgaacttttgttggacaataattctgaactccaagatcaaatcacccgtgatgctaatagttttaaatctcgtgatcagagaggtgtacaggaagaaaaagtgaagaatcatgaggatatttttgattgctctagggatttattttctgttacctttgatttaggattctgtagtccagattctgatgatgaaatattggaacatacatcagatagcaatagacctctagatgatctatatggaaggtatttggaaattaaggagataagtgatgcaaattatgtttcgaatcaagcactaataccaagagatcatagtaaaaattttactagtggaactgttattatcccatcaaatgaagatatgcagaatccaaattatgtacatttgccactgagtgcagcaaaaaatgaagaattgttatctcctggttattctcagttttctttaccagtgcaaaaaaaagttatgagtacaccactctctaaatcaaacacattgaactcattttctaagataagaaaggaaatacttaagacaccagattctagtaaggaaaaagtaaacctacaaagattcaaagaagcattgaattcaacttttgattattcagaattttctctagaaaagtctaaaagcagtggtccaatgtatctgcataaatcctgtcattctgttgaagatggacaattattaacaagtaacgaaagtgaagatgacgagattttccgaagaaaagttaaaagagcaaaaggaaatgttttaaactctcctgaggatcagaaaaatagtgaagttgattctccacttcatgctgtcaaaaagcgcagatttcctataaacagatcagaattatcatctagtgatgagagtgagaattttcccaaaccatgttcacaattagaagacttcaaggtttgtaacgggaatgccagaagaggcatcaaagtcccaaagagacagagtcacttaaagcatgtagctaggaagtttttagatgatgaagcagaactttctgaagaagatgcagaatatgtttcatcagatgaaaatgatgagtcagaaaatgaacaagattcctcattacttgactttttaaatgatgaaactcaactttcacaggctataaatgattctgaaatgagagctatttacatgaaatctttgcgtagtccaatgatgaacaataagtacaaaatgattcataagacacataaaaacataaacattttctcgcagattcctgaacaagatgaaacctatttagaggatagtttttgtgttgatgaagaggagtcttgcaaaggccaatcaagtgaagaagaagtttgtgttgattttaacttaataactgatgattgctttgcaaatagtaaaaagtataaaactcgacgtgcagtaatgctaaaagaaatgatggaacaaaattgtgcacattcaaaaaagaaattatccagaattattttaccagatgattcaagtgaggaggagaacaatgtaaatgataaaagagaatctaatattgcggttaacccaagcactgttaagaagaacaaacaacaggaccattgtttaaattcagtgccttctggatcttctgcgcagtccaaggtgcgttctactccaagagttaatccattagcaaagcagagcaaacagacatcgctgaatttaaaggatacaatttccgaagtctcagacttcaaacctcagaatcataatgaagtccagtctaccacaccacccttcactactgttgattcacagaaagactgtagaaaatttccagttccacagaagaggttcggacatctagcactaatgtttcccatgccctctgcctctgcaaaaagaggagctcatggtccacaggatttggcagattactttggaaaggaaagctgggatggtagtgctttggaggattctagcacttcaggggcatcctgttccaagtcaagaccacatttagctgggacacatacttctcttagacttccgcaggaaggaaaaggaacctgtattcttgtaggtggtcatgaaatcacttctggattagaagtaatttcttccctaagagcaattcatgggttgcaagtagaagtttgtcctcttaatggctgtgattacatcgtgagtaatcgcatggtggtggaaaggaggtctcaatctgagatgttaaatagtgtcaataagaacaagttcattgagcagatccagcacctgcagagtatgtttgaaagaatatgtgtgattgtggaaaaggacagagaaaaaacaggagacacatcaaggatgtttaggagaacaaagagctatgacagcctgctgactaccttaattggcgctggaatccgaattcttttcagttcctgccaagaagaaaccgcagatttgctaaaggaactgtctttagtggaacaaagaaagaatgttggtattcatgttccaacagtggtgaatagtaataaaagtgaggcactccagttttatttaagtattcccaatataagttatataactgcattaaatatgtgtcaccagttttcatctgtgaaaaggatggctaacagctcacttcaagaaatctccatgtatgcacaagtaactcatcagaaggctgaggagatctatagatatattcactatgtatttgacatacaaatgttaccaaatgatcttaaccaagatagactgaaatctgatatataatcaagctgctcaagatggggttttcaaagacctctcacaatattaaatgcacttcaataatcattgctgttttatgtttatttgtaaataagagaatattttatttaaatattttatattgtatacatttttatttatagattatagaaattattaaaaaagaaaaatctgatgttcagtgatcattttgactagattataaaactaatttttcttattaaataaaacaaggtttattaaaagtgttactaaggatagtttaagaaagtaaaagctaagctagagatatactttggaatgtttcccaaaattaaagttgtactgttgtgataaatagtaaagttgacatgtctatgactacagccaacttgtcgattttccctatgtgtagatagtatacttttaagtgtactgattctaaatacatgtacttggtaaggtgtgggtgatgggtgggttgtgagataaatgacccagtaactaggaaagtagaaaacttaactgaatgtttatctgaccaaaggtgtgtcccagttaagtactgtcaaatctattaatatgaactctgatatggtttggctgtgtccccaaccaaaatctcatcttgacttgtaatctgaattataatcccaatatattggggagggacctcctggaacgtgattagctcatgggggcggttcccccatgctgttctagtgatagttctcagaggatctgatggttttataagcttttcctctgttcactctgcagttctcttgcctactgccatgtggaaaaggaaacgtttgcttcccctccaccatgattgtaagttcccgaggcctccccagccatgcaggactgtgagtcaattaaacatcttttccttataaatta

SEQ ID NO: 32278 - DNA, 5155 bp, Homo Sapiens
aggtgccaagctctcctgatgaaatgtgttctgccccactgggctccagggacagtgtctggtgctgttgaagcccttattcgaactttccagaatggatagtcccccaaagctgactggagagaccctcatcgttcatcacatccccctggtgcactgccaagtcccagacaggcagtgctgtggaggggcaggtggaggtggtgggagcacaagacctaatcccttctgcccacctgagctgggcatcacccagcccgatcaagacctaggacaagctgactccctgctattcagcagcctgcactctactccaggaggaactgcacggtctatagacagcaccaagagtaggagtcgggatggaagaggccctggagcccccaaacgacacaaccccttcttgctgcaggagggtgtgggtgagccaggacttggtgacctgtatgatgacagcattggtgacagtgccacccagcagtccttccacctgcatggcactggccagcccaactttcatctatcctctttccagctgccaccatctggccccagagtgggcaggccatgggggacaacacgcagtcgggctggagtggtggaagggcaggaacaggagccagtgatgaccttggatactcagcagtgcggcaccagccactgctgccggccagagctggaagcagagactatggagctggatgagtgtgggggacctggtgggagtggcagtgggggtggagccagcgatacctctggcttttcctttgaccaggaatggaagctcagttcagatgaatccccaaggaaccctggatgctccggctcaggggaccagcactgccgctgcagtagcacatccagtcagtccgaggcagctgaccagtccatgggctatgtgagcgactcctcctgcaacagttcagatggtgtgctggtcaccttcagcaccctctacaacaagatgcatggcaccccccgtgccaatctcaactctgccccacagtcctgcagcgactcttccttctgcagccactcagaccctggcgccttctatctggatctgcagccctccccatttgagtctaagatgtcttatgagtcccatcaccctgaaagtggaggaagggaagggggctatggttgccctcatgcctcttctcctgagcttgatgccaactgcaactcctaccgcccacactgtgagccgtgcccagcagtggctgacctcacagcctgcttccaaagccaggcccgtcttgttgtggccacacaaaattactataaacttgtcacctgtgacctatcttcccaatcatccccaagccctgctggctcttccatcactagctgctctgaggaacacaccaagataagtcccccaccaggccctggcccagacccaggccccagccagccctctgagtattacctattccagaagccagaagtccagccagaggaacaagaagcagtgagttcctccacccaagcagcagctgctgtgggccccactgtgcttgagggacaagtatacacgaatacttcaccccccaacctcagcactggacgtcagcgctcccgcagctatgatcgcagcctgcagcgcagccctcctgtccgcctgggctcgctggaacgtatgttgagttgcccagtgcgcttgagtgagggccctgcagccatggccgggcctggctccccacccaggagggtcacctcctttgccgagctggccaagggccggaagaaaactggaggctctggctcgcccccacttcgtgtgagtgttggggactcctcccaggagttctcacccatccaagaagcccagcaagatcggggggccccactggatgagggcacttgctgtagccatagcctgccacccatgcctttggggccaggcatggacctacttggcccagacccaagtccaccctggtccacccaggtctgtcagggaccccactccagtgagatgcctcctgctggcctcagagctactgggcaaggccccctggctcagctgatggatccagggcctgctctcccagggagcccagccaacagccatacccagagggatgcaagagctagagctgacgggggtggcaccgagagccgaccagtccttcgctacagcaaggaacagaggccaaccacactgcccatccagcccttcgtgttccagcaccacttccccaagcagctggccaaggcccgggccctccacagcctttcccagctctacagcctctcaggctgcagccgtacacagcagcctgccccactggctgcccctgctgctcaagtctcagtcccagctccctcaggggaaccgcaggcatccactccccgagccactggcagaggtgccaggaaagctgggtctgagccagagacctctcggccatcgcccctgggcagctactcccccatccggagtgttggcccctttgggcccagcactgactcttctgcctccacttcgtgctcccctcccccagagcagcccacagccacagaaagcctgcccccatggagccactcctgtccttctgctgtccggcctgccacctcccagcagccgcagaaggaggatcagaagatactgaccttgactgagtaccggctccatggaacaggaagcttgccgcctctgggctcctggcgatctggcctcagccgagcagagagcctggcccggggaggtggtgagggcagcatggccaccaggcccagtaatgccaaccacctatcccctcaagccctcaagtggcgggaatacaggaggaagaacccactagggccacctggtttgtcagggagcctagaccgaagatcacaagaagctcggctggcccgaagaaaccctatctttgagttccctggctccctcagtgctgccagccatctgaactgccggctgaatggccaagcagtgaagccgttaccactgacctgccctgacttccaggaccccttttccttgacggagaagcctccagctgagttttgtctgtccccagatggcagctcagaggccatttccattgacctgcttcagaaaaaagggctggtaaaagctgttaacatcgctgtggacctcattgtggctcattttggcacaagccgggatcccggggtgaaggcaaagctgggaaacagttctgtgagccccaatgtgggccacctggttctgaagtacttgtgccctgccgtccgcgccgtgctggaggatgggctcaaggcctttgtactggacgtcatcatcgggcagcgtaagaacatgccatggagtgtggttgaggcttccacacagctaggcccatccaccaaggtcctgcatggcctctacaacaaagtcagccaattcccagagctcaccagtcataccatgcgcttcaacgccttcatcctcggcctgctcaacatccggtccctggagttctggtttaatcacctctataaccacgaagacatcatccagacccactaccagccctggggcttcctgagtgcagctcataccgtgtgtcccggcctctttgaagagctgctgctgctgctacagcccctggccctgctgcccttcagcctcgacttgctgttccagcaccggctgctgcaaagtgggcagcagcagcggcagcacaaggaactgctgcgggtgtcccaggacctgctgctgtctgcccactccacgctgcagctggcccgggcccggggccaggagggccctggagacgtggacagggcagcccaaggggagcgggtgaagggtgtgggtgcctcagaaggtggagaagaggaagaggaagaagaggagacagaagaggtggcagaggcagccgggggctcagggcgtgccaggtgggcccgaggtgggcaggccggctggtggtaccagctcatgcagagctcccaggtctacatcgatggctccattgagggttccaggttccctcgtggtagcagcaacagcagcagcgagaaaaagaaaggggcaggaggtgggggacctccccaggctccaccaccccgagagggagtagtggagggggctgaggcctgccctgcctctgaggaggccctgggccgggaaaggggctggcccttctggatggggagcccccctgactctgtgctggccgagctgaggcgcagtcgggagagggaagggcccgctgcctcgccagcagaaaatgaggaaggggcctcagagccttcacctggaggcatcaagtggggacacctctttggctcccgaaaagcccagcgggaggcccggcccacaaataggctcccctcggactggctgagcctggacaagtccatgttccaactagtggcgcagacagtgggttcccgccgggagccagagcccaaggagagcctgcaggagccacactccccagccctgccctccagtcctccgtgtgaggtgcaggcactgtgccaccacctggccaccggccctggacagctgagcttccacaaaggagacatcctacgagtgctggggcgagctggaggagactggctgcgctgcagccgtggccccgactctggcctggtgcccctggcctacgtgacattgaccccaactccaagtccaacccctggaagcagccaaaactgaggccctgtgcatgctggtggcctcagggaccctcataacccccagactcagagcccgagagcccttcccaagccattggcttggctgcagagtagactgagagctggggccacgtatccctgtgctggcacctgctccctgtgctcagtattaattacgcccccttaactgtcccagtgaccttgtccagacctccacccaggagagggatgggacacagcactgggctgccaggattcccctggcccgtctgggccaacccttccatgggtgaagacaagcaagtccccctggaggcgggtggcccagaaagccatctacagggttccctaggccaggtggagatgaggatgggtaacagtattggggccagatccctaagccccccagctgtaaataggctgtggccagtgcctggtcatcagaagagggaggaggagcccaggcgtctgtttatgtatttatttatttatttattatacctattaataaaaaaggtgctcagcctcc

SEQ ID NO: 32279 - DNA, 7319 bp, Homo Sapiens
atgactaatccttgggaagagaaagtctgcaaaatggctcaaaccagtttactgcaagggaagcagttttactgtagggagtgggttttccacaagcttcagcattgcctccaggagaaaagtaactgctgcaatagtgctgtcaatgcaccatcacttgtaatgaattctgggaataatgctagtggtgtctctggaaagggagctgcctggggtgtgttgttggtaggagggcctggcagtggcaagacggccctatgtactgaactcttatggccaagttcacctgcaagtttgcagagaggtttacatcgccaagctttggcctttcatttctgcaaagcccaggactctgatactttgtgtgttggagggtttattagaggtctagtagcccagatctgccgcagtggactactccaaggatatgaggacaagctaagggatccagcagtccaaagcctcttacagcctggggagtgcgagagaaacccagccgaagcatttaaaaggtgtgttctactccctcttctgggaatgaagcctccccagcaaagcctatacctgcttgttgattctgttgatgaagggtgtaacattactgaaggtgaacaaacgtctaccagcttatctgggactgttgcagcacttttagctggtcaccatgagttctttccaccatggctattgcttctctgttctgcccgaaagcagagtaaggctgttactaaaatgtttactggttttcgaaaaataagtttagatgaccttcggaaggcatatatcgtcaaggatgttcagcagtacattcttcatcgtttagatcaagaagaagctttgcgacaacacctcacaaaagaaactgcagagatgttaaatcaactgcacattaaaagcagtggatgctttctttacctagaacgagttttagatggagttgtagaaaattttattatgttaagagaaattcgtgacatcccaggaactctaaatggtttatatctctggctgtgccaaagactttttgtaagaaaacaatttgcaaaggttcagcctattttgaatgtgattcttgcagcctgccgacctttgaccataacggaattatatcacgcagtatggaccaaaaacatgtcgttaactttggaagattttcaacgcaagttagatatcctctccaaacttcttgttgatggactaggaaatacaaaaatactgtttcattatagttttgccgagtggcttctggatgtgaaacactgtactcagaagtatttatgtaatgcagcagaaggacacagaatgttggctatgagttatacctgtcaagccaagaatttaacaccattggaagcacaagaatttgcattgcacttaattaactcaaacttacaattagagacagcggagttagctctgtggatgatatggaatggtacacctgtcagagattccctttctactttgatacccaaggaacaagaagtgctacagctgttggttaaagctggggctcatgtcaacagtgaagacgatcgcacatcatgcatagttcgacaagccttagaaagagaggattccattcggacattattagataatggagcttcagtaaatcagtgtgattcaaatgggagaacattattggctaatgctgcatatagtggcagtcttgatgtagtcaatttacttgtctctaggggagcagatttagagatagaagatgctcatggacatacaccactcactctagcggctagacagggacataccaaggtggttaattgtttgattgggtgtggagcaaatattaatcatactgatcaagatggttggacagcattaagatctgctgcttggggtggccatactgaggtagtttctgcactactttatgctggcgtaaaagtggattgtgcagatgctgatagccgaacagctttgagagcagcagcatggggaggacacgaggatattgtactgaatttgctacaacatggcgctgaagtgaacaaagctgataatgaaggtagaactgctttgatagcagcagcatacatgggacatagagagattgtggaacacctactggaccatggagcagaagtaaatcatgaggatgttgatggcaggactgcactctctgtagctgcactttgtgtgcctgcaagtaaagggcacgcatcagttgttagccttttaattgatcgaggtgctgaagtagatcattgtgataaagatggcatgactccactgctggtagctgcctatgaaggacatgttgatgtggttgacttgcttctagaagggggagcagatgtagatcacacagataacaatggccgtacacccctcttagcagcagcgtctatgggtcatgcatcagttgtaaatacacttttgttttggggtgcagctgtggatagtattgatagtgaaggtaggacagtcctcagtatagcttcagcacaaggaaatgttgaggtggtacgtactctactggatagagggttagatgaaaatcacagagatgatgctggatggacacctttgcacatggcagcttttgaagggcacagattgatatgtgaagcacttattgaacaaggtgctagaacaaatgagattgacaatgatggacgaatccctttcatattagcttcacaagagggtcattatgattgtgttcaaatattactggaaaacaaatccaacattgatcaaagaggttatgatggaagaaatgcactgcgggttgctgcattagaagggcacagggacattgttgaattgctttttagccatggtgctgatgttaactgcaaagatgctgatggtcggcctacactttatatcttggccttagaaaatcagcttacaatggccgaatattttttagaaaatggtgcaaacgtagaagcaagtgatgctgaaggaaggacagcacttcatgtgtcttgttggcaaggccatatggaaatggtgcaggtcctgatagcataccatgctgacgtcaatgctgcagacaatgaaaagcgctctgctttgcagtctgcagcctggcagggccatgtaaaagtggttcagcttctgattgagcatggtgctgtagttgaccatacatgtaaccaaggtgcaactgcactctgtattgcagcccaggaagggcacattgatgttgttcaggtcttattagagcatggtgctgatccaaaccatgctgatcaatttggacgcactgctatgcgtgttgcagccaaaaatggacattctcagataattaaattattagaaaaatatggtgcatctagtttgaatggctgttccccatctcctgttcacacaatggagcaaaaacctctacagtcattgtcttcaaaagtgcagtcattaacaattaaatcaaatagctctggtagtactggtggaggggatatgcagccttcgttacgtggtttacctaatgggcctactcatgcttttagttctccttcagaatctccagattctacagttgaccggcagaagtcatcactgtcaaataattccctgaaaagctcaaaaaattcatctttgagaactacttcatctacagcaacggctcaaacagtgccaattgatagctttcataacttgtcatttacagaacaaattcagcagcattcattgccacgcagtagaagtcgacagtcaattgtttccccatcttccacaacacagtccttaggacagagtcataattcaccaagtagtgaatttgagtggagtcaagtaaagcccagtttgaagtcaactaaagcaagtaaaggggggaaatcagaaaattctgccaagtctggatcagctgggaaaaaagcgaaacaaagtaattcttcacagccaaaggttttagaatatgaaatgactcagtttgatagaagaggacctatagccaaatccgggactgctgcaccacctaaacaaatgccagcagaatctcaatgcaaaattatgataccttcagctcagcaggaaattggtcgatctcaacagcagtttcttattcaccaacaaagtggggaacagaagaagagaaatggaataatgacaaatccaaattatcatcttcagagcaaccaggtttttcttggtagggtttcagtcccacgaacaatgcaagatagagggcatcaggaagtgttggagggatacccttcctcagagacagaattaagccttaaacaagctctgaagcttcagattgaaggttctgaccctagcttcaactataaaaaggaaacaccattataaaagtttcctattctgtgaaacagaagacattgtgatggagtggttcttcagctactggatggaaacatatgcctgttgatttgctgaaaaaacaaaaaaaatgaagaatgtgatctctgcagtacagttaccttaattactgtaatgtgcctaaatagtaaggctgccttctcaatgtaaccctctgtgcttaaaaaatttcattttgtgtgctttgtattcactacacaggaataagcactttttaaaaatgcagatacatactgcagttccctgataaaagctgaaaagaaaatttgagtattttaagttaagatgtgataaaaaatgtgcatgtgccataatcaaatatatatgaaaaggcagtgttccttgtatttatttttttttctttttgtggcaaaagaaacttaaacatactgtttcagtcacattgcattgtagtgtatggcctgtttcttgtatctttaaagacgttgctcaataaaacaaatcttgcaactgttctatgttcactacaccttcagcattggataaaaatcattttctatataaatatcacattgaaatgaaaaaatgatttcttggcagtttaaaaaaaatattttatagtagtttagggagctgctttaagtagtttaaatctggattttcccagtagaattcttctcatctctggctaaacatgtcagaacaaacaaccaaccagtctgtaggcagaacaaagtcctatttcatccgctgggatacaatttcatcttccattcactttgtcattccacctctaagaagacagactatcattcctgaggcatgaaaattctcagggacaaagccatgcctcagtcacatgtgtgtgcagagagaaatgcacctgtctatctaagggtagatttttgatccctgaataattcattgactaaactgacctcttcctcctggctaaataaattaattttgctggcttctctctcagcggtttctattttgtaaattgctgcatgaccaaaatagccccactcaaaatcaattggattaattttaatggtttggttggatgaatattctggatgaatataaaatgtgctgcccttcacagatgacaccactcccctgtcaatcatagcacatgtgtactttttattgttacttaatagtgatggatttgcacttttctatcctcatactctttcctgttttcttctttgtacaattgcatgcaggagggctggatgccagggttaagagagaaattcatgacaaggaaggtaaaattggttcaaatgagcatgtgtcccacagccttagtctccttactcttaaatcagtggagctgtagcttagatgggtcgtttatatgtctggaaaagttgtcataacagtttagaagccaaggttgtggatttgatcttagaatgggcctgttaatcttatagaacccagaaattctgttcttttcatgtactgttgatgaggaatgaggaaagagaatttggagattcagcacaaaaccattgctacttctagaacaaaatctttagaatatgtcctaataacaaaggtcagtaatgtcatcttcatatatgaaggacacatgtgatacattgttcgtggaaatagaaatgtataattatgataaatgtttcacttgaatcttattgtaaggcttttcttgcttttattttttaaagtcagcaaaactcattttgtctgtcatctataagtcatagtgaggactacgagataagttgataagttcaattgatattaaggtgacatggcaatattaataactcaaatgtgaatgtttcaagtattgaattcttgtccctatgggacatttattaaataaaattaatgggactcttgcaaagtagccttaaaagtgttaatgagtctattaataaatatgaacacatactattattagaaccaactttactcatatctcaaatacagtacatttacattactgtagaggatgaagctctaatttctattacatgtaattttctttagaaagagaaccctgaaagctgccagtttttctattaactttgaattattgaaattgtatttatttaattttattgtttttacaaaattgcaccttgtgtccaaagggcgaagatatgacattgcataagggatttatgtttttcaaagagctaactgttttcatatccatactatatacacttgaagcaattggtaggaagagaacctattggaaaaatacgattttcaaaagtaagtattcctcgggatgtttttatataaattatgttttggaatagaacataaatgactttgagttaggataaggatgataggatgggtgctggagatgccctgccttgcttatttgtttctgtgggggatttaatactataaatgaaaatggcttctgctccattaaaaagtaaaaattgtcctccaaatataaaactccttaatagatatttttgaaattaaaatctttaaattttataaatcagctgttgccactacacaactatgatggcatgtgcttataacatttttataacattccgtctgtgtctattccctaaatatcatgagtttataataaggaaagtgataaaaatacagtaatgaaataaaaatctgaatgtttctaagaaaggttttggaaggaaaaatgacctgaaatcagtgcgtactgcaaagtacagccaataatttttgttctttgttttcacccccaccctcactggaattctcaccaaaaatagtttgatacttaaaaaacagaagtaaatacttttctcaatattgttttggctatgcaaatatttgttttgcttaatgtcctccatttacacttctcagcaaatgtagttgcaaacaaatgctttctttttatttttcccttggtttgaggtatgtaaatagccaaaaatgtacattgaatttcacattgtaaaagttttattttatcccttgtatgatattactcaaaaaatccctgtgtatatgaaagtgcataataaatatatttgctttac

SEQ ID NO: 32280 - DNA, 5944 bp, Homo Sapiens
atggtggaggatggaggagatggtctgcgacagtgccctgcagctatgcagggagtgactgctgttccttgttgctgggcagtccctgtggatgaacgggatctttgcccttcgcgtgagaaggacgcagtgcccaaacagcttgctctggcggaattagtggtctctgactcgtggctggcctgggtgcctgcctcctctagagcagcgctcccgctgcccggcggctcagacacggcccgagcgccgccgcggacgcggacagagacccgcacgggcacgggcgctgcgctggaggctcccctcgcggtccggggctgcgcgaccatggcggacaaggaggccggcggcagcgacgggccccgagaaacggctcccacatctgcatattcatctccagcccggagtcttggggacacaggaataacgcctctgtccccctcccatattgtgaacgacactgactccaacgtctcagaacagcagtcatttctcgtggtggtggccgtcgactttgggaccacatccagtggctatgcctacagcttcaccaaggagccggaatgcatccatgtgatgaggcgatgggagggaggtgaccctggtgtgtccaatcagaagactccaaccaccatcttgctgactcccgagaggaagttccacagcttcgggtatgccgccagggacttttaccatgacctggatcccaatgaggccaagcagtggctgtacctggagaagttcaagatgaagctgcacaccactggggacctcaccatggatacagacctgacggcagcaaatggcaagaaagtcaaagcccttgaaatctttgcttatgccctgcagtactttaaggagcaggcgctgaaggagctgagtgaccaggcgggttcggagttcgagaactctgatgtcagatgggtcatcacggtgcctgccatctggaagcagccggccaagcagttcatgagacaagctgcctaccaggcaggcctggcctcccccgagaactcggagcagctcatcattgccttggagcctgaggcagcctctatctactgccgaaagctgcggctacaccagatgattgagctgagcagcaaggcagccgtcaatgggtacagcggcagtgacacagtaggagctgggtttacacaggctaaggaacacatacggcgtaatcggcagagtcggacctttttggtggagaatgtcataggagaaatctggtccgagctggaggaaggtgataagtatgtggttgtggacagtggcggtggcaccgtagacctgacagtccatcagatccggttaccggagggacaccttaaggaactgtataaagcaacaggcggaccctatggatctttaggagtagattatgagttcgaaaaacttctgtataaaatatttggagaggattttattgaacaattcaaaatcaaacgccctgcagcctgggttgacttaatgattgcgtttgagtctcgcaaaagggcggctgccccagacagaactaacccgctgaacatcaccctgcccttctccttcattgactactacaagaagttccgcgggcacagtgtggagcacgccttgcggaaaagcaatgtggattttgtgaagtggtcctcgcaggggatgctgcggatgagtccagatgccatgaacgccctttttaagccgaccatcgatagcatcattgagcatctccgggacctgtttcagaagcccgaggtgtccaccgtcaagttcctctttctggtgggcggctttgccgaggcgcccctgctgcagcaggcggtgcaggctgcttttggggaccagtgccggatcatcatcccccaggacgtgggcctcaccatcctcaagggtgccgtcctctttggcctggaccccgcggtcatcaaggtgcgccggtcgccgctcacctacggggtaggcgtgctgaaccgctacgtggagggcaagcacccgcctgagaagctgctggtgaaggatggcactcggtggtgcaccgacgtctttgacaagttcatctctgccgaccagtctgtggctctgggtgagctggtcaagcgtagctacaccccggccaagccctcccagctggtcattgtcatcaacatctacagctctgagcacgacaacgtcagcttcatcactgatcccggggtgaagaagtgtggcacgctccgcctggatctcacagggaccagtggcactgcggtgcccgcccggagggagatccagacccttatgcagttcggggacaccgagatcaaagccacagccattgatatagccacttcgaagagtgtcaaagttgggatcgacttcttaaattactaaccctcccgccccgctgcctgtccccttggactcaacttatctgcatctgctgacctcaaccttgactgttctttccctaaccttgaccctcaccattgcccatgtgaatttcagcagggaagatgagaacaatcagggctagaaataattagtgacttttgagggcacactggagtcagaaaaacagaaattaagattaaggtttaggcatagaaaattaaaggatcctggaggagcagctagttttcataggtacaaaagtggtgaaatggccacggagaagggaatcagtacatttctgcagcagtggttgcgctgctttgaacagatctccgttatgtagaatttaggatgccctattgctgtctttctagatttaaaatgagatctttgaaccaggaggagatcttcatctgagacttgtctttctaaattttttggatggccatcaatataaaatgccacccatctgcagttaatttcttttcctcatcatgtgattaaaagtggtgattcagtgggaactgggaatgtttttagctggtggtagaaggctgcctacactgggcactgttttagattctcatatcatttaaacagcaaggaggttcagggaagaataaccgtagccttgggtaatccactagggcttttgtgagtaggagagctgatacctcacattcttagcaggtgaaaacttgccatgatggaaacagatagtgaagagttactgacgtatcccaaattatatgctgtgacataaattcccagcatgcccagccctgatttctgagttcataagtaattctagtgaaccttagtaggaattctgggtaagaaaatgaggttgccattggtcttgtttgcatcaccaagaccagacatccagaagagcccctcaccttgaaaagcagacagattttaaattaaccccctccttcccactcaccttcatctccctaagagttttggccatttaattccacattttgaaaggaatacattggtgaaatttgggaagagaatctgtgctatgcaatgtttcattaaaatcttcagtttttcaagtctctctaaaaataatttgtagatctatacttgatgtattaagtcagttttttttcacagcgggcctgtggctcgcctgcatcagaattgcctgggtgcgtgttcagaacaggttcctggatctgagccctttttaactgaggccgactcttggagaggggcaccagaatctgcatttgtagtgtataccacatcgtggttcaactgaaattggagaaatactaacctgagattttgttgaagttcacacacagatcacagcccgccctctgcaggtgtcccctttgggctcctttaggaagagggcttccatgagaaggtgaccccataccttgccctcttggtcaatgggattggggctccacctggcttggagatggcccttttaaccctcacaggaagggccaggggaggaaaaaaattgcaagaaagcgacaccaagaacggagctgactgaggaaccaactggagggtcttcactctctccttccccagtgtacaaaaccagttttctgcaacattcaggagccaaatgaggaaaaagaatcaagaatctgactcacagcccatctgatctgttcaaagctgtcttttccacctgctgaaattcattaaatcactggaggcatgcataatgaatggagaatgagtgaacttccaatgcaacttggattcacaaacccattatcatagccaatatgcagattttaaacagcatttcacatttcatttgaccatgtcttctttttcgcatcgcctgctgcagaattccctactagaatgtgaaacaacgaacaaaccacagaacttagagtgtgctggttagtcacataacttagtagcaggattgtgtatccaggcacaaaggtgtctttgctaatgttctcttgctacctgccctgcttcaaacgctaaatggtatgggtctttctttgttgccagccatattctacaaataagacttttcaatatagttatgagtaatataattttatgtacatataatgttagaatattgtacagaatcttggtttctacgatgcgcttttcttgtttcaaaaagaggaaaatgcttgatttttgttgatgatacttttgttactgtccttaattttccatagtttggtttcttaattgtgctcactaagcatcgatctgtgctgatgccaagctatggactatgtacgcaagaccgagcaatagacagaggtgcctagggtccaaacacactgaacgcacgtggaccgcctggatcaggagcctcatcagacccttctccatgcacatccttcccaaacagtcacagattccattgaaaggagcagattctatcagttcttctgtgcagactttaagagctgaacgttctggttctggaagccatgtgactgcgcagaacaacctaagaaaccctttgtgtcctgaggggtcgttgacctctccttccgggtcggagcagtcactctgagggcaaagcgtggtccactgtgtgtgatgttttcaggatgctagggtcaaagaaagaaaccaagtggtacataagcccagcttttctgctgggctaagtgtaagtgtgagtaacatggtcaagcccctcttttttgggctaatgtaaagcctttcctgccttgcattaatgctatctccctgtgtactgtttctcttaaatgagcagatagaaatctgcagtgttggcagataggtgatggagaggatgataattttatcttctggccacagagctgcagccccagttgtcagagtccttaaatgaaacccccaaatccatccctccttccctacccccactggaatattctagaataagagcactggataagtacacttgaacacatttttctaaccttagaaaatacctacaaggcctgttgtcttgacccattactcaattgtccctggcatattatctgatcttcacgtttcttggaagcagaatcatcaaggctttcctttgtaactgccctttccgtacacagcaggcatgaataaatgctgagtaacagacaagttacagacaggaggggaaagaggaggaaccatacaactgtttttgcaaaatgatggctgagtccagattatagaggttgccttacccttagaatgttatttagaccaagtttagcttttagagtccaggtctggttaattgccagggtagcaaagaatcgcatgcaccaatgtaaacaggagtcagaatgcattattagtcaaagatcgaatttcacattgtagagatgtatagctgtgattaagctgcatatgtatgctgggaaacggcttgagtggatggctaatataaaagttgttggccataatgccacacctctcatctgcttgaaatatggaccagtattctaaaatatcagctactggggtctcattcactacaagataaattcaaacttcacagaactttgcagcagttcaccaccagacgggactgtgtctgcaaactctcttgtcttcacagacgcctaataaagcaaaactctgaatctca

SEQ ID NO: 32281 - DNA, 4282 bp, Homo Sapiens
cggtgtcgccgccgcggcgctgtcatggagctagcgcaggaagcgcgggaactgggttgctgggcggtcgaagagatgggggtgcccgtggcggcccgggccccggaatcgacgctgcgcaggctgtgtctgggccagggggctgacatctgggcctacatcttgcagcatgtgcacagtcagaggactgtcaagaagatccggggaaacctactctggtatggccaccaggacagtccacaggtccgtcggaagttagagctggaagctgctgtgacccgcctgcgggcagaaatccaggaactcgaccagagcctggagctgatggagcgagacactgaggctcaggacacggccatggagcaggcacgtcagcacactcaagacacccagcgtcgagctctcctcctccgggcccaagctggggccatgcgaagacagcagcatacgctccgagatcccatgcagcggctgcagaatcaactgaggcgcctgcaggacatggagaggaaagccaaagtagatgtgacctttggatccctcacgtcggcagctctgggcctggagcccgtggtcctgcgtgatgtccgaacagcctgcaccctccgggcccagttcctgcagaacctcctgcttccccaggccaagaggggcagcctcccaacccctcatgatgaccactttggcacttcgtaccagcagtggctgagctcagtggagacgctgctgacaaaccaccccccaggccacgtcctggctgccttggagcacctggctgcagagcgggaggcagagattcggtccctgtgcagtggggatgggcttggcgacacagagatatccagaccccaggccccggaccagtcagactccagccagaccctgccgtccatggttcatctcatccaggagggctggcggactgtgggtgtgctggtctcccagcggagcaccctcctgaaggagcggcaagtcttgacccagcgcctccagggcctggtggaggaggtggagagacgcgtcctgggatccagtgagaggcaggtgctgatactggggcttcggcgctgttgcctgtggacggagctcaaggccctgcacgatcagagccaggagctgcaggatgcagctgggcatcggcagctcctgctgagggagctacaggccaaacagcagcggatcctgcactggcgccagctggtggaggagacccaggaacaggtccgcctgctcatcaagggaaactcggccagcaagacccgcctgtgccggagcccgggggaggtgctagctctggtccagcgaaaggtggtccctacatttgaggcagtggcaccacagagccgggagctgctgcgctgtctggaggaggaagtccggcatttgccccacattctgttgggcacgctgctgcggcacaggccgggagagttgaagcccctgcccacggtcctcccatccatccaccagctgcaccccgcgtccccaaggggctccagcttcatagcgctgagccacaagctggggctgcctccagggaaggcctcggagctgctcctgccggcggctgcctctcttcgccaggaccttctgctcctgcaggaccagcggagcctctggtgctgggatctactccacatgaagaccagcctgccgccaggccttcccacccaggagctgctgcagatccaggcatcccaggaaaaacagcagaaagagaacctggggcaggctctgaagaggctggagaagctactgaaacaggcactggagcgaatccctgagctgcaggggatcgtgggggactggtgggagcagccaggccaggccgccctctctgaggagctctgccagggcctgtccctgccccagtggcggctgcgctgggttcaggcccagggggccctgcagaagctgtgcagctgaagagagggttcaaacggaagccgagaacttgacactgttcaccccaacacctcacctcccccaggacatttggaagaaagcagcgccaggattcctcggcagtcgtccccacccgcacctgcagtcccctcatgtgctgttctgctgccccactcagctcctggaccctgtcctttcatcccgctaaagcaccccctaaaaccccttcatcactttcattctcagcaaaaagtaattgagcacctcctctaggcgctggggagtccacactgaacaaaagaaacagaaaaccctgtcttccagcagttgagttctagggcagggagacagagtttacaagataaggaaaatatatatgtagtatgctgcaagttaactgctgtgtgggaaatccagcagggggtgggatgtgtgatttgaattgagggccacactgcccaggtcgtgctccgtcaaggggtgagcaggagcaacaggggtggctgagtaagggcttgcagctggaggcaacagcacatgcaaaggccctgagccaggatgtgctgcaataagggccactgagggggacagtgtaggttgggggtgaggaatgtattaaaagatgagattgccttctagtttgtatagtttctttttttacatgtaaatcagccatttggaatttatcctagcacatggatccaattttgtcttattttacatatatcctagtagcacttactgaaattcccagtcagagtggcagttgcctctgagggaaggtgggtggcagggatcaactgaggaggagacacagaaatgtcctagctgatgggaatgtgctgtgtcaagagcagcggcggtgacgcaggtgtagagatttgtcagagctcatgtagttgtagtcttaaggcctgtgcatttcactgcgtgggttactcaatttataaagcaaagcccttacacttttgagatgccacctttttatgcactaaatttccatgtttaattgggttatatctggcttctctccagacctgctttgtatttaactctccatgtgtcattcctacagtagcttaatagaaaggcttgtgacacattgtcatatctgttcttgttttcttttgttttttttttttttttttttgagatgcagtctcattctgttgcccaagttggagtgcagtggcatgatctcagctcactgcaacctccgcctcccaggttcaagccattctcatgcctcagcttccccagtagctaggattacaggtacgcaccaccacgcccagctcatttttgtacttttagtagggacggggtttcatcatgttggccagactggtctcgaactcctgacctcaagtgatctgcctgcctcggcctcccaaagtgctgggattacaggcatgagccaccgcgcctgaccacattgccatatctgaaatggctggattctcttaggtgcttttctttttctttctttctttctttttttgagacagaatctggctgtttcccaggctgaagtgcagtggcatgaactcagctcactgcaacctctgcctcctggattcaaacaattctcatgtctcagcctcctgaatagctgggattacaggcacccaccaccatatctggctaatatttgtattttttgtagagtcggagctttaccatgttggtcaggctgctctccaactcctggcctcaagtgattctatcgcctctgcctcccaaatcttcacctgctgggattagtttcccctgtctcagtaaattttttttcccaaactaagtgaacattagatttaatttggctggccccagaagaaaaacatgcacagatggtagttttactggtgttgcagtaagttttcaaatttggaagtttggcagctttatgatcttgaaccttgctgtccatctctcacacaactcctctcttggcctccagagtccctttactctcccagctttcctcctgcccctggctgctgtttcccagcctttccacattggctttcccatgtagtccttagtgtgtctgctcctcctctctctcctcatcacagttcccagcccccaccttcaactgaactcaacaaaatcttcaacttcatacagtagtcacattgttagtaataacactggcatttttattttgataaaatagaccgtttaaatttttgagattctaccttatattttttgaattatatactaaagcaaataagtagtgatgtaatgtcattggggaccaagatttttagtgtaaatgaaaaaagataacaaatataaactcaagtaaacaccctgtagtctttcacatgaattggaaatatcagaataaagtcatgatttttctctttct

SEQ ID NO: 32282 - DNA, 8353 bp, Homo Sapiens
atggagactgggggccgggcccgcactggtaccccgcagccagcggccccgggggtgtggagggctcggccggcgggcggcggcggcgggggcgcctcctcctggctgctggacgggaacagctggctgctgtgctatggcttcctctacctggcgctctacgcgcaggtgtcccagtccaagccgtgcgagaggaccggctcctgcttctcgggccgctgtgtcaactccacctgcctctgcgacccgggctgggtgggggaccagtgccagcactgccagggcaggttcaagttaacagaaccttctggatatttaacagatggcccaattaactataaatataaaactaaatgtacttggctcattgaaggctatccaaatgcagtgttaagattaagattcaatcattttgctacagaatgtagctgggatcatatgtatgtttatgatggagattcaatatatgcacctttaatagctgtacttagtggtttgatagtccctgaaataaggggcaatgaaactgtgcctgaagttgttactacatctggctatgcactgttacatttttttagtgatgctgcgtataatctaactggtttcaacattttctattcaatcaattcttgtcctaacaattgctctggtcatgggaagtgtacaactagtgtctctgttccaagtcaagtatattgtgaatgtgataaatactggaagggtgaagcttgtgatattccttactgtaaagccaattgcggcagtccagatcacggttactgtgacctgactggagaaaaattatgtgtctgcaatgatagttggcaaggtcctgattgttctttgaatgttccctctactgagtcttactggattctgccaaacgttaaacccttcagtccttctgtaggtcgggcttcacataaagcagttttacacgggaaatttatgtgggtgattggtggatatacttttaactacagttcttttcaaatggtcctaaattacaatttagaaagcagtatatggaatgtaggaactccatcaaggggacctctccagagatatggacactctcttgctttatatcaggaaaacatctttatgtatggaggcagaattgaaacaaatgatggcaatgtcacagatgaattatgggtttttaacatacatagtcagtcatggagtacaaaaactcctactgttcttggacatggtcagcagtatgctgtggagggacattcagcacatattatggagttggatagtagagatgttgtcatgatcataatatttggatattctgcaatatatggttatacaagcagcatacaggaataccatatctcatcaaacacttggcttgttccagaaactaaaggagctattgtacaaggtggatatggccatactagtgtgtatgatgaaataacaaagtccatttatgttcatggagggtataaagcattgccagggaacaaatatggattggttgatgatctttataaatatgaagttaacactaagacttggactattttgaaagaaagtgggtttgccagataccttcattcagctgttcttatcaatggagctatgcttatttttggaggaaatacccataatgacacttccttgagtaacggtgcaaaatgtttttctgccgatttcctggcatatgacatagcttgtgatgaatggaaaatactaccaaaaccaaatcttcatagagatgtcaacagatttggacactctgcagtagtcattaacgggtccatgtatatatttgggggattttctagtgtactccttaatgatatccttgtatacaagcctccaaattgcaaggctttcagagatgaagaactttgtaaaaatgctggtccagggataaaatgtgtttggaataaaaatcactgtgaatcttgggaatctgggaatactaataatattcttagagcaaagtgccctcctaaaacagctgcttctgatgacagatgttacagatatgcagattgtgccagctgtactgccaatacaaatgggtgccaatggtgtgatgacaagaaatgcatttcggcaaatagtaactgcagtatgtctgtcaagaactacaccaaatgtcatgtgagaaatgagcagatttgtaacaaacttaccagctgtaaaagctgttcactaaacttgaattgccagtgggatcagagacagcaagaatgccaggctttaccagctcatctttgtggagaaggatggagtcatattggggatgcttgtcttagagtcaattccagtagagaaaactatgacaatgcaaaactttattgctataatcttagtggaaatcttgcttcattaacaacctcaaaagaagtagaatttgttctggatgaaatacagaagtatacacaacagaaagtatcaccttgggtaggcttgcgcaagatcaatatatcctattggggatgggaagacatgtctccttttacaaacacaacactacagtggcttcctggcgaacccaatgattctgggttttgtgcatatctggaaagggctgcagtggcaggcttaaaagctaatccttgtacatctatggcaaatggccttgtctgtgaaaaacctgttgttagtccaaatcaaaatgcgaggccgtgcaaaaagccatgctctctgaggacatcatgttccaactgtacaagcaatggcatggagtgtatgtggtgcagcagtacgaaacgatgtgttgactctaatgcctatatcatctcttttccatatggacaatgtctagagtggcaaactgccacctgctcccctcaaaattgttctggattgagaacctgtggacagtgtttggaacagcctggatgtggctggtgcaatgatcctagtaatacaggaagaggacattgcattgaaggttcttcacggggaccaatgaagcttattggaatgcaccacagtgagatggttcttgacaccaatctttgccccaaagaaaagaactatgagtggtcctttatccagtgtccagcttgccagtgtaatggacatagcacttgcatcaataataatgtgtgcgaacagtgtaaaaatctcaccacaggaaagcagtgtcaagattgtatgccaggttattatggagatccaaccaatggtggacagtgcacagcttgtacatgcagtggccatgcaaatatctgtcatctgcacacaggaaaatgtttctgcacaactaaaggaataaaaggtgaccaatgccaattatgtgactctgaaaatcgctatgttggtaatccacttagaggaacatgttattacagccttttgattgattatcaatttaccttcagcttattacaggaagatgatcgccaccatactgccataaactttatagcaaacccagaacagtcgaacaaaaatctggatatatcaattaatgcatcaaacaactttaatctcaacattacgtggtctgtcggttcaacagctggaacaatatctggggaagagacttctatagtttccaagaataatataaaggaatacagagatagtttttcctatgaaaaatttaactttagaagcaatcctaacattacattctatgtgtacgtcagcaacttttcctggcctattaaaatacagattgcattctcacaacacaatacaatcatggaccttgtgcagttttttgtcaccttcttcagttgtttcctatccttattgctggtggctgctgtggtatggaagatcaaacaaacttgttgggcttctcgacggagagagcaactgcttcgagaacgacagcagatggccagccgtccctttgcttctgttgatgtagctctggaagtgggagctgaacaaacagagtttctgcgagggccattagagggggcacccaagccaattgccattgaaccatgtgctgggaacagagctgctgttctgactgtgtttctttgtctaccacgaggatcatcaggtgcccctccccctgggcagtcaggccttgcaattgccagtgccctaatagatatttcacaacagaaagcttcagatagtaaagataagacttctggagtccggaatcgaaaacacctttcaacacgtcaaggaacttgtgtctgagaaatggaaaccgctcctgtatattctgtactgttttacttcgggcttctgttaaagctgttctatggccttggattttatggaggcagatctctgtatcatccagagcctgagtacagtttccttccaaatggacaatgacccaggtggccaaagaatgttcatgagttttataaaagtattgatggtcacaggtgataaagtcagtttttaccactatcttaggcttattatagctaacattaaattactctggaaaaagatgtatattgtttcttaatgaagatgaaaaatatgtaattcatataaatcaactgtttatatcccaagacttgaaagaaagacattttttaatgcctgaatgatgagaattgtacagtttttgcctcataagcaaacttgaatcacctgtgtatgaacagggaatgaacacattgcaatggctttaaatgctcttttatctcgttgtaaaggtaaggcaagattttgatgtagtaggatgtaggtaatgtatttaaatatttcatatgaccatatcgtgtccaaactcagtctgagaatgtgacagctttccgcctaactagaatgcagaccagaatgagttcaactcattctgtgcaacttcacagggggtttattagaatgctcagtgtagaggacattcctgtcatccatgccaactacctaactcgttatcagagctgatagagcatggaaaagtctgtccagcgatcagttgttcccctccttccaaaaacagcctccaataccacaacctgaaaagagccgaaatggttattttacagcatacaagcttctgctccagtatgataatttttaattgcctaagaatcattggatcagacctaaatgatccatctgcatttttataagaatggatctttctttgcccttcctctcctagctgctagattttaactaccttttacaaatgttacaaaatgtattttagaggcgacatctctcaagatgacctgagttccttcctgccaactgttccacctagaatacaagtagagaagagcactggctggcaagcatcaacaggagtcttcttcccaacacgagcgcatccatgtcctgagaaaaagtctgtggtttagaaaatatgtccatggttgcccacagtcagcacactcttagtgactcaaaattctgaattatggcagaaaggaaaaataaaacatacttcacattagaacacagaatcatttacatcctaatactgaccacagttcactaaagctcagtagcattaacagatatagtttggaattgcagtttcctcacttcagggtgacaagatatgtataacagtgacagaaatctccaaagctgctgtatatgatatagctttgttaaatatgaaggtcctttaaatacaattgatgtttagtactatatatgtacttttcacattctttggatttctggaaggttatgacactttactgtttacagctaatgcatagttacttgcatgccatggttgtacagtagcagactatgaccctattgtgatattaagtgtttatttcataatgccatttatacatagctgaatttgatgaggattgaatgtcatatataagaggaatgatcatacaatatgtagttgcatcttatataagatttctaggttgcatctaaccatgactatgtcattattttgataattaggcatttatgaattatagtatatattcctcatgttggcatgataattttgctattttccatgcattaaaaataagacaaattcttagagtaattttagtaattttatctataatctgtggggtttttttggagggggaggccactggttgtttctacttccctgtgatattttctctctcattaaaggaatgagctaagtttgtaaatatctcctaaaaacaatcaagtaattttattagcttcttttggaccctctaaatattgacttctctcatgaaaaaataaattgatgaaactaatgattacaaagatataatcattttttaaaaagtgattgcccaatgtatttctctaacaattgtcacaagagaaagcataacaataaaaatacaaaaacatacagatttagatgtaaaatctatataagctatatttttagggaggctaagcagatagtattactgtggaagaattatcaagttttattcacctcaaatcccactgggttcttaaaacttgaaaattcaaattgtagagaattatgagacacaatgtgatgtttagttaaagtcatgctatacctttctgggccacatattgctaactctgtggctaattatgcaattaattctcaacgtatcaaagcttttcactggcagtaaattctttgccctcaggtgaagtggattgaaaagacatcaaggatcaaggataatcactttgaatctgttggtttttccccctacattccagacactttaaatttggatgctttcattttttttaaatcaaaccacacaaatatgcagatactttcccagaatttcgcagttaaatggctgatcctcttgaaaactaaccttaatggaattctaaacatttcagtttagaatgactttgaaaaattccttagatttttaggatgttttattctgccaagtatgaaaaaaaaatggttaaatacaatggagttttaaaaattaacctggggattctatttgaactagaaaattcctattggaaaagaatttgcacatacttacagattcagctaataaattttaagaggattaggattctcataattctttaaatgaaaatttgttttagtgatacacagagatgccgtatactatagtgttatgttcagtaggaaaacttcaaatagttcgtatttaaaaaggtaattgatccttgctgtacttcccaacatctcatcttcttttagctgcagtaagatagaggtgactgtatggctacagttcatggtataaggtcatttagggtgcacactggcacacaggctggaaaacgggcactggacccagctttcaggtgtgtggtgctgggtaagtttcacctttgaagcctcagccttccatctgtaaagggcggtaatggtgcccacctttcgaggcattgcgaggctagatggtaacacacagaaagctcccacagtgggaccttgatgcagcgtagctggtattaacaaccgtggggacaccaggccactctttttctaccagttgttttatgaatccacctattaattttcatccatcttttggtcgtaggtaaaggtcaatcaggtttttcaaaaagactccctgaataacttaagttcctgtatttctaagatatagggatttctacaaaacgactttgacatttagtcaataaagacttaaactcttcttaaatctatagttttaggagagtttttcttaaaattactgactgatgacattgagacaagagcatcaatgatcacctttcacgtacaaactaggcaagacagggtcagtgcttacattttgtggttatacatgatacatcttttctcagtgaacataaaactatgatttgaaaggtgtcttatatttaaaaaagattgtaaaatgaaaactgaccaaatgaactaattctacccacctatggtctttttaaatgtcgagtttcaaaacccatttgccgtatactagagtgagcttggaaacttacctgattacaggaattgcttgggttcaggcagattcccactttcacctctagagatttagattcagaaacactggggtaggccctggagagcagtactcttaacaagctcctcagtgcttcttaccattaggcaaattagggaaacactgcattgggtcaaagtgctgcctttaatcgaccattagagggagttctctaaataacaaagttattactctaattcaaaatgctttaaagaattttccaaggaatacaagccatctggttggtgttagttatagcagtgatttcattagagtgtacatttaacattttagttttatcaaaattttttgaaattaagaattagaaccagagctcctatcagtatatatgtacacaggtgtgcatgccagtgttcaaaagattgtgtaaaagttcaagcccgttttagaaagccaacattttatgttataatatgctgttaatcaggactttattaaataaaaacattggctcttccaacccccac

SEQ ID NO: 32283 - DNA, 5806 bp, Homo Sapiens
gcaggccgcggcgggcagagcggggggaaggaacccgagccgggctgccaccgtgtcccaaccggtgccgccgccggagcttctccgggccccgagtcctcgccgaacgccctcctcgccgcccgccgcgtcccggcgccctccggagccgccgagccgcccgcgcacacctgaagcggccgggccaggccctgcctcgatcctcagctcgtcctccccgccccgcaccggccttcactctggagcggccccggcagccgcagcaggggcggcggcggcggatcgaggagctctccaggtcgtcccgggagaggctgctgcagtcccgggacaggatgttctccaagttcacctccatcctgcagcacgccgtggaggcgcttgcaccttctcttcctttacaagaagattttgtttatcactggaaggcaattacccattactacatagagacttcagatgataaagccccagtgaccgatacaaatattccatcgcatctggaacagatgttagatatactggttcaagaagaaaatgaacgggaatctggagagacagggccatgtatggaatatttgcttcatcacaagatcttggaaacattatataccttggggaaagctgattgtcctccgggaatgaaacagcaggttttggttttctatacgaaacttctgggaagaatccggcagccactacttccacacattaacgtgcacaggccagtgcagaaattaattagactctgtggtgaagtcctagcaacaccaacagaaaatgaagagattcagtttctttgcattgtgtgtgcgaagctgaaacaggacccctacctggttaactttttcctagagaataagatgaaatcattggcttccaaaggagtaccaaatgtaatttcagaagatacattaaaaggtcaggattccttgtcaacagatacaggacagtcccgtcaaccagaggaactatctggtgctactggaatggagcaaacagaattggaagatgagcctcctcatcagatggatcacctgtccacaagcttggataacctcagtgtcacctcactgccagaggcctcggttgtttgtccaaatcaggattacaatttagtgaattctttgttaaatcttactagaagtcctgatggcagaatagctgtgaaggcatgtgaaggcttgatgctgttagtaagtttgccagagcctgcggctgcaaagtgccttacacagagcacttgcttgtgtgaactactgacagacagacttgcctccctgtacaaggccctacctcagtcagtggatccgttagatattgaaaccgtggaagcaattaactggggcttggactcatatagtcataaagaagatgcttcagcatttccaggaaaacgagccttaatttcatttctttcctggtttgattattgtgatcagctcattaaggaagcccaaaagactgctgctgttgctcttgccaaagctgttcatgaaagatttttcattggtgttatggaacctcaattaatgcaaacttctgagatgggtattctcacatccactgctctgcttcatcgcatcgttcggcaagtgacctctgatgttttgcttcaagaaatggtgttttttatccttggagaacagagggaaccagaaactctggcagaaatcagcagacatcctttaaggcataggttaattgaacattgtgatcacatatctgatgagataagcataatgacattacgaatgtttgaacatcttttacaaaaacccaatgagcacattctttacaacttggtcttgagaaatcttgaagaaagaaattatacagaatataaacctttgtgcccagaagataaagatgtggtagaaaatggattgatagcaggagcagtagatctggaagaagatccattatttactgacatttcaccagaaaacactttgccaaaccaagagtggcttagttcttcacctcctgctactccagaccaccccaaaaatgatggaaaaactgaagttcataaaattgtaaatagttttctctgtctggtaccggatgacgcaaaatcctcctaccatgttgagggcacaggatatgacacttacctccgagacgctcataggcagttccgagactactgtgctatctgcttaagatgggagtggcctgggtctccaaaagcattggaaaagtgcaatttagaagctgctttctttgaaggtcattttttgaaagtgctgttcgacagaatgggaagaattcttgatcagccatatgatgtaaacttacaagtaacctcagtgttatctagactttctctcttccctcatccacacatccacgagtaccttttggatccttacgtgaacctcgctcctggctgtagatctctcttctctgtaattgtcagggttgttggagaccttatgcttcgaatccagcgtattcaagactttactcccaagcttctgttagtcagaaagcggttacttggtttggaacctgaaggccctattattgaccacatcacactgctagagggtgtgattgtgttagaagagttctgtaaggagctggcggcaatcgcatttgtaaaatatcatgcttcctccacaccataaataacatctttcatgtaactgggggaacagaactactgtgtacatttcaccaaaaaagactcagttccacccagccacaagaggataaaaagcctttttaaacgcagtattgctgtaaactggacagaaccattaagaacctattgagtggacattcttggtgaaatgttgtataatgttgttttcattggctttatcataatggttctatatatacaattgcacattgttgaatccaggatacaatcaaaggaacttcaggaaataagcatttctaatgactgtgaaaagctgcaatatttccaatgtcatgactttgatgatatttctgttatattaatgtccttttaggtagcaaggcattttgacattctctgggactcaaatgcttgtattcttttggattaataagtagcaaaaaaaaatcactaattttataactttttaaggtcagaattcttatcaaacaaaatatgaaaactgtaaatgagaaaaaaatacaattcagaaaccattgaatgaattaattataggcgataaaaatgtgtagagcaccattaactttcttcagcttttttaagaataacaatttaatatgataaattcttgattaatataatatatctatatttttaaagaaatgttcttttactcttttgtgcacatagccatgttagtgattttcttcatgtgtgggtcccagtttatttaaactgtgtcgttttcgcagcagtgttcaatttgctcaccattggtagtgtttgctaaaattgtatttttttaagctaagtaacatgtactgggttgagaacctttttcccccctctccctctcagaaaattgctttataaaattgctttataatttgattttcttactgaaacgcatggtggtgtctaggtggggaactgactgataacccttggcagcaatcaaagtgccagtggctcctcgatgtttacatttttttctattttgttcagtcttttgttttaaatgattctaaagagattaaagaaaacagagttttaaatgtcctatttacatgttaaaggatttggggaaattgggtatgtatgtgaatgggtgtacatgtaggaacctgtagttcagcaaagctgcgctgggcacagcatgcttgtacttgattgacaaaatcgtgtttgccagtccactttctatttttcctttaagtgatgctgatcactcaaataatgcttttaagctattgtttgtttttatttgacatgttaagccgcagcactttcttcttcatctttccatttactgatatttgggggaacaggctatcaaaggttccggcttgaagggaactgtcactaccccctctaggaagttattttatgtagcatgtttgcatatacgcattgtgtggcatgtgcatagaggcttgttttacacctatctgctcattttgttgtgttagcttttctggtttatttcatagtttgttcttgctatttattaagaacagaatatcaaaagattatgaatagcctcagctctagaatgcttaccactgttaaaacaacaaaaagactaaacctctaatttcatgcaaatctttgttagcttattctaagaaatttattaagtaaaacaaagaaaaaacagaagtgggagatagttattttgtgcgtaattttctttaaatcattttgaatgatgtgaaggcattcagtttgctgtatttttttaatcacttcatacaaggaaaacttcgacatttacatttctagatgtagtaacagtctactttgatatatgagtatttaaactaaggcattaagagatattagatatttcttaatgttttcatagtgctcaataggtgtagtagcaatgatattacctctgaaaccaaatactcttttatccttgattccactatgggaccttataactagtccatgaaaccaagctcagaaaagctttaactcttatatttgtgtatatgtatgctgcttctgaaaatataatttttctaagttgttgtaatgactttaatttgtaatcagctaaggcttaagatttcatttgtttctaagtttctgtttttcatcccttcttttttcttttatatttagttcagacctagagccagtagaagctctcacagtgagttcaatttgttagtgaaacattgtactgcatcaccagtttttcttaccttctgttgacagctgaatatttctgttactcagtacttgcaaaaacagtaactaaaatgcactatgctgagtggaaagcaccgtcataacaattgattgccatagcaagttccaaagtgaatttcagccttgcttcacatttgtatcaataaatatgcacattttttaaaactttctaacaatatagtctttggatttgtttttagttatgagccgcattctttacttgatagaactcagatttgtcttagcctattgccatatagtactcaccttataactatgtaactttctcgtaatgtatctgtttgtgcaatatggaagctgtgagtggattcatagctttttggtttaattgtacattattgtgtgtgtatatatgtatatatgtatatatataaggaccaaaattcttagctcgcttacactgttgctagtgtaaacattgttacacttaattttacagggcacaaattatggaattacttcataaattcatggtaatgttttcataaattattgcattaacatacaattgccatttaattatgaagtccatcagtattgacagaagacgttacagtgaagtgctaaaaccacactatatggtaattatattttgggttatgtagtaaatcaaatatgcatgtcattgtgacactttatgtgttaaaacatggtagataatcacattttctgggccctgtaaaatagtgttactgtaatactctgttttgcctcctgccttgtttacattaaacaggatatttggtaaatttttttgtattgaaagttgtgtaggttactgacagtgttaccagcgtctggaattcttggtccctccgtggagaaactcttcagatggtcattgtgtacctactctctcttcaaaggaagttgtgatcaagttcaactttttgtgctaacaatgcatgcaggactaagagggatgatctaaaaaataaataatgtaatttaaac

SEQ ID NO: 32284 - DNA, 6451 bp, Homo Sapiens
atcctcagaattcctcgggtccctcgatactcggctgaaaattctcatcggactctgagaggagcgctgggctggaggcattttccccagggacagaagcgggctattctctcacttgggccagtaagaaaaatccaaaaaaagttgtcgactctgccagcagggattggctaacgggccgttattttcttgactccaccaaggcggatgaaggggaggctacggctgaggccgggaacagtggcgaatctgcagcctctcagaatttggcagtgcaaggaagggacggggaagagaagcaaagcggcgcgcatcctgtccagcgattcgccccgcccgcccggtgaatctgcgtctgcagaacgcgccactgaaggttccccagcgctggctggcctcctcccctccgccccgccccttttcctcagggactagtcgcagctttcgtcgccgccgattcgtcaaggtcccgggccgcagcatctagatcgtcgtggcgaagccgactctccgggggatgcggccaatctccaagctccctgggccgcaacttccgagcctcccagggcgccggccgaggcgaagccgctaccctcggccccgtgggtcccccggcagcgcctgtggcgaaagtgcgaatgcagaccctgtgcccgctgggcctcgcgcagtgtaaatgagcaaagatggatcaggaaggtgggggagatgggcagaaggccccgagcttccagtggcggaactacaagctcatcgtggatcctgccttggaccctgccctgcgcaggccttctcagaaggtgtaccgctatgatggagtccacttcagtgtcaacgactcaaagtatataccagtcgaagacctccaagacccccgttgccatgtcaggtccaaaaacagagacttttccctcccagtccctaagtttaagctggacgagttctatattggacagattccactgaaggaagtgacttttgcaaggctgaatgacaacgtgcgggagaccttcctgaaggatatgtgccgtaagtacggtgaggtggaagaggtagagatcctccttcacccccgtacgcgcaagcacctgggcctggcccgtgtgctcttcaccagcactcggggcgccaaggaaacggtcaaaaacctccaccttacctccgtcatgggcaacatcatccatgcccagcttgacatcaaaggacaacaacgaatgaaatactatgaactaattgtcaatggctcctacacccctcagactgtgcccactgggggcaaggccctgagtgagaagttccaaggctcgggtgcagccactgagacggccgaatcccgccgccgctcttcctctgacacagctgcctacccagcaggcaccactgcggtgggcactcctggcaacggcaccccctgctcccaggacacaagcttctccagcagccgacaagataccccatcttcctttggccagttcacacctcagtcctcccaaggaaccccctacacgtctcggggcagcaccccctactctcaggactctgcctactccagcagcaccacttcaacctccttcaagccccggcggtcagagaacagctaccaagatgccttttcccgccgccacttctctgcatcttcagcctccacaaccgcctccacggccatcgccgccaccactgcagccactgcctcatcctccgcctcttcctcctcattgtcctcgtcctcctcgtcatcctcttcctcctcgtcctctcagtttcgtagttctgatgcaaactacccagcgtattatgaaagctggaatcgctaccagcgccatacttcctacccaccacgccgggccacacgggaggaaccccctggagccccttttgctgaaaatacagctgagcgcttcccaccttcttacacctcctacctgccccccgagcccagccggcccaccgaccaggactaccggcctcctgcctcagaggctccacccccggagcctccagaacctggtggaggcgggggtggaggagggcccagccctgagagagaagaagttcggacttccccccgcccagcctcccctgcccgctctggctccccagccccggagaccaccaatgagagtgtgcccttcgcccagcacagcagcctggattcccgcatcgagatgctgctgaaggagcagcgctccaagttttccttcttggcctctgacacagaggaggaggaagagaacagcagcatggtccttggggccagagatacagggagtgaggtgccttctgggtcagggcatgggccctgcacaccccctccggccccagctaattttgaggatgtggcacctacagggagcggggagccaggggctacccgggagtctcccaaggcaaatggacagaaccaggcttctccatgctcttctggagacgacatggagatctccgacgacgaccggggtggctcaccccctccggccccgacgccccctcagcagcctccgccacctccccctcccccgccgcctcctcctccctacctggcgtcccttcctcttggttatcctccccaccaacctgcctacctcctcccacccagacctgatgggccgccgccccctgagtaccccccacctcctccaccacccccgcacatctatgactttgtgaactccttggagctcatggaccgacttggggctcagtggggagggatgcccatgtccttccagatgcagacccagatgttaactcggctccatcagctgcggcagggcaagggattgattgccgcctcagctggcccccccggtggggcctttggggaggccttcctcccgtttccacccccgcaggaggcagcctacggcttgccgtatgctctatatgcacaggggcaggagggcagaggggcatactcacgggaggcctaccacctgcccatgccaatggcagccgagcccctgccctcctcctcagtctcgggagaggaggcccggctgccacccagggaagaagcagagctggcagagggcaagaccctcccgacagcaggcaccgtgggccgtgtgctcgccatgctggtccaggagatgaagagcatcatgcagcgagacctcaaccgcaagatggtggagaacgtggccttcggagcctttgaccagtggtgggagagcaaggaggagaaggccaagccattccagaacgcggccaagcagcaagccaaggaggaggataaagagaagacgaagctgaaggagcctggcctgctgtccctcgtggactgggccaagagcgggggcactacgggcatcgaggctttcgcctttgggtcagggctgagaggggccctgcggctgccttcattcaaggtaaagcggaaagagccatcggaaatttccgaggccagtgaggaaaagaggcctcgtccctccactcctgctgaggaagatgaagacgaccctgaacaagagaaggaggctggagagccaggacgtccggggaccaagcccccgaagcgggacgaagagcgaggcaagacccagggcaagcaccgcaagtcctttgctctggacagcgaaggggaggaggcatcccaggagtcctcctcggagaaggatgaggaggatgacgaggaagatgaggaagatgaagatcgagaggaagctgtggataccacaaagaaggagacagaggtgtcggatggcgaggacgaggaaagcgattcgtcttccaaatgttctctgtatgctgactcagatggcgaaaatgacagcacatcagactccgagagcagcagctcttccagctcctcatcctcctcctcctcctcgtcctcatcctcctcgtcctcttcatcctctgagtcctcctctgaagatgaagaggaagaggagcggccagcagcccttccctcagcctccccgccccccagagaagtcccagtgcccacgccagcacctgtggaggtgccagtgccggaaagggttgcaggctccccagtcacacccctgcccgaacaggaggcgtctccagcaaggcctgcaggccccacggaggagtcaccccccagtgcgcctctgcgtcccccagaaccacctgctgggcccccggcccctgccccacgccccgatgagcgtccctcttctcccatccccctcctgcccccacccaagaaacgccggaaaactgtctccttctctgccatcgaggtggtgccagccccggagccccctccagccacaccgccgcaggccaagtttcccggcccagcctcccgcaaggctccccggggcgtggagcggaccatccgcaacctgcccctggaccacgcatctctggtcaagagttggcccgaggaggtgtcccgaggaggccggagccgggctggaggccgaggccgcctcaccgaggaagaggaggctgagccagggacagaggtggacctggcggtcctggccgacctggccctgacccctgcccggcgcgggctgcctgccctgcctgctgttgaagactcagaggccacagagacatcggacgaggccgagcgccctaggcccctgctcagccacatcctcctggagcacaactatgccctggccgtcaagcccacgccccctgcgccagccctgcggcccccggagccagtgcccgcacccgccgccctcttcagttccccagctgatgaggtcctggaggcccccgaggtggtggtggctgaggcggaggagcccaagccgcagcaactgcagcagcagcgggaggagggcgaagaggagggggaggaagagggggaggaagaggaggaggagtcctctgacagcagcagcagcagcgatggggagggcgccctccggaggcgcagcctccgctcccacgcccggcgccgccgccctccgcccccacccccgccgccaccgccccgcgcctacgagccacgcagtgagtttgaacagatgaccatcctgtatgacatttggaactcgggcctggactcagaggacatgagttacctgcggcttacgtacgagcggctgctgcagcagacaagcggggctgactggctcaacgacactcactgggtccatcacacaatcaccaacctgaccaccccaaaacgcaagcggcggccccaggatgggccccgggagcaccagacaggctcagcccgcagcgaaggctactaccccatcagcaagaaggagaaggacaagtacctggacgtgtgcccagtctcggcccggcagctggagggcgtggacactcaggggacgaaccgcgtgctgtccgagcgccggtccgagcagcggcggctgctgagcgccatcggtacctccgccatcatggacagtgacctgctgaaactcaaccagctcaagttccggaagaagaagctccgatttggccggagccggatccacgagtggggtctgtttgccatggaacccattgctgctgacgagatggtcatcgaatacgtgggtcagaacatccgtcagatggtggccgacatgcgggagaagcgctacgtgcaggagggcattggcagcagctacctgttccgggtggaccacgacaccatcatcgatgccaccaagtgtggcaacctggccagattcatcaaccactgctgcacgcctaactgctacgccaaggtcatcaccatcgagtcccagaagaagatcgtgatctactccaagcagcccattggcgtggacgaggagatcacctacgactacaagttcccactggaagacaacaagatcccgtgtctgtgtggcacagagagctgccggggctccctaaactgaggtggggcaggatgggtgcccacacccctatttattccccctggtgccctgagctcccagcacccccccagccttagtgggctcagcagggcccacatgcccccatctccaagcgtggggttgggggccccaagcccagcgagggagcctcagtccctggaggcagcttctgcctctcctgtcacccctgcccaccaccccctgattgtttttctttgcggagaagaagctgtaaatgttttgtagcagccagcagctgtttcctgtggaaacctggggtgccggcctgtacagattctgtcctggggggctacacagtcctcttgctttgtgttaatggggacttccccttacgccctgcgtgtacccctccccagtttaggggtctctggggcagtggccatgttctccccctgggggggctctgcacccccagtcctggggactccgtgcctggaaccctgcctcatctgttcctgccagaccctgagggtcacccttccaccctggtgtcactccccggctcagccaggccaggatggcggggtgggtcccttttgctgggctggactgtacatatgttaatagcgcaaacccgacgccacatttttataattgtgattaaactttattgtacaaaa

SEQ ID NO: 32285 - DNA, 1345 bp, Homo Sapiens
atcgggggtccggagcctgtcgcggctgctaagcgctcggcgcctggcgctggcgctggccaaggctgtgagtccctgccgcggaccggggcagggcaggcgggggacgaggcggcggtaggagcgggacggtccccagcgggtccgagcggagcgggcgccgggtccccgcgccccctgcccggggatcgggaaggggctgggagagccctgggccggtgcgagggggagccgcggagtgtactcgggggcctggggagctcggtccttagcagtggccaacagtgttgcaaacaggaacccgaggtgttcacttcactgttgaaggaacgagagggcatctgctaaagtttcagattccatttctgctcagtatccagtagtggatcatgaatttgatgcagtggtggtaggcgctggaggggcaggctttgcgagctgcatttggcctttccgaggcagagtttgatacagcatgtgttaccaagctgtttcctaccaggtcacacactgttgcagcgcaggttggaatcaatgctgctctggggaacatggaggaggacaactggaggtggcatttctatgacaccgtgaagggctccgactggctgggggaccaggatgccatccactacgtgacggagcaggcccccactgccatggtcgagctagaaaattatggcatgccgtttagcagaactgaagatgggaagatttatcagcgtgcatttggtggacagagcctcaagtttggaaagggcaggcaggcccatcggtgctgctgtgtggctgatcggaccggccactcaatattgcacacctcatatgggaggtctctgagatatgataccagctgttttgtggagtattttgccttggatctcctgatagagaacagggagtgccgtggtgtcattgcactgtgcatagaggacgggtccatccatcacataagagcaaagaacactgttgttgccacaggagtcaagaaacttttcttttgagctattgacagcttttaacaagttattatactcctatgaacaaaatttggagcatatttgtttctctctgcctgatttctcctgaatttggaaactatttgacatgaggattctcaacctgataaaaatgagctttcctaataactcaagacccatctgcctaggaataaaccatcccagctgtgagagaccagacgaaacctgagaccagagactcgttttcttctaaaatgctttctccaaaagatttttaaacagaaaaagggggaaatgtgaaaggaaaagaaaacttgaggcccccaaaatcactaagctaaaaggaaaagtcaagctgggaatgg

SEQ ID NO: 32286 - DNA, 5173 bp, Homo Sapiens
atggacgcggcggagcgccgagttcggagcgacccggagcgctgcggatacaaaggcgacgggccgagcggggcgcccgcggagcccacccggcagttcgcagcggcggctcacctggtgggcaggagcgtcgctggattttctctgagacaagcccacccgtccagcaaaatagagtccctcagggtgacagttgacttcctgaaggtgcctcttggcctaaagaagccggtgctgaaggaggtggctgtggggccccccaagaggccccagcctgcggccctggagcgctacaaggcgcggcgttcagacgccatggacaccgagtcccagtactcgggctattcctacaagtcgggccactcccgcagctcccgcaagcacagggaccgccgggaccgacaccgctctaagagtcgagatgggggccgaggggacaagtcggtgacaatccaggctcccggggagcccctgctggacaatgagtccacacgaggggatgagcgggatgacaactggggggaaacgacgacagtagtaacgggcacctcagagcacagcatctcccatgatgacctcacacgcatcgccaaggacatggaggacagtgtccctctggactgctcccgtcacctgggtgtggcagcgggggccaccctggcactgctgtctttcctcacgcctctggccttcctgctgctgcccccactgctgtggcgggaggagctggagccttgcgggacggcctgcgagggcctcttcatctctgtcgccttcaagctgctcatcctgctactgggcagctgggctctgttcttccgccggcccaaggcctcgctgccccgcgtctttgtgctgcgtgccctgcttatggtgctggttttcctgctcgtggtctcctactggctcttctatggtgtgcgcatcctggatgctcgggagcgcagctaccagggcgtggtgcagttcgccgtgtcgctggtggacgcccttcttttcgtgcactacctggccgtggtcctgctggagctgcgccagctccagcctcagttcacgctcaaggtcgtgcgctccaccgacggcgccagccgcttctacaacgttggccatctcagcatccagcgcgtggcagtgtggatcctggagaagtattaccatgacttccctgtctacaaccctgccctcctcaacctgcccaagtccgtcctggccaagaaagtgtctggcttcaaggtgtattccctcggagaggaaaacagcaccaacaactccactggccagtctcgggctgtgattgcagcggcagctcggaggcgggacaacagtcacaatgagtactactatgaggaggctgagcatgagcgaagggtgcgcaagaggagggccaggcttgtagtggcggtggaggaggccttcactcacattaagcggctgcaggaagaggagcagaaaaaccccagggaggtgatggacccccgggaggcagcccaagccatctttgcatccatggcccgtgccatgcagaagtaccttcggaccaccaagcagcagccctaccacaccatggagagcatcctgcagcaccttgaattctgcatcacgcatgacatgacgcccaaggccttcttggagcgatacttggcggctggacctaccatccagtaccacaaggaacgctggctggccaaacagtggacattggtgagcgaggagccggtgaccaacggcctcaaggatggcatcgttttcctcttaaaacgccaggacttcagcctggtggtcagcaccaagaaggtcccattcttcaaactctccgaggaatttgtggatcccaagtcacacaagtttgtcatgaggctgcagtctgagacctcagtgtgactgtgcaacagcagggggagtgggaaactctggggggtcctgagggggtgggagggggcttggttctcaggcccagccacattcctgccacccttcttcttcttgctcttttttttttacttgaattaacgcacccccaccttctctcctcgcttcttccttattttaccccatgtgaacctggagagaccatcctgctgtcaacagtacctgggaaggactcccacctcaccaacaacttttgtattactctaggccctgcaggaatcagtgcctctctccctcttctttccctagtcttttcccagattacagtctctcctgaaagggcacagggccctgctgattgtactttcccctcctgagccccgactcacaaatccaagttcttaaaacatttctcttcagtggcccaacagggtttctctggggcacatggacatgactccagagagccacagtgccaaactcctccagggcagcaactggccctcctgtccctcaccccagccacaacaaaccctgggttctagggcagggatactcctgccacacagcccgagttagaaatctccttgctaggagcatttgcttccacatatatttagagcaaagaaggatcccatccttttcccagaaatctccacctaatgtttttggtttgtatggtcacgtgaccataggcaaccacgtggaaaccctctgtgaccacttttccagggacttaggggaaggtacctttcttccaatgtgtcttcctaggcagcccctgaggaggagggctgaatagatccctgaggttttggagagacccccatcactgactcctgctccctaaccctaccctcactttcgtccccgctcttcccagtgaaggatggtatgtagactcctgtacagacatagtggcttgcagaccctgacccagcccctgtggtcttagacaaatgtttttatttttgtcaccagccacccctgtcctgccgccttctctcgactccagagacctgttgcctcatctcttttggggaagagccggcagctcctcctcatcccctgccttaagtccagttctttgcctcaggggtctcgtttccttggccttccagggtccccaccccttttctccctgcctgattctctgagctctgggctccgtctgtattgggttgaggggcaaggattactgccttttgtaggtacttcacccctcaccccattttagcttccatagtctttgcaccaaatccaaattcttgataatttagatctcattttgagcaaaatttgctggccctctaataaatattttcaatataaatctgagcctttgactcagacatttttgccaaggagagtagaattaggaagtacccatatacatccagccaggatccacatggaggacctttctgatggctgcaatgactaggccattcctctgagtaactcacagtgtccttttgtaggcccttcttttccctgaaagactggttggtacttaccttgcagagcacatcctgggataagatccccagtgtctcccctgggaggctccccctctgtgtagcaccagccctgggaatgatggagcctagtgatcggggtttctcctgctgtcctttctgcaaaagttcacttgtttacccaccgcatgctagagaggagctcattggccaatgcttaccttgtccccaaaggggtgggttgtggagctcacttaggcagggcctctggctggggccagggttatgagataggcctgtatgaaatatgtcctgttctgggggtctgtctcttttcttctcttcaaaaactttgtgtcagagagtcccttctgagtcacataaatacctcactatcctggaaaacagggcctggatggtgactggggtcattgcctttgtggacaggatggagtgtggtgtggtctgaggagcaggttggggtgggggagagggaaaggatttgggatcttagttgctgccctaggttaggggctggggagtgtttattttaagatcctgccatgtttttaatcactgtgatttttttttcattcccctttcctaaaaaaaattttttgcctccaactctctaagcactaagggctgtgcctgagaatggtagcattttggtcttttgcttcagaactgtggtatctttgtcttttttcattattattattattattattattattattactattgttttttaaaatgtcaggatgaattgtcagacatatggccatgtgtttgtcctctgcttctcccctgtgggaagttgtctccatgctgtgaactgctgtggggtgtgcagctgactcagtccctctgagcagtttccccactgtgtctgtcccatcatgcgctggatctgctcattctcctgctgtgggggtatgcccacctcttacccccttgacaccatagggctgctgtggctgggcctcaccagcactgtcttttgtgtgactcatggcatcctcgttcatccccaccgtgcctagcaggccttccttttcaccacctcggaacgcttgcctttcctccctccacaacaggacgctgtgcctcagtccttcacctacctcgccactctgccactgtccccattggtcctttctcctaaactggtctttgtgctctctttgttttttcttatttccctcttgtctctcattttttcttcccattcccctcccatttcagcccttaacttttctctttcccatctccactcagtattccaatggcaaaccctgatgatgtaacacctgcgatgagacatcggactctccggaactttctcatctgacacgtctttttcccagggttcgtacttctcctccattggtcccaggctaactcccctgttcctctgtggtgtctgtcagtccgtctgtcttctctttcctctgcccttcccacagggcagtatctgctgatggattcagtcctggtgtgtgattgttgtgatttgttcttccgtgcgcaaaaggaagagggctttttgagtcccttccaagtgagattgtaaatgtagaattttccactgttggatctagattttttttccttttttttgggggggtggggttacagagctgagaccttgtgcatgcatgtagaaaattgtaaaatgtaaattttttttaatatataaaaagcttgtttctacagtttgcagtggatctaaacattacggcaattttaggatttttttcttaaacataggaactaaaactgtacaaattttttttatataaaataaagacatttgacttttg

SEQ ID NO: 32287 - DNA, 2730 bp, Homo Sapiens
atgggtggctgtgctgatagggcagagaggagcccatgctccagctgcggggagtgcctgcccgaggagctggccagtgaagacaggtgcctgccagtgaagacaggtgcccacaagctggacacagggtcggccctgagacaggacagcagctgcggaatgttcccgctggctttctggagcgccagcgtcctgcttggggcggcagggacagcatcatctatggggaaagcaagcccagcctcagggctgtcccgtccaaagacccttgtgagtccactgaggtcaaatcaatggagtcttcagaaaggccttccggagcagtactacagcctcacctggttcctgagccccatccttggcctcatcttcacacctctcattgggtctgcgagtgaccggtgcaccctgagctggggccgccggcggcccttcatcctcgccctctgcgttggcgtcctctttggcgttgcacttttccttaacggctctgccatcggtctggccctcggcgatgtccccaaccggcagcccattggcatcgtgctcacggtgctgggagtggtggtcctggacttcagcgccgatgccaccgaggggcccatccgtgcctatctgctggacgtggtggacagcgaggagcaggacatggccctcaacatccacgccttctctgccggcctcggcggagccatcggctacgtgctgggtgggctggactggacccagaccttcctgggcagctggttccggacccagaaccaggtgctcttcttctttgccgccatcatcttcacggtgtccgtggccctgcacctgttcagcatcgacgaggagcagtacagcccgcagcaggagcgcagcgctgaggagcccggcgccctggatgggggcgagccgcacggcgtccctgccttcccagacgaggtacagtcggagcacgagctggccctggactacccggacgtggacatcatgcgcagcaaaagcgactcggcattgcacgtgccggacaccgcgctggacctggagcccgagctgctgttcctgcacgacatcgagccctccatcttccacgacgcctcctaccccgccaccccccgcagcaccagccaggagctcgccaagaccaagctgccccgcctggccaccttcctcaaggaagccgccaaggaggacgagaccttgctggataatcacttgaatgaagctaaagtcccaaacggaagtggctcccccacaaaagacgccctcggcggctacaccagggtggacacgaagccctcggccacgtcgagctccatgcggcggcggcggcacgcgttccgcaggcaggcctccagcaccttctcctactacggcaagcttgggtcccactgctaccgctaccggcgcgccaacgccgtggtgctgatcaagccgtcgcgcagcatgagcgacctgtacgacatgcagaagcggcagcggcagcaccggcaccggaaccagagcggggccaccacctccagcggggacaccgagagtgaggagggggagggcgagaccacggtgcgcctgctgtggctctccatgctgaagatgcccagggagctgatgcggctgtgcctctgccacctcctcacctggttctctgtcatcgccgaggccgtgttctacaccgacttcatgggccaggtcatcttcgaaggcgaccccaaggccccctcgaactcgaccgcctggcaagcctacaacgccggggtcaagatgggctgctggggcctggtcatttatgccgccactggtgctatttgttcagggccaccccttggggagaagcatcgaaattcccatgtcctcgttttagggaaaaggccgctgtgggctggcaccagaagcagtgtggttctgagacccttttggggcctgtcctgcctgtgcggtcccatgatgctgtcccacgtcaatggtgcctccagacacgctgtccctggccccagcacagagctggatgaaggcctgatgatcagagcagtggaggagcagggcccagcacccctgttacagaagtacttggacaactacgacctgagcgtcagggtgatctacgtgctggggacgctgggcttctctgtcggcacagccgtgatggccatgtttcccaacgtctacgtcgccatggtcaccatcagcaccatgggcatcgtctccatgagcatctcctactgcccgtacgccctgctgggccagtaccatgacatcaagcagtacatccaccacagccccgggaactccaagcgagggtttggcatagattgtgccatcctgtcctgccaagtgtacatctcgcagatcctggtggcctctgcccttgggggcgtggtcgacgccgtggggactgtccgcgtcatccccatggtggcctctgtgggctctttcctgggcttcctgacggccacattcctggtgatctatcccaacgtgtcagaggaggccaaggaggagcagaaaggcctgtcttccccgttggccggcgaaggcagggccggtgggaacagcgaaaagcccaccgtgctgaagctcacgcggaaggagggcctgcagggaccggtggagacagaaagaatgacgtatcttcttttcctcagcgagttggacacattgtgcccagggcagccctgtccttgggcagcgaccgcacaccaaagctgggaggaggctggtccggggggcctgggcagaagacagtga

SEQ ID NO: 32288 - DNA, 6224 bp, Homo Sapiens
ccggcggcgcctgagcccagccgaggatggagaaccggcctgggtccttccagtacgtccctgtgcagctgcaagggggggcaccctggggcttcacccttaaggggggtctggaacactgtgagccgctcacagtgtctaagattgaagatggaggcaaggcagctttgtcccagaagatgaggactggtgatgagctggtgaatatcaatggcactccattatatggctcccgccaagaggccctcattctcatcaaaggctccttccggattctcaagctgattgtcaggaggaggaacgcccctgtcagtaggccgcactcatggcatgtggccaagctgctggagggatgccctgaagcagccaccaccatgcatttcccttctgaagccttcagcttgtcctggcattctggctgcaacacaagtgacgtgtgtgtgcagtggtgtccactctcccggcattgcagcaccgagaaaagcagctccattggcagcatggagagcctggagcaaccaggccaagccacctatgagagccatctgttgcctattgaccagaacatgtaccctaaccagcgtgactcagcctacagctccttctcggccagctcaaatgcttctgactgtgccctttccctcaggccagaggagccagcctctacagactgcatcatgcaaggcccagggccaactaaggcccccagtggccggcctaatgtggctgagacctcaggaggtagtcggcgcaccaatgggggccacctgacccccagctctcagatgtcatcccgtccacaggagggataccagtcagggcccgccaaagcagtcaggggcccaccacaacctccagtgaggcgggacagccttcaggcctccagagcccaactcctcaatggagagcagcgcagggcatctgagcctgtggtccccttgccacagaaggagaaactgagcttagagcctgtgctacccgcaaggaaccctaataggttctgttgcctcagtgggcatgaccaagtgacaagtgagggccatcagaactgtgagttcagtcagcctcctgaatccagccaacagggctctgagcatctactgatgcaggcctcaaccaaagctgttggatccccaaaagcctgtgacagagcttccagcgtggattccaacccactcaatgaggcttctgcagagctagctaaggcttcttttggcagacctccacatctcataggacccacagggcatcgccatagtgcccctgaacagctgctggcatcccacctgcagcatgtgcaccttgataccaggggcagcaaagggatggagctcccacccgtacaggatgggcaccagtggactctgtcccctttgcacagcagccacaaagggaagaaaagtccatgcccccctacaggaggaacccatgaccagtccagcaaagaaagaaagaccagacaagtggatgacaggtctttagttttgggacaccagagccaaagcagtcccccacatggagaggctgatggacacccctcagaaaaaggtttcctggacccaaacagaacaagcagagcagccagtgaattggccaaccagcaaccctctgcctctggctcccttgttcaacaagccacggactgttcttcaaccactaaagcagctagtggcacagaggcaggtgaagaaggggacagcgagcccaaggagtgcagccggatgggtggtaggcgaagtggagggacccggggccgctcgatccaaaaccggcggaagagtgagcgttttgctaccaatctgcgtaatgaaattcagaggaggaaggcccagctccagaaaagcaagggtcccttgtcacagctgtgtgacactaaggagccagtggaagagacccaggagcccccagaaagtcctccactcactgcctctaacacatctcttctatcttcatgtaaaaaacctcccagccccagagacaagctcttcaacaaaagcatgatgctcagagctaggtcttccgagtgcctcagccaagcccctgagagccatgaatctaggacaggcttagagggacgaataagccctggccagaggcctggccagtcctctttgggcctgaacacctggtggaaagcacctgacccatcctcctcagaccctgagaaagcacatgctcactgtggagtccgtggaggtcattggagatggtctccagagcataattcacagccacttgtggcagcagccatggaaggcccttccaacccaggtgacaacaaggaattgaaggcttctactgctcaagctggggaggatgccatcctcttgccttttgcagacagaagaaagttctttgaagagagtagcaaatccttatctacatctcatttgccaggtttaaccactcatagcaacaagacttttacccagagaccaaaacctatagaccaaaacttccagccaatgagctccagctgtagggaattgaggcgccatcccatggaccaatcatatcattccgcagaccaaccatatcatgccacagaccaatcatatcattccatgtcaccccttcagtcagaaactcccacttactcagaatgttttgcaagcaaaggtctagaaaattccatgtgttgtaagccactacactgtggtgattttgattaccacaggacctgctcttactcctgcagtgttcaaggagctctagtccatgatccttgcatttattgttctggggaaatctgccctgccttgctaaagagaaatatgatgccaaattgctacaactgccggtgccaccaccaccaatgcattcggtgttcagtttgctatcataatcctcagcacagtgccctcgaggacagcagcttggcacctggcaacacttggaaacccaggaagctgacagtgcaggaatttcctggggacaaatggaatccaataacaggaaacaggaagaccagccagtcagggagggaaatggctcattccaagactagcttttcatgggcaacccctttccatccttgccttgagaacccagcactggacttgtcaagctaccgagcaatttcttctcttgacctccttggagacttcaaacatgctttgaaaaaatcagaggaaacttcagtttatgaggaggggagctcccttgcctccatgccccacccactgcgcagccgtgccttctcagagagtcacatcagcttggcgccccaaagcacccgggcctgggggcagcataggagggagctctttagcaaaggtgatgagacccagtcggatcttctcggagccaggaagaaggcctttcctcctcctcgccctcctcctcccaactgggagaagtacaggctctttcgtgcagcccagcagcagaagcagcaacagcagcagcagaagcaacaggaggaggaggaggaggaggaagaagaagaagaagaggaagaggaagaggaggaggaggaggcagaggaggaggaagaggagctgccaccccagtatttcagttcagaaacctctggttcctgtgctctcaatcctgaggaggtcctagagcagccacaacccctcagctttggccacctggagggctcgagacagggttcacaaagtgtcccagcagagcaagaatcctttgcactccattccagtgatttcttgcctccaataaggggtcacttgggatctcaacctgagcaggctcagcccccttgctactatggcattggtgggctttggaggacatcgggacaggaagccactgaatccgccaaacaagagtttcagcacttttcgcctccttcaggggccccaggaatccctacctcttactcagcttattacaatatttctgtggccaaggcagagctgctgaacaaactgaaagaccaacctgagatggcagagattggcctaggagaggaggaagttgaccatgaactggctcaaaaaaagatacagcttatcgaaagcatcagcagaaaactttctgtcttgcgggaggcccagcgagggctgctagaggacatcaatgccaattctgcccttggggaggaggtggaggccaacttaaaagccgtctgcaaatccaatgaatttgaaaagtaccacttgtttgttggggacctggacaaagtggtcaacctgttgctgtcactctctggacgactggcccgggtggagaatgctctgaacagcatcgattcagaggccaaccaggagaagttggtactgatagagaagaagcagcagctgacggggcagttggcagatgccaaggagctgaaggagcacgtggaccgccgggagaagttggtgtttggcatggtctcccgctacctgcctcaggaccagctccaagattaccagcactttgtcaagatgaaatctgctctcatcattgaacagcgagagctggaggagaagatcaagctcggggaagagcaactcaaatgtctcagggagagtctactcctggggcccagcaatttctaattctaccagcactctgccacagcatccctgcccagccatgtgggaagtgctttcaatcttctttgttagcagtttctcagcaagtagatagcaattagcagtttgttccagccctctaccctggatgtctctcactaccccttccctagcagtggtcctaaccagctaggagaccctggggaagccacaagcttctacccaagggagctgcagcaaggtgtgatcttagaaccacactctccttcccacagttgccaagggcaagtacttgctgcacagagaaccaaggaagtgccttcattctgctttgtactaggacaccaaagacatcaagtactcatcacccacccatatcatcaacagcctctaaaggctcagagggaatctgccttgcagctctactctgccccagggcttgtggccagccatttctcacagagagctggctgccttgagggcattcacctggcaccagtttcagggcctcacccaagctttgcaggggaaagcacagagggaggaattacactgaaaaaaatgcaagcaaaggttgagtacccccaggtgccccttaggaaggaaccaggtttaaataggctctacccttacctttcccagcagcaagttcaggggaagaggcctactcttagccctggctagtgtgaccctcttcctgtcctaagactttggtcctaccacctcttgtttcatctttcctttacattgctgggggttaccgcaggtgcctaccccagggcttcaccatatgggccattaatagctctactaaaactgacttctagatgtaggtttcattattgggggagggggttcttattgttatattttaaatggccttttgattttatttatttttatgttttgattatttttttcttttttaactaataaggcgagaagagggaagttggagagggaaaagttagcccagaaggaaagcattttctgcagatcagcctgaatccaccgtggctaggcatattcttgctcttctcgtgttgctcacaactacctgcctggatgaatttaggaaagttgcaggatacaaggttaaaacacaagatcaaatgaacaatccgaaaatgttattaagaaaacagttccggccgggcatggtggctcacgcctgaaatcccagcactttgggaggccgaggcaggtggatcacgaggtcaggagatcaagaccatcctggctaacacggtgaaaccctatctctactaaaaatacaaaaaattagccaggtgtggtggcacgcaccagtagtcccagctactcgggaggctgaggcaggagaattgcttgaacctggaaggcagagattgcagtgagctgagaccacaccactgcactccatcctgggcaacagagtgagactttgtctcaaaaagaaagaaagaaagaaagaaagaaagaaagaaagaaaagaaagaaagaaagaaagaaagaaaacagttccatttacaatagcatcaaaaagaaaaaagtacttaggaataatttaacaaaagaagtgcgaaacttttacactgaaaactataaaacattgttgaaagagattagagaagatcaaaataaatggaaagacactccatgttcatggattggaagacttagtattgttaagatgaaatgtgccccaaattgatctacagattcaatccagtgcttatcagaattccagtggcttccttg

SEQ ID NO: 32289 - DNA, 5033 bp, Homo Sapiens
ctccgacttcggacatggcgcacgctggcggtggcagcggtggcagcggtgccggcggccccgcgggccgggggctgagcggcgcccgctggggtcgctcgggctccgcaggccacgagaagctgccggtgcacgtagaagacgccctcacctatctggaccaggtgaagatccgctttggcagcgaccctgccacctacaacggcttcctggagatcatgaaggagttcaaaagccagagcatcgatactcctggagtcatcagacgtgtctcgcagctcttccacgagcaccctgacctcattgttggattcaacgcttttcttcccctcggatatagaatagacattcccaagaatggcaagttaaacatacagtcgcctctgacaagccaggagaattcgcacaaccacggggacggtgcagaggacttcaagcagcaggtgccgtataaagaggacaaaccccaggtgcccctggagtccgattccgtggaattcaacaacgccatcagctatgtgaataagattaaaacccgcttcctagaccacccagaaatctacaggtcattcctggagatcctgcacacgtaccagaaggagcagctgaacacgaggggccggccattccgaggcatgtctgaagaggaggtgttcaccgaggtggccaacctcttccggggccaggaggacctgctctcagagtttggacagttcctgcccgaagccaagcggtctctgttcacaggaaacgggccgtgcgagatgcacagcgtgcagaagaacgagcacgacaagaccccggagcacagcaggaagcgctcccggccctcgctcctccgccccgtgtctgcacccgccaagaaaaaaatgaaacttcgtggtaccaaagacctgtccatcgctgcagtggggaagtacgggactctgcaggaattttctttctttgacaaggtccgccgggtgctgaagagccaggaggtgtatgaaaacttcctccgctgcatcgcactcttcaaccaggagctggtgtctggctctgagctcctgcagctcgtcagcccatttctggggaaatttccagaactctttgcacagttcaagtccttcctgggggtaaaagagctgtccttcgcgccacccatgagcgacagatccggggacgggataagccgggaaattgattatgcatcctgcaagcgcataggatccagctaccgggcactccccaaaacctaccagcagcccaagtgcagtgggaggacagccatctgcaaggaggtactgaacgacacctgggtctccttcccttcctggtctgaggactccacgttcgtcagctccaagaagacaccgtacgaggagcagcttcaccgctgtgaggacgagcgcttcgagttagacgttgtcctggagacgaacctggccacaatccgtgtgttggaaagtgtgcagaagaagctatctcggatggcgccggaagaccaggagaagttccggctggacgactccctgggaggcacgtcggaggtgatccagcgccgtgccatttatcgcatctatggcgacaaggccccggagatcatcgagagcctcaagaagaaccctgtcaccgctgtccccgttgtcctgaaaagactgaaggccaaggaagaggagtggcgggaggcccagcagggcttcaacaagatctggcgggagcagtatgagaaggcgtacctcaagtcccttgaccaccaggctgtgaacttcaagcagaacgacaccaaggccctgcgctccaagagcttgctcaacgagatcgagagcgtctacgacgagcaccaggagcagcactcggagggccgcagtgccccctctagcgagccgcacctcatctttgtgtacgaggaccggcagatcctggaggacgcagcagcgctcatcagctactacgtgaagcggcagccggccatccagaaggaggaccagggcaccatccaccagctgctgcaccagttcgtgcccagcctcttcttctctcagcagctggacctgggcgcctccgaggagtcagctgatgaggaccgggacagcccccaggggcagaccacagaccccagtgagcggaagaagccggcgccaggaccccacagtagccccccagaggagaagggggccttcggggatgccccggccactgagcagccacccctgccgcccccagccccgcacaagcccctggacgatgtctacagcctattttttgccaacaacaactggtacttcttcctgcgcctgcaccagaccctgtgctccaggctgctgaagatctaccgccaggcgcagaagcagcttctggagtatcggaccgagaaggagcgggagaagctgctgtgtgagggccgcagggagaagggcagcgaccccgccatggagctgcggctgaagcagcccagtgaagtggagctggaggagtactacccggccttcctggacatggtgcggagcctgctggagggcagcatcgaccccacgcagtacgaggacaccctacgcgagatgttcaccatccatgcctacgtgggcttcaccatggacaagctggtgcagaacattgcgcggcagctgcaccacctcgtgagcgatgacgtctgcctgaaggtggtggagctctacctgaacgagaagaagcggggtgccgctggtgggaacctgtcctcccgctgcgtccgcgctgctagggagaccagctaccagtggaaggctgagcgctgcatggccgacgagaactgcttcaaggtgatgttcctgcagcgcaaagggcaggtgatcatgaccatcgagctcctggacaccgaggaggcccagacggaggaccctgtggaggtccagcacctggctcggtacgtggagcagtatgtggggaccgagggcgcgtccagctcgcccactgagggcttcctcctgaaacctgtgttcctgcagaggaacctcaagaagttccgccgccggtggcagagcgagcaggcgcgggccctgcgcggtgaggccaggagctcctggaagcggctggtgggcgtggagagcgcctgcgacgtggactgccgcttcaagctcagcactcacaagatggtgttcatcgtgaactccgaggactacatgtaccgtcgcgggaccctctgccgggccaagcaggtgcagcccctggtcctgctccgccaccaccagcactttgaggagtggcacagccgctggctggaggacaatgtgacggtggaggcggctagcctggtgcaggactggctgatgggtgaggaggacgaggacatggtaccctgcaagacgctgtgtgagacagtgcacgtgcacggcctgcccgtgacccgctaccgcgtgcagtacagccgccgcccggcctcgccctgacccgccctcatgggcaccgggcaggcgcctcacagagcacagacgtgccctcggccttggtcgtgtcggggccgttttcttgaacgacgtgagaggcatctcccagcccctctgctgccggacagcgcactccagggcaggacgccgcccccgtggctcccggtctcctgtgggcctgctgtgtgccaaacctgagctacctgcacccgagccctggggctcagccccaccacaggggcgggtggacgtgctggccgaggaacaagcaatcatgtttgcgtccccgtccgtcacatgtgccaaatccctggcaggcagatggctcctgccccatattcttgccgtgtcttggaaaagtcacaggtgacagccctcctgaggcccacactttggagggggtccatgtccaagagaccctgacaaggaaggagttgagccctgggtaggcttgcttgaaaagtgagtccttccagaatattctcagagctgccagaaacatcatctgagggtttgggcatcagctctgcctggctggtgttcaggccctcagtcactttggaagtgagaagaacccttcagccaaacctttgggatcccattttgaagtccagagctggagcaggcgggcagtgccctgggagaccccgctctggataagacacccaaccccaactccagcagctggactctgggcccacaaggggagggaccccagccagtattccctcagagccggcacgaccctgctgtggggcggcgggcccagtcgtgttcctgcagtgggcaccctaggcgtatgtgtatacacgcacagatatttattcctttcgcttttagtggttgttatttctgtagcagccaagtcctgcggctccctggggctgagatctccctttgtggaactccgagagccgccctgacagtcccagccgccacccaaggagccccatccgcccacccaccctgggacccacgcggccactccagggatcattgttgtccttttgtgaggggctgaggcgactgtcccatggaggcatccaaggctttctgtgccaagaatcccaagtgactggggctggggaccacttctccaggcctctctccccgaccatgagagcccctggccctggcccctgcacaccagtaggcccagaataaccgccacccttgccatcctgcaacagctggactcaagtttccaggaagtggagatgtgtttctagaagtttcctgtggaacctggaggctcctgatgcctttgactccaggctgggcgattccgatgctgacccgtcctcctgggctccccacccccgctccccaagtgtcacacaggcactttgtacacatcctggttttctaagaagggaacttgccatcaagattcctgtaccaggcccacggccgtctcgggcagagccacctgggccccgggtgcagccggagaccccgccgagcccctcctcccagtattcccatccccgcatgcttctagggagcgcctcttttccgttcttgaggaatttctgttctggggcttgtccttcctttgcagctgttttgaatgtagttttccttttctatttatttgcacattaaagttaataattgaatattgacatc

SEQ ID NO: 32290 - DNA, 5441 bp, Homo Sapiens
atggcggatcctagattggcagcctgcgtctctctagctaccgtctctatggttcggggaatctccaggtcggggcttgaccggtccgacttttgcgcgtgcgcgagtcctggcgcgtgcccgccctcaagcaactgtccgacccagcgggtgggaggggtgggtctgggaacgttgcggcggctgtcgccgcggccccagcacccagagctgttctctggccaagcctgcgcctgtagtccttctttgcctcctggggcggccgccacccacccccagatggtgggtccggaggatgccggagcctgctcgggaagaaaccccaagttgctcccggtgcctgcgccggaccccgtgggccaggacaggaaggtaatccgggccacgggcggctttggcggaggcgtcggcgctgtggagccgccggaggaggctgacgaggaggaggaggctgacgaggaggaggagacgccgcctcggcagctccttcagcgttacctcgcggcggccggggagcagctggagccggggctctgctactgtccgctccccgctggccaggccggcgccccgccgccctcggcagccccacgatcggacgcctgcctgctgggctcgggctccaaacaccgcggcgcggaggtggctgatggccgcgcgccgcggcacgaaggcatgaccaacggcgactcgggttttctgccgggccgggactgtcgcgatctggaagaggctcgcgggctggcgcgcgccggcggccgggagtcgcgccgccgccgcccctacggccgccttcgcctggaggggcctggcgacgaggacgcggacggcgcgggaagcccgtccgattgggcctctccgcttgaggacccgctgcggagctgctgcctggtggccgcggacgcccaggagcccgagggcgcgggcagcgactcgggggacagccccgccagcagctgcagcagtagcgaggactcagagcagcggggagtcggcgccgggggtcccgaggagggcgcgccccctgccacctcggccgagaggactaatgggggtgcggagccgcgcctgggcttttctgacattcacttcaactctcgcaacacgttccaggtgagccgcggtcagagcgcccgcgatcacctgcccccggcggggccgccggtgcccttgcccgccgcggagcagggtcctgcgggggcttcggcccgggctcgacggagtggcggcttcgcggacttcttcaccagaaacctttttccaaaaaggacaaaggaactcaaatcagttgtccatagtgctcctggttggaaattatttggtaaagtccctcctagagagaatcttcagaaaacatccaaaatcattcagcaggaatatgaagcacgaacggggaggacctgtaaaccaccacctcagtcttcaagacgcaagaattttgaatttgagccgctttctaccactgccttgattcttgaggatcgaccatcaaatcttcctgccaaatctgtggaagaagctttacgtcaccgacaagaatacgatgagatggtggctgaggctaaaaaacgagaaattaaggaagcacataaaagaaaaagaatcatgaaagaacgatttaagcaggaagaaaatattgcaagtgcaatggtaatttggatcaatgaaatactgcccaattgggaagtaatgcgtagtacaagaagagttcgagaattgtggtggcagggattgccccctagtgtccgtgggaaagtttggagtctagctgtaggaaatgaactaaatatcactcctgaactttatgaaatcttcctctcaagagcaaaagaacggtggaaaagtttcagtgaaacaagttcagagaatgatacagaaggtgtatctgttgctgatcgagaggccagtctggaattaattaagttggacatatcccgtacatttccatctctctacatctttcagaagggtggtccatatcatgatgtcttgcatagtattttaggggcatacacatgctacaggcctgatgttggttatgtccaagggatgtccttcattgcagcagtactcattctcaatttggaagaggcagatgcctttatcgcatttgccaatctcctgaataagccatgccagttggccttttttcgtgtggatcacagcatgatgttgaaatattttgcaacatttgaagtattctttgaagaaaatctttccaaattatttcttcacttcaaatcttacagtcttacaccagatatatacttgatagactggatcttcacactatatagcaaatcactaccacttgatctggcctgtcgagtctgggatgtattttgcagagatggggaagaatttttatttaggactggattaggaatcctccgattatatgaagatattctcctgcagatggactttattcatatagcacagtttctaactaaattgccagaagatatcacatcggaaaagctgttcagttgtattgcagccattcagatgcagaatagcaccaaaaaatggactcaggtctttgcatctgtaatgaaggatattaaagaaggagacaagaacagtagtcctgctttgaaaagctagtcttcaaaattgacagactaactgacatagaaaaagtggtttttggataaaggttttttgtttcctatgtaaaaggcgtggaagaaaatgttggagatacctaaaagaatcaagaggtggaaaactgctgattttacattttatggctgaagtaaatgaaataagtaacttattgacagtattaataaactattattttgtaggtagagtcatttttcaaaggaaaaagtttaagtggtgagtttatattccacaatttggagtaaacaaaatgcaataaatttttaaaatagctttgaagatacttcaaatttttacatcttttcttttgtaacagttaccacaaagatattctggaggctagagtaggattgttaaatactactgttaacctccaaagtactatagtacagacattgtttccagttctgaccttttgaagatattatagaccagtaatgaacagatttggttgtaaattatttaagtcactgaagatgtcatttatcttcattcacaagttggggcaaattcgagttacctaggaactggaaatgttggtgggagattgtttattgtttgtttagatgtttttccatagtatggtgtccatttgttttttaagggaaattttttgtcttccttaaggaattcctatcactcagagaattttagccattctggttctagtctaacaaattattcatctaataatttgacattaagaaaactataaataactggtagaaggaaagtgctttgcacttcagtggattgaagacttgactttgagagtaagtccaaaaacatatatgatgtttctcagtgataagagtaaaaagtaatgaatcctgagagttcttaaacagcatgctacttggcaagacttcatattttttagttacaattcttccactgtttaactccagtttgaaatttgaaatctaatatgtagctaaatctgtgacttgtaaaactctatgcataatttttcctaatcagtggaaataagaataaaagaaaaaggtaaagttaattttttttctaagtctacatcctatctcttgattcagttgcctgaagaagctgggtaaggagattagtcttgttattgattcttttatgtgtcagtgccatcttaatctcttcacatggtacactaaatgctgcctataacccatcctcatcttctttactcatcattgctttcttcaaggaaggtcttgatactgccctcgtctacctcactatccgctagtctagatagtgactctttggaaaattggtagcctctgaatgagttatccaacttctgcttcctcacattggccactttgcataggttcgggaacttagcaggttttaaatcatcatgcccatggaggtgaaatactttgaggaatgggaacatctcttcactgtgtttttggatcagccttctctcaaccgccaagaaatgcatgatttccctgccaactctaggaagtagtgctgcatgattgaatcattatttgatgaattctttcattgtaacatagggagtcattttcaaaaaggtagatatgaacttaaattaaattgacttatgaatgctttgcctgtgggcccaacagtgtcatgaccctccaattgaaacatagcatgaattatttttatgtcgagttcttgaactgctaatcaggtgtgtgtttccttgaagtccagagcaggatccaggtcagatgaaggaggtggtatgcctggcttaactgctgaaaatagagcattgaaactcttcacaatgtgctgcattgggtttctgcttggctttctcactgaaaagtaaattggggaaaatgctgcttttactattttgcattttatagcaacattaacagtcttttcccagtcaggtgctgtccagggaacatgtttcccttgggaggtctgaacagagtgacctggcttgatgtatttcctgagctctagtaccatatcatagaattagttaaatgtagtcaacagcaatgtcagaacaattgacattgtctttccaagagtgaatgcattggctttcggaactgctactagagacatacatgaggcagcgaacacatctttaggtgggggcaaggctatatctgattgacagagatctctgatctctaatgacatattgctattgtcctattatgtttaaatttgaacctaaatcacttgagtgttatgagtgatggctatataacatgctgtttggttagatttacagtgtgtttttatgttgcagtttagtttgaaacaacacttaagcacactatttctgttagtgtatatagttttcaaactaacaagcctgcgatccttgttagtgtagtgactgcctctttaggagtatggggccctagggtgtccatatatttttaccccatgggtcattctagtctaaggactactagtagaaccctcaaaaggtaattgctattatagggacttacttattggagactggtaatataataaaatattgaaggagtggccatggtcttagcaggttttagaatgaccttttaactccagtaactacttccttggtattggtatccttgatagagggaatataacatctggcagtaatctcattcaggttatactacctgactaaatttaatcatactttcatgtatttgtttcctcagttggacctaagttactgtatttgtttttcttatttttttattattgtacagtttctttacctttcaagtataaatgtgtatataaaatgtaaatacaaagaattcactaaaaaccactcataacaattactgtgtaaataaaactggtaagcagagtaa

SEQ ID NO: 32291 - DNA, 9544 bp, Homo Sapiens
gtgggcgactcggctaatggcgtcggcgagtcttaggggcctggggagctggcgctgaagcttcttgccaggttggctggtgacacccggtgtggctgggccccgcggcagcggagggacctgcccgccttgtgggtttctcggccagagtcggcggagcctagcgggacggtgcgactgcggggggcgcctccgagaaaagccagaggtgttgcggggaagctgctgggggacgctcgagcaggctccgggttcgcagcccagggcccaagaagcgggctgctgaaggaccagagacaccgggagggagctgcctgtggccctaaggagctgaccgtgccagagcttgtttgtacctctcggaaattggctgggaccttggaggatcatgtccggcaccagcagccccgaggcggtgaagaagctgctggagaatatgcagagcgacttgcgcgccttgtcactggagtgcaagaagaaattcccacctgtcaaagaggctgctgaatcaggaataataaaagttaaaacaattgctgcacgaaacactgaaattttggcagcactgaaagagaacagctcagaggttgtacagccttttttaatgggttgtggaaccaaggaaccgaagatcactcagctatgtttggctgctattcagagactcatgtcacatgaagtcgtgtctgagactgcagctggaaatataattaacatgctttggcagctaatggagaatagtcttgaagaacttaagctacttcaaacagttcttgttcttttaacaaccaatacagtagttcatgatgaggcactttctaaggcaatcgttctttgttttcgactacacttcacaaaagataatattacaaataatacagctgctgctacagtgcgacaagttgttactgttgtttttgagaggatggttgctgaagatgaacgacacagagatattatagaacaaccagtactggtacaaggaaatagtaacagaagatctgtcagtaccctcaaaccttgtgctaaagatgcatatatgcttttccaggatctttgtcagttggttaatgctgatgctccttattggctagtgggcatgacagaaatgactcggacgtttggcctcgaattacttgagtcagtcctcaatgattttccgcaggtctttttacaacaccaagaatttagtttcctcctcaaagaaagggtatgtcctcttgtgataaagctcttttctccaaatataaagttcagacaaggttccagcacctcatcttctccagcaccagttgaaaaaccatattttcctatctgcatgcgtttgctgagagtagtatctgttctgattaagcagttttacagtcttttggtaactgaatgtgagatatttctgtcacttctggtgaaatttctggatgcagataaaccacagtggctacgagctgttgcggtggaatcaatacacagattctgtgtgcagcctcaactattaaggtcattttgtcagtcctatgatatgaaacagcattctaccaaggtttttcgtgatattgtaaatgcactgggatcttttatacagtccttgtttcttgtcccccctactggaaatcctgcaacaagcaaccaagctggaaacaataatttaggtggctcagtctcagcaccagctaactcaggaatggtggggattggtggaggtgttactttgctaccagcatttgaatataggggaacctggatacctattctgacaatcacagttcaaggcagtgctaaagccacctacttagaaatgttggacaaagttgagcctccaactatacctgaaggttacgccatgtctgtggcattccattgtttgctagaccttgttcgtggaatcacaagtatgattgaaggagagctaggagagcttgaaacagaatgtcaaaccaccactgaagaaggttcttcaccaacacagtcgacagaacagcaggatttacagtcaacatcagaccaaatggataaggaaattgttagtagggctgtttgggaagaaatggtgaatgcctgctggtgtggtcttcttgctgcactctcactccttcttgatgccagcacagatgaagctgccactgagaatattttaaaagctgaactgactatggctgctctttgtggaagactgggccttgtaacttcaagagatgcctttataactgcaatatgcaaaggttccctgcctccccattatgctcttactgtattgaataccaccactgcagctacactttccaacaaatcatattccgttcagggccaaagtgttatgatgataagtccatcaagtgaatctcaccaacaagttgtggcagtgggtcaacctttagcagtccagcctcaagggacagtaatgctgacttccaaaaatatccagtgtatgaggactttacttaacttggcgcattgccatggggctgttcttggaacatcatggcaacttgtcttggcaactcttcagcatcttgtgtggattctgggattaaagcctagtagtggcggtgccttgaaacctgggagagctgtagaaggacccagtacagttctaacaacagcagtgatgacagatttaccagtgatttccaatatactttcaagattgtttgaaagctcacagtatcttgatgatgtatcactgcatcatttaataaatgcactttgctccttgtctctagaagcaatggatatggcctatggaaataataaggaaccatctctttttgctgttgccaaattgttagaaactggtttagttaatatgcaccgaatagaaattctgtggagacctctgactggccatctacttgaggtctgccagcatccaaactctcgaatgagagaatggggagcagaagctttaacttctcttattaaagcaggattaacatttaaccatgatcctccactctcacaaaaccagaggctgcagttgcttttattgaacccgttaaaggagatgtccaatattaatcatccagatattcgactcaagcagttagaatgcgtgttgcagattctgcagagtcagggagacagtcttgggcctggatggccattagtgcttggagtcatgggagcaatcagaaatgatcaaggagaatccttgatacgaactgcattccagtgtcttcagttggttgtgacagattttctaccaacaatgccttgtacttgcctgcaaatagttgtagatgttgcaggtagctttggcctccataaccaagaactcaatattagtttaacttcaataggtttattgtggaatatttcagattattttttccaaagaggggaaactattgaaaaagaactaaataaggaagaggcagcacagcaaaagcaggcagaagagaaaggagttgttttaaatcggccattccaccctgcaccgccatttgattgcttgtggttatgtctttatgcaaaattgggtgaactatgtgtggatccccgtcctgctgtcaggaagagtgcagggcaaactctgttttctacaattggtgcgcatggaactttattacagcattcaacctggcacactgttatctggaaggtactctttcatctactggacagagttcgagagtcctctaccactgcagacaaagaaaagattgagtctggaggtggcaatattctcattcatcattcaagggacaccgccgagaagcaatgggctgagacgtgggtattaacattggctggagtagcaaggatcttcaacactagaagatatttgctgcagcctttaggagatttttcaagagcttgggatgttcttcttgaccatatacagtcagcagcactcagcaaaaacaatgaagtatctctggctgctctgaaaagcttccaggaaattttacagattgtgtcccctgtcagagactcagataagcctgagacaccacctgtagttaatgtacctgtgcctgttcttatagggcccatatcaggcatgagcaggccatttgtaagaacagattccattggagaaaaactaggaagatatagtagctctgagccacccattgttactgatgagcttgaagatttgaatctatggtgggctgcgtggaatacctggtatagaattggatctgaaagtactaagcctcctattacttttgataaactaacttttattcctagccagccttttcttacagctttaattcagatatttccagctctctaccaacacataaaaactggtttcaatatggatgacttgcaaaagttgggagtcatattgcacagtgctatttcagtcccaataagttcagatgcatccccttttattcttccatcttataccgaagcagttttgacaagtttacaggaagctgtacttacagctttagatgttctccaaaaggccatttgtgtaggaccagaaaacatgcagataatgtatccagctatatttgaccagttgttggcatttgtagaattttcctgtaaacctccacagtatggacagctggaaacaaagcacattgcaaatgcaaaatataatcagatccaactatttgcaccggcggaatgggtagccttgaattatgtgccgtttgctgaaaggtctttagaagtagttgtggatttataccaaaaaacagcgtgtcacaaagcagtggtgaatgagaaagtgctccagaatattattaagactcttagggttcctctcagtttgaagtattcctgcccttctgaaagcacatggaaactagcagtatcctctctcctcagagttctttctattgggctacctgttgcccggcagcatgcttcttctggaaaatttgacagtatgtggccagaactagccaatacttttgaagattttctctttactaaaagcatacctccagataatctctctattcaagagtttcaaagaaatgaaaatattgatgtcgaggtagttcaacttatcagcaatgagatactaccttatgccaattttattcctaaggaatttgttggtcaaataatgacaatgcttaacaagggctcaatacattctcagtcatcttcatttacagaagcagagattgatattcgtttgagagaggaattttctaaaatgtgttttgaaacattactccagttttccttcagtaataaagtcacaacacctcaagaaggctacatctcacgaatggcactctcagtgcttttaaagaggtcccaagatgtactacatcgctatatagaggatgaaagattaagtggtaaatgccctcttccaaggcaacaagtaacagaaattatatttgttttaaaagcagtcagtactcttattgattcacttaagaaaactcagcctgagaatgttgatggaaatacctgggcacaagtaattgccttatacccaactttagtagaatgcatcacctgttcttcttcagaagtctgttctgcacttaaagaggcactagttccttttaaggatttcatgcagccaccagcatccagagttcaaaatggagaatcttgaccggctacaatatatttgaaagcaggaagatagtctaaaaaatgtttgctcctaattgagtcttctgtgagaaggacatttcttactgcagataattcttggcagctgttgttggcctcctttaaattctacttacctgagttcagtaattcatattacaggcttgcacatcaacaaaggctcctgaatgaacagcagtgtaaggctttaataaattaaactgatgggagggataattaacactacagtatacatgctaccatatctccagttggtgatttaaagtgagcttatgtacagtttgtggtgtatgtgttaatgatgtactttttaaaaagaaagaagagatatttcaattcagtcagatttattagtctggtgtttttgcaccctttttcaagtacaaaatcgtactagaattttatgcaagatggtactgtaacattccatattatctataaccagcctttgttaacaaagggaactgatatacttgtgtgtataataaatggtacagttctgtataaaatagtgcatttatttaaattttaaaagtattgataatgttaaatgcttaaagctctatttattattaatacaaaattgtttgcttacatttttacttataatttgccttcatatgtggcggataagctcaccatatgatcatgcagttagcttcatgcttattttaaatgtattattagtgaccattaaacatctgaccagtaaggtcatgtgaacacagcagcaaatagtttatgatttgctgattttggagctttgaaatataggttcttaatacattgatacatattgtagcactatgacttcatcatacctcatttctttaaacagctctccaagctttcactgaagtctgtctgttttttatattggctgtctggattttaaagacttttcatattttatatttctactgattttgtttcccctaacaacatttgtcactgtctttgaattatgacccaggcaagatgatttcagattttctaaaatcttgcctgtgaggttttgttcatatcagtgcttcattttgtaatgtcttctcaagaaaaatacctatgttaactcacaagtataaaatatgtgtgtattataaaacaatgaaaagtgtatttttggagatagtcaagcatttagaagtgcagtgaacttgctgtcacggagtaaaatgctaattatgtttcactttcctagcctagtgaaaaagaaaagtgctcttgagtacaataccttaattatttcttaaaatactgactttgacctagctcactgtattttttatttaatggattatggattacagtatttttcttctgagttaaattttcataatttatgtgaagacacaaagatgtttaaaacaatgattattcataagaaatcatgatggtctcagtattattttagtgtattggaaggtctttgatcttaatagaatttataaatttcagcttctccagaataatcataaaactgcaaaaagatattataattgagtcatgattgagatacagttttgaggctattataattgtataattatttaatttgcattatctgtaaaatgtagtaaggtctttgaggggatattttttatttacatgaattactgaatttctattttattatttcacctaaaattaaggtaaaatatggcatttcataagttctgctttcagcattttccttaaagttgtaaaaaatcaagctatgtacttattttctatatttgggtgtgttaaattgaggattagaaaaatccacataatcactgataaagcattgaaacagaataacccaagggtagtgtaccgattcagtaacatgttaaaaatattgctatgcatttattcaaaggaaaatggtctgttcttgagaaataaaagatcagttgcaattaggataattaaatagttaaatatgagtcaagtgtatgcaatatacatttatatgaaccaaagcttgctttatcaggaccatgccctacagttcaaaacataaacatagtgaatgtgttaatatcatataataaggtaataaatgccagtcttagtgtgaagcaagtgggtggcccccttggtagtataattggacaggattttcctccagaatatttcctgtcaccctccaagagtcactacagtaattgattgctggcatggaacacattgcccttgtcttgttagtatgaattgggttctccagtgactagaagaactggggtgtgtgaaagtattcgatgccaggagattcaaaaaggaagctctcaaagataagatcattttatggcacaattgagtctataaccagccctttaagcagtagtaaaaatgtcctttgtcatacttactagaaatactatgagttttttttttttttttcatttgagacggagtctcgctctgtcacccaggctggaatgcagtggcacgatcttggctcactgcaacctctgcttcccgggttcaagcagtttcctgcttcagacttccaagtagctgggattacagacatgccaccatgccaggctaatttttttaatatttttagtagagatggggtttcaccattttggccattctagtcttgaactcctgacctcaggtgatctgcccgccttggcctcccaaagtgctgacattacaggcctgagccactgcgcccagccaataccatgagttttaagcctcacatcgtcacttgctgtcactgccagtgcctgttttattcatattgctggacaacagacatatgccaccaattgtatgattaataaagtctttttctggccattttgtccattataaaggaaataaactaattgttaacttgcatagattacttcttagtttcctatgctaccaccactgccaagggagaaaaaaatacatcattttgtaatgtctttagtatttctttataactagtgttaaggttttgttaattttattgtatacatttgtaacatttattaggagccttttaggttccaaaacaaacaaaaggcataaaaaagtctagcttagaaccacttttcacttgctttcatttttaattttattcacttaacagctaacatctttcttgtttcttgttttttccattatatggttatcgattcaactcttgctatattccttaaatttgtatgtatcatcagaagaaagagatgaacaatttagtgtagatattttattctggagaataatattcaattaaattatttctacagcaggccagtaacaactagattatttgtcctttctcagtataattttaaagagcattttgttttattgtcacaatttggtaccactagtcccaggtaaccattgggccaaaggatcagttgagaaacagttaaggatgaattagcataagttatggaacagtgttagaaaacaactcaaaagtatattctttattaatgaggtggtcattattacatttgtgtcaatgaagggcagtgtagttattttaaaatgactaatattttctccccaaatacagaataattcagatgggcaaccaagttttcaagagactgctgtaggtgaagtctgtctagccaaggcagaacacttacaggagtccctaactgtgccacccttggaatgggttagtgtacaggctcagaatattgtggattacagtttttcagagaaaactaccacagatgtagacaaaaatgatctctgaaagcattgccagcagccaggtatgttccttagatttccacttaggtttggcattttggcagataagctaatcttgtataaagcatcacattttactatgcttagtgttcctgggttgtatttatctacattattagagggaatttttattttaaaaaaattgtcattcatgagaagaatgggagttcatgccacatagtattttaccaatttatataaagtgggaaaagtctttaatacttcatgatcacttgaattaaagtttttgtatctctgg

SEQ ID NO: 32292 - DNA, 4579 bp, Homo Sapiens
ctagagtccaaggagaactacatttcccaggaggctacgggagcctgccatgtttctcccgtgctcctctcggccagccgcccgccacgctgtcggcgctatagcaacggtagctagctgcagggccagtggcacgctaggccatgtctggtccaactgatgagactgcaggagacttgcctgtgaaagatacaggtctaaacctctttggaatgggagggttacaagaaacttcaacaacacggacaatgaagtctcgccaggcagtgtcacgtgtcagtcgtgaggaactggaagacagatttttgcgtttgcatgatgagaacattttacttaaacagcatgcccgcaagcaggaggataaaattaaaagaatggccaccaagttaatacggctagttaatgacaagaaaagatatgagcgggttggtggcggccccaagcggctgggacgagatgtggaaatggaagaaatgattgagcagctgcaagagaaagttcatgagcttgaaaaacaaaatgaaaccctcaaaaacagactgatttcagccaaacagcaacttcaaacccagggttacaggcaaactccatacaataatgtacaatctcgtattaacactgggcgtagaaaagcaaatgaaaatgctggtttacaggaatgccccaggaaaggtataaaattccaagatgcagatgtagcagaaactccacatcccatgtttacaaaatatggcaacagtttacttgaagaagccagaggagaaataagaaatttagaaaacgttattcagtcacaaagaggccagatagaggagttagagcacttggctgagatcctgaaaactcagttgaggagaaaagaaaatgaaattgagttatctcttcttcagcttcgagaacagcaagctacagatcaaaggtcaaatattcgggacaatgtagaaatgattaagcttcataaacagctagtagagaaaagcaatgctctttcagcaatggaaggaaaatttattcagcttcaagagaagcaaagaactctcagaatcagccacgatgctttgatggcaaatggggatgaattaaacatgcaacttaaagagcagcgtttaaaatgctgcagtcttgagaaacaattacattctatgaagttttctgaaagaagaatagaagagctgcaggatagaattaatgatttagaaaaggaacgggaacttttaaaggaaaactatgataaactttatgacagtgccttcagtgctgcccatgaagagcaatggaagttaaaggagcaacagctgaaagtgcagattgctcagctcgagactgccttgaagtctgacttaacagacaaaactgaaatccttgacagattaaaaactgaaagagatcaaaatgaaaaactcgttcaagagaatagagaactacagttacagtatctggaacaaaagcaacaacttgatgaacttaaaaaacgcataaaattgtacaaccaggagaatgatattaatgctgatgaattgagtgaagctctcctacttataaaggctcaaaaagaacaaaaaaatggagacctttcctttttagtgaaagtagatagtgaaattaataaagatctagaacgctctatgagagagctgcaagcaactcatgcagaaacggtgcaagagctggaaaagacaagaaacatgctaattatgcaacacaaaattaataaagattatcagatggaggttgaggcagtgacccgtaagatggaaaatttgcagcaagattatgaactcaaagtggaacagtatgttcatcttcttgatatcagggctgcacgtatccataaactagaagcccaattaaaggatattgcctatggcaccaagcagtacaaatttaaaccagaaatcatgccagatgactctgttgatgaatttgatgaaaccatccacttagaacgaggcgaaaatctatttgaaatccatatcaacaaagtaaccttttcttctgaagttttacaggcatctggagataaagagcctgtcactttctgtacctatgctttctatgattttgaactacagacaactcccgtagtgcgaggccttcatcccgaatataacttcacttctcaatatcttgttcatgttaatgacttatttttgcaatatattcagaagaatactatcacccttgaggtccaccaggcttatagcacagaatatgaaacaattgcagcatgtcaattaaaatttcacgaaattcttgaaaaaagcggccgaatattttgtacagcaagtttgattggaacaaaaggagacatcccaaattttggcacagtggaatactggttccgattaagagttcccatggatcaagcaattcgactttatcgagaaagggcaaaggctttggggtatataacatcaaattttaaggggccagagcatatgcagtcgttaagtcagcaagcacccaaaactgctcaactcagttctacagattccacagatggcaacttaaatgaacttcacattacaataagatgttgcaaccacctgcagtcccgagcaagccacctgcagccacacccatatgttgtgtacaagttttttgattttgcagaccatgatacagctatcattcccagtagcaatgatccacagtttgatgatcatatgtatttcccagtgccaatgaatatggacttggatcgataccttaagtcagagtctctgagtttttatgtttttgatgatagtgatacccaggagaatatttacataggaaaagtcaatgtgcctctgatttcgttggcacatgacaggtgtatctcaggaatatttgagttaacagaccatcaaaagcatcctgctggcaccatccatgttatattgaaatggaaatttgcttaccttccaccaagtggatcaataacaactgaagacttaggaaatttcattcgcagcgaagagccagaagttgttcaaagacttcctccagcatcctctgttagcacactagttttagcaccaagacctaaaccaagacaacgtttaacacctgtagataagaaggtatctttcgtggatatcatgccacatcagagtgatgagacttctcctcctcctgaagataggaaggaaatttcaccagaggtagagcatataccagaaatagaaattaatatgctgactgttccacatgttcccaaggtttcacaagaaggcagtgtagatgaggtaaaagagaatactgagaaaatgcagcaaggaaaagatgatgtgtctttactatctgaaggtcagcttgcagaacaaagcttggcatcttctgaagatgaaacagaaataacagaggacttggaaccagaagttgaagaggacatgtcagcttctgacagtgatgactgtattattccaggtcctatctccaagaatatcaaacagccatcagaaaaaattcggattgagatcatagctctaagccttaatgattctcaagtaaccatggatgacactatccaacggctgtttgttgagtgtcgattctacagtcttcctgctgaagagacacccgtgtcacttccaaaacccaagagtgggcagtgggtctactataactatagcaatgtgatctacgtggataaagaaaacaacaaagcaaagagagacatcttaaaagctatactacaaaaacaagagatgcctaatagaagccttcgcttcaccgtggtcagtgaccctccagaggacgagcaggacctggagtgtgaggacattggcgtggctcacgtcgaccttgccgacatgtttcaggaagggagggacctcattgagcaaaatatcgatgtttttgatgcacgagcagatggtgaaggtattggcaagctcagggtaacagtcgaagctctccatgccctccagtctgtctacaagcaatacagagatgacttggaggcttgaaagcaaatgctccagaggcatctcctactcctcagtaaatgctcacatgaaagttcctacatgagatttttgtaattactctggtgtatataatctataattcatgggaagctgggagcggggagacctgggtttgaagtgttgaagttttgtatactttttcatttgtttatttctctattccctccttctcataactgccacccctcaggacttaagttctccataatgggcagtaccttctcaataatttatacctacgtgatagcgtgagaaagtctatttgcattttcaacattttcttaggaagaaccgaaatgcaattcccatttttatttttaataagcaaaagcataaatcttagaaaacctatgaaaaagaaatacttttatgttatccctaatcgtcccactaaatggaatgcctatgattagcttcattaagagttttatactgtgaagattttattagaagcaatatatgaaaattacttggattaatgtgttaatcttcctctttaaaatgctaatatccattttatgcacattaaagctcagtatgcattttctttgatgcatgcagtttctatcaattaaatataaagaatgaaacttagcaccaactta

SEQ ID NO: 32293 - DNA, 3181 bp, Homo Sapiens
atgccacgtcctgagctggccacctgccgctgcagccctggcggtagagaagcaccccgtgaggtcttctgtgaaactgcaagacagggactggcagaaaacgagacagctacttttcagcggcagctctccctgagaagtcccaatcagaacggactgaatcacagaacctgggagcagcctgcaaggccaccccagtgtgagctccgtgcatctcgctcaactctgtgtctgatcaacagccccagctctcggctgcctcgcggattcgcgcgggtggtgagagtggccagcgagggcagcgttcgccgcccctcaggccccgtcccggcgccgcagccgcctgcgtttcggtttgtgagcaggcccggccgggccaggagcgagagcgagactctggagcggtcgccgccgcagtcgcccgggccgggaaaggcgggcgatgcccccaaccgccgctcgggccatgtccgaggggcgcgcgtgttgtcgccgccggggcgccgtgcccgcctgtcgtcccccgggcccagccgctcgtccgaggcccgcgaggagctgcgccgccacctcgtgggcctcatcgagcgcagccgggtggtgatcttcagcaagagctactgtccccatagtactcgggtgaaagaactcttttcttctttgggagtcgaatgtaatgtcttggaacttgatcaagttgatgatggggccagggttcaagaagtgctgtcagaaatcactaatcagaaaactgtgcccaatattttcgtgaataaagtgcatgtaggtggatgtgaccaaactttccaggcatatcagagtggtttgttacagaagctccttcaggaagatttggcatatgattatgatctcatcatcatcggtggtggttctggaggcctttcatgtgcgaaggaagctgccattttgggaaagaaagttatggtgctagactttgttgtcccgtcacctcagggcacatcctggggtcttggtggcacttgtgtaaatgtaggttgtattcctaagaaattgatgcatcaggctgcccttttggggcaggcattatgtgactcaaggaaatttggctgggaatataatcaacaagtgaggcacaactgggagacaatgacaaaagcgattcagaaccacatcagctctctaaactggggctacaggttgtctctgagggaaaaggctgtggcctatgtcaattcctatggagaatttgttgaacatcataaaataaaggcaaccaataaaaaaggacaggagacttattatactgctgcacagtttgtcatagcaacgggtgaaaggccacggtatttaggaatccaaggagataaagaatactgtattactagtgatgaccttttttctctgccttattgccctggcaaaacattagtggtgggtgcctcttatgttgccctggagtgtgcagggtttctggctggctttggcctagatgtcacagttatggtacgctcaatccttctccgtggcttcgaccaagaaatggcagaaaaagtgggttcctacatggagcagcatggtgtgaagttcctacggaaattcatacctgtgatggttcaacagttggagaaaggttcacctggaaagctgaaagtgttggctaaatccactgaaggaacagaaacaattgaaggagtctataacacagttttgttagctattggtcgtgactcctgtacaaggaaaataggcttggagaagattggtgtcaaaattaatgagaagagtggaaaaatacctgtaaatgatgtggaacagaccaatgtgccatatgtctatgctgttggtgatattttggaggataagccagagctcactcctgtcgccatacagtcaggcaagctgctagctcagagactttttggggcctctttagaaaagtgtgattatattaatgttccgactacagtgtttactcctctggagtatggttgctgtggattatctgaagagaaagctattgaagtatataaaaaagagaatctagaaatatatcatactttgttctggcctcttgaatggacagtagctggcagagagaacaacacttgttatgcaaagataatctgcaataaattcgaccatgatcgggtgataggatttcatattcttggaccaaacgccggtgaggttacccaaggatttgcagctgcaatgaaatgtgggctcacaaaacagctacttgatgacaccattggaattcaccccacatgtggggaggtgttcacgactttggaaatcacaaagtcgtcaggactagacatcactcagaaaggctgctgaggctaggcctgctgctgtttagttctccttgtcatattctcatttctctcaaagataagaatgctctcggataaaatgagcctgtgctcatgacagctgctctgttactcagggaccagtgcagggctgtcttacgacacttagatgagaaagtagacaaggaaagaggacagcagtgggcatctgccttgtggtcttgctgacagcgagaagcagtgggactgcttccttgacgccttagcttggagccccgttatgaggtgagccaaggctgactctcgcaagccaggactgagcttccctcggaaagacctttgagtggcaccattcacctaagttagcttttctggtcgctattgtttttatcccctttgctttgttgtttctgtgaaaatatattttcagttaagaaatgctataaagtagtggttttctagtgcgtgggcctagaattcacacatgctcactggtgaacagtgtctgtgggctgctgtgggctgcatttggatagctgtctgcattagcaggaagctgtacacactgtgtagggttagtcatctcttttcttttttgaggcacatttaacctactgtcaaaacgctgactcatgcttcaccctcacactcactacttggtggtgataaccttgaagctattctcccctaattaatatctcgagactgagcaaaatatctcatgtaagataaaagtacttgaattgctttttcatgttcatcttaatagtattatttccaaaagtttttaatactgtattatgtgaaatctaactaatttatctgtgaaataattccatcacagtctgtttaatgatgataaagttccataaatgaatacaggt

SEQ ID NO: 32294 - DNA, 4743 bp, Homo Sapiens
atggcaggtcggatcacgtgcgggttctgtcacgtgacatcaggtcacgtgaggccggtcacgccccgggcagcttggctggggctaggcttccggggctctgcagtcctcggcgtgtgctggcagcttcggagcccaccgagccgggcggctaggatgatgaaccggacgacccccgaccaggagctggcgccagcgtcggagcccgtgtgggagcggccgtggtcggtggaggagatccgcaggagcagccagagctggtcgctggcggccgacgcgggcctactacagtttctacaggaattctcacagcaaactatctctaggacccatgaaatcaagaaacaagtggacggactaattcgggaaaccaaagccacagattgtcgcctgcataatgtcttcaatgacttccttatgctctctaatacccagttcattgagaatcgtgtatatgatgaagaagtggaggagccagtactcaaggctgaggcagaaaaaacagagcaggagaagacacgagagcagaaagaagtagatctcattcctaaagtccaggaggctgtgaactatggcttacaagtattggacagtgcctttgagcaacttgatatcaaagcaggaaactcagactccgaggaagatgatgctaatgggcgggtggaactgatccttgaaccaaaggatctatacattgatcgtcctttaccatatctcattgggtcaaagctgttcatggaacaagaagatgtaggtcttggagagctgtccagtgaagaaggctctgtaggcagtgatcgtggcagtattgtggacactgaggaagagaaagaagaggaggagtcagatgaagattttgcccatcatagtgacaatgaacaaaaccggcacaccacacaaatgagtgatgaggaagaggatgatgatggctgtgaccttttcgctgactctgagaaggaggaggaagatattgaggacattgaagaaaatactagacctaaaagaagcagacctacatcgtttgcagatgagctggctgcccgcatcaagggggatgccgtgggtcgagtggacgaggagccgacaaccttaccctcaggagaagcaaaacctcggaagacactcaaagagaagaaggaaaggagaactccttcagacgatgaagaggataacttattcgcaccccccaagctgaccgacgaggacttctcgccatttggctctggaggtggcctgttcagtgggggcaaggggctctttgatgatgaggacgaggagagtgacctcttcacggaagccccccaggatcggcaagctggagcctctgttaaggaggagtcttcatcatccaaacctggaaagaaaatcccagcaggagctgtttctgtatttttaggagacacggatgtgtttggtgctgcctccgttccatcaatgaaggagccacagaagcctgagcagcccactccaaggaaaagcccctatggtccccctcccactggcctctttgatgatgatgatggtgatgatgatgacgactttttctcggcaccccacagcaaaccttctaaaacaggcaaagtccaatccactgccgatatctttggtgacgaagaaggagatctgttcaaagaaaaagccgtagcatcgccagaagccactgtgagtcagacagatgaaaataaagcaagagcagaaaaaaaggttaccttatcttccagcaaaaatctcaagccctcatcagaaacaaagactcaaaaaggcttattttcagatgaggaggactctgaggatttgttttcttctcaaagtgcgagtaagttaaaaggtgcgtctctgctgcctggcaagctccccacgttggtttccctgtttgatgatgaagatgaagaggataatctttttgggggtacagctgctaagaagcagacattgtgtctacaagctcagagagaagagaaagcaaaagcctccgagctctccaaaaagaaagcatctgccctgttgttcagcagtgatgaggaggaccagtggaatattcctgcttcacagacccacttagcatctgacagcaggtctaaaggagaacccagggattctgggaccctccagagccaggaggccaaggctgtgaaaaagaccagtctctttgaggaagacgaagaagatgatctttttgccattgccaaggacagccaaaagaagacccagagagtgtcactcctctttgaagacgatgttgatagcggaggctctctgtttggctctcctcccacatctgttcctcctgcaacaaagaaaaaagagactgtctctgaggcaccacctttgctgttcagcgatgaagaagagaaggaggcacaacttggagtgaagtctgtggataagaaggttgagagtgccaaggagtcattaaaatttgggagaactgatgtggctgagtcagaaaaggaaggacttttgactagatctgctcaggaaacagtcaagcattctgatttattttcttcatcatccccatgggacaaaggaaccaagcctagaaccaaaactgttcttagcttgtttgatgaggaagaggataaaatggaagatcaaaacattatccaggctccacagaaagaagtaggaaagggccgcgatcctgatgcccaccccaagagcacaggtgtcttccaggatgaagagctgcttttcagccacaagctccaaaaggacaatgacccagatgttgacctttttgctggcaccaaaaaaaccaagctgttagagccaagtgttgggagcctgtttggggatgatgaagatgatgatcttttcagctctgccaagtcccagcctttggtacaagagaaaaagagagtagtgaaaaaagaccactctgttgactctttcaaaaaccagaaacatcctgaatccattcaaggtagtaaagaaaaaggcatatggaagccggaaacacctcaggactcatcaggtctcgctccatttaaaaccaaagaaccatccactcggatcgggaagatacaagcaaatttagcgatcaacccagcggccttgctgcccacagcggcttcccagatctctgaagtaaagcctgttttgccagaattggcttttccttcatctgaacacagaaggagccacggtctggaaagtgtgcctgtccttcccgggagtggggaggccggtgtgagttttgatcttccagctcaggcagacaccttacacagtgcaaacaagagccgtgtcaagatgagagggaagcgtagaccgcagacccgtgcagctaggcggctggctgctcaggagtccagcgagactgaggacatgagcgtccccagaggacccattgcacagtgggctgatggcgccatttccccaaatggccatcggccacagctcagagcagccagtggagaagacagcactgaggaggccctggcagctgccgctgcaccttgggaaggtggtcctgtgcctggagtggacagaagcccctttgcaaagtctctgggtcattccagaggggaggctgacctttttgattctggggacatcttttccacgggcactggatctcagtctgtggagagaacaaaacccaaggcaaagatagcagagaatcctgccaacccaccagtgggtggtaaagcaaagagccccatgtttcctgctctaggtgaggccagcagtgatgatgatctctttcagtctgctaaaccaaaaccagcaaagaaaacaaatccctttcctctcctggaagatgaggatgacctctttacagatcagaaagtcaagaagaatgagacaaaatccaatagtcagcaggatgtcatattaacaacacaagatatttttgaggatgatatatttgctacggaagcaattaaaccctctcagaaaaccagagagaaggagaaaacattggaatctaatttatttgatgataacattgatatctttgctgacttaactgtaaaaccaaaagaaaagtccaaaaagaaagtggaagccaagtctatatttgatgatgatatggatgacatcttctcctctggtatccaggctaagacaaccaaaccaaaaagccgatctgcacaggccgcacctgaaccaagatttgaacacaaggtgtccaacatctttgatgatcccctgaatgcctttggaggccagtagagcacacagggtatccacatgttaccctgcagctacattgttgagttagtgatgatgttgtatatgctgatggtcttaactggattacaaaaagcaaatactagaacagctagctcatcgttcacccaatgtacttggtatttttctgcactggtttaatcatgcttaatactacaaaacaaaaataaatatttcacagtggttggtttgttttgtttttaaaccacagtttgatttagttagccttgctggggccataatatgcttcagggtgtgtaaaagaagaaatctctttgtggctttcatgggcagggaatcccagagatagcaaatgccacctgaccagaagtctttgttatatggatgggaaccctaacttagggcctgggcaggggaaagagaaagaaggtgagagattatacttcatgagtcttagcaatatgggagcaggttttcactgaattctgagggtgcctctgcatgtcctccaaggcaaagtttggcaaactgtggcccccccactgtcatattttgttaataaaattttattggaacacaacc

SEQ ID NO: 32295 - DNA, 1425 bp, Homo Sapiens
atggccccccagagagcggggccgggtctagggaagccctcttccaagaagtcccgtgccctgagaggagggccaggagtccccagggccagacagcgaagccccagagctgctgcggagctgaacaccgaggtccccaagccctccgcaaaggacgtggagatcctggagcaagagagcgaagtcctcgagccatcagtcgagcaggacgcagagagccccgggctgtccacagctgcgggctttgagagtcctgagccaggcagagacgaccctgggccgtccgaagcgcaaagggcggaggtccaggggcagcatccccctccaggccctaagacctcctcctccaggtcaggctcggaagccccccacctgcgttttccgccgtgccccgaggctccccagcgtcccccggaggagcggttcatggagacgcccatcgagcgcgaaatccgccgcagctgcgaacgcgaggagagcctgcgccggagccggggcctgagcccgggccgcgcaggccgtgaactcgtcgagctgcgcgtgcggccggtgctcaacctgccgggtcctggccccgcgctcccgcgcgccctggagcgggcgcgggcgggcgcgcagatgcagcgggacatcgagcgggaggcccaccggcaggcggcgctggcgcgccccgcggtccccgagccgcgcgcccggtcgccgccgcagccgctgggcgaactcaagcgcttcttcgaggccgcggcggggagcggctcctcggcgggggcgggggacggcgcgggcccgcagaggctgccagagcctgggggacggccgcgctcggccgtgcagggcgggtgccgggtgctgggcagcgccccgccgcctttcactccgtcactgctggagcaggaggtgcgcgccgtgcgcgagcgcgagcaggaactgcagcgccagcggcgcagcgtctatggcaccgcggagttcaaggagcctacgccgagcctcaccgcgagcaggggcgacggaaagttggtggtgatctggcccccccgcagaaaggtctcggagaacggcctggagcaggaggagcgcaaaccttgaggtttgaaaaggctgggacccccggccggaagtaacgtacgcgtcagaggaacagggcggggggcgtctagcattaggcctggagaagggtcggctctctgcattggggaagatgaaatcgacttgcctttgtgaaattgaccagccccctctataaaacttacagtcccccattgggaaactgaccaccacccacaactccgccagtgaaactgcccagcccttctctgcctaattgcaaactgaactaccctctcccttgactgttaagagggccggagttaccgcctcgattgccccactccccccacccccaataaagcctcttctttcagggca

SEQ ID NO: 32296 - DNA, 5783 bp, Homo Sapiens
aaaattctctctcatccccttgggattcaaagctgagaagatgtaaggactggagctgcagcagtctttctgggaccattatacagagattctgtctgaggttggatccacgtggtcaaaagtattgctgaggagccagagagagactgaggtctgatgacatcacttgagccctgcagacttttcatttacgggaaaacagagaggatgaaggcctatctaaagagcgcagaaggcttttttgtcctaaataaaagtaccacaattggaaggcatgaaaattcagaccttgttttacagtctcctgacatcgacaaccaccatgcactcattgaatataacgaggcggagtgcagctttgttctccaggacttcaattcccgcaacggcacgtttgtcaacgagtgccacattcaaaacgtggctgtgaagctcatccctggagacatcctgagatttgggtctgcagggctgacctatgaactggtcattgaaaatccacctccggtgagtccgggccactgggggatagaggggccatgtcgccttcgtgcagcccggcgctcggatgcagctgcagggtggcgcttatccacattggtctctttcccatggatgaggggcccagcaccatggccagggccacagccacctcgtgccacacagcagccaaaccaggcccccccaccatcacatatccccttccaccaaggtgtccagccagcaccgatgcaaaggagctggtcccaggcctttcccagacccaccgtggtcctgccggcctcccacaggcggcctgtgagcgccaacaaggagatgttctcgttcgtggtggacgacgcccgcaagccacccgtcatcaagcaagtgtggaccaatgccatgaaactgtcagaaaaatcagtggccgaggggattcctggggcagttccccctgcggagatttatgtggaggaggacttggcccagcaggacaaggatgaaataattctgctgctgggaaaagaggtcagccgtctctcagattatgaaattgaatccaaatacaaagacgtcataatagcaaacctgcagaatgaagtggctgagctgagtcagaaggtgtcagagaccaccacctccaggcagaatgagaaggagatctcgcagaagtgtcaggttctggatgaagacatcgatgccaaacagaaagagatccagagcttgaaaagccagatcagtgccctacagaaaggctacagcaaggtgctgtgccagaccctgtcagagcggaactcagaaatcacatccctgaagaatgagggcgagaacttaaagagagacaacgctatcacatcagggatggtgtcatctttgcaaaaagacatattagcaaaggatgagcaagttcaacaactaaaggaagaggtcagtcacctaaaaagtcagaacaaggacaaggaccaccagctggaagcccttggctctagatgctcggtgctaaaggaagagttaaaacaggaagatgctcacagggagctcagggaagcccaggagaaagagttaaaactctgcaaaacccaaatccaagacatggagaaagaaatgaagaagcttagggcagagctgaggaagagttgtactgaacaaagcgtgatctctaggactctgagagaaaaaagcaaggttgaagagaagcttcaggaggattccagaaggaaattgcttcagctgcaagaaatggggaacagagagagcgtcattaaaatcaatttggagagggcagtaggtcagctggagcacttcagaagtcaagtcatcaaggccacctatggacgggcgaagccgttccgggacaagcccgtcaccgaccaacagttaatagagaaaattacccaggtcactgaggacaacatcaattttcagcagaaaaagtggaccctccagaaagagacccagctgagcaactccaagcaggaggagaccaccgagaacatcgagaagctgaggacgtcgctggacagctgccaggcttgcatgaaaatatcctgttgcagccatgacctgaagaaggaggtcgaccttcttcagcacctccaggtgagcccacctgtctcggggctccagaaggtggtgctggacgtcctgaggcacgcgctgtcctggctggaggaggtggagcagctcctccgggacctcgggatcctgccctccagccccaacaaagggttctctttgtatctgatatatcttctggaacattataaaaaacttatgagccaggcccaggaacttcagatcaagttcaacagttctcaggaaactcagcagtctttactgcaggaaaagctgcgggagcatctggcagagaaggagaagctgaacgaggagaggctagagcaagaggagaagctcaaagccaaaatcaggcaactgacggaagagaaggcggctttggaggagtacattactcaagagagaaacagagcgaaagagactttagaggaagaacggaagagaatgcaagaactggagagcctcctggcccagcagaagaaggctttggcgaaaagcattacccaggagaagaacagagtgaaggaagcattagaggaagagcagacaagagtccaagagctggaggaacgcttggcccgccagaaggagatctcagagagcaacattgcgtacgagaaacgcaaagcaaaggaggccatggagaaggaaaagaaaaaggtgcaagacctggagaatcgcttaaccaagcagaaagaggaattagaattaaaagagcaaaaagaggacgttttaaataataaattaagtgacgcactggccatggttgaagagactcagaaaacaaaggcaactgaaagtctaaaagcagagagcctcgccttgaaattaaatgaaacattagccgaactggaaactaccaagacaaaaatgatcatggtggaagagcggctaatcctgcagcagaagatggtaaaggccctccaggatgagcaggaatcacagagacacgggtttgaagaagagatcatggaatataaggagcaaatcaaacagcacgcccagacaattgtgagcctcgaagagaaactccagaaagtcactcagcaccataaaaaaatagaaggcgagattgcaacattgaaggacaatgacccagccccaaaggaggaaaggccgcaagaccctctggtggctcccatgacagagagcagtgccaaagacatggcgtacgaacatctgatagatgacttattggctgctcagaaggaaattctgtctcagcaggaagtcatcatgaagttaaggaaagaccttaccgaagcccacagcagaatgtcggatttgagaggggagctaaacgagaagcagaagatggaactggagcagaacgtggtgctggtccagcagcagagcaaggagctgagtgtgctcaaggagaagatggcccagatgagcagcctggtagaaaagaaagatcgggagctgaaggcccttgaggaggcactcagggcttcccaagagaaacacagactccagctgaacacagagaaggaacagaagccccggaagaagacccagacgtgtgacacctctgtgcagatagaacccgtccacactgaggccttctccagcagccaagagcagcaatccttcagcgatctaggggtcaggtgcaaagggtcccggcacgaggaggtcattcagcgtcagaaaaaggccttatctgaacttcgagcgcgaattaaagaactcgagaaggcgcgctcaccagatcataaagaccaccagaatgaatcatttctagatttaaagaacctcagaatggaaaacaatgtccagaaaatactactggatgcaaaaccggatttgccaactctctcaagaatagagatcctagcgcctcagaatggcctttgcaacgcaaggttcggctcagccatggagaagtcagggaagatggatgtggctgaggctttagagctcagtgaaaagctgtacctggatatgagcaaaaccctcggaagtctcatgaacatcaagaatatgtcaggccacgtgtccatgaaatacctctcccgccaggagagggagaaggtcaaccagcttcgacaaagggacctcgacctggtgtttgataagatcacccaactcaagaaccagctggggaggaaagaggagctgttgagaggatatgaaaaggacgttgaacagctcaggcggagcaaagtgtccattgagatgtaccagtcgcaggtggcaaagctggaggatgatatctacaaagaggccgaagagaaggccctgctgaaggaggccctggagcgcatggagcaccagctgtgccaggagaagaggatcaacagggccatccggcagcagaagtagatgggagcttccagcccctgcctcgcagacagatggtgaggatgaaagaatgcaggcatccctcgctatctgctgtccactctcgctgtcgtcatacctcaggagccaagtgcttttggatggtgagggtgcttgtcccgtctctgaagcacctgcccagggcctggcaccagccggcggacactgccttccccatgctgcccatgacccatgctgcccgtgacccatgcaggtggtctcctgggtgagtcctgcctcagacccggtagggtctacacactggaaagtttccccaaagcaagtcacacatgagcagcacccgggcggcttccaaagctccctgaaagctggcagaggggctttcctgtctgctttgcagttgacatattcatcatccactcctgcagtccacaaggcactggaacagtgacctctaaatagagccagactctccctttccttcactcttgcctaaggtggagcagatcccaaggctggggttaggcaagtcagggaaagaaccacagtcactgtttcttcatgaccgtctccaggccagggactgggctcacctgagctttgcagccgtgatagggcttattaatgcctctaatagccctgcctggtacgatgatccctattttacagatgaggaaactgcgcctcagagagttaagaggcgcccaagtgcacacagcggctggtaaggacagctgggacctgaccccagatccctctgaccctggttctcctgctgtctgcagggttggccgtgagtcccctccttgtaactgtcagcttttatgtgtgtgtgcattctcgtgtgtgtgtacattctcatgtgtgtgtgtgtgtgcacatgtgtaccatgtgcatgagggtttggctgtgtgtgacactatgtgtgtgtgtttgtgtgtgttgcctgcctgagctcagagagagccaaacccccagagaagggtgccccctccaccaaccaggtgagctccttgcagaggcctggccttcatcccacaaaccttgcagaccacaggctccctggcttgcagcccccaaaaatgaaggcagcgctctgctctggacgtggcctttccagcactcaccactctgaattaaacatcacaggcccccatctgcacatgtcgtggggctgcctcgggcagaggaccgtttccttttacgctgtgccatgccagggagatctgggcagcagcagagtcctgagatgtcctttgatgtacccacaggagagttcgctccttcccgaggcagtgtcccccagggcttggcaggccaggcccacagcagagacaccaaaccacagaatgggacggcagagggccctaaaaagcccattgtcatgcactggctgaaaatgaaagaaaacctgcagattt

SEQ ID NO: 32297 - DNA, 4473 bp, Homo Sapiens
aaactttacccggcctaacagctgaggcgctttacggcgacggcggctgagtgagaaccttggcggctgtggaggctgccgcggctgcgaaggaggcggcggcggtggcggaggaagaggagtggcggcagcggcggcggggacccgtgcggggatggcggaggtaccgcctgggcctagcagcctcctcccaccaccagcacctccggccccggcggcggtcgagccccgctgtcccttcccggcgggggccgccctcgcctgctgcagcgaggacgaggaggacgacgaagagcacgaaggcggcggcagcaggagcccggcgggcggagagtcggcgacggtggcggccaaggggcatccgtgcctccgctgccctcagccgccgcaggagcagcagcagctcaacggattgattagccccgaactgcggcacctccgggcggccgcctccctcaagagcaaggtcctgagcgtagcagaggtggccgcgaccacagccacccctgacggaggccccagagcgactgcaacaaaaggagccggggtacactcgggcgagaggccccctcactccctctctagtaatgcaagaactgcggtccccagcccggtggaggcagcggcggcgagcgatcccgcggcggcccgcaatggactggccgagggcaccgagcaggaggaggaggaggaagacgagcaggtgcggctgctgtcttcgtccctgaccgccgactgcagcttaagaagcccttcgggcagggaggttgagcctggggaggatcggacgatacgatatgtccgatatgaatccgagctacaaatgcccgatatcatgagactgatcaccaaagatctgtccgaaccctactccatttatacctatagatattttatccacaactggccacagctgtgcttcttggccatggtaggggaggagtgtgtaggtgccatcgtttgcaagttggatatgcacaaaaagatgttccgcagaggttatatagccatgttagccgtggattccaaatacaggagaaatggcattggtactaacttggttaagaaagctatatatgccatggttgagggagactgtgatgaggttgttttggaaaccgaaataacaaataagtccgctttgaaactttatgaaaatcttggttttgttcgagataagaggctgttcagatactatttaaatggagttgatgcactgcgacttaaactgtggctgcgttgagaaactgacatcaaggaacaactatcatccgcacagaatcgacctttgcatgcaatgcaatttgtacagaattgctttgcaggtggatttagtaatttccatgcagctcttacctgtcagtgtctcattgagtgtcgcacaatatttgttgcactttggcatggcacatttgttctgaattaaaagattgttttaaacttcaggagttcttttggtaccaacaagatgtgccagttgatagccaagatttatgtgttcatttgcaaagtctgctgacaatgttatttacacagtgatcattttatcacagaaccagtaagtggaacataatttttgttccttaaaaaagccaatgtggattgtaaaagtctttaagtatactaacatttcacacaaaacctgccctagttttctgaagtgggtgagggagacgcttcagttttaggttttattttttcaatattaaattttccattcttgaatattggtacctcagtgattagtgaatgaaaaaaatgtagggtgggtatgtcttacaatgagtaaaggtaacaattaaattttgtctgccagtgcctgtgtagataagtatatttgtcttcatctctagtttttgaatgcatgctatcttttccttttctttaaggcctttgcaagcaaacttttgtttttatttaaattctaaatttgataaattatttcagatttttataatttggatacttttttcaggtgaatgaaagaatggtttactttagaagtccctttttccttacagtaacaagttgaatctacttggaaaattgagaaatggctcaaaagagataagaaaagttgatggagccgggaattgctggggtttagatgcactttttcttttgagagtaagggaagttttggaaaagaatagaaaattagtgtaagttgatatgattttatttaatcaaaattactgctacgctgcgaagaacagcttttacaaagtagctgaatttgtttttcccacttgatttggattcacattgctttcatttcttaaaatgcttcacttcaggttcttggtcttggaaataaatttcaaggtgcattgtatccattttaagctgctttattttattttcacttgtatgagcaaattcttgggggagctttgcttttcttctgccagaaaaacaaaagggggaaatgaaaatcttttttggaatgagttctgtgggttttcttaacagccaccatgtttattagttacattgtgttttggccaatcagtgcaatgtaacaaattttacagttaattgctttcaattgagtcagtaaacctgtgatagataatttatttaactggaaaacctaggtacccataagaaaaaagattcattctctgtgaaaactgtaggaatctgttgttgttttcatttgaatatgctctacttctgctctagtatttggtttggaatatattttgtggctctaattactgtatttttaaaaaccctacctccattaacagttggtaaaggccccttttcaggaaagtttgttgctttttttttttttttaaaggaaagctgctctttgctcagtatagtgttttgaaagtgaacatagtaacaaatactttaaaaataaagatacacaatttatatttgaaaataaaaactttctgctggtgggattatttatagttctttatttttaaagaaaatgttttcctttttatattgctcttgaaagtttaatgagcagaatacaatactggttataataaaaatatggtaaccacacagtactcagcctttcaatatgtttttggtcaaacttcatttaggcactagcatttagaagaataccaatcacagtgatgcttttgttatttaatatgaaggaaatggaactaaaacatttatgtcatcaaattttatttcacttctttatatttgacttgctggttgatacataatggttgatgaacatatatttgcttaaatcactaatagggatggttgtaaagtagatagatcattggttcaaccattttagtgtttttgccagattgtcaatgaaaccatcatactgaccttttcctccaaaattgccaaattgactgaactggttgggtgtttgtaaagatgacgttaactgtgtgactaaaaagtcagatggttgccatattgtttggaatatgttgaatgtcagtgtatgccttatgtctttaattgggtatgcaaaaaaatttttacttaagtagattaaaattttaacctctagcatgaaaacccagcaccaacactgaaagactccattcaggttgaagtagcctcaaacagtaatttactttttgataataggctgttgtttttcttaaataagcttaaaacaattctatctgaaattggtagcatgggttcacttggctacaactgagcaaaatagatgcaactttcttttaatggggtgctgcctctttaggactgactgtactatccactgacactggtttggcagttggtactgctgaacatttttatacatgctaccatgaagctatatatgttagtattgaagaagctaacgggtatactatcatttttgatgtgtgggctgattataatttcctgtatttcctgtacattgggatgaaactactttagcaaagtccacagatcagaaaccagacggtagtttttgaagttgaaaccagcaaaataagaaaaaataaaaaatcgattttaatattttctgcctctttcccaaattacccttcccacttgctcgacaaatctatgtaaagcagtttgttttttcatgttttaactttaccttgccctgtgttatggtactggctgacatgtctaagactggatgtgtatatttattatggtgtctaaaaatcatgaagttcatcacttttcaggagtatagataaaatcaaattggtagtacatcagagttacttttcagtgcaccatgacatcactaaaatgagtgctgtaatgttacagggctttcaggtttgtaaaaacataaccataaattatattgacgtcagatatgagttgagtatctataaaatatcacgtgtatctcaaaatattggactgctgtttgactggatattgctgcataattttcttctattgtcccatatccttttggagagagatttaatgggatttgaaatgtgcaagctgtctaaataagatgcagtcaaataaagtatggttaagttg

SEQ ID NO: 32298 - DNA, 2007 bp, Homo Sapiens
atgcattggtatcggcgggtgcccatcagggtgtccagcagtgaatcagactccagccctgcccttggacctcgcagcccacagcaggacaggcaagtgtggcacacctatgggcagagtaagggcttccgtgccccagaagccttcaaggaagtggctttggagttggtaacaagacataagctgcattccagctgtcagctgtcagagccgcggcggcgaacgaggcgcagcgagctgagcggtggcagcgccgcagccggggccggagcgcaggagccgacggggcccgaccaggatggtgcagtggcggctccgcggcgcacgcacgcgctgagcgggcccagcctgggccccgcgccccccgcgccccccgccgccccgatccgggccggcatgatgtgcctggaatgcgcctcggcggcggcgggcggcgcggaggaggaggaggcggacgcggagcggcggcgccggcgccggggggcgcagcgaggggctggcggtagcggttgctgcggggcgcggggcgcgggcggcgctggagtctcggccgcgggcgatgaggtgcagacgctgtcgggcagcgtaaggcgggccccgaccggaccccccggcacccccggcacccccggctgcgcagctactgcaaagggccccggcgctcagcagcccaaaccggccagcttgggccgcgggcggggggcagccgccgccatcctcagcttgggcaacgtgctcaactacctggacaggtacaccgtggcaggcgtccttctggacatccagcagcactttggggtcaaggaccgaggcgccggcctgctgcagtcagtgttcatctgtagcttcatggtggctgcccccatcttcggctacctgggcgaccgcttcaacaggaaggtgattctcagctgcggcattttcttctggtcggccgtcaccttctccagctccttcattccccagcagtacttctggctgctggtcctgtcccgggggctggtgggcatcggggaggccagctactccaccatcgcccccactatcattggcgacctcttcaccaagaacacgcgtacgctcatgctgtccgtcttctacttcgccatcccactgggcagtggcctgggctacattactggctccagcgtgaagcaggcagccggagactggcactgggcattgcgggtgtcccctgtcctgggcatgatcacaggaacactcatcctcattctggtcccagccactaaaaggggtcatgccgaccagctcggggaccagctcaaggcccggacctcatggctccgagatatgaaggccctgattcgaaaccgcagctacgtcttctcctccctggccacgtcggctgtctccttcgccacgggggccctgggcatgtggatcccgctctacctgcaccgcgcccaagttgtgcagaagacagcagagacgtgcaacagcccgccctgtggggccaaggacagcctcatctttggggccatcacctgctttacgggatttctgggcgtggtcacgggggcaggagccacgcgctggtgccgcctgaagacccagcgggccgacccactggtgtgtgccgtgggcatgctgggctctgccatcttcatctgcctgatcttcgtggctgccaagagcagcatcgtaggagcctatatctgtatcttcgtcggggagacgctgctgttttctaactgggccatcactgcagacatcctcatgtacgtggtcatccccacgcggcgcgccactgccgtggccttgcagagcttcacctcccacctgctgggggacgccgggagcccctacctcattggctttatctcagacctgatccgccagagcactaaggactccccgctctgggagttcctgagcctgggctacgcgctcatgctctgccctttcgtcgtggtcctgggcggcatgttcttcctcgccactgcgctcttcttcgtcagcgaccgcgccagggctgagcagcagtga

SEQ ID NO: 32299 - DNA, 3279 bp, Homo Sapiens
atgccgcgcaccgcctgcgcccgagctcgacgaggcctcgcacagccaatgggagggtccgggggcgggaactcggagtacgtgcgttgtgacgcaccgacggcgacgtcgggctgcaccgccgctgccggggccccaccttcccgtcgacccccgcgggaaggtcctggggctgccaccctcgttcccccgattggggccgcaggtgtgatggtcggctcccacgcggacatggcgccggcctctactgcggagggggccggggagaagccaggccctgcggcccctgccccggcggcccagtacgaatgtggggagtgtggcaagtcattccggtggtcgtcccggctcctgcaccaccagcgcacgcacacaggcgagcggccctacaagtgcccagactgccccaaggctttcaaaggctcctcggccctgctctaccaccagcgaggccacacgggcgagcggccctaccagtgccccgactgtcccaaggccttcaagcgctcctctctgctgcagatccaccgtagcgtgcacaccggcctgcgggccttcatctgcggccagtgcggcctggccttcaagtggtcgtcccactaccagtaccacttaaggcagcacacaggcgagcgcccctacccgtgcccggactgccccaaggccttcaagaactcgtccagcctgcggcgccaccgccacgtgcacaccggcgagcggccctacacctgtggagtctgcgggaagagcttcacgcagagcaccaacctgcggcagcaccagcgcgtgcacacgggcgagcggcccttccgctgcccgctctgccccaagaccttcacccactcctccaacctgctgctgcaccagcgcacgcacggcgccgcccccgccccgggtaccgcctccgcggccccgcccccccagtcccgggagcccggcaagctctttttggcggcggcggagaccacggtggagctggtgtaccgctgcgatggctgcgagcagggattcagcagcgaggagctgctcctggagcaccagccgtgccccgggcccgatgcggcgccccagccccaggaggcacccgccgaggcgcccaaggccgaccagccaccgtcccctctgccgcagccccctcctcccgccgccgcccccgcgcctggctttgcctgtctgccctgcggcaagtccttccggacggtggctgggctctcccgccaccagcacagccacggggctgccggcgggcaagcgttccgctgcggcagctgcgacggctccttcccgcagctggccagcctcctggcgcatcagcagtgccacgtggaagaggccgcggccgggcgcccgcccccgcaggctgaggctgcggaggtgacctgcccccaggaaccgctggcgcctgccgcccccgtcccgccgccacccccgtccgcccccgcttctgcggagcggccctacaaatgtgccgagtgcggcaagtccttcaagggctcctccgggctgcgctaccacctgcgggaccacacgggcgagcggccctaccagtgtggcgagtgcggcaaggccttcaagcgctcctccctgctggccatccaccagcgggtgcacacgggcctgcgggccttcacctgtggccagtgcggcctcaccttcaagtggtcgtcccactaccagtaccacctgcggctgcactctggcgagcggccctacgcctgcggggagtgtggcaaggccttccgcaacacgtcgtgcctgcgtcgccaccgccacgtgcacactggcgagaggccccacgcctgcggtgtctgcggcaagagcttcgcgcagacctccaacctgcggcagcaccagcgcgtgcacacgggcgagcggcccttccgctgcccgctctgccccaagaccttcacccactcctccaacctgctgctgcaccagcgcacgcactcggcggagcgccccttcacctgccccatctgcggtcgcggcttcgttatggccgcctatctgcagcggcacctgaggacgcacgccccggccaacacgcctcccagcaccacagcccctgccgccggcccccagccccctgctccactggctgctgcgcgggccccgccagccacccaagatgtccacgtcctgccccacctccaggccacgctctccctcgaggtggcggggggcacggcccaggccccgagcttggggccagcagcgcccaactctcagacgttcctcctggtgcaaactgcccagggcctccagctgatccccagcagcgtgcagccccctacacctccgccccctcccgcacctcccaagctcatcctgctgccctcctccagtgctggggctgggggcggccgtgcaaggcagggcccgcgggcagtggggaaagcgggccagggggcgggagtggtctggctgccaggccctgggggtctaggggtgcagggagcggccagcgctggggccagcgggacagggcagagcctcatcgttctgcagaatgtggggggtggggaggcagggccacaggaaatgagtggggtgcagctccagcccctccgaccagccccagaagtaaccacggtccagctccagccagcgcaggaggtgaccacagtccagctccagccagcacaggaagtaaccacggtccagctccagccagcacaggaggtgaccacggtccagctccagcccgtggccggccagctctccaattccagtgggggagctgtggctactgaggcacccaacctgctggttgttcagagcggggcagctgaggagttgctcactggcccgggccccggggaggcgggggatggcgaggccagcactggtgtggtccaggatgtcctctttgagacactccagacggacgagggcttgcagagcgtgctggtgctgagcggggccgatggcgaacagactcgactctgcgtacaggaggtagaaacacttcctcctgggctgacggagccgcctgccaccggcccacccggacagaaactcctcatcatccgcagcgccccagccactgagctgctggacagcagcaacactggaggaggcaccgccacgctgcagctcctggccccaccgccgtcaggcccagcctcgggccccgcggggctccccggggctccagcctcccagatggtgcaagtggtccccgcaggagctgggcctggtgttatgacccctcagggcctgccctccatccagattgtccagactctacccgcagtccagctggtgcacacgttttga

SEQ ID NO: 32300 - DNA, 1877 bp, Homo Sapiens
atgtacactgtcttgttggggagcggccaggctagctccaggccagttctcggtgtcctgggggacccagacatggagctgcgggaagaagcctggtctccggggccgctggattctgaggaccagcagatggccagtcacgagaacccagtggacatcctcatcatggatgatgacgacgtccccagctggcctcccaccaagctgtccccgccccagtctgcgcccccagccggcccgcctccccggccgcggccgcccgccccctacatctgcaacgagtgtggcaagagctttagccactggtccaagctgacgcggcaccagcgcacgcacaccggcgagcggcccaacgcctgcgccgactgcggcaagaccttctcgcagagctcgcacctggtgcagcaccggcgcatccacacgggcgagaagccctacgcctgcttggagtgcggcaagcgcttcagctggagctccaacctcatgcagcaccagcgcatccacacgggcgagaagccctacacctgccccgactgcggccgcagcttcactcagagcaagagcctggccaagcaccggcgctcgcacagcggcctcaagcccttcgtgtgcccgcgctgcggccgcggcttcagccagcccaagagcctcgcgcgtcacctgcggctgcacccggagctgtcggggcctggcgtggcggccaaggtgctggcggctagcgtccggcgggccaaggggcccgaagaggcggtggcggcggacggcgagatcgccatccccgtgggcgatggcgagggcatcatcgtggtgggcgcgccgggcgagggggccgcggccgcggcagccatggcgggcgcgggggcaaaggccgcggggccccggtcgcggcgcgccccggcccccaagccgtacgtgtgtctggagtgcgggaagggcttcgggcacggggccgggctcctggcgcaccagcgggcccagcacggggacgggctcggggcggcggggggcgaggagccggcccacatctgcgtggagtgcggggagggcttcgtgcagggcgccgcgctccggagacacaagaagatccacgcggtgggcgcgccctcggtctgcagcagctgcggacagagctactaccgcgcgggcggggaggaggaggacgacgacgacgacgaggccgcgggcgggcggtgccccgagtgccgcggtggggagggccggtaggggaggggcccgggggggggggcgggcagggcccctcgggcttggcgggagcgacgacgtgcaagaccaagagacccagggagaagcggacggggtgcgatggaccccgcggcatccccggctccccgccctcctctgtccctgcgccgtccgtgggggggcactggggcgtattagggcccgttcacttctccgcctcgagactctgccccctcagcctggcccgcccttcctaagttatcggcctgcgagccggagagacaatggagagaactgcagaggccgagtggcgaccaggccccaagcggaaggccattttccctgctcttcctcagttgtccggggcgggggtggggggtgctgcgaggaatggagaaaccaggccctttagaggatcccagagagggaagagaaccaggggcccttttctcttttagaattttcttttaatcagcccaccttttgactccccgcccgccccaatccattatttttttctgccttccgggtcccatccttagagctcgagtcgttccttcccctcctggattccgggtagcagaggcagcgccgcaggaggcgggtgcccgtttgtcccaggcctgggcgtggtggaggaaggggtgctggaacaataaacggcactatccaaa

SEQ ID NO: 32301 - DNA, 1413 bp, Homo Sapiens
gtaagcgcgaaagtgcttcccttaagcttctgaaggttggctgcagttccggctacctgtgtagtccgagtttccacagccaggtactactccgccagtgaccctggacagtaacaaaacatataaagcccgagcccaaaccccgccaccatcataggtctgtagttactgtggaatcaataagccatggcatctaagaaatttgctgttaaatgtgggaattttgctgtcctcgtggatcttcatatcttgccacaaggttcaaacaaagatacaagctggttttctgaacagaagaaagaggaagtctgtttactgttaaaagaaaccattgattcaagagttcaggagtacttggaagttcgcaaacagcacaggccatcaaatgcagaattcacaagatccaatcccttgtccttaaaaggttatggctttcaaatcacagcctatttcctcaagagagggatacgccttcgctgcatcaggagcacacagaatgctgaactctgtgtattccctgacagatttgtggtttgtgtcagtcagcttgcattcagtcgtgatcttttagcaagtcagaatgaagatttgacagaaagagttctccatggagtgtctgattactttgctgagtgtgcagagagttcacttcctcccagtgcaaagctccggagaaatgctctgaaagaaattgtgaaaagaactgaaacaaaaagcagtgtcacgagcaaatcgcagaccagaagagacactgtggaaacatctagtgactcagtgattgcagagatagcaaggaggaggaatgatggtcaggcttcctccagtcccccatcagaatccatgggacaagcaaaggattccataaaggcagctgagagccactgggggcttcctgttcaaaagctggaaaaagttaatcagacccagccagaagacactagtggccagcaaaaacctcatcctggggagcggttaaagacagggcttctaagcaggagccccgtctgtagctgtgagtcagcatcaccatgtccaaaacaaagtccacgagtggccaaaacccaacagaaacgcaggaactgcagctctgcggaagacttcgaccaccacgggagagtttctcttggaagtgatcgattagtcccgagagaaataatagtggaaaaaagcaaagctgtcagggttttgccagcttcagagttgtcagatccagggttacttttgaaacaagatttggcaaaaaccacgtctaaggaagagttgcatgttttggaaagtctctcctccagacatcttatgaaaaataacccagggcaggcacagcaaaccggcttagccacaaacactgaaagattatctacaattcagaacagcccaaccaagaaaagaaagaaatacgaaagaggccattaa

SEQ ID NO: 32302 - DNA, 2802 bp, Homo Sapiens
atggctccgccgcgccgcttcgtcctggagcttcccgactgcaccctggctcacttcgccctaggcgccgacgcccccggcgacgcagacgcccccgacccccgcctggcggcgctgctggggcccccggagcgcagctactcgctgtgcgtgcccgtgaccccggacgccggctgcggggcccgggtccgggcggcgcggctgcaccagcgcctgctgcaccagctgcgccgcggccccttccagcggtgccagctgctcaggctgctctgctactgcccgggcggccaggccggcggcgcacagcaaggcttcctgctgcgcgaccccctggatgaccctgacacccggcaagcgctgctcgagctgctgggcgcctgtcaggaggcaccacgcccgcacttgggcgagttcgaggccgacccgcgcggccagctgtggcagcgcctctgggaggtgcaagacggcaggcggctgcaggtgggctgcgcacaggtcgtgcccgtcccggagcccccgctgcacccggtggtgccagacttgcccagttccgtggtcttcccggaccgggaagccgcccgggccgttttggaggagtgtacctcctttattcctgaagcccgggcagtgcttgacctggtcgaccagtgcccaaaacagatccagaaaggaaagttccaggttgttgccatcgaaggactggatgccacgggtaaaaccacggtgacccagtcagtggcagattcacttaaggctgtcctcttaaagtcaccaccctcttgcattggccagtggaggaagatctttgatgatgaaccaactatcattagaagagctttttactctttgggcaattatattgtggcctccgaaatagctaaagaatctgccaaatctcctgtgattgtagacaggtactggcacagcacggccacctatgccatagccactgaggtgagtgggggtctccagcacctgcccccagcccatcaccctgtgtaccagtggccagaggacctgctcaaacctgaccttatcctgctgctcactgtgagtcctgaggagaggttgcagaggctgcagggccggggcatggagaagaccagggaagaagcagaacttgaggccaacagtgtgtttcgtcaaaaggtagaaatgtcctaccagcggatggagaatcctggctgccatgtggttgatgccagcccctccagagaaaaggtcctgcagacggtattaagcctaatccagaatagttttagtgaaccgtagttactctggccaggtgccacgtctaactagattagatgttgtttgaaacatctacatccaccatttgttatgcagtgttcccaaatttctgttctacaagcatgttgtgtggcagaaaactggagaccaggcatcttaattttacttcagccatcgtaccctcttctgactgatggacccgtcatcacaaaggtccctctcatcatgttccagtgagaggccagcgattgctttcttcctggcatagtaaacattttcttggaacatatgtttcacttaatcactaccaaatatctggaagacctgtcttactcagacagcaccaggtgtacagaagcagcagacaagatcttccagatcagcagggagaccccggagcctctgcttctcctacactggcatgctgatgagatcgtgacatgcccacattggcttcttccacatctggttgcactcgtcatgatgggctcgctgcatctccctcagtcccaaattctagagccaagtgttcctgcagaggctgtctatgtgtcctggctgcccaaggacactcctgcagagccatttttgggtaaggaacacttacaaagaaggcattgatcttgtgtctgaggctcagagcccttttgataggcttctgagtcatatataaagacattcaagccaagatgctccaactgcaaatataccaaccttctctgaattatattttgcttatttatatttcttttctttttttctaaagtatggctctgaatagaatgcacattttccattgaactggatgcatttcatttagccaatccagtaatttatttatattaatctatacataatatgtttcctcagcataggagctatgattcattaattaaaagtggagtcaaaacgctaaatgcaatgtttgttgtgtattttcattacacaaacttaatttgtcttgttaaataagtacagtggatcttggagtgggatttcttggtaaattatcttgcacttgaatgtctcatgattacatatgaaatcgctttgacatatctttagacagaaaaaagtagctgagtgagggggaaattatagagctgtgtgactttagggagtaggttgaaccaggtgattacctaaaattccttccagttcaaaggcagataaatctgtaaattattttatcctatctaccatttcttaagaagacattactccaaaataattaaatttaaggctttatcaggtctgcatatagaatcttaaattctaataaagtttcatgttaatgtcataggatttttaaaagagctataggtaatttctatataatatgtgtatattaaaatgtaattgatttcagttgaaagtattttaaagctgataaatagcattagggttctttgcaatgtggtatctagctgtattattggttttatttactttaaacattttgaaaagcttatactggcagcctagaaaaacaaacaattaatgtatctttatgtccctggcacatgaataaactttgctgtggtttactaa

SEQ ID NO: 32303 - DNA, 5866 bp, Homo Sapiens
atgcggcacggcgtcgcctgggcgctgctggtggccgcggccctggggcttggggcgcgcggggtgcgcggcgcggtggcccttgccgacttctacccgttcggcgccgagcgcggcgacgccgtcacccccaagcaggacgacggcggctcggggctgcggccgctctcggtgcccttcccgttcttcggtgccgagcactccggactctactctgggggctggccgctcaggctcagactctccaaacaggactcccagtgggactcctggggccagggactcatgacagcaggctcagctcagctgaaggaacaggcccgagtgccggttctgtctccatggctcccagagtgtgaccccaggccaagcccttatggcagcccagggaatgaaatgcacctggtgaacaacaacgggatcatctccttcctgaaggaggtttctcagttcaccccagtggccttccccattgccaaggaccgctgcgtggtggcagccttctgggcagatgtggacaaccggcgtgcaggcgacgtgtactaccgggaggccaccgacccagccatgctgcgccgagccacggaggacgtcaggcactacttccccgagctcctggacttcaatgccacctgggtttttgttgccacctggtaccgagtgaccttctttggaggcagttcctcatcccctgtcaacacattccagactgtgctcatcacagacggcaagctctccttcaccatcttcaactatgagtccatcgtgtggaccacaggcacacacgccagcagcgggggcaacgccactggcctcgggggcatcgcagcccaggctggcttcaacgcaggcgatgggcagcgttacttcagtatccccggctcgcgcacagcagacatggccgaggtggagaccaccaccaacgtgggtgtgcccgggcgctgggcgttcagaatcgatgatgcccaggtgcgcgtggggggctgcggccatacaacgtccgtgtgcctggccctgcgcccctgcctcaacggcggcaagtgcatcgacgactgcgtcacgggcaacccctcctacacctgctcctgcctctcgggcttcacggggcggaggtgccacctggacgtgaacgaatgtgcctcccagccctgtcagaatggtgggacctgtactcacggcatcaacagtttccgctgccagtgcccggctggctttgggggacccacctgtgagacagcccaatccccctgtgacaccaaagagtgtcaacatggtggccagtgccaggtggagaatggctctgcggtgtgtgtgtgccaggccggatacaccggagcagcctgcgagatggatgtggacgactgcagccctgacccctgcctgaatggaggctcttgtgttgacctagtggggaattacacctgcttgtgtgccgagcccttcaagggacttcgctgtgagacaggagaccatccagtgccagacgcctgcctctcggccccttgccacaatgggggcacctgtgtggatgcggaccagggctacgtgtgcgagtgccccgaaggcttcatgggcctggactgcagggagagagtccccgatgactgtgagtgccgcaacggaggcagatgcctgggcgccaacaccaccctctgccagtgccccctgggattctttgggcttctctgtgaatttgaaatcacagccatgccctgcaacatgaacacacagtgcccagatgggggctactgcatggagcacggcgggagctacctctgcgtctgccacaccgaccacaatgccagccactccctgccatcaccctgcgactcggacccctgcttcaacggaggctcctgcgatgcccatgacgactcctacacctgcgagtgcccgcgcgggttccacggcaagcactgcgagaaagcccggccacacctgtgcagctcagggccctgccggaacgggggcacgtgcaaggaggcgggcggcgagtaccactgcagctgcccctaccgcttcactgggaggcactgtgagatcgggaagccagactcgtgtgcctctggcccctgtcacaacggcggcacctgcttccactacattggcaaatacaagtgtgactgtcccccaggcttctccgggcggcactgcgagatagccccctccccctgcttccggagcccgtgtgtgaatgggggcacctgcgaggaccgggacacggatttcttctgccactgccaagcagggtacatgggacgccggtgccaggcagaggtggactgcggccccccggaggaggtgaagcacgccacactgcgcttcaacggcacgcggctgggcgcggtggccctgtatgcatgtgaccgtggctacagcctgagcgcccccagccgcatccgggtctgccagccacacggtgtctggagtgagcctccccagtgccttgaaatcgatgagtgccggtctcagccgtgcctgcatgggggctcttgtcaggaccgcgttgctgggtacctgtgcctctgcagcacaggctatgagggcgcccactgtgagctggagagggatgagtgccgagctcacccgtgcagaaatggagggtcctgcaggaacctcccaggggcctatgtctgccggtgccctgcaggcttcgttggagtccactgtgagacagaggtggacgcctgcgactccagcccctgccagcatggaggccggtgtgagagcggcggcggggcctacctgtgcgtctgcccagagagcttcttcggctaccactgcgagacagtgagtgacccctgcttctccagcccctgtgggggccgtggctattgcctggccagcaacggctcccacagctgcacctgcaaagtgggctacacgggcgaggactgcgccaaagagctcttcccaccgacggccctcaagatggagagagtggaggagagtggggtctctatctcctggaacccgcccaatggtccagccgccaggcagatgcttgatggctacgcggtcacctacgtctcctccgacggctcctaccgccgcacagactttgtggacaggacccgctcctcgcaccagctccaggccctggcggccggcagggcctacaacatctccgtcttctcagtgaagcgaaacagtaacaacaagaatgacatcagcaggcctgccgtgctgctggcccgcacgcgaccccgccctgtggaaggcttcgaggtcaccaatgtgacggctagcaccatctcagtgcagtgggccctgcacaggatccgccatgccaccgtcagtggggtccgtgtgtccatccgccaccctgaggccctcagggaccaggccaccgatgtggacaggagtgtggacaggttcacctttagggccctgctgcctgggaagaggtacaccatccagctgaccaccctcagtgggctcaggggagaggagcaccccacagagagcctggccaccgcgccgacgcacgtgtggacccggcccctgcctccagcaaacctgaccgccgcccgagtcactgccacctctgcccacgtggtctgggatgccccgactccaggcagcttgctggaggcttatgtcatcaatgtgaccaccagccagagcaccaagagccgctatgtccccaacgggaagctggcgtcctacacggtgcgcgacctgctgccgggacggcggtaccagctctctgtgatagcagtgcagagcacggagctcgggccgcagcacagcgagcccgcccacctctacatcatcacctcccccagggatggcgctgacagacgctggcaccagggaggacaccaccctcgggtgctcaagaacagaccgcccccggcgcgcctgccggagctgcgcctgctcaatgaccacagcgcccccgagacccccacccagccccccaggttctcggagcttgtggacggcagaggaagagtgagcgccaggttcggtggctcacccagcaaagcagccaccgtgagatcacaacccacagcctcggcgcagctcgagaacatggaggaagcccccaagcgggtcagcctggccctccagctccctgaacacggcagcaaggacatcggaaacgtccctggcaactgttcagaaaacccctgtcagaacggaggcacttgtgtgccgggcgcagacgcccacagctgtgactgcgggccagggttcaaaggcagacgctgcgagctcgcctgtataaaggtgtcccgcccctgcacaaggctgttctccgagacaaaggcctttccagtctgggagggaggcgtctgtcaccacgtgtataaaagagtctaccgagttcaccaagacatctgcttcaaagagagctgtgaaagcacaagcctcaagaagaccccaaacaggaaacaaagtaagagtcagacactggagaaatcttaaggatttaagacgttcttgttacactccaccaacctcacgagtttctaacacccaggaagatgaggtctaaaaactggatgaaaaaggacaccctgagaaaaggtcctagctggagtcagtcccctctgtgacctctctcctcaggcctctagaggacagatggccaggcctgtgcacacaccagcccaccctgagagacccctctgggaccaaccacctgtgagtcctgcgatgcgtttaagcagcctgtgccctcacccaagctgcagttcctgaaggtgtagtctgtgtctctgcggatgagatgacagctcgccattccccggaatcagtgaggctgtcagtcagccacgcttctgcagtatgcagaaacctgttcttagactccaaagccagagaaagaattctcccttcgaggcccaacaaattgagaaggaactgtgatggaccacttccaaaacagagacgggggcaggggctgaagggcagagaccaggtgatgtcagaaggaaagccgggttgcagacacagccgcccctgctctggtcctccagcgtgtttatgacgctcgtgcaggtcgacgagccatcctatggactagttaacactaaggtggagttcagacttttttagacaacggcgcgactggcagcctttctctatcaagggtcagacggtaaacgttttcagctttgcagaccagaggtccctgtggctacagtagcgcagacacagccacaggcatgtcattgaatggctgcggctatgttccaataaaaacttatttacaataacaggtggtggccaaattggcccatgggccttatttggtgaaccctgttctatgagatcacctaggcttcagccttaaacagtggaagccatcccctgaatgacaagtcacaagggtatcaaagaaagacccctgaattttcatggaaaaagctattcagacccctgcttggaaagctaaggcacactgccacgaagcagcaaggacgccttacaagtctcagtgcaacagagatggacacctgggctgggctggacaatgtttaaggttccttttagtccatgactcaagtgatactgttttaggctatcaggtagtaaacacgatcttagacatccccatctttgtaagcagaacagtacggcacttcaccacatctgcttcccaccatgcttctaagcagctgtcttccccctgctaatgttacaaccaaagcagccaccccacctcctctcgtgttgagcctcacgaccgctgacccagctggaaagccagcgccctgccgcgtcaccctgactctgctcagagccagcattccagccacaaagagggcctccttcctttcctctttcataaaaatgttttttgaagagttagagtatattttaggctttttatctttattaaaatttcatgtgc

SEQ ID NO: 32304 - DNA, 4232 bp, Homo Sapiens
atgcaacccgtttggacactggagatcaaccttacatcaataaagcagaatgtgactttggaggccacagaagagcgcagcgcgccggccgctaccagccgcgccggagcccctgcgccctgcggcccgctccccggggaccgggccggcgccatggaccgaggccaggtgctggagcagctgctcccagagctcaccgggctgctcagcctcctggaccacgagtacctcagcgataccaccctggaaaagaagatggccgtggcctccatcctgcagagcctgcagccccttccagcaaaggaggtctcctacctgtatgtgaacacagcagacctccactcggggcccagcttcgtggaatccctctttgaagaatttgactgtgacctgagtgaccttcgggacatgccagaggatgatggggagcccagcaaaggagccagccctgagctagccaagagcccacgcctgagaaacgcggccgacctgcctccaccgctccccaacaagcctccccctgaggactactatgaagaggcccttcctctgggacccggcaagtcgcctgagtacatcagctcccacaatggctgcagcccctcacactcgattgtggatggctactatgaggacgcagacagcagctaccctgcaaccagggtgaacggcgagcttaagagctcctataatgactctgacgcaatgagcagctcctatgagtcctacgatgaagaggaggaggaagggaagagcccgcagccccgacaccagtggccctcagaggaggcctccatgcacctggtgagggaatgcaggatatgtgccttcctgctgcggaaaaagcgtttcgggcagtgggccaagcagctgacggtcatcagggaggaccagctcctgtgttacaaaagctccaaggatcggcagccacatctgaggttggcactggatacctgcagcatcatctacgtgcccaaggacagccggcacaagaggcacgagctgcgtttcacccagggggctaccgaggtcttggtgctggcactgcagagccgagagcaggccgaggagtggctgaaggtcatccgagaagtgagcaagccagttgggggagctgagggagtggaggtccccagatccccagtcctcctgtgcaagttggacctggacaagaggctgtcccaagagaagcagacctcagattctgacagcgtgggtgtgggtgacaactgttctacccttggccgccgggagacctgtgatcacggcaaagggaagaagagcagcctggcagaactgaagggctcaatgagcagggctgcgggccgcaagatcacccgtatcattggcttctccaagaagaagacactggccgatgacctgcagacgtcctccaccgaggaggaggttccctgctgtggctacctgaacgtgctggtgaaccagggctggaaggaacgctggtgccgcctgaagtgcaacactctgtatttccacaaggatcacatggacctgcgaacccatgtgaacgccatcgccctgcaaggctgtgaggtggccccgggctttgggccccgacacccatttgccttcaggatcctgcgcaaccggcaggaggtggccatcttggaggcaagctgttcagaggacatgggtcgctggctcgggctgctgctggtggagatgggctccagagtcactccggaggcgctgcactatgactacgtggatgtggagaccttaaccagcatcgtcagtgctgggcgcaactccttcctatatgcaagatcctgccagaatcagtggcctgagccccgagtctatgatgatgttccttatgaaaagatgcaggacgaggagcccgagcgccccacaggggcccaggtgaagcgtcacgcctcctcctgcagtgagaagtcccatcgtgtggacccgcaggtcaaagtcaaacgccacgcctccagtgccaatcaatacaagtatggcaagaaccgagccgaggaggatgcccggaggtacttggtagaaaaagagaagctggagaaagagaaagagacgattcggacagagctgatagcactgagacaggagaagagggaactgaaggaagccattcggagcagcccaggagcaaaattaaaggctctggaagaagccgtggccaccctggaagctcagtgtcgggcaaaggaggagcgccggattgacctggagctgaagctggtggctgtgaaggagcgcttgcagcagtccctggcaggagggccagccctggggctctccgtgagcagcaagcccaagagtggggaaactgcaaataaaccccagaacagcgttccagagcaacctctccctgtcaactgtgtttctgagctgaggaagaggagcccatccatcgtagcctccaaccaaggaagggtgctacagaaagccaaggaatgggaaatgaagaagacctaggaagaggatgaggatttcattccaaaggaaataccagcttgtccacctgaggaagaaatgcttttttcacaaggagacaccaagagaagactaggaagtagccctcgttctccagggcacccaaaataccagcctttattgtctgcatgattttaggggatatggggagggaacaagtagaagggaagagggaaatggagagcatccttatgactttacaaagggtggaaatgaggatggagggatacagaagtctgcacagctgtaaaggttttatagatgtctttgccttcccttctgaggaagggaagaagtaatgaaagcacatgtgaataaccccttccatcccattcacagcatcgcactcccagtccttaaggcaaagggaggcagtgctgaagcattggtggtgcagtgtaaagagacaagacctgatcatctgatcacacttgtgccaacttgattcatattgggcattactaacaacccctggtcaaggtaaataggttgaacaatcaataacattatccctgcctgcatacatgtgaacaaaagctatagaggacatgcaaattctacagtcattcctcatatgctttagacagagtgcagctactggaatcttccagatttcagtgttttaaaatcagagctctgaatacacaaaaggaaagagaaatggagcagctgacatattttaagctcacagtgatactcagtgacaggagcacagagctctaatgtccacaggatgttgtagggtagggtctctcagtaaatcaagtcccttacctatgttctgacactgaggctcttggagctatgggttagaaatccaggaggcaatatgtctttattctaatgaagtcctcatcttgcactcagaggcccactagtttgcccttctatatattaagtaaaaccaagagaaattaagaggatgatggcttctttctgtcacatgggtgctaaaccttttacaaacacttgatacttctatagagggaccaaggacctcaagtcctgggcagtctccttactgtgctactcactactgtctcaacactgtagtgagtctgtctttaacacatttccttccaataaagataaaaccacttaactcttaagtgccagtgcttagctcaagaggaaagaaggaaaatcccagaataaccgtggccactttgctataggggttacatattttaacccacctaaggttttacagactttagcctcactcaaactttatcaccctctgaggtagctggagaccacagcaggaaaaataacctgaccagtaatcacccactgattagtggcagagcgtaggacttaggggttataagcccagatccagatagggctaggtttgagccatgcctctaatgaccagctgggtgaccttgggaaagtcacttgattgctctgattcttgttttccttatctgtgaaatgggactaacaattgttacttttctcccaagattgttgggaagatttaataagataatatatagtaggcatcttgcatagtgtctgagaaataagaaatgctcagtcaatagtggctctcattagccaggcatggtggtactcgcctgtagtcccagctactcaggaggctgaggcaggaggaccgcttgagcccaggagtttgagactgtagtgcactatgatcacgcctgtgaattgccactgcactccagcctaagcaaatagcaagaccccatctattaaaaaaaaaaagtggctattattagctatatcag

SEQ ID NO: 32305 - DNA, 1175 bp, Homo Sapiens
atggaaacccagctgccatcgctatgtctctgcaaaagacccctccgacccgagtgttcgtggaactggttccctgggctgaccggagccgggagaacaacctggcctcagggagagagacgctaccgggcttacgccaccccctctcctcaacacaagcccaaactgctacccgcgaggtgcaagtaagcggcacctcagaagtgtctgcgggccctgaccgggcgcaggtggtggtgcgagtgagcagcaccaaggaggcggcagccgaggccaaaaagagcgtttgtcgccgtctagattacatcacgcagagcctccagcagcagggcgtgcaggcagaaaatataactgtgacaaaggattttaggagagtggaaaatgcttatcacatggaagcagaggtctgcattacatttactgaatttggaaaaatgcaaaatatttgtaactttcttgttgaaaagctagatagctctgttgtcatcagcccaccccagttctatcatactccaggttctgttgagaatcttcgacggcaagcctgtcttgttgctgttgagaatgcgtggcgcaaagctcaagaagtctgtaaccttgttggccaaaccttaggaaaacctttactaatcaaagaagaagaaacaaaagaatgggaaggccaaatagatgatcaccagtcatccagactctcaagttcattaactgtacaacaaaaaatcaaaagtgcaacaatacatgctgcttcaaaagtatttataacttttgaggtaaagggaaaagagaagagaaaaaagcacctttgaaattccaaacaaattatattgtacttgtatctttttacctatttttatactttttataatgtttacgtttgtcctgaatatatatatatatatatatatatatatatatatggtataggagataagctatttctttccaaaatctataaatctttgaatatagtcccacagaatacttatgttcactttctatttttaaaagactactctgaaaaacactcttggataataaatgtattatgtgcatacttatatactgacagttcatacaagcacatgtgtaatatttctattataaggacagatattgacccttgcatttcataatttttaaagatatttaagctaaaattttctcagccacatttt

SEQ ID NO: 32306 - DNA, 4961 bp, Homo Sapiens
gccgctagccagcggaagatggcggagggcggaggccctgagcccggcgagcaggagaggaggtcttccgggccgcggcctccgagcgcgcgggatttgcagttggccttggcagaattgtatgaagatgaagtgaagtgcaaatcttccaagtctaatagacctaaagccacagtcttcaagagcccacggacaccacctcaacggttttactcaagtgaacatgaatacagtggattaaatatagttcgaccttcaactgggaaaattgtgaatgaacttttcaaagaggcaagggaacatggggctgtccctctgaatgaagccacaagagcttcaggtgatgataaatctaagtcatttacaggtggaggatacagattgggtagttctttttgtaagcggtctgaatatatctatggagaaaatcagctgcaagatgttcagattttgcttaaactgtggagcaatggtttcagtttagatgatggagaattgagaccttacaatgaaccaacaaatgctcaatttctggagtctgttaagagaggagagattcccctggagcttcagcgccttgttcatggtggccaagtgaatttggatatggaggatcatcaggatcaagaatacataaaacctagattgaggttcaaggcttttagtggagaagggcaaaaacttggaagccttacacctgaaatagtcagtacaccttcctctccagaagaggaggataaatcaatacttaatgcagttgttcttattgatgattcagtgccaacaacaaaaattcaaatcaggttagcagatgggagtcgtttgatacaaagattcaatagtacacacaggatcctggatgtccggaactttattgtacagtctcgtcctgaatttgcggctcttgactttattcttgtgacttcatttccgaataaagagctaacagatgaaagcctgacactgctagaagcagatattcttaacactgtgttactccagcaactaaaataatattgttcctgtccatgcagtagcatgtgggaatagatgatgtgccgtattaataaggacaatacttcagcattaaaaacagccaaattatttttattatttttacagataaattttggttttattgttattctgtcttccaatctgaatatagacaaatttggattaggaatagaccttgagataagtatgtttgagtttttagttgaaggactggcttatgttgatagtttttggatttctaggcaaatgagttgttacatgcttagtgttaatgtaacaacatttgtttgcagagaaaaatgaacaaaacccctttttgataaatgcatttggtaaaatttgcactaaagtttcttgatgcagcattgaccaacagccattaagaaatcttttgatcaaataagttgaaaatttgtctataatatatactgaaacgtgtcttttgattttgaaattgtttgatcatacaataattatttctcctattaagattttacacatcctttttacttactgatttagatatattactagtatcagaaactacagttttgccttgtattttacagaattatgactgttgtgaacttaaacagaaacacataaaggtcagcaattctttttttttttttttttgatatggagttttgctcttgttgcccaggctggagtgcaatggcataatttctgctcaccgcaacctccgcctcccaggttcaaaagattctcctgccttagcctcccaagtagctgggattacaggcatgcgccaccatgcctggctaatttttgtacttttgctagagacagcgtttctctgtgttgatcaggctggtctcgaactccgaacctcaggtgatccacccacctcagcctcccaaagtgctgggattacaggcatgagccaccacgcccagcctaaaggtcagcagttcttaagaagatatggtaaacagcaacaatattttaaaatcaagtaattacagttcctcccagagcttgcgttgatcacattcatttattcattcaacacatttttctaggaaactcactgtatacactaaacactattctgtgtgctcaacctagaatgtcttctccagaacaagactagtgtagaaatacaggaatgtaaattctgtcagacggactagatctaaagaattaccagcataaatgtttgcatttctgctgaagccagaagcttttccttcttcctagacaccatttcatccttaattattacttctggttagttttccattgccaccataacaagttacaaaatgtggcttaaaatagcacaaatttattatcttcacaattctgtaggttaggagtccaggttaagagtttcgcggtgccaagatcaatttgttggcagggttgcattctgttaggaggctctacaggagaatcatttccttgtcattccaccttctacaggacatcctcattccttggcttgtgacctccttcttccatcttaaaaaccagtgctgtttcatctctatgacccttctgttaccacatctctctgacaccagtgtggagaggttctctgcaggactcatgattaaatgaggcccaccggatatccaatctaggcttatctccttgtcttgaaatccatagtaaccttaattacatctgcaaaatctcttttaccatctaaggttacatacaggtttggagattaggacattaacattttacatggaacattattcttgcctactacagttcccacccaccccccgctccactcctgtgttaaagattcagattcatcacaaataaatttacatcactcataggtgctcaaaagtcacaatccattattacagcatcaactctaaatccaaaatcttatctgagtctcaccaactcaaaagtctcaaatctcacattgaagccatctaaattaagtttgggagaggatctgtgtgtgatttctgggacataattccaactgtgcacttgtgaacctagaaaacaagttatctgttcccaagtatgatggcatgacaggcagacaataatagttacacacgttcctgttcaaaaagcagaaacagatggaaaaaggagccatcagcaccaatcaatttacaaaaccagcgaggcacccttctttaagtttcaaggcctgggagtaatcttcagctcactgctgttctctgggcttgttgactgtctcagagtcatctttactttttcacaaaaggtagcacacgtttgcagctgagtatcaacttatcagtttgttcttcttttatattctctaaagctttctgttaaaaatggtggtgcttctgctgctataacgttgtcaagaaacttgtgggtcttttacatatgtcacagggatgcactcatttagataggaggctcctcacgtatctttcctggaaaatcctgtctctgtttttggctttttctgaaatagctgagaggatctatgattcacacccttaatatcttcaaagagtcttgtgtgtgacctgatattcagaccttttgatgtttctgaagtattagcaaaaggttatacagccatatcttcatcactttctctagagtaaaggctgtcctgacggtgaatcttagttttagtggcttttgccatttgaataggccgcgaatttcccaaatcatcaagtcctggtttctttatatttaacaggtcttccctcaatctacctctttccacattttactataatcagcaagaagacagcaggctgtaccttccacagcttgcttggaaatatcctcagctaaatattgaagtcatcacttaaaagttctgctttacacataacggcaggacacaactcagcttagcttttcgccactatgtaacaaggactcctttcctccacttctccagtaacatattcctcattttttaccaacagtctattcatgatgatttagatattctatggcaatcgaggtattctctattatgctcctttcttcaaggccgccctagcattaacattccatatttctactaacagtctgtttaaggcagtttagcttcttttctggcatgctcctcagaattcttccagcctccacctactgcccaattccagagccacttttctacttttaggtatttgttacagcagcacctcaagtacctagaaaactcttttatgcctgcttctctgccagatgacttgaatatggtactagatttggaattcacctttctccagggtcactgtttatttcaaagaggtgaatttacctgtgctagggttttcacactgggagtgctaccagaactaccacaggatgaaagtggtgagcccaccactgcagagaagttttctcagtgccgtaatatagaggaattctcaaaataagccctactccttttcacttactgaaaacaacttggataatgtgtaacagccagccccatttcaaaaagattaccaggggtaaaacaactttttcatgggtcaaaatcatcttccgaagaaaatgatttcttaaaagaattgaacattgtaaatcaaagggcattgtcctgttttggattaacaaaacaggaaaaataaccaatccttgtaaaattatttgaaattttcttgtttttatcagttgagtgcctatagatgcacatacaaaaacaactgccatttttgtatataatagtcttccaagatagagatttacattaggagagaattaaacatccaggagggatgaacagtatttcatgtgtgctatgtagtgttttgcttcattgagagtcattttcatgaattatttttactactgcagtcatcttaaatttataatcatctcaaaaaagatgtcacaatgaacagacaaccatctgtgaggtcagtcattttgcatgatgtatgtaatcaaaaagtttgaaatgtctgcttactaataaagaatgttttcactgaaac

SEQ ID NO: 32307 - DNA, 2235 bp, Homo Sapiens
cgaggagccgcggcggctcaggagcgggtggtgggcgtctgaaaagtcgccaccatgaggaagctcttcagcttcgggagacgcctgggccaggcgctcctggactccatggaccaagagtacgctggtcgggggtaccacatccgggactgggaactgcggaagatccacagggctgccatcaagggcgacgccgcggaggtggagcactgcctgacgcgcaggttccgggacttggacgcccgcgacagaaaagacaggactgttctacatttgacctgtgcccatggccgtgtggaagtggtcaccctcttgctgagcagaagatgccagatcaacatatatgatagactaaacaggacacctttaatgaaggctgtacactgccaggaagaggcttgtgccattattctcctggaacatggcgccaatccaaacattaaggatatctacagcaacactgctctccattatgctgtgtataataaggggacttcactggcagaaaaactgctttcccaccatgcaaatattgaagcactaaacgaggagggaaacactccacttttgtttgctataaattctaggagacagcaaattgtggaatttctgttgaagaaccaggcaaatttacatgccattgacaatttcagaagaacagccctcatgcttgcagtacagcataactcatcaagtatcgtcagcctcctccttcaacaaaatataaatatcttttctcaagacctgtttggccagactgccgaggattatgctgtttgttataatttcagaagcattcaacaacaaattttggaacataaaaataagatacttaaaagtcatctttgaaatgataatcaagaaacagcagctatgaagccttgaattttgaaaaaaagacaagaaggtgcaaaagtctttaatcctggcagggattcacgggcgcacacacacacactcaggattcagatcttgttgaaagctgcgatatcgacactctgcacgtgctcctcaaacttggtgatctcctccagcaagtctgtccccaccttgtcgtcctccaccacacactgaatctgtagcttccggataccgtagcccatgggcaccagcttggaggccccctagaccagctcttccagctggatggagcacacacaggcctccagctgggccatgtcagtctcatcgtcccaaggcttgaaatccagcaggatggaggacttggccaccagttcaggcttcttggccttcttctccgcgtactgctgcagccgctcctcctgcagctgtgccgccttcttgtcctcctcctcattgtcgctgccaaacaggtcagcaccggccacaggcccattcatctgctcgtagaatctcctttctgcgtcgtcatatttgaacttgtcgaaccagatcttctcatgtactaggaagtttgtagccatttttctgacgcctgccaaggacgcgacgaccagggaggaggaatcggcggacgcgggacacctgaggaaagggtactaccttaaaaatcttttcctatagtcttggtaaattttaaatgatagctctataaatgatatttataagttatggttatttttttttttagtttttcattaattttgatcaattgtatcttactaggagatcacccatttactgtaggtagtattctcttcctactatatttcatatctacctactacatttcatatcattcctactacatttcatatctacctacatttacatgtaggtagatatgaaatgattcaatatccatgtctccttttactcattacaaatcttacataattttgctctctcttatctctttaccttactcgggtttatgtgaggtatttagtttactaaggttttaaaatattttcatattcattttagtaggaaaaggacggattattttataaatttcattgcctgaataagtttaggtatggtttcgggtacaataagaaagagataaaatggaatgctttatgccaaacatgtttatttttatcacacagctaaagtctgtagttaagttgctgctacttttgagtcaataacatcaagaccagtgttggtgaatcttttggcctttccccaatgcttgaaagaagatcaccactgctggaggcataatgtacaaggcaggaaaagggatggaattgatggtgacagctaagtctgtcttttttcttaggaaataaaggttttcctaggata

SEQ ID NO: 32308 - DNA, 3001 bp, Homo Sapiens
cgcaccccggcaagcagcagcgggccgcgacgcccagcctgccagtgagctgcgacgggcacaccccggagcgtcggcgactgcggacaggttagagtgggggcaggggcgggcgcgggagcagcccagggccagagagggagcccgagccaggccatctccaaccatgtccgacgaggcctcggccatcacttcctacgagaagtttctaacccccgaggagcccttcccactcctgggacctcctcgcggggtgggcacctgcccgagcgaggagccgggctgcctggacatcagcgacttcggctgccagctgtcctcctgccatcgcaccgacccgctccaccgcttccacaccaacaggtggaacctaacttcttgtggaacaagtgttgccagctcagaaggcagtgaggagctgttttcatctgtgtctgttggagatcaagatgattgctattccctgttagatgatcaggacttcacttcttttgatttatttcctgaggggagtgtctgcagtgatgtctcttcttctattagcacttactgggattggtcagatagcgagtttgaatggcagttaccaggcagtgacattgccagtgggagtgatgtactttctgatgtcatacccagtattccaagttcaccttgcctgcttcctaaaaagaaaaacaagcaccggaatttagatgaactcccttggagtgcaatgacaaatgatgagcaggtggaatatattgagtatctgagtcggaaagtgagtactgagatgggtcttcgggagcaacttgatattattaagatcattgatccttctgctcaaatctcccctacagacagtgagtttattattgaacttaactgtctcacagatgaaaaactgaagcaggtcagaaactatatcaaggaacatagccctcgccaacggcctgcaagagaggcctggaagagaagcaactttagttgtgcaagcaccagtggagtgagcggtgccagtgccagcgccagcagcagcagtgccagcatggtcagttctgcaagcagcagtgggtccagtgttggaaactctgcttcaaactccagtgccaacatgagtcgagcacacagtgacagcaacctgtctgcaagtgcagcagagcggattcgggattcaaaaaagcgatccaagcagcggaagttacagcagaaggccttccgcaagaggcagctgaaggagcagaggcaggcccggaaggagaggctcagtgggctcttccttaacgaagaggtgctgtccttgaaagtgactgaggaagaccatgaagcagatgttgatgttttgatgtaataagggtgaatttatcaacgttctttgtgagcattaaaatactccatccttatgggtttacatgcatcttgaccaaaattttggttagggctgtgctgatgtaccattaataatttaagccagtggttcttggcaggtgatcccaagacctgcagcttcagcatcacttgagaagttgttaggaatgcatactagtgggccccgcccccagacatagtgaatcagaaaccaacagggaggcgcctagcattgtttttttaacaagtgctgggttattctgatgcacagtctagtttaagaaccactactttgggtaaacgttttgactgtttaaagtttatggcggtgaagtgggcgtcttcaaagactagtacttacacagtttagaagatttcaaggtactgctgacagtagtttattatgtcagtatacatacatgtgtagagatcataatttagttcccttcttaatgttacaatttcttagtttacttttcctaaagggccatagcataattcttgattcctggtggaaatcttttctgaggtgtgggggtgggcaaggtgtggattgctgtttacgatagtgccttcattagttttagttctgtctgttttcattcattattgactcaaaggtattagaacaggcccttatctttttcctattagatttatttttgttttttactttatgtaagttcagaatccttttttaagtgatgactactgatgaaataatgttactagtagctgaattttagacttgatgctatgttgattaatatttaaatggtgaaagtaattaggcaaaataagcaattctgcttttctgttgctttcagaatttttaggctgtaaaattgtctcaggcaggaagtcagtctatatctctctcaagttcttattgtaggtcatttttttttcagcacagctctaatttttaaatatttggtataacagcttctggcatgtgacctagttaatgttgaaaattaactgatgaaaacccttgtagatctgctaaacttctctataaattgctagaaatatacagagcaatgagatatagaaaacaccttagcttgttggttattaatagagctctaattttaactgtgaaatcatggagtttctttaaatgttttcctagagtgtttgttatcatgaacattagaaatagcattattccttttcttctaccacatgtcttgaacattcacatgggttaaagaagatggaaactgatactactgacaatcaagctgctttctgactttcataattttctttatattgtggatagcattttgaaggtgaccgtgattctgtaggaagagctgtaatcaatatttttcaaactctaagagtacagaggttagtaagatttcttttttttttactttttgttacgtcaagtagcttattaagaaaaagattcatgacttaaattcttaattctcagttgatacaaaggcttataatcatgtgttttaaaattttgatttcattttcgttccttgaaggttaaagaatggaaactggggataaaaattaatacactgcagctttgccaaggtctgtgatatggttgtaaccttttaaagactactaaagtcataatttgaaatttttactaaaataaaacatatgtgtctatggttttcaa

SEQ ID NO: 32309 - DNA, 6505 bp, Homo Sapiens
gacagatttcaatgtctgttgaaggcccccccacaccctccttcagtgccgggggcatggagggatatcttgggctcctgctgttttttaaaatgatgcgagctcatctcctgtcctgggtgtgaacgagtatatcttaccagggatgtaactgaacatttttttctgcattgtgttcctactgagcaacccaagatggccaggaactgctctgagtgcaaggagaagagggcagcacatatcctctgcacctactgcaatcgctggctgtgcagctcttgcacagaggaacaccgacacagccctgtccccgggggcccattctttcctcgggcccagaagggatctccaggagtgaatggtggtcccggagacttcaccttgtattgtcctctacacacacaggaagtactcaagctattctgtgagacatgtgatatgctcacttgccatagctgcctagtggtggaacacaaagaacacaggtgcagacatgttgaagaagttttgcaaaaccagaggatgcttctggaaggtgtgactacacaggtggcacataagaaatccagtctacagacatctgcaaagcaaattgaggacaggatttttgaagtgaagcatcagcataggaaggtggaaaaccagatcaaaatggccaagatggttctgatgaatgagctgaacaaacaggccaatgggctaatagaggaattagaggggattactaatgagagaaagcggaagctggaacagcagttacagagcatcatggttctcaaccgtcagtttgagcatgtgcagaatttcatcaactgggctgtctgcagcaaaaccagtgtcccttttcttttcagcaaagagctgattgtgtttcagatgcagcgattgctggagacaagttgtaacacagatcctggctccccttggagtatcagattcacctgggagcctaacttctggaccaagcagctagcttctcttggctgcataactactgaaggtggacaaatgtccagggcagatgctcctgcttatggaggcttacaggggtcatcacccttttatcaaagccaccagtctccagtggctcagcaagaggctcttagccacccctcacacaagttccagtctccagcagtgtgctcctcatctgtgtgctgctcccactgctccccagtctcgccttccctcaaaggccaggtccccccacccagcatacacccagcccacagcttcaggcagccccctgagatggtgccccagcagctggggtctctgcagtgctctgccctgctgcccagggagaaagagctggcctgcagccctcatccaccaaagctgctgcagccctggctggaaacccagccccccgtggagcaggagagcacatcccagcggctggggcagcagctgacttcccagcccgtgtgcattgtccccccacaggatgttcagcaaggagcccatgcccagcccaccttacagacaccctctatccaagtccagtttggccaccaccagaagctgaagctcagtcactttcagcagcagccacagcagcagctaccacctccaccaccacccctcccccatcccccacctccccttccccctcccccacagcagccacacccacctcttcctccatcccagcatctggcttctagtcagcacgagagccctcctggccctgcctgttctcagaacatggacataatgcatcacaagtttgagctggaggaaatgcagaaggacttggagcttcttctccaggctcaacagcccagcctgcaactgagtcagaccaaatctcctcagcatcttcagcaaaccattgtggggcagatcaactacatcgtgaggcagccagcacctgtccagtcccagagccaggaggagaccctgcaggctacagatgagcccccagcatctcagggctcaaagccggctctccctcttgacaagaatactgctgctgccttgccccaggcgtctggggaagaaacccctctcagtgtccccccagtggacagcaccatccagcactcctctccaaatgtggtgagaaagcactccacctcgctgagcatcatgggcttttccaacactctggagatggagttgtcatctaccaggttggagaggcccctagagccacagatccagagtgtgagcaacctgacagctggtgccccccaggcagtaccaagcctgctgagtgctccccccaaaatggtgtccagcctgacaagtgttcaaaaccaggccatgcccagcctgacaaccagtcacctacagactgtgcccagccttgtgcatagcacattccagtccatgcccaacctgataagtgactcccctcaggctatggcaagcctggcaagtgatcaccctcaggctgggcccagcctaatgtctggtcacacccaggctgtgccgagtctggcaacttgtcctctgcagagcatccctccagtttctgacatgcagccagaaactgggtccagctccagttctggccgaacttcagggagcctgtgtcccagagatggggctgatccctccctggagaatgctctgtgtaaggtaagtcctggggaaatgctatccaaacttcctttgttcatcattgggcaaaagattggccactgggacccttattctgaccttagcttaacagttctgagaccactaatgacaaccatgtctgagttctttgattcttgtcgacatttcacttttgaaagatggaaagtgaggattccactcgcttcactgacttactgggacaaggtcccatagtccccggtctggatgctcccaaggacttggccatcccctcagaactggaggagccaattaacctctctgtgaagaaacctccactggcgccagtggtcagcacgtctacagctctgcagcagtaccagaacccaaaagagtgtgagaattttgaacaaggagccctagagctggatgcaaaagagaaccagagcatcagagccttcaatagtgagcataagattccctatgtgcgactggagcgactcaagatctgtgctgcctcctcaggagagatgcctgtgttcaaactgaagccacagaagaatgatcaggatgggagcttcctgctgatcatcgagtgtggcactgagtcctccagcatgtccattaaggtcagccaggacagactgtctgaggccacccaggccccaggtctggagggaagaaaggtcactgtcacttctttggctgggcagcggccaccagaagtggagggcacatctcctgaagaacacagactcattcctcgaaccccaggagccaagaagggccccccagccccaatagagaatgaggacttctgtgctgtttgcctcaatggcggagagttactgtgctgtgaccgctgccccaaagtgttccacctctcctgccatgtgccagccttgctcagcttcccagggggagagtgggtgtgtaccttgtgccgcagcctgacccagcccgagatggagtacgactgtgagaatgcctgctataaccagcctggaatgcgggcatctcctggcctaagcatgtatgaccagaagaagtgtgagaagctggtattgtccttgtgctgcaataacctcagcctgcccttccatgaacctgtcagccccctggcccggcattattaccagattatcaagaggcccatggacctgtcaatcatccggaggaagctgcaaaagaaggacccagctcactataccaccccagaggaggtggtatcagatgtgcgcctcatgttctggaactgtgctaagttcaattatcctgactccgaggttgcagaggctggccgctgcctggaagtgttctttgagggctggttgaaggagatctacccggagaaacggtttgcccagccaaggcaggaggactcagactccgaggaggtgtctagtgagagtggatgttccactccccagggcttcccgtggcctccctacatgcaggagggcatccaacccaagaggcggcgacgacatatggagaatgaaagagcaaaaagaatgtcatttcgcctggccaacagcatctctcaggtgtgagagccaaaaggagactgggcactctggcagctgttgtcccatactgtcgaccattcctccccatcttgcagcttatcctcttcagagtgtggatggtagatgagtcttgttgaactgtgtagtgctcttctttgccatttgcatctacagcatttatttgggagccgtagtacatccactacagagaagatttcagtaataaacaggaaagaggaaggtatttattattaccagagtaatcagatgtataggctccacttgacaagaccacacctggttaggctcgggaaaacctactttccttggtgaatttttttctgcctgggaaagcagacccgtctaaccttttagtgtccagggctcaggagccatgtatacatctgaactcctcctgggctcagaagtgggtaaaagaagggagagaggtttagacatatggcaggactgtgatccctggcccagcacagccaaagactgtcactgtttgcctttgcttgtcctgtctggatagaggcacctgccatgtgcagactagtggaggcttctagaggccataggtctcaatttgtgcctatttgggttctaacggttttcagggtatttgttttgcatagtcactttcctgatgttgacataggtggctgctgtgaaaatgctgtggatggtgtgacattcttgactgagctgggtggctgtggagagaccacttaaatcttctggttcagatttcacttacagacttagtaagatgtccacttcagagcccgccctctgtgctacttactctgggctaatcacacttctttagggtgagaacctgccttcctagaagtgactgttggtgcttgtcagtggccatacccttcatcatcctcattcagaggtatggatcgtgagttctgcttgtgaatactgtgagacagctgctgtctgcttcaggtccagagttccatgggtggagagagtaacccacaaccagctcactcctctgggcctctcctcctgcttaaagattctagttctcaacctctccaagttcatgagccaaagatcagaagtgagtcttctgaccagcccgcctccaggctgtctacagccccaaaaaagccaacacttttctggcagccctttttgttggaggttagagaaggcctcagggaccaacaggggccagatctagacattcctgggggaagtttgtctaaggtggacagggggaaaaatcaagaggcaaaaagccagtgtcctttggtgaccatgaagcaacctcagagccttagttctcctagaatgcagagagaagcattctggaagccatgggaacaggagctcgaggctgcatcctgaatgcatctgcatggccctcgcagggtgtttgtgaggatactggaggtcaggctacctcccaagcaagggcttggttgagaaggaacccattgctcatattgttgggggagctatgaacctgacatgtcagtggccaggactgagacagctctccctggtcctgtcattgcatggctaatttcaggggagtctgaggtcatggctttatttttgctaacagatgaagttcaaggatgttcttgtttgtagggcctttgctaatgagcagttttttaattagaaaacatttcttctctctttgtgagttgatggtattgctcatttccttctctacccaacctgagagatcatcttcactttaaagcaaaccatgccccttggcttgccattctttcagcagcacatgccacgttctaagcagatgggcttccgtgatcccgttttctagtttggggtaactgagtcttgaatgctttactagtccggcaatctttggacttaggcttctgccctttgagactcacatgactttctggtttggggtctggtcatttccctttcaatttttgaatctccttctctgttcagttggcttggcaaagtaccctctgttctcatgtcactaattcctgctctaggtcatctttcctttgtgcagcccacattcccaccatcctgtgaactttgttgtacttggtgttgggcaactggtgagtgttgtgacaggctcagacctgatccttcctcaggagcaattggagaccacaaatttaaagcagaaatacctgttaaaagcttggctttccttatatgagtgaggctcccagcttgggtgtggcctcctgggctcacggatcagcttgctgggccagagggggtcttagtaatgtgctagagagacacatgctcccttctcatcgtagagagcctgcatgctgagaggctccctttacacacctgcctctcgctggcttttcctttagacctagccaccagtgttttgaatcatggttttgttttgtttttgcatgcaaaaaccagaacatgacttagaaatt

SEQ ID NO: 32310 - DNA, 3512 bp, Homo Sapiens
agcaggcttcttcggtgcccgagagggagcgggtgcccaagggggtggtccctgtggcaggtcccggggtgggggcgcggcgctccgggaagagccttccgcaggtccccgccccgtcacgtgggcgccggccccggccgctgcggtcggtccgctggttggtcgggcgcttggtccggcagttggtcggtgggccagtggcccgtcgctcgcttctgggctctcatgtttgaaggtgggagggacacgggagcggcccgcacacctgagccgcccggagaggagcctcggccccgtacccagtaagaagaggaggaggccaggcaggcaaaaggagtcatggcttctgatgctagtcatgcgctggaagctgccctggagcaaatggacgggatcattgcaggcactaaaacaggtgcagatcttagtgatggtacttgtgagcctggactggcttccccggcctcctacatgaaccccttcccggtgctccatctcatcgaggacttgaggctggccttggagatgctggagcttcctcaggagagagcagccctcctgagccagatccctggcccaacagctgcctacataaaggaatggtttgaagagagcttgtcccaggtaaaccaccacagtgctgctagtaatgaaacctaccaggaacgcttggcacgtctagaaggggataaggagtccctcatattgcaggtgagtgtcctcacagaccaagtagaagcccagggagaaaagattcgagacctggaagtgtgtctggaaggacaccaggtgaaactcaatgctgctgaagagatgcttcaacaggagctgctaagccgcacatctcttgagacccagaagctcgatctgatgactgaagtgtctgagctgaagctcaagctggttggcatggagaaggagcagagagagcaggaggagaagcagagaaaagcagaggagttactgcaagagctcaggcacctcaaaatcaaagtggaagagttggaaaatgaaaggaatcagtatgaatggaagctaaaggccactaaggctgaagtcgcccagctgcaagaacaggtggccctgaaagatgcagaaattgagcgtctgcacagccagctctcccggacagcagctctccacagtgagagtcacacagagagagaccaagaaattcaacgtctgaaaatggggatggaaactttgctgcttgccaatgaagataaggaccgtcggatagaggagcttacggggctgttaaaccagtaccggaaggtaaaggagattgtgatggtcactcaagggccttcggagagaactctctcaatcaatgaagaagaaccggagggaggtttcagcaagtggaacgctacaaataaggaccctgaagaattatttaaacaagagatgcctccaagatgtagctctcctacagtggggccacctccattgccacagaaatcactggaaaccagggctcagaaaaagctctcttgtagtctagaagacttgagaagtgaatctgtggataagtgtatggatgggaaccagcccttcccggtgttagaacccaaggacagccctttcttggcggagcacaaatatcccactttacctgggaagctttcaggagccacgcccaatggagaggctgccaaatctcctcccaccatctgccagcctgacgccacggggagcagcctgctgaggctgagagacacagaaagtggctgggacgacactgctgtggtcaatgacctctcatccacatcatcgggcactgaatcaggtcctcagtctcctctgacaccagatggtaaacggaatcccaaaggcattaagaagttctggggaaaaatccgaagaactcagtcaggaaatttctacactgacacgctggggatggcagagtttcgacgaggtgggctccgggcaaccgcagggccaagactctctaggaccagggactccaagggacagaaaagtgacgccaatgccccctttgcccagtggagcacagagcgtgtgtgtgcatggctggaggactttggcctggctcagtatgtgatctttgccaggcagtgggtatcttctggccacaccttattgacagccacccctcaggacatggaaaaggagctaggaattaagcacccactccacaggaagaagcttgttttagcagtgaaagccatcaacaccaaacaggaggagaagtctgcactgctagaccacatttgggtgacaaggtggcttgatgatattggcttaccccagtacaaagaccagtttcatgaatctagagttgacagacgaatgctgcaatacctaactgtgaacgatttactcttcttaaaagtcaccagccaactacatcatctcagcatcaaatgtgccattcacgtgctgcatgtcaacaagttcaacccccactgcctgcaccggcggccagctgatgagagtaacctttctccttcagaagttgtacagtggtccaaccacagggtgatggagtggttacgatctgtggacctggcagagtatgcacccaatcttcgagggagtggagtccatggaggcctcattatcctggagccacgcttcactggggacaccctggctatgcttctcaacatccccccacaaaagacgctcctcaggcgccacctgaccaccaagttcaatgccttgattggtccggaggctgaacaggagaagcgagagaaaatggcctcaccagcttacacaccactgaccaccacagccaaagtccggccaaggaaactaggattttcacacttcggaaacataagaaaaaagaagttcgatgaatcgacggactacatttgcccaatggagcccagtgacggtgtcagtgatagtcacagggtctacagtggctaccggggcctcagcccccttgatgcccctgaactggatgggctggaccaggtgggacagattagctgatgcccttgtcacctgccctctgtgcaccctgagagctcacagtaacactgtgtgtgtcaccatataactgcacctcacccccgcacgtgtgcatgactcgcagagaatattccagcaattgtgtacccctgggccagtctctttgaaccctgagggtggccaggatctggagctgcatctctaaggggccaggctttggggaccattgccaaaggtggactcaggaggaaagacacttaaagacacttttacatgtctagtaattcttgatgttcatcttcagcaccagtggaaacacatgaacttcgatgcaggtccagagaccatggacactcccacgaggctcagctctcaggcaccccctacacttcagttgagggaaaagctcaagtgccttaggcccgtggaccacagtcttggctgagatcaaagggatgagcaacagggacttctgccacagtgacaatggaattgtgttgtgccttacttcagaggtggtctcttctttcttgtaataaaagcaatatttatgcggaaagcaa

SEQ ID NO: 32311 - DNA, 4017 bp, Homo Sapiens
atgcaaatagaaaagcagcccagcatcccgaagccagcgaagaaacagcacgcctgtgtaaaaattaacccccagatcatcaaaggcaggcgtctgcgtgccaactccctagtctcagcttctcagaggtctgcatttaccactgtaaagcgtcacagggaccgagttatgctccggctccgctcgacttcctgccgggcgctggcaagccgcgcgctgcctggggtctccgggggccgcgcttgcagctggccgagtccgggccagctgaggggctggcggtgggcgggagcggtcggcggcctcagccccttcagagagcgactttcaaactcgcgcccgcgtcgcggcagcacctgggcagccccgcacgccgtgcgcgtcccgagcccgcggggcagctaccgctcgaatctccctggggtgccctccccaggcagcaatgccaggatgcctgtgtccacctccctccaccaggatggcagccaggagcggccggtgagcctgacctctaccacctcctcgtcgggctcctcctgtgacagtcgcagtgccatggaggagcccagcagctccgaggctcccgccaagaatggggcaggctccctgagaagccggcatctgcccaacagcaacaacaactccagcagctggttgaacgtgaaggggcccctctccccgttcaacagccgggcagcggcagggcctgcacaccacaagctcagctacctgggccgagtggtgcgggagatcgtggagacagagcgcatgtacgtacaggacctgcgcagcatcgtggaggactacctcttgaagatcattgacacacccgggctgctgaagccagaacaggtcagcgccctctttgggaacatagaaaatatctacgcgctgaacagccagctcctcagagacctggacagctgcaatagtgaccccgtggctgtggccagctgctttgtggaaaggagccaagagtttgatatctacactcagtattgcaacaattaccccaactccgtggccgccctgacggaatgcatgcgggacaagcagcaggccaagttctttcgggaccggcaggagctgctacagcactcgctgcccttgggctcctacctgctgaagccagtccagcgcatcctcaagtaccacctgctgctccaggaaattgccaagcattttgatgaagaagaggatggctttgaggtggtggaggatgccattgacaccatgacctgtgtggcctggtacatcaacgacatgaagaggaggcatgagcacgcggtccggctccaggagattcagtcactcctcatcaactggaaggggcccgacctgaccacctacggggagcttgtcctggagggcacattccgcgtgcatcgcgtgcgcaatgaaaggacctttttcctctttgacaaaacactgcttatcaccaagaagcggggcgatcactttgtctacaagggcaacatcccgtgctcctccctgatgctgatcgaaagcaccagagactccctgtgcttcactgtcacccactacaagcacagcaagcagcagtacagcatccaggccaagacagtggaggagaaacggaactggactcaccacatcaagaggctcatcctagagaaccaccatgccaccattccccagaaggccaaggaagccatcttggaaatggattcctattatcccaatcggtaccgctgcagcccagagcggctgaagaaggcttggtcctcccaggatgaggtgtccaccaatgtgcgccaggggcgccggcaatctgagcctggtcactctccgtacagccgggcaactctccccagcggtcagcgaggcttcgtgatgcccagccttaagggccgtagaaagtcggagccaaccaaacacctgctcaggcaactcaacgagaaagcacttaacaccatcgctcgctgtcacaccctgggaaaggggcgcagggagtctgaaagctccaggagcagcagaaggcccagtggccggtctccaaccagtactgagaagcgcatgagcttcgagtccatttcttccctgccagaggtgagcgaccagcaggttgagccggaccctgaggctgggagtgagcaagaggtattttctgctgtggaagggcccagtgccgaggagacgccttcagacacagaatctccagaagtcctggagacacagcttgatgcccaccagggccttctggggatggaccccccaggtgacatggtggacttcgtggcagctgagagcactgaggaccttaaggccctgagcagcgaggaggaagaagaaatgggaggtgccgcccaggagcctgagagccttctgccaccctctgtgctggaccaggccagcgtcattgcggagcgatttgtcagcagcttctctcggcggagcagcgtggcacaggaggacagcaagtccagtggctttgggagcccgcggctggtcagccggagcagcagcgtgctcagcctggagggcagcgagaagggcctggcccggcatggcagtgccacagactccctcagctgtcagctctccccagaagtggacatcagtgtgggggtggccacagaggacagcccttctgtcaatgggatggagcccccaagcccaggctgcccagtggagcctgaccggtcttcctgcaagaagaaggaatcagcactctccacccgagaccggctgttgctagacaagattaagagctattatgaaaatgcagaacaccatgatgcaggcttcagcgtccgtcgccgggagagcctctcctacatccccaaaggactggtaagaaactccatctccaggttcaacagccttccccggccagacccagagccagtacctccagtggggagcaagagacaggtgggctcccggccgacttcgtgggccctgtttgagctcccaggaccaagccaggcagtcaaaggggacccacctcccatctcagatgctgagttccgcccatcttcagaaattgtgaagatctgggagggaatggagtcttccggagggagccctgggaaggggccaggccagggccaggccaatggctttgacctgcatgagccactcttcatcctggaggagcatgagctgggagccatcacagaggagtcggccactgcctccccggaaagctcctctcccactgaggggcgcagcccggcccacctggcccgggagctgaaagagctggtgaaggagctgagcagcagtacccagggggagctggtggccccactgcacccccgcatcgtgcagctctcccacgtaatggacagccacgtgagcgagcgcgtcaagaacaaggtctaccagctggcccgccagtacagcctccggatcaagagcaacaagccagtgatggccaggccaccactgcagtgggaaaaggtggcccctgagagggatgggaagagccccactgtgccctgtctacaggaagaggctggagagccattaggtggcaaaggtaagaggaagccggtgctgtctctatttgactatgagcagctgatggcccaggagcacagccctcccaagccctcctcggctggggagatgtcaccacagcgtttcttcttcaacccgtctgctgtcagccagaggaccacctcgcctgggggccggccctccgcccggagccccctcagccccacagagaccttcagctggcccgacgtccacctcaccctggaggacaaccggcgggtgattgtcatggagaagggaccccttcccagccccactgcagggctggaggagagcagtggccagggaccaagctcaccggtggccctgctggggcaggttcaggacttccagcagtctgcagagtgccagccgaaggaagagggttccagggacccggcagacccgagccagcagggcagaacctggggccaggacgtggagaagctgatcaaggggtaccacaccttcatggctctggccctgacatttgtcccagttgtgcaggagtag

SEQ ID NO: 32312 - DNA, 2767 bp, Homo Sapiens
atctgcgtccgcacctgactcagctgggcaccccggagctacggaggggccagcgggctcccttgcccatgcgtctgggagcgcgcgggggacgtggcgaggctgaaaatgagtctctggaagaggaaacccgatgggatgatgcctggagtctctccctctctcatcagagtgcagtcggcatttggggggcgcatggtggagaatacatatccaatgagcagcgctgccctggcctcgagcactaaatgccagttcccctagctgcttgtgacaaccagaaaacgccccaacaaatcaccagacgttggcagttctccccaaagcaaaggctttagagcttcctgggttaatctggctgccacttgtgagcctcggaggttcctgatctgtacaccaggatggagtctccctctgtcgcccaggctggagtgcagtggtacgatcttgactcactgcaacttccgcctcccaggttcaggctgttctcctacctcagcctcctgagttgctgggattacagtgtcctggtgaagacctagttcttgccggagacaattccactgcagaagcactttacttaaaaggacttgccaggctggacaatgcccgttgacttggggcaggccctaggcctgctgccatcgctggcgaaggccgaggactcccagttctcagaatcagatgctgcccttcaagaggaactctccagccctgagaccgcacgccagcttttcaggcagttccgttaccaggtgatgtctgggcctcatgagaccttgaagcaacttcggaagctctgtttccagtggctacagccagaggttcacaccaaagagcagatcctagagatcctcatgttggagcagtttctgaccatcctgcctggggagatccagatgtgggtgcggaaacagtgtccaggaagtggagaagaggcagtgacccttgtggaaagcttgaagggggacccccagagactgtggcaatggatcagtatccaggttctaggacaggacatcttatcagagaagatggaatctccaagctgccaagtgggggaagtggagccccatcttgaagtggtgcctcaggagttgggacttgagaattcatcctcagggcctggggagcttctgagccacatcgtgaaagaggaatctgacacagaagcagaactagccctggctgcctcccagcctgcccgactggaggaaaggctgatcagagaccaggacctcggagcctcactgctcccagcagcacctcaggaacagtggagacaactggattccactcaaaaggagcaatactgggatctcatgctggagacctatgggaaaatggtctcaggagcaggcatttcccatcccaaatctgacctgactaattcaatagaatttggggaagagctggcaggaatataccttcatgtcaatgagaagatcccaagacccacctgcataggagatagacaagagaatgacaaggagaacctaaatttggagaatcacagggaccaggagctcctgcatgcttcctgtcaagcttcaggagaggttccttctcaggcttccttgaggggcttcttcactgaggatgagccaggatgctttggagaaggagagaatctccctgaggctctgcaaaacattcaggatgagggaacaggggaacagctgtctcctcaagaaaggatttctgagaaacaactaggtcagcatttgcctaatcctcattcaggagaaatgtccaccatgtggcttgaggagaagagagagacctcccagaaggggcagccaagagcccccatggcccagaagctccccacctgcagggagtgtgggaagaccttttataggaattctcagcttatttttcaccaaagaactcacaccggagagacatactttcagtgcaccatctgcaaaaaagcctttctgcggagttcagactttgtgaagcatcagagaactcacacgggagagaagccctgtaaatgtgattactgtgggaaaggctttagtgacttctcaggattgcgccaccacgagaaaatccacacaggagagaaaccctataaatgtcctatctgtgagaaaagtttcattcagagatcaaactttaatagacatcagagggttcacactggagagaaaccttataaatgttcgcactgtgggaaaagtttcagctggagctcgagccttgacaaacatcaaagatcccacttaggaaagaagccctttcaatagccagtaaccaaactctctttccccatttctatctcccagcccagtcacaaaaatactcagctccatcaagaggaattgtgtctaagaggatacccctgttaatctccttttttcttggattggagaggagagaatctggacatggctttggacttggaggatatcttggattggattgcacaatggcttaaattcttgattctgcctcaggagaaagaatagtcttcatgtttccactcatccttcctttggacccatcggggaaaaagtctaaattggagatccagttttagaagtgctttctgggaagcatttaatgggattagctgtagtcactgcttatgggaagaacctcagatcagccccttaaaatgagttctagagcaggtcttctgttccagaaggggagaagcatagagggcctgtgagctcacgtgtgttctttgtcataggggtgaaaaactaacttcaagtgtcccttgtttgaaataaacttagcagagtcactttct

SEQ ID NO: 32313 - DNA, 2942 bp, Homo Sapiens
gtgtggctgtgggacccgtgagcaagcagcgacgccagcggcggagaaccgacgaaaggtgtcaccacagtgatggcagtggaggacagcacgctgcaagtagtggtacgggtgcggccccccacccctcgggagctggacagtcagcggcggccagtggttcaggtggtggacgagcgggtgctggtgtttaaccctgaggagcccgatggagggttccctggcctgaaatggggtggcacccatgatggccccaagaagaagggcaaagacctgacgtttgtctttgaccgggtctttggcgaggcggccacccaacaggacgtgttccagcacaccacgcacagcgtcctggacagcttcctccagggctacaactgctcagtgtttgcctacggggccaccggggctgggaagacacacaccatgctgggaagggagggggaccccggcatcatgtacctgaccaccgtggaactgtacaggcgcctggaggcccgccagcaggagaagcacttcgaggtgctcatcagctaccaggaggtgtataatgaacagatccatgacctcctggagcccaaggggccccttgccatccgcgaggaccccgacaagggggtggtggtgcaaggactttctttccaccagccagcctcagccgagcagctgctggagatactgaccagggggaaccgtaaccgcacgcagcaccccactgatgccaacgcgacttcctcccgctcccatgccatcttccagatctttgtgaagcagcaggaccgggttccaggactgacccaggctgtccaggtggccaagatgagcctgattgacctggctggctcagagcgggcatccagcacccatgcgaagggggagcggctgcgggagggggccaacatcaaccgctctctgctggcgctcatcaacgtcctcaatgccttggccgatgcaaaggtaaagcagcacaggccaggccgcaagacccatgtgccctaccgggacagcaaactgacccgcctgctcaaagactccctcgggggcaactgccgcacagtgatgatcgctgccatcagcccctccagcctgacctacgaggacacgtacaacaccctcaaatatgccgaccgggccaaggagatcaggctctcgctgaagagcaatgtgaccagcctggactgtcacatcagccagtatgctaccatctgccaacagctccaggctgaggtagccgctctgaggaagaagctccaagtgtatgaggggggaggccagcccccaccacaggacctcccaggatctcccaagtcgggaccaccaccagaacaccttcccagctcccccttgccaccccaccctcccagccagccctgcaccccagagctccctgcagggcctagagcccttcaagaggagagtctggggatggaggcccaggtggagagggccatggaagggaactcttcagaccaggagcagtccccagaggatgaggatgaaggcccagctgaggaggttccaacccagatgccagagcagaaccccacacatgcactgccagagtcccctcgcctgaccctgcagcccaagccagtcgtgggccacttctcagcacgggaactggatggggaccgttctaagcagttggccctaaaggtgctgtgcgttgcccagcggcagtactccctgctccaagcagccaacctcctgacgcccgacatgatcacagagtttgagaccctacagcagctggtgcaagaggaaaaaattgagcctggggcagaggccttgaggacttcaggcctggccaggggggcacctctggctcaggagctgtgttcagagtcaatccctgtgccgtctcctctctgcccagagcctccaggatacactggccctgtgacccggactatggcgaggcgactgagtggccccctgcacaccctgggaatcccgcctggacccaactgcaccccagcccaggggtcccgatggcccatggagaagaagaggaggagaccaagcgccttggaggcagacagtcccatggccccaaagcggggcaccaagcgccagcgccagtccttcctgccctgcctaaggagagggtctctgcctgacacccaaccttcacaggggcccagcacccccaaaggagaaagggcctcctccccctgccattcccctcgcgtttgcccagccacagtcatcaaaagccgggtgcccctgggcccttccgccatgcagaactgctccaccccgctggctctgcccactcgagacctcaatgccacctttgatctctctgaggagcctccctcaaagcccagtttccatgaatgcattggctgggacaaaataccccaggagctgagcaggctggaccagcccttcatccccagggcacctgtgcccctgttcaccatgaagggccccaagccaacatcttccctccctgggacctctgcctgcaagaagaagcgcgttgcgagttcctcagtctcccatggccgcagccgcatcgcccgcctccccagcagcactttgaagaggccagctgggccccttgtactcccagagctgcccttgagtcccctgtgccctagcaaccggaggaatggaaaggacctcatcagggtggggagagcactctcagcagggaacggcgtcaccaaggtgtcctgaccgccagaatgtcctgaccaccaaggtgtcctaacctaccggcccctctgctggatacccctcttggacctgtagccacctgcaccaggagctggacctgccttccttacctgggagcaattagtgccaacacacctttgctgtattaacatccctccccagacatccatcctgctactcaccctctgttaatctcctgttacactcagcttcttggcatgtacatattcatttgtgagtgttaatgtgctgctgtt

SEQ ID NO: 32314 - DNA, 2780 bp, Homo Sapiens
acttcctgggggcggagaggacctcagcggctgcggcgacacccagggaaggcggcgcggccgggtcccgaaactcctggctgtttccatcagagccctcggacactcccagcccgggctgagcacgcatcgtcgctccccggcggatacaagggggctccgccatccgctcccgtcagttcggcctccatctcctgggacccgcgccggcagccaggccaggcctctgagtggccccagagccctggctggactcgtccacggcggcagcgatctgcccggggtctcggaggccatcccttcagagtcggccctgtgctcgccaccgtcacctgctggttggattccggaaacccactgtctgaagaccacagaggggtgtcgctgaccaccccaaatcggatacgtccagacctcaagctcccttcccctctctggctgccctctgctcttttcatctcttctctcaaccttttggggatttctgtgtcctgacaccacctccccatccaccaccaaagtagccggggtgagccccaaaccttactgggtgtgctccacctgtgcctccaacccagcgaatctgacagcttcgacccaattctgcacacacccaggaagttctgccttttcttttctttcggtgtctcctgtacttcccaaaatttctcctcctcctgtgccctcttcgcccccctcctttgggggccccgtgaccctgaatgtggggggcacactatattccaccactttggagaccctgacccgcttcccagactctatgctgggggccatgtttagggccggcacccccatgccccccaacctcaattcccaaggaggcggccactacttcatcgaccgggatggcaaggccttccggcacatcctcaatttcctgaggctgggccgcctggacctgccccgtgggtacggagagacagcgctgctcagggcagaggctgacttctaccagatccggcccctcctggacgcgctgcgggaactggaggcctctcaggggacccctgcacccacagctgccctgctccacgcagatgtagatgtcagcccccgcctggtgcacttctctgctcgccggggaccccatcactatgagctgagctccgtccaggtggacaccttccgagccaaccttttctgcaccgactctgagtgtctaggtgctttgcgggcccgatttggtgtggccagtggggatagggcagaggggagcccacattttcatctggagtgggccccccgccccgtggaactccccgaggtggagtatgggagactggggctgcagccgctgtggactggggggccaggagagcggcgggaggtggtgggcaccccaagcttcctggaggaggtgctgcgggtggctctcgagcacggcttccgactagactctgtcttccccgaccccgaagacctgctcaactccaggtctctgcgctttgtccggcactgaggatgctgttctcagtttgactgtggggaggagagagaatggggtactagcacccctgaagcctctttccagctctgcttcaggagctatgagagtcgggactctcctgcacctgactggagctcagatgtgggcaggaattcccaaacctgagcccaccaaggactcacaagtggtccagaaggtctcaacctgtgctgaccctgggaggggtagggaaggttctctcagcttgttcttgcctaaggctgagcacctccagtctctccttgatttggagctcagtgtttaagggcttggaaaaggggggaacatctctttacccagactagacctagcaaaaccctggaaggatattgaggtctggggaaaagggaggactttgcattttcccaatgcggtctcttggaccatggcttctactcctgaagctgggtggcctggcctggcctgaccaatgagaggccagaacactctggaacatcggaagaggagttctttgctatgttccaagccatctactgagggaggcagaaaggccacaacccaccctaggttgatgtatgggagctaggacagtccccatggcaatggggctggagcatccctcatctggaagaatcccatactgatggcagggctggccagggggaagagggtagtatctgtgggtcctggcctttcttcatgtgtgcgtgcatatcagcccgtgtggctgactgatgtataggtccctggcatcctggttcatatctgtgttgctgactacagtgtctgtgatgtccgcatgtccaggcctgtttggggttgcctagcgactcttctggcacagggtgtgtctgtggtatacctgtgaggtggttgacaattagtagtttaatcacagggtgtgtgtgtgtgtgtgtgtgtgtgtgtttatgtgcacgcatgtatatgcatcaccacgtagccaggaggggcctgttggggtttgagtcactgggatcttcctggtgagaggtaagagaagtcactgggcttagctgggcctctgaggcctgtatggaactcttggttgctgaggcaaccatggacctgttgctaggagatagctggggaaggcccaaggccgcccagggcagagagaggagacgaagagtttgggacagtgggggaggagatgggaagggatgggatttctgggtcccagagcgggtgggatactcacgcacagcttcttcactggtggggggtggggcacacattatttctcactggtcatgatttacaagaagaaaaataaaactgcttttggaaccac

SEQ ID NO: 32315 - DNA, 1565 bp, Homo Sapiens
ccttgtcctgcccagatcttgtcccttctagtactggccttccccattcctgggggcccccgcccctccgacccccgccgaccggcgctggactacaactcccggcgtgccgcgcgcgtccggccggctgcaccggggctttgcgcgtggcggccgccgagctccgcgcggggcaaacctcccggcgcggccatgcggggagttgctgaagtaaaggaaccctgcagccttcccatgctatctgttgacatggaaaacaaggaaaatggctctgtcggtgtaaaaaattccatggaaaatgggagaccacctgatcctgcagactgggccgtgatggatgtcgtcaattatttccgaaccgtgggatttgaggagcaagctagtgcttttcaggaacaggaaattgatggaaaatccctgctattgatgacaagaaatgatgtgttgacaggacttcagttaaaattggggcctgctctgaaaatctacgaatatcatgtaaaacctctgcagacaaagcatttaaagaacaactcttcatagtacagtcaaattggggtcttcgacctcaaaaaatacataatgacataatttagtttcatgtaatgaaactttgtaaacagaatacatacatgtgtatatgtaaagaatttcaatcaaatgaaacgttatcctattggatagactaggcaattcatcagctcacctgaaatcagccaggaggagcaaggacaagatgcgcacagggtggttttcctcatggattttgtcaaatagatgatctttgacacgattagacactcctccccacaaaggctttgaaatcataaggattttcctcatctctttatagctttcccaaaatcttttaaaaaagaatttaattaaatgacagtcttttggttacagacttaggatgagtaaaaacaagaaaatttggggagggggagaaagaagaaagggattgctgtctcccttgaattcctctgttccttagagcttgtgttacttggacggaattgccaacacccttttttatagagggttctccacttgaccttattaaggttttattgggatatgctgcagtgtttgaaatgaacatgcatcatggccccttcaggagcagaatcatagctctgaaaagagaagctccgttgtgtactgaggatatccatccatattcagctagctttcaaatggggtaacgatattttctgcatagattttcttttaaattggttctttgtttctgaagaaagaattttttttaacttcatggttttatttataataatttgtttctgaagaaatttgccgagagttacaggtcaaaaagccttgttactagtacagaatatttttatatatattccttcatgatggtgtaattttttttaattgtcctatgctttgttcggttcctgggttaagtacttgtttttaagagcttggaaaaagtgggcttgctacatctctgttcaaagagacatttgttcaatctctgtgtgtcaacgccttgttgaattggtgctttgtggttgcaataaagcattgcttcagtt

SEQ ID NO: 32316 - DNA, 5344 bp, Homo Sapiens
atgcctgtacaagctccacaatggacggatttcctctcctgcccaatttgcactcagactttcgacgaaacaattcgaaagcccatcagtttgggttgtggccatactgtctgcaagatgtgcctgaataaactccaccgcaaggcttgcccatttgaccagaccactatcaatacagacattgagctcctccctgtgaactcagcattgctgcagctcgtgggtgctcaggtccctgagcagcagcctattactttgtgtagtggggttgaagacacaaagcattatgaggaagccaagaaatgtgtagaagaattagcattgtacttaaaaccgctcagcagtgctagaggagtgggtctgaacagcactactcagagtgttctgagtcgcccaatgcagaggaagcttgtgactctagtccactgtcaactagtagaagaagaaggcaggattcgtgccatgagggcagctcgatctttaggtgaacgaacagttacagagctcattctccagcaccagaatcctcagcaactctcttccaatctttgggcagcagtaagggctaggggatgccagttccttggaccagcaatgcaggaggaagctttaaagttggttctgctggccttagaagatggttctgctttgtcaagaaaagtattggttctgtttgtggtgcaaagattggagccacggtttcctcaagcctctaaaactagcattgggcatgttgttcagctcctttatagagcctcctgtttcaaggtcaccaaacgtgatgaagactcttctttgatgcagctgaaagaagaatttagaacctatgaagctctgcggcgagaacatgactcccagatagtgcagattgctatggaagcaggcttacgaattgcaccggaccagtggtcctctttgctttatggagaccagtctcacaaatctcatatgcagtccattattgacaagttgcagactccagcctcttttgcacagagtgttcaggaactaacaattgctctccagcgaactggagacccagcaaacttgaaccgactaagaccccatttggagctgttagcaaacattgaccctagtccagatgctcctcctcctacttgggaacagctggaaaatgggctggttgctgtgcgtacagtggtacatgggctggttgattatatccagaaccacagcaaaaaaggagcagatcagcagcagcctccacagcatagcaaatacaaaacatacatgtgtcgagatatgaagcagagaggaggatgccctcgtggggccagctgtacatttgcacactcacaggaggaactggaaaaatttcgtaaaatgaataagcgcctggttccgagaagacccttgagtgcctctttgggtcaacttaatgaggtgggcctgccttcagcagctatccttccagatgaaggtgcagtggatctccctagcagaaaacctcctgctctgccaaatggaattgtatcaacagggaatacagtaacacagcttattccgcgagggacagaccccagctatgattctagtctgaaaccaggaaaaatagatcatctgagcagtagtgctcctggatcccctcctgacctgctagaatctgttcctaagagtatttctgccttacctgtgaatccacattctatacctccaagggggccagcagatctgcctccaatgcctgttaccaaaccacttcagatggtacctcgaggttctcagttatatccagcacaacagacggatgtttattatcaggatcctcgaggagcagctccgccatttgaaccagcaccttatcagcagggtatgtattatactccaccaccacaatgtgtgtcccgctttgtccgacctccaccatctgctcctgaacctgctcctccctacttggatcattatccaccctacctccaagaacgtgttgtaaactctcagtatggcacacagccacagcagtacccacctatatacccatctcactatgatggccgtcgagtgtaccctgctccgtcttacacaagagaagagatattccgagaaagccctatacccattgagattccacctgcagcagtaccatcgtatgtaccagaatccagagaaagataccaacagatcgagagttactatccagtggctcctcatccaactcagatcagaccttcgtacctcagagaacctccttatagccggcttcctcctcctccccagcctcatcctagtctagatgaactacatcgccgacgaaaggaaataatggcccagctagaggaaagaaaggttatctctccacctccttttgcaccttcaccaaccttgcctcctacctttcatccggaagaatttttggatgaagacttgaaggtagctgggaaatacaaaggaaatgattatagccaatactctccctggtcatgtgacaccatcggctcctacattggaaccaaagatgcaaaacccaaagatgttgtggcagcagggagtgtggaaatgatgaatgtggagagtaaaggaatgagggaccagcgattagatcttcagagaagagcagcagaaaccagtgatgatgacctcatcccatttggagaccgaccaacagtgtctcggtttggtgccatctcacgaacttccaaaactatatatcagggtgctggtccaatgcaggctatggcacctcagggagctcctacaaaatctattaacatttcagattatagtccatatggaacccacggtggctggggagcttctccatattcacctcatcaaaacataccttctcagggacacttcagtgagagggagagaatatctatgtcagaagtggccagtcatggaaaaccccttccatctgctgagagagaacagctacgactagaattgcagcaattgaaccatcagattagccagcagacccagctacgtggactagaggctgttagtaacaggctggtgttgcagagggaggcaaacaccctggcaggccagtcacagcccccaccaccgccacctccaaaatggcctgggatgatctcaagtgagcagttgagcttggaactgcaccaggtggaaagggaaatcgggaagagaacacgggaactgagtatggaaaaccagtgttctctggacatgaaaagcaaactgaatacaagtaaacaagcagaaaatggacaaccagaaccacaaaacaaggttccggctgaggaccttacattgacattcagtgatgtaccaaatggatcagccttgacacaagagaatatcagcctcctatcaaacaagaccagctctctgaacctgtcagaggaccctgagggaggaggggataataatgactcccagagatcaggagttactcccagttctgctccttaaaatatgaggagtcctacttttatcttctgctcctaatcagtttgtcgggcataggggtaggagaacgcataacttctaaactttttctcttaagagcggtcagagaaatccaggaaattcaccagaggcaatgtgcacaaacaccactactaaaaacaaaccctgcacatagttcacattaatgcatttttttaatttaaagaaaaagaaaattagcagtatctgcaagcaattcagattaaatttgtttttgttctgtgaatgaactttattttaataactttggacgccttggatccagggctttaaaaaaaaaagatattatatatacactctgtttgattaattgtatgatcttaatgaagtaggttttcttgtattttggtattacatacccagtgtataatttgtataattcctcacccccaatccttatcaattctcaccaccccataaacttaaaacagaccaaaaatgtcagctttcagagaattctgtggtgcttgagaaacagacagtactagactgagttattagaaaatgtgcagcaaaccaacttttcccagagctgttatttggaattctttatccctttctagatcactagcttcattggatacgtatatttttcttgacattgaagctttttgtttgtttgggagggttttatttcttgtttttattttcaacttttcaaatagaattaccaattttgaagtcctcattttcatattaaggatcatttgcattctcttaatataatcagaaagctgattcagtgtttaattagatttaaatgttgatcaagaattaactgtaacttactagcactgaaaatacatgtttggtgtttcgcctgcgttcagctcatggttggaaatttgaagcagtgcttttcaaattaaacttttgctgacatcataggatgctaaaaaacaaggacaatcaactatgttttaaaactgcaacatttgatttgaacttaaaatgaatagagccacattattttaatggatgttttgttttacttgtgaactgattgagtcttaaggatagtttatgaattgatcacttgttgctcagaatcattagtataagtaggtaggaaatagtttgaagtcatttttcatagacttaactgtccaatgttgcaaatgtttcttcatgaaaatattgaaaagagtaaggttttttttttttttaattctgctgcacatattctgatgccatgtgtctgtgcttaattaactaagaccctataaaacgtgtttagtggggactgtttgatatagttgccctctccattcctctatttgcctgatttttttcagtttccctttctgtattttactactaaattagaaagcactggttatgtaataagttactacattgctttggttgagtaaaaacaagagtttatatttttcttgtttcttattttcttaacccttaactcctgctgaggtcataacaacctcagtctaagctctgtgtccatcatactgttaacttaaacaaatgggtggtgggggtgggaagggtaatacagtcctgccattgcctaccagtaggagagtccaaacagaacactcttttgagtagcaattatttaatttgcccagtcaaggcaccgtgtttatatactatttcacattgaatttgattatgccctacagacctggctggtcaaggatttgatatacacatattggcttgggattcgagctttcttttttatttaaataaaaatttatatatatattatatatatacatatatacatagctatatctgtatatatattgggtatgttttaaggattttttcgcatgagcgcagctgttgcgataaattgaccgattgggaggtggtagaagcactgaatgaaggtgaggctttttttttttccagttttcttatacatttgtcttcttttttt

SEQ ID NO: 32317 - DNA, 4565 bp, Homo Sapiens
agccgcctgcaagcgggcgggggcggggtgtgaggcgctgcggacggggttgcgggctcggtagcggcagcttcagggcgcgagcgcgggcggtgccgaccactgcaggtaacagaggcgctgcgagggcagccgcggccctgtggagatgaggaaattgaggcacagagattaactaatctgaaccagataatgccataagtagtagaactgcgatgcaaacttggacagtctgactccagagtctgcacacttaaccactccactattctggccttctacaagttccaaaagatgagtcgtggatattcagaaaacaacaatttcctgaacaataataaccaaatggtattggacatgatcctttatccattaattggaatccctcagactatcaactgggaaactatagcaaggctcgtgcctggattaacaccaaaagagtgtgcaaaaaggtttgatgaattaaagagcagtggaagctcgcctgttgacaaccagtataattccctaatggctgctggagagagtcctgttgaaactttagccacatatatcaaatcctcacttcttgacatacatggagaatttcaggagactccagttggacatgatgcagtttccaaaactggaagacatagtatagcttccacaaggaattgttcttcagaaagtgaaaattgtactactcataatggtggagaaatgactgaagaatctgaagggccaaacatggtgatccatgtgtgtgatgaagcaaaaaacttgaaagaagattttacttgcccgcgagatcttttgatatcagaaatgaagtactttgctgaatatttatctatggatgcccagcgctgggaagaggtggacatttcagttcattgcgacgttcacattttcaactggttgataaaatacattaaaaggaacactaaggagaataaagattgtgagatgcccactttagagccaggaaatgtcatttcaattcttatttcttcggagtttttaaaaatggattcactagttgaacagtgtattcagtattgccacaaaaatatgaatgccatagtagctaccccatgcaacatgaactgtattaatgcaaatcttctcacacgtatagctgatctgttctcacacaatgaagttgatgatttaaaggacaaaaaagataaatttaaaagcaaacttttttgtaagaagattgaaagactgtttgatcctgagtacttgaatccagattctcggagtaatgcagcaacattgtatagatgctgtttgtgtaagaaacttttaacaaaagaaacagaaagaagaattccttgcattcctggaaaaatcaatgtggatcgacgtggaaatattgtctatattcacataagagataagacatgggatgttcatgagtatttgaatagtcttttcgaagaattaaaatcttggagagatgtatactggcgattgtggggaacaatcaattggctgacttgttcaagatgttatcaggcctttctctgtattgaattttcacattgtcaataccactcagaaacagtggtttatcctactgcagcaagttcattgaatactgttggcactggaatttatccctgctgtaaccaaaaggttcttcggtttgatcctactcagcttacaaagggctgtaaagtgagggaccacatggttacacttcgtgatcaaggtgaaggcggagatttgccgtcctgtcccactgctagaatgttggacgatttgcacaagtacagagatgtcattgttgtgcctttttcaaaagatacagttagtgatgttggggttggcctctgtgatgaaaagggtatagaatgtgatgttttactggagccaaatacaccatggggtcccaaaactggggagctcaatgctttcttgtcattgaaaaactggactctacaactgaaacaacagtcactgttttcagaagaagaagaatataccactggatctgaggtcactgaagatgaagttggagatgaagaagaagtatccaagaaacaaaggaaaaaggagaagccaaagaagttcactagacaaccaaaaaagcaggtatcttcaccctgtgcccagaggaaagaaaaggcattggagaagtcagcttctagagatgtgtctcctttcgttatgagtatgcagaagaataagtgggatgccacaagatccttgagattcaaccaggatgcacaaagagaagacgatcaacggcgaatgactgaaattacagggcacctaataaaaatgagattgggggatctggaccgagtcaagtcaaaggaagcaaaagaatttgcaggaggtatttattccaggctggaagcacaaatcaaggcctcagtgccagttagtgcacgccaaagcagctcagagaaaaacacaaggtctaaaagtcgttttggtcaagggcgtcctgcataaagtaccttaaaatataagtaaaaagagagaaggcactcttctggacatctgaaattgctcacttcttgaagatcttcagaacaatgacttccaactgttttatgttattattattttaatccacataaatcataattctaaaagaaatgcatagttaggttttatgaaaatctaattgtaaatatgaaactttttaaatctgattttcttctaatatcattctaggctatgtagaaagcaattatttacaaatttgcatagttgagactcccagtgttttcctttatttatttgaaaaagaaaggcctaaactgtcaggtagccaagtttttttaagaccttaaaagttaggggaacacaactggtagtgttaccatgcatggcactgattgtagtatgtctttggagctgtaaatcttgagatagcattgagaactgcaggttgtgtgacgaaattcccaatgatgctaattttaagtctgcatgaatattaaggagtgacaggtctcaagactgcattaaatgaagtttcagggtaaggtatttcagtactgtgttgggcagaagggttaatttttttcagcattatatcgtggaaagtacaatgttaatccaacttttttttctttcagtttttaatgcttatctattgatcatctgagctggaattactgattattactctgtcctctgtgaaactagtggcattctgaatttggtaaaataaccattgatagttttaggatagtaaatcatttctgttatatgagacacccactgtacagttctcagggctctaaaacccaaccatatttctgtaaccattcaaataactccttaaaacagttatacttgctagttcggtctaaaattttccaaatacattagataggtgaaaatttgcatatattcaagaaaaatcaaaataaaattctattttataaatcatgtttaaatttttctagccaggcagaaagagtgctcagggaaaatttgttccaaactataaccatataataaattatgtgtttgtaaattatatgtaggtctctgaaaaactttaagatgcactgtttctatttttttaagtcttaatttgccttataactgacatttcttcaaattattcagagaacagactttaataatgtgtgacaaaagagcaatttccattgaaatattgaagtgttacactcagtttacacgtacagaaatcattctttttagtgagtcttttagttgataaatgaagctagatgttatttgataactggctttgccaaggtttttgaactgctgtttagaaattttgttcccatttatatttgtttcaattgtttgatactgtggaaatagacttttattttcgaaagaaaatgtcttgtagtacatattatatgtaagtactctgttaaataccagagttttttttgtagtttactgtgttttctgattaaaggatttggatttgtacatgtaaacagtgctgtaatggtcacgactagataaggaaaaaatatatatgctcttttgatttttaactgatggtaaaaaggcaaactgcttctcccctgggaggcctataccactgaattaatttttacaaaccagagtttatcagaatttgattctcttcagaatgcttttggccaggtgtagtggctcacgccagtaatcccagcactttgggaggccgaggcgggcagatcacctgaggtcaggagtttgagaccagcctggccaacgtggtgaaaccctatctctactaaaaatacaaaaagattagccaggcatggtggcatacacctgtagtcccagctactcgggaggctgaggcacaagaattgtttgaacccgggtggcagaggttgcagtgagctgagatcatgtttctgcgctcctagcctgggtgacagagcaagactccatctcaatttaaaacaaaaaaagaatgtgtttttaattttgttaatgtttgtctgttatacatagcactggtaccgcaaacattttacttaaactcttaatagcatttctttcgccagatactttaatatttcaccttacattaatcctggattcacatttctttaattgaaataaatgttaatgac

SEQ ID NO: 32318 - DNA, 3602 bp, Homo Sapiens
atggctctgcagctgcgtggggctctacagctccgcgactgcgcctgcgtcggggagggggcggctccgccccgcgccggtgcgcctgcgcacggacgaacacgtggctgcagcggggccagagcagcaatggcggcgggcggcggcggtagctgcgaccccctggcccctgctggggtcccttgcgccttctccccgcacagccaggcctacttcgctttggcctctaccgacggtcacttacgagtatgggagacggccaacaaccggctgcaccaggagtacgtgccttccgcgcacctcagtggtacctgcacctgtctggcctgggcgccagcgcggctgcaggccaaggaaagtccccagaggaaaaaaaggaaatcagaagctgtaggaatgagtaaccagactgacttattggctcttggcacagcagttggtagcattttattatacagcacagtaaaaggagagttacacagtaaattaataagtggtggacatgacaacagagtcaactgcatacagtggcatcaagacagtggctgtttatatagttgttcagatgataaacatattgtggaatggaacgtacagacatgcaaagtaaagtgcaaatggaaaggcgacaatagcagtgtcagttccctatgtatcagcccagatggaaagatgttgctttcagctggtcgaacaatcaaactatgggttttggagaccaaagaagtctacaggcatttcacaggacatgcaacgccagtttcgtcactgatgttcactaccatcagacctcctaatgagagccagccctttgatggaattacaggtctttatttcttatctggagcagtacatgaccggttacttaatgtctggcaggtccgatcagaaaacaaagaaaagagtgcagtgatgtcatttacagttaccgatgaacctgtctatattgacttaactttgtcagaaaacaaagaagagcctgtcaagttggctgttgtttgcagagatggtcaagtccatctttttgaacacatattaaatgggtactgcaaaaagcctttgacttcaaactgcacaattcagatagcaacacctgggaaaggcaagaagtcaacaccaaaacccatccctattctagctgctggtttttgctcagacaaaatgtcattgttgcttgtatatggcagttggtttcagcctactattgagcgagtggctttaaactccagagaacctcatatgtgtttagtaagagatatttcaaactgctgggcccccaaagtagaaacagctataacaaaggtgaggacaccagtgatgaattctgaagcaaaagttctggtgcctgggattcctggtcatcatgcagctatcaagcccgctcctccacaaaccgagcaagtagagagcaagaggaagtcagggggaaatgaggttagcattgaagaacgtctgggagcaatggatatagacacacacaaaaaaggaaaggaagacctccagacgaatagctttccagttcttcttacccagggcttagaaagtaacgattttgaaatgctaaataaagtacttcaaactaggaatgtaaaccttataaagaagactgtattaaggatgcccctgcatactattattccgttgttacaagagcttacaaagaggttacaaggacatcctaatagtgctgtgctaatggttcagtggctaaaatgtgtgttaacagttcatgcatcatacctgtccacgttgcctgacctggtaccccagctggggacactctaccagttaatggaaagcagagtcaaaacttttcagaaactttcacaccttcatggaaagcttattcttctaattacacaagtaacagcatcagagaagacaaagggagcaacttcccctggacagaaggcaaagttggtgtatgaagaagagtcttctgaagaggagtctgatgatgaaatagcagataaggattctgaagataattgggatgaagatgaggaggagagtgaaagtgaaaaagatgaggacgttgaagaggaagatgaggatgccgaaggaaaagatgaagaaaatggcgaggacagagatacagcaagtgaaaaagaattaaatggagattctgatttagatcctgaaaatgaaagtgaagaagaatgaagacagcaaagcaagccggtcaaactatataaactctggctcaccttgcccagtggtgagggctgcctctgtgccaggatgccaaggaccgctgcacatttccaaattcacagcagtggatcccatgccactttgctgtcctgagcaccccagacttgactgtgtaaataagagtgtttcattcaaatgttaataaactttacacagtatatagacacattttctgcaatgtactgacatcagtgtccaatatatggtatatttttataatataatatcctagtatgattggttatatcaagaattgacaagtgcagataaagacctttcccataggagttcaagaactggactgttgtgaagaagtcagctcttatctcaggttggtatctttcatcaaatccagatgcaaagcagcactagtgaaaatttttttaatttagtacatttaatttggtacattttcataaaatatgaagggataactacaaactggagtaaaaatgatggtaattaaaaaaaatcctcagtatccctagcttgtctattaactgtgataatctgacttgagtcagattgaatatttggagtgcttccccagaataaccacttatttttgaagctatcatgtgaagtatttttttaaaacaaaacaaaaattatggtcattaaaaaactagagaattagccatattaaggatttttcttgactgcaaattacttctaaagaatcatcagtgtatagattagaagtgctcattacctgcaacttttaaaaaaaattcagttatagctgcttttgaagaggtttccatttttatttaaattactaatggatcaaagaacaattgtttattttttctctttggttttagatattaatgataaccttgttggaattttttttccaaagaaaatatttttataattaaataatttaatgtttttcttccttttcattacctactcttggcagtgttagggtatctgtttacctttaaaatgataagtctcactcaagattttttatgtatgtataaatattttggtgtgctacaaaagcctttgcaaattatcagtagtagtttttttttttttttttttttttttaaagaatgagccgatattggcttagtgctcactaggggacatgcacatggaagctcacctctaagaaagggctgggcagatggatttattttttcccacctgtgaatatgtaaaacaaaaccattatctttgagggagtttttaataccaatgacagaacagagatttgtgtgctcatcttaagagccagagccatataagcatcttgggaaagcaagtttgaaccagctgctggtgtaatgtacagttatatttgtctataaatggagctgtttatggcaatttaataccattctctttgtaaagtgaataaatattcatctttaccc

SEQ ID NO: 32319 - DNA, 1370 bp, Homo Sapiens
atgccggaccgcgcatgcgccgtcggcagcgtcgcgcgcgccctgtcgcgcagccggcgctacgtgtgcgcccgggacgcggacgcaagccgccgacggaggaggccttttaactacggcctctccatcgaagaaaaaaatgaaaatgatgaaaactcattaagcagttcctctgacagtagtgaagacaaggatgaaaaaataagtgaagaatgtgatattgaagaaaagactgaagtgaaagaagaaccggagcttcaaacaaaaagggaaatggaagaaagaacagtaactctagaaatccctgaagttctgaagaggcagctggaggatgattgttactacattaatcggaggaaacggttagtgcaacttccatgccacaccaacatcataacgattttggaatcctatgtgaagcattttgctatcagtgcagccttttcagccaatgagaggcctcgtcaccatcacgctatgccacatgccagcatgaacgtgccttatatcccagcagaaaagaatattgacctttgtaaggagatggtggatggattaagaataacctttgattacactctcccgttggttttactctatccctatgaacaagctcagtataaaaaggtgactgcatctaaggtttttcttgcaattaaggaaagtgccacaaatactaataggagccaggagaagctctctcccagcttacgtttgttgaatccatccaggccgcagtctacagagagtcagtcgaccagcggtgaaccagccacccctaaaaggcgcaaagccgagccgcaagcagtgcagtctctgaggcggtcctcgccccacaccgccaactgtgacaggctttctaagagcagcacctcacctcagcccaagcgctggcagcaggacatgtccaccagtgtgcccaagctgttcctgcacctggaaaagaagacacctgtgcatagcagatcatcttcacctactctgactcctagccaggaagggagtcctgtgtttgctggctttgaagggagaagaactaatgaaataaatgaggtcctctcctggaagctcgtacctgacaattacccaccaggtgaccagccacctccaccctcttacatttacggggcgcaacatttgctgcgattgtttgtcaaacttccagaaattcttggaaaaatgtcctttactgagaagaatctgaaggctttattgaagcactttgatctctttgtgaggtttttagcagaataccacgatgacttcttcccagagtcagcttacgtcgctgcctctgaggtgcattacagcaccaggaacccccaggcagtcaataagtgttgatggttctgtaagaacaactgctccat

SEQ ID NO: 32320 - DNA, 6805 bp, Homo Sapiens
atgtggcgctggatccggcagcagctgggttttgacccaccacatcagagtgacacaagaaccatctacgtagccaacaggtttcctcagaatggcctttacacacctcagaaatttatagataacaggatcatttcatctaagcttatgattgatacacctaccagtccagttaccagtggacttccattattctttgtgataacagtaactgccataaagcagggatatgaagattggttacggcataactcagataatgaagtaaatggagctcctgtttatgttgttcgaagtggtggccttgtaaaaactagatcaaaaaacattcgggtgggtgatattgttcgaatagccaaagatgaaatttttcctgcagacttggtgcttctgtcctcagatcgactggatggttcctgtcacgttacaactgctagtttggacggagaaactaacctgaagacacatgtggcagttccagaaacagcattattacaaacagttgccaatttggacactctagtagctgtaatagaatgccagcaaccagaagcagacttatacagacctctggggccggagagtctcctgcttcgtggagccagattaaaaaacacaaaagaaatttttgtaattcttatatctgaagctgtcatcagcactatcttgaagtatacatggcaagctgaagaaaaatgggatgaaccttggtataaccaaaaaacagaacatcaaagaaatagcagtaagattctgagatttatttcagacttccttgcttttttggttctctacaatttcatcattccaatttcattatatgtgacagtcgaaatgcagaaatttcttggatcattttttattggctgggatcttgatctgtatcatgaagaatcagatcagaaagctcaagtcaatacttccgatctgaatgaagagcttggacaggtagagtacgtgtttacagataaaactggtacactgacagaaaatgagatgcagtttcgggaatgttcaattaatggcatgaaataccaagaaattaatggtagacttgtacccgaaggaccaacaccagactcttcagaaggaaacttatcttatcttagtagtttatcccatcttaacaacttatcccatcttacaaccagttcctctttcagaaccagtcctgaaaatgaaactgaactaattaaagaacatgatctcttctttaaagcagtcagtctctgtcacactgtacagattagcaatgttcaaactgactgcactggtgatggtccctggcaatccaacctggcaccatcgcagttggagtactatgcatcttcaccagatgaaaaggctctagtagaagctgctgcaaggattggtattgtgtttattggcaattctgaagaaactatggaggttaaaactcttggaaaactggaacggtacaaactgcttcatattctggaatttgattcagatcgtaggagaatgagtgtaattgttcaggcaccttcaggtgagaagttattatttgctaaaggagctgagtcatcaattctccctaaatgtataggtggagaaatagaaaaaaccagaattcatgtagatgaatttgctttgaaagggctaagaactctgtgtatagcatatagaaaatttacatcaaaagagtatgaggaaatagataaacgcatatttgaagccaggactgccttgcagcagcgggaagagaaattggcagctgttttccagttcatagagaaagacctgatattacttggagccacagcagtagaagacagactacaagataaagttcgagaaactattgaagcattgagaatggctggtatcaaagtatgggtacttactggggataaacatgaaacagctgttagtgtgagtttatcatgtggccattttcatagaaccatgaacatccttgaacttataaaccagaaatcagacagcgagtgtgctgaacaattgaggcagcttgccagaagaattacagaggatcatgtgattcagcatgggctggtagtggatgggaccagcctatctcttgcactcagggagcatgaaaaactatttatggaagtttgcagaaattgttcagctgtattatgctgtcgtatggctccactgcagaaagcaaaagtaataagactaataaaaatatcacctgagaaacctataacattggctgttggtgatggtgctaatgacgtaagcatgatacaagaagcccatgttggcataggaatcatgggtaaagaaggaagacaggctgcaagaaacagtgactatgcaatagccagatttaagttcctctccaaattgctttttgttcatggtcatttttattatattagaatagctacccttgtacagtattttttttataagaatgtgtgctttatcacaccccagtttttatatcagttctactgtttgttttctcagcaaacattgtatgacagcgtgtacctgactttatacaatatttgttttacttccctacctattctgatatatagtcttttggaacagcatgtagaccctcatgtgttacaaaataagcccaccctttatcgagacattagtaaaaaccgcctcttaagtattaaaacatttctttattggaccatcctgggcttcagtcatgcctttattttcttttttggatcctatttactaatagggaaagatacatctctgcttggaaatggccagatgtttggaaactggacatttggcactttggtcttcacagtcatggttattacagtcacagtaaagatggctctggaaactcatttttggacttggatcaaccatctcgttacctggggatctattatattttattttgtattttccttgttttatggagggattctctggccatttttgggctcccagaatatgtattttgtgtttattcagctcctgtcaagtggttctgcttggtttgccataatcctcatggttgttacatgtctatttcttgatatcataaagaaggtctttgaccgacacctccaccctacaagtactgaaaaggcacagcttactgaaacaaatgcaggtatcaagtgcttggactccatgtgctgtttcccggaaggagaagcagcgtgtgcatctgttggaagaatgctggaacgagttataggaagatgtagtccaacccacatcagcagatcatggagtgcatcggatcctttctataccaacgacaggagcatcttgactctctccacaatggactcatctacttgttaaaggggcagtagtactttgtgggagccagttcacctcctttcctaaaattcagtgtgatcaccctgttaatggccacactagctctgaaattaatttccaaaatctttgtagtagttcatacccactcagagttataatggcaaacaaacagaaagcattagtacaagcccctcccaacacccttaatttgaatctgaacatgttaaaatttgagaataaagagacatttttcatctctttgtctggtttgtcccttgtgcttatgggactcctaatggcatttcagtctgttgctgaggccattatattttaatataaatgtagaaaaaagagagaaatcttagtaaagagtattttttagtattagcttgattattgactcttctatttaaatctgcttctgtaaattatgctgaaagtttgccttgagaactctatttttttattagagttatatttaaagcttttcatgggaaaagttaatgtgaatactgaggaattttggtccctcagtgacctgtgttgttaattcattaatgcattctgagttcacagagcaaattaggagaatcatttccaaccattatttactgcagtatggggagtaaatttataccaattcctctaactgtactgtaacacagcctgtaaagttagccatataaatgcaagggtatatcatatatacaaatcaggaatcaggtccgttcaccgaacttcaaattgatgtttactaatatttttgtgacagagtataaagaccctatagtgggtaaattagatactattagcatattattaatttaatgtctttatcattggatcttttgcatgctttaatctggttaacatatttaaatttgctttttttctctttacctgaaggctctgtgtatagtatttcatgacatcgttgtacagtttaactatatcaataaaaagtttggacagtatttaaatattgcaaatatgtttaattatacaaatcagaatagtatgggtaattaaatgaatacaaaaagaagagcctctttctgcagccgacttagacatgctcttccctttctataagctagattttagaataaagggtttcagttaataatcttattttcaggttatgtcatctaacttatagcaaactaccacaatacagtgagttctgccagtgtcccagtacaaggcatatttcaggtgtggctgtggaatgtaaaaatgctcaacttgtatcaggtaatgttagcaataaattaaatgctaagaatgattaatcgggtacatgttactgtaattaactcattgcacttcaaaacctaacttccatcctgaatttatcaagtagttcagtattgtcatttgtttttgttttattgaaaagtaatgttgtcttaagatttagaagtgattattagcttgagaactattacccagctctaagcaaataatgattgtatacatattaagataatggttaaatgcggttttaccaagttttcccttgaaaatgtaattcctttatggagatttattgtgcagccctaagcttccttcccatttcatgaatataaggcttctagaattggactggcaggggaaagaatggtagagacagaaattaagactttatccttgtttgcttgtaaactattattttcttgctaatgtaacatttgtctgttccagtgatgtaaggatattaagttattaagctaaatattaattttcaaaaatagtccttctttaacttagatatttcatagctggatttaggaagatctgttattctggaagtactaaaaagaataatacaacgtacaatgtctgcattcactaattcatgttccagaagaggaaataatgaagatatactcagtagagtactaggtgggaggatatggaaatttgctcataaaatctcttataaaacgtgcatataacaaaatgacacccagtaggcctgcattacatttacatgaccgtgtttatttgccatcaaataaactgagtactgacaccagacaaagactccaaagtcataaaatagcctatgaccaactgcagcaagacaggaggtcagctcgcctataatggtgcttaaagtgtgattgatgtaattttctgtactcaccatttgaagttagttaaggagaactttatttttttaaaaaaagtaaatggcaaccactagtgtgctcatcctgaactgttactccaaatccactccgtttttaaagcaaaattatcttgtgattttaagaaaagagttttctatttatttaagaaagtaacaatgcagtctgcaagctttcagtagttttctagtgctatattcatcctgtaaaactcttactacgtaaccagtaatcacaaggaaagtgtcccctttgcatatttctttaaaattctttctttggaaagtatgatgttgataattaacttacccttatctgccaaaaccagagcaaaatgctaaatacgttattgctaatcagtggtctcaaatcgatttgcctccctttgcctcgtctgagggctgtaagcctgaagatagtggcaagcaccaagtcagtttccaaaattgcccctcagctgctttaagtgactcagcaccctgcctcagcttcagcaggcgtaggctcaccctgggcggagcaaagtatgggccagggagaactacagctacgaagacctgctgtcgagttgagaaaaggggagaatttatggtctgaattttctaactgtcctctttcttgggtctaaagctcataatacacaaaggcttccagacctgagccacacccaggccctatcctgaacaggagactaaacagaggcaaatcaaccctaggaaatacttgcattctgccctacggttagtaccaggactgaggtcatttctactggaaaagattgtgagattgaacttatctgatcgcttgagactcctaataggcaggagtcaaggccactagaaaattgacagttaagagccaaaagtttttaaaatatgctactctgaaaaatctcgtgaaggctgtaggaaaagggagaatcttccatgttggtgtttttcctgtaaagatcagtttggggtatgatataagcaggtattaataaaaataacacaccaaagagttacgtaaaacatgttttattaattttggtccccacgtacagacattttatttctattttgaaatgagttatctattttcataaaagtaaaacactattaaagtgctgttttatgtgaaataacttgaatgttgttcctataaaaaatagatcataactcatgatatgtttgtaatcatggtaatttagatttttatgaggaatgagtatctggaaatattgtagcaatacttggtttaaaattttggacctgagacactgtggctgtctaatgtaatcctttaaaaattctctgcattgtcagtaaatgtagtatattattgtacagctactcataattttttaaagtttatgaagttatatttatcaaataaaaactttcctatat

SEQ ID NO: 32321 - DNA, 7897 bp, Homo Sapiens
atgcctgtcctctctaaaggcaaactcttcccctctgttggacgccatgctcctgtgccttacggaccatctcctcagcgactcctgtttccccctcctttctccggtctctacccacacacgggccagtcctggcaaatacgctggtgggagtgccccaagggcagggagcctgtagctttgtatccccagagcactgaggacagggctgccagtgtggtgggtgctcacaaagaatctgtgggctggctgctcgaggtctccccttgtagaaaccatccggagcaagaacaaggaaggaaacgaaactccctgagagccctggacagtccagatcgagggctgagtcttttgttcacacaaactcatttggcttctaaacgtcctccacccaaaatcattacatccgcagcagcatttcaaaacacagcccagagtggcctcgctgagtgggcggctgcttttctggggaggctgcagccaccttcccacaggcccccaaggttcttgcatgtcccagaatatcccgctgctggccaccggcctgaaatccccctcatccggaggacccttggtggaagatttgaaactgttactatacctcttggacctcagtcctgtgaaggtcaggttatttggttgctatggtccctaagggtagtggtcacctttggagagggatgggggcaccagagacaatccagtctgtctgattccaaagcccgtgtgataggcaccatttcattcctcttagagagaaacaaggagaggtgtcgtggagtggaattcagcgaggcccaaactgttcctgcagccatttgtctagcctcagtgcttttgtcagagtggattcctagcttccaagagggcttgggagcctggggccactctgatgctgcctggaaacattggccagaaagtaacactgaggcccatgtagaaaacatcaccttctatcagaatcaagaggacttttcaacagtgtcctccaaagagggcgtgatggttcagacctctgggaagagccatgctgcttcggatgctccagaaaacctcactctactcgctgaaacagcagatgctagaggaaggagcggctcttcaagtagaacaaacttcaccattttgcctgttgggtactcactggagatagcaacagctctgacttcccagagtggcaacttagcctcagaaagtcttcacctgccatccagcagttcagagttcgatgaaagaattgccgcttttcaaacaaagagtggaacagcctcggagatgggaacagagagggcgatggggctgtcagaagaatggactgtgcacagccaagaggccaccacttcggcttggagcccgtcctttcttcctgctttggagatgggagagctgaccacgccttctaggaagagaaattcctcaggaccagatctctcctggctgcatttctacaggacagcagcttcctctcctctcttagacctttcctcatcttctgaaagtacagagaagcttaacaactccactggcctccagagctcctcagtcagtcaaacaaagacaatgcatgttgccaccgtgttcactgatggtggcccgagaacgctgcgatctttgacggtcagtctgggacctgtgagcaagacagaaggcttccccaaggactccagaattgccacgacttcatcctcagtccttctttcaccctctgcagtggaatcgagaagaaacagtagagtaactgggaatccaggggatgaggaattcattgaaccatccacagaaaatgaatttggacttacgtctttgcgttggcaaaatgattccccaacctttggagaacatcagcttgccagcagctctgaggtgcaaaatggaagtcccatgtctcagactgagactgtgtctaggtcagtcgcacccatgagaggtggagagatcactgcacactggctcttgaccaacagcacaacatctgcagatgtgacaggaagctctgcttcatatcctgaaggtgtgaatgcttcagtgttgacccagttctcagactctactgtacagtctggaggaagtcacacagcattgggagataggagttattcagagtcttcatctacatcttcctcggaaagcttgaattcatcagcaccacgtggagaacgttcgatcgctgggattagctacggtcaagtgcgtggcacagctattgaacaaaggacttccagcgaccacacagaccacacctacctgtcatctactttcaccaaaggagaacgggcgttactgtccattacagataacagttcatcctcagacattgtggagagctcaacttcttatattaaaatctcaaactcttcacattcagagtattcctccttttttcatgctcagactgagagaagtaacatctcatcctatgacggggaatatgctcagccttctactgagtcgccagttctgcatacatccaaccttccgtcctacacacccaccattaatatgccgaacacttcggttgttctggacactgatgctgagtttgttagtgactcctcctcctcctcttcctcctcctcctcttcttcttcttcagggcctcctttgcctctgccctctgtgtcacaatcccaccatttattttcatcaattttaccatcaaccagggcctctgtgcatctactaaagtctacctctgatgcatccacaccatggtcttcctcaccatcacctttaccagtatccttaacgacatctacatctgccccactttctgtctcacaaacaaccttgccacagtcatcttctacccctgtcctgcccagggcaagggagactcctgtgacttcatttcagacatcaacaatgacatcattcatgacaatgctccatagtagtcaaactgcagaccttaagagccagagcaccccacaccaagagaaagtcattacagaatcaaagtcaccaagcctggtgtctctgcccacagagtccaccaaagctgtaacaacaaactctcctttgcctccatccttaacagagtcctccacagagcaaacccttccagccacaagcaccaacttagcacaaatgtctccaactttcacaactaccattctgaagacctctcagcctcttatgaccactcctggcaccctgtcaagcacagcatctctggtcactggccctatagccgtacagactacagctggaaaacagctctcgctgacccatcctgaaatactagttcctcaaatctcaacagaaggtggcatcagcacagaaaggaaccgagtgattgtggatgctaccactggattgatccctttgaccagtgtacccacatcagcaaaagaaatgaccacaaagcttggcgttacagcagagtacagcccagcttcacgttccctcggaacatctccttctccccaaaccacagttgtttccacggctgaagacttggctcccaaatctgccacctttgctgttcagagcagcacacagtcaccaacaacagtgtcctcttcagcctcagtcaacagctgtgctgtgaacccttgtcttcacaatggcgaatgcgtcgcagacaacaccagccgtggctaccactgcaggtgcccgccttcctggcaaggggatgattgcagtgtggatgtgaatgagtgcctgtcgaacccctgcccatccacagccatgtgcaacaatactcagggatcctttatctgcaaatgcccggttgggtaccagttggaaaaagggatatgcaatttggttagaaccttcgtgacagagtttaaattaaagagaacttttcttaatacaactgtggaaaaacattcagacctacaagaagttgaaaatgagatcaccaaaacgttaaatatgtgtttttcagcgttacctagttacatccgatctacagttcacgcctctagggagtccaacgcggtggtgatctcactgcaaacaaccttttccctggcctccaatgtgacgctatttgacctggctgataggatgcagaaatgtgtcaactcctgcaagtcctctgctgaggtctgccagctcttgggatctcagaggcggatctttagagcgggcagcttgtgcaagcggaagagtcccgaatgtgacaaagacacctccatctgcactgacctggacggcgttgccctgtgccagtgcaagtcgggatactttcagttcaacaagatggaccactcctgccgagcatgtgaagatggatataggcttgaaaatgaaacctgcatgagttgcccatttggccttggtggtctcaactgtggaaacccctatcagcttatcactgtggtgatcgcagccgcgggaggtgggctcctgctcatcctaggcatcgcactgattgttacctgttgcagaaagaataaaaatgacataagcaaactcatcttcaaaagtggagatttccaaatgtccccgtatgctgaataccccaaaaatcctcgctcacaagaatggggccgagaagctattgaaatgcatgagaatggaagtaccaaaaacctcctccagatgacggatgtgtactactcgcctacaagtgtaaggaatccagaacttgaacgaaacggactctacccggcctacactggactgccaggatcacggcattcttgcattttccccggacagtataacccgtctttcatcagtgatgaaagcagaagaagagactacttttaagtccaggagagagagggactcattgctctgagccagtcacctgggacctctgctcagaggaccgcaccaggaggctgcgcccaggatttgtcgggagccacgctgagtggcaagcaggaagagggacaggcatgcggggcgtgaccacagtggaggagacaggtggatgtggaaccacaggctgctcattcagcacctttgttgttactgtgaacgtgaatgtgggccagtatcaagagagtctctctgagtgactgcaccatggcactggcaccagggcgactattagccagggcagaccactagacttcagtgcagggacctggttttcccttcgtttgcactttagtaaattgggtgggaggtttccttttggatctgttttgagactgttccagaaagaaggcttcctttcccgagacacttccataggcagcaatttggtgattcatttgcagcaaaatactggcttgttaattattttcctgcccagcgcctgcgtgctaaacaacagatgaggatgagcgtaccactgaagtctgaagatgtcgccattgaacggacagtgttttcatatgtttctaggttgtcttatgctacagtttccaagccagcccccacagtgaggaaatgtgtgaggcaccgcacacaactgcaatgtgttttttaagtcaaggtgacacatgtatttaagattttttttttaaatctctttgcagttaaatctcactttttcaaacaagcctggatcagggcaaaacaacttatatttggttttagctggaggctcagcaggcagattgcaggcaggggggcacttttcatccatgagggcccagcctggggcctgggactcgatcaccattgtggaggccagaggcagctgcgtatggaggagaaatgtcaaactgaacgcaggtttcaccactctaggaaagcagcttgttgagcccctgcagctggatgtggttagagggatgggctgaataggcaggttagatttcctgcatcaacagtgctttgggaagctgtgtggattcctgaggaagaacagggagccgagatggagccacacatgagtttgctcaccggctactgcagcactttgtacccagaatctcatgtccacaaaccccatgtaaactttcaaccactcaaagctgtttattcggctgaagaaataacttttttttctcacccagtcatttgtacctcttcatatggctatgtcgcaccctccagaaacgtggttatacttccagtcagtgtgggagaactgaagacttccggttggtcgaggaactgagggttgaccttcgggaaggaagttccactcatcttatttattatgcctgtgatgtgggtcctgccagggagacatccagtactcggtgtctttaattgccacctggggaactgtgtttattggccttctttggggcatcctggttttggatgaagtgaggggaatacagaggtaaaagaattgtctccaccctgaagcggggagtcccgcttcacatttctggaaatggtgcagccactggggacagttctgccccgggcatggttgtttcttcaaggtcctctaaatataatccctattcttacataatccttggccctgatggttttaagcaagaactcctgtgtcccatggtctccaccactcaccatcaccctgctgtagcaagagtcctagtcaggggaggtgcattttagtagttacattgcacttatccatgagataaataaaaggagaactgtttttatcagtggaggctaacctaaaatttcaaagtgtcgcctttttgaaatcttgggcctctctctctgtagaaccaatggccctttgtggctcacggcctcgcacctaactggagagttctgagctcctgcagctcacctgagcccacagactaggcttcttggctccttccgcagcatgcctgctcacccccagaacccgcagctgtgggaagagccatgtagggaggctattcccaggcatacacttccactgccttcagctgacgtcacagctgacaaatcatctcctctatcggagccagaagacttcagctccacaaaatgaagtgttctgtcctgaaaacattcttgggaagaatcccaacatcgagaaaacggtgtcctgtgagttccaacaatgcttcttgttcatgggtttcttccgtatggagtggattaagagtgttttattttgttgttctaactgagaaaaaaaggaggcacccacaaggttgaggtcacacagtctccacagtttccaggaggcgtttgggggtggggaaggcacctccagagcatgaggctctaaggggacatgagtaaagcatgtctgtgacccagtgaggaagggagaggccagctgcactcctgcacggggttcctagctgcagaagggtcccgcctaggccgaggggaaacacctgatagcagaagaggcctggatgcacacctggcacgccgaggctctccgcccagacacagtgctccatgtcagcccctgcacctggggtgtgtgattcacgtgcacagatgccacaatcctgcaccaatatcccacagatgggggaaggtgagaggaaggggcaagtgatgtgtaactgctcaagagatgcttaaacctccatagagaggagccgggcgcaggggcatctgtgtgtcccgtcacacactgcagcagggaagggtggctggctggctccctggcatcagtggtttggtttaagctccagagggtcttattgccattgtcttttcctctgccccttgagccagcctaaggccctggagtctgtttctttaggcggatgaactgacatgctcctaccatgaccaggctctgggcaaggctcctcacagtatccttgagaggtgggcatggaagtgcccatttctcaggtacagaaaccttcagagaggataaatagcttgccctgtagaagcaggactgaaacccttgtctgcctgactcccccagctactctgcccactgtagccccctgccttactgtcctggcacacccctcaccatcctgtataccttaaatatcaaagagggcaagagagaaagggctttaaagataagttatttttttaaggaaccttaatattatttttaagaagtaaccaaattagtgacgtgaaatgc

SEQ ID NO: 32322 - DNA, 2851 bp, Homo Sapiens
ctcttctcttgaagcagatgcgaaggctccccgaatgagaaagaatactcggaatcagcggtgaattgcagtgatctttcagagaaagcgcctgttcaactttgtcctctctcagagactcagagccttggggcactgagggatgccagttctgcctgttcatctggaacctggatctaaggagggaagaggcgttgcccctgctggcatagtcaggtaccagcccagccaggtattgaacgggctgagcttttcatgatggttcctgctgacctggaaacatcttaaatggaaggttagcttctatgagtcactgatactctttttattgctatttctaaatttccttggcttgaaaattacttctgctttgcagaaattatctgcttgcagctgtggataatttataacaatctctggtgaaacctcagaaaagagatatgcttttgtcttagatggatgtcagcagctgctgcagaacccggtgaaaacaccccccgggtagcacgaggctctgcgagccgtaactccgacaaacgcagaacttcttgaggctttcttcttctaaggagtatgacacagttaaaaaggaaaaaagaaccacaagcaaaacagttgccagtgaaataggagagggagctctttaaacaaggctggctgcagctggcctccgccgctcatctgcagggcgtgagcgcttggtccatgcagtgaagctcttccaacctgggtcaacgaaaacggagaagaaatggcccaagaaatagatctgagtgctctcaaggagttagaacgcgaggccattctccaggtcctgtaccgagaccaggcggttcaaaacacagaggaggagaggacacggaaactgaaaacacacctgcagcatctccggtggaaaggagcgaagaacacggactgggagcacaaagagaagtgctgtgcgcgctgccagcaggtgctggggttcctgctgcaccggggcgccgtgtgccggggctgcagccaccgcgtgtgtgcccagtgccgagtgttcctgagggggacccatgcctggaagtgcacggtgtgcttcgaggacaggaatgtcaaaataaaaactggagaatggttctatgaggaacgagccaagaaatttccaactggaggcaaacatgagacagttggagggcagctcttgcaatcttatcagaagctgagcaaaatttctgtggttcctcctactccacctcctgtcagcgagagccagtgcagccgcagtcctggcaggttacaggaatttggtcagtttagaggatttaataagtccgtggaaaatttgtttctgtctcttgctacccacgtgaaaaagctctccaaatcccagaatgatatgacttctgagaagcatcttctcgccacgggccccaggcagtgtgtgggacagacagagagacggagccagtctgacactgcggtcaacgtcaccaccaggaaggtcagtgcaccagatattctgaaacctctcaatcaagaggatcccaaatgctctactaaccctattttgaagcaacagaatctcccatccagtccggcacccagtaccatattctctggaggttttagacacggaagtttaattagcattgacagcacctgtacagagatgggcaattttgacaatgctaatgtcactggagaaatagaatttgccattcattattgcttcaaaacccattctttagaaatatgcatcaaggcctgtaagaaccttgcctatggagaagaaaagaagaaaaagtgcaatccgtatgtgaagacctacctgttgcccgacagatcctcccagggaaagcgcaagactggagtccaaaggaacaccgtggacccgacctttcaggagaccttgaagtatcaggtggcccctgcccagctggtgacccggcagctgcaggtctcggtgtggcatctgggcacgctggcccggagagtgtttcttggagaagtgatcattcctctggccacgtgggactttgaagacagcacaacacagtccttccgctggcatccgctccgggccaaggcggagaaatacgaagacagcgttcctcagagtaatggagagctcacagtccgggctaagctggttctcccttcacggcccagaaaactccaagaggctcaagaagggacagatcagccatcacttcatggtcaactttgtttggtagtgctaggagccaagaatttacctgtgcggccagatggcaccttgaactcatttgttaagggctgtctcactctgccagaccaacaaaaactgagactgaagtcgccagtcctgaggaagcaggcttgcccccagtggaaacactcatttgtcttcagtggcgtaaccccagctcagctgaggcagtcaagcttggagttaactgtctgggatcaggccctctttggaatgaacgaccgcttgcttggaggaaccagacttggttcaaagggagacacagctgttggcggggatgcatgctcactatcgaagctccagtggcagaaagtcctttccagccccaatctatggacagacatgactcttgtcctgcactgacatgaaggcctcaaggttccaggttgcagcaggcgtgaggcactgtgcgtctgcagaggggctacgaaccaggtgcagggtcccagctggagacccctttgaccttgagcagtctccatctgcggccctgtcccatggcttaaccgcctattggtatctgtgtatatttacgttaaacacaattatgttacctaagcctctggtgggttatctcctctttgagatgtagaaaatggccagattttaataaacgttgttacccatgtc

SEQ ID NO: 32323 - DNA, 3144 bp, Homo Sapiens
gtacctgggagttgggttggggcggagcggaggggaggccgtgccaggcagggccggttcgtgcggaaccgccatggccgagccggcttcggtaactgtgacatttgatgatgtggccttatatttttcggaacaagagtgggagatcctggagaagtggcagaagcaaatgtataagcaagagatgaagaccaattacgagacccttgattccctggggtatgctttttccaagccagatttgatcacatggatggaacaagggagaatgctattaatcagcgaacagggatgcttagataaaacaagaaggacaactagccctcctactgatgaacagttgaacatgaagaatactggaaagttgctatgttttgatgacgaaggaactcccaggacaaaagaagaggattgccgtttaaatggtcctcaaaaacaggacttgtgtgctgccttacgagggaaagagagaaagattttattagctcaaacagccaccttccagtctccaagtctccgagaaacagagattctaaataaaaaagtcagcatcacagcatatgatccagacaagaaagacctgcggcataagcctcgggagaccccagggcgcttagaaattcccacagggccaagatgctattcctgctatgtctgtaggaaagtcttccaagtaaggagggatttgctaaagcacaaacggagccactccaagagccagctctgcagatacccaaagtacaaaaactcgtccagagggaagtccgaactcaggcggacgcagaggctcctgtgtcagaagaagcggttccagtgcagtgagtgtgagaagagctacttcctgaagggcagcctcgtcactcatcaggttgtccacaccggccagcggccctacccatgccctgagtgcgacaagaccttccggtacagggccaacctgaagaagcacctgtgtctacaccgcggggagcggccgttctgctgcggggagtgcggccgggccttcgtgcagcagtgcgagctcacggagcacttgcggctgcacagcggagagaagcccttccagtgtccgcagtgtgaccggtgcttccgcctgaagaggggcatgaaggtccatctgacccagcacagcgggaagaggcccttccactgtcccgagtgtggccggagcttctcccggaaggctgccctgaagacccaccagaggacgcacagcgaggaaaagccgttttcttgtggtgaatgtggcaggaaattcatctacaagattaagctggacgagcacatcagagttcacacgggagagaagcccttttcgtgtcccgagtgtaacaaaagtttccgcctcaagagaagcctgaaagcccacgggctgcagcacattgggaagcggcccttccagtgcccggagtgcagcaggggcttcttctggaggaacgccatgcgcgcccaccagcgcctgcacagcgagcaaaagcccttcccctgcgccgagtgcggcaagcgcttcacgcggccttccaagctcgcctgccacaccagagtccacgacaggcagaaggagtttccctgcggcgagtgcaaaaagaccttttctcagcagtcgcggctcacgcagcacctgaaggtccacaccacggaaaagccgttctcctgcgccgagtgcggccgcagtttccgccgacgcgcgcatctcacagagcacacgaggcttcacagtggcgaggagcccttccagtgtcccgagtgcgacaagagcttctcctggaaggcctccatgaagttccaccagcggatgcacagggacgagaagcccttcgcgtgcggtgagtgtgacaagacctacacgcatcagtctcagctcaccgagcacctgaggctgcacagtggagagaagccctaccagtgtcctgaatgcgagaagactttccgcctcaagggaaacctgaaaagccacctgctgcagcacagtggccaaaagccattctcttgtgtgatgtgcggcaaaagtttcactcaacagtaccggctcacagaacacattcgagtccacagcggggagaagcccttccagtgtccggagtgtgacaagagctactgcatcaggggcagcttgaaggtccacttgtataagcacagtggagagaggcccttccagtgtcccgagtgtggcaaaggcttcctccagaagagaagcctgaaggcccatctgtgccttcacagtggggagaggcctttttcttgtgatgagtgtggaaggagcttcacgtacgtgggggcgctcaagacccacattgcagtgcatgccaaagagaagccctccagcctctaggtcaggccatgcagcagtcacgcagtcggctttcaggaggtgccagcagctctgttggctcaagttgaggcaggttgaaggattcacagggtaagatcgggcacagtggctcccgcctgtaatcccattactttgggaggcccaggtgggaggatcgcttgagcccagaagtttgagaccagcctaggcaacattgcaagactccatctctacaaaaaatataaaagtcagccaggcgttgtggtgcatgcttgtggtcccagctactttgggaggttgaggcaggaggatcgcttgagcccaggaggcagaggctgcagtgagccatgctcacaccactgcactccagcctgggtgacagagcaagatcttgtctcaaaaaagaaaaaaaatcacaaaatactggctacagacacactggacaggtgtgtggtctgcagaactctatggctccttgacaaaagttccaaataatccatagacagtcaaagagacatctccctcaataatcgtcataggaaagacgtgccagttgtggaggaaacattcacactgatctgctagtccaacgatctcttcagtgtcatccaataatcccttcattaaattcagaaactacagcctgagtgaagaaatgttacagccaggaacatattcctcagtcagcttttccattaccaggccattttacttaaatctgtattaaagtcttcagttttctctcatagtggattttcattttctctcagatggtgagagggcttctgtttcttggaatgtttccatattgctaaaaataaatgtcttccact

SEQ ID NO: 32324 - DNA, 1519 bp, Homo Sapiens; identical to SEQ ID NO: 23965

SEQ ID NO: 32325 - DNA, 8194 bp, Homo Sapiens
atgcctgggctcgaccgacccctgagcaggcaaaacccacatgacggtgtggtcaccccagcagcatccccttccctccctcagcctggtctgcagatgccaggacagtgggggccagtgcagggaggcccacagccctcggggcaacatcgttcaccctgccctgaaggacctgttcccagcggggtgccctgtgccaccagcgttcctcatttccccaccccgtccatcctacatcagggccctggtcatgagcaacacagccctctggtggctcccccagcagccttgcccagtgacggaagagacgaggtgagccacttgcaaagtggaagccacctggccaataactctgatcctgaaagtacattcaggcaaaatcccagaattgtgaatcactgggcaagcccagagctcaggcagaatccaggagtgaagaatgagcaccggcccgcctctgctcttgtgaaccccctcgcccggggagatagcccagaaaaccgtacgcaccacccactgggggctggggccgggtctggctgtgccccgctagaagcagactcaggagcttcaggagctctggcgatgtttttccaagggggagagacagaaaatgaggagaatctctcatctgaaaaagcaggcttatctggtcaagcggactttgacgatttctgctccagccctgggctaggccgtccgcccgcacctacacacgtgggggcaggcagcctctgccaggcccttctcccaggccccagcaatgaggctgctggtgatgtgtggggtgacacagcgagcacaggggtgccggatgccagcggctcgcagtatgagaatgttgagaacttagaatttgttcagaatcaagaagttctgccaagtgagcccctcaatttggacccttcctccccgagtgaccagttcagatatgggccccttcctgggccagctgtgcccaggcatggtgctgtgtgccacaccggagcccctgatgccacactgcatacagtgcaccctgacagcgtgtcatccagctatagcagcagaagccacggaaggctctcaggctcagccaggccccaggagctggttggcacattcattcagcaagaagttggaaaacccgaggatgaagcttcaggtagtttttttaagcaaatcgattcttctcccgtaggaggtgaaacagacgagaccactgtgagccagaattaccgtggcagcgtgtcccagccctcaaccccgagccccccgaaacctacaggaatatttcagacaagtgcaaatagttctttcgaaccggtaaaatctcacttagttggggtaaaaccatttgaggcagatcgcgccaacgtggttggtgaagtaagggagacctgtgtccgccagaagcagtgcagaccagctgccgccctgcccgatgcttcccctggcaacctggagcagccaccagacaacatggagaccctctgtgcaccccaggtctgtcccctgcctcttaactccaccacggaagctgtgcacatgcttccgcacgcaggggcaccgcccttggatactgtgtatccagcacccgagaagaggccttcagccaggacccaggggcccgtgaagtgtgagagcccagcaacgactctgtgggcgcaaagtgagctgccagattttggaggcaacgtccttctggcccctgcagccccggcgctttatgtgtgtgcaaaacctcagccacctgttgttcagcctccagaagaggcgatgtccgggcagcagtcacggaacccaagctcggcggccccggtgcagagccgaggtggcattggtgcttctgagaaccttgagaatcctcccaaaatgggagaggaggaggcccttcagtcccaggcgagttctggttatgcaagtttattatcctcaccgcccactgagtctctgcagaatcctccagtcttgattgctcagcctgatcacagctataatctggctcagcccattaacttttctgtgtccttatcgaactctcatgagaagaatcagtcctggagagaggctttggtgggggatagacctgcagtcagcagttgggctctcggtggtgattctggggagaacacttctttgtctgggattccaaccagctctgtccttagcttgtctctgcctagcagtgttgcccaaagtaattttccacaaggttctggtgcttccgaaatggtttctaatcagcctgctaatttgctggttcaaccaccatcccagccagttccagagaacttggttccagaaagtcaaaaggatcgtaaggcaggaagtgctcttcccggatttgctaatagccctgctggaagcacaagtgtggtgttagttccacctgcacacggcaccctggtgcctgatggtaataaggcaaaccattccagtcatcaggaagacacttacggagccctagactttaccttaagcaggactttggaaaatcctgtaaacgtgtacaacccgtcccattctgacagcctcgcttctcagcaaagtgttgccagtcatcccagacaatctgggcctggggcgcctaaccttgaccgtttttatcagcaggtcacgaaagatgcccagggccagcctggcctcgaaagagcccagcaggagctggtgccaccccagcaacaggcttctcccccacaactacccaaagccatgttttcggagctgtcaaatccagaaagtctgcccgcacagggacaggcccagaactcagcacagtcaccagcaagtctggttctggtcgacgcgggtcagcagctgccccctcggcctcctcagtcctctagcgtgtctctggtgtccagtggctccggccaggcagctgtgccgtcagagcagccgtggccacagccagtgcctgcacttgcccccggcccaccgcctcaggacctggccgcctactactactaccggcctttgtacgatgcctaccagcctcagtactctttgccgtacccaccggagcctggcgcagcctccctctattaccaggatgtctacagcctctatgagcctcgatacaggccctatgatggtgctgcgtctgcttacgcccagaactaccgctatcccgagcccgagcggcccagctcccgagccagccactcctcggaacggccacctcccaggcaaggatatcctgaaggatactatagttccaaaagtggatggagcagtcagagcgattactatgcaagctattactccagccagtacgattatggagatccaggtcactgggatcgttaccactacagtgctagagtcagggacccccgcacctatgaccggaggtattggtgtgatgcagagtatgacgcatacaggagagagcactctgccttcggggacaggcccgagaaacgtgacaacaactggaggtacgatcctcgcttcacggggagttttgacgatgaccccgatccgcacagagacccttatggggaagaggtggaccggcgcagcgtccacagcgagcactcggcacggagcctgcacagcgcacacagcctggccagccgccgcagcagcctcagctcccactcgcaccagagtcagatttacagaagccacaatgtggctgccggttcctacgaggccccgcttcctccaggctcctttcacggcgattttgcctacggcacctaccgcagcaatttcagcagtggccccggcttcccagagtatggctaccctgccgacaccgtctggcctgccatggagcaagtttcatcaagaccaacttctcctgaaaaattttcagtgcctcatgtctgtgccaggtttggccctggcggtcagcttatcaaagtgattcccaatctgccttcagaaggacagccggccttggtggaggtccacagcatggaggccttgctgcagcacacgtctgagcaggaggagatgcgggcgttcccgggacccctggccaaagacgacacccataaggtggatgtcattaattttgcacagaacaaagctatgaaatgtttgcagaatgaaaacttaattgacaaagagtctgcaagtcttctttggaattttattgttctcttatgcagacaaaatgggaccgtggtagggaccgacattgcggagcttctgttacgagaccacagaacagtgtggcttcctgggaagtcgcccaatgaagcaaacctgattgatttcacgaatgaggcagtggagcaggtggaagaggaggagtctggtgaggcccagctctctttcctcactggtggtccggcggctgccgccagctcgctcgagagagagaccgagaggttcagggagctgttgctgtatggccgtaagaaggatgctttggagtctgcaatgaagaatggcctgtggggtcacgctctgctacttgcaagtaagatggacagccggacacacgcccgagtcatgaccaggtttgctaacagcctcccaatcaacgaccctctgcagacagtctaccagctcatgtccggacggatgcctgccgcgtccacgtgctgtggagacgagaaatggggagattggaggccgcacctcgccatggtcttgtccaacttgaacaacaacatggacgtcgagtccaggacgatggctaccatgggcgacactctggcttcaaggggcctcttggatgcggcccacttctgctacctcatggcccaggcgggatttggtgtttacacgaagaaaactacaaagcttgtcttaatcggatccaatcacagtttgccattcttaaagttcgcaaccaacgaagcaatccagaggacggaagcctatgagtacgcccagtccctgggtgccgagacctgccccctgcctagtttccaggtgtttaagttcatctactcctgccgcctggcggaaatggggctggccacgcaagccttccactactgtgaggccatcgcgaagagcatcctgacgcagccgcacctgtattccccggtgttgatcagccagcttgtgcagatggcttcccagttacgactcttcgatccccagctgaaagagaagccagaagaggagtccttggccgcacccacgtggctggttcacctgcagcaggtggagcggcagattaaggagggggctggagtatggcatcaggatggagccctcccgcagcagtgtcctggcactccgagttccgagatggagcagttggacaggccaggactcagtcagccaggagccctggggatcgccaaccctctgctggcggtgcctgcaccgagccctgagcactcgagcccgagcgtgcggctgctgccctcagctccgcagacgctccctgacggcccattggccagtcctgccagagtgccgatgttcccagtgccactgcccccggggcccctggagccgggtcctggctgtgtgaccccagggcctgcacttggcttcctggagccctccgggcctggcctcccacctggtgtgccacctctgcaggaaaggagacacttgctccaggaagccaggagcccagacccagggatagtgccgcaggaggcgcctgttggaaactcactttccgagctaagcgaagaaaattttgatggaaaatttgctaatctgaccccctcgaggacggtgccagactcggaggcccccccagggtgggatcgtgccgactcgggtcccacgcagccacctctgtctctctcacccgctcccgaaacaaagagacccggacaggcagccaagaaagaaacgaaggaacctaagaagggtgaatcctggttctttcgttggctacctggaaagaaaaagacagaagcttatttgccagatgacaagaacaaatcgattgtttgggatgaaaagaaaaaccagtgggtgaatttaaatgagccagaagaggagaagaaagccccgcccccacctccaacctcgatgcccaagactgtgcaagctgccccgcctgccctcccagggcctcctggagcccccgtgaacatgtactctagaagagcagcaggaaccagagctcgctacgttgacgtcctgaacccaagcgggacccagcggagcgagccggctctcgctcctgcggactttgtcgctccactcgcgccactcccaattccttctaacttgttcgtgccaaccccagatgcagaagaaccacagcttccagacgggactggcagggaagggcctgcagcagctaggggcctggccaatccagagcctgccccagagcccaaggttttaagctctgcagcgtcactccctggctctgaactcccctcctccaggcctgagggttcccagggaggagagctttcgcgctgtagttcaatgagttcattatcacgtgaagtgagccagcattttaatcaggctcctggcgacctccctgctgcagggggccctcccagcggggccatgcccttctacaaccctgctcagctggcacaggcctgcgccacctccgggagctcaaggctagggaggattggccagaggaagcacctggtgctgaactaggcttgccctgctgtgaacttgcacttggagccctgacgctgctgttctccccgaagaacccgaccgacctccgcgatctccgtcccgcccccagggagacacagcagtgactcagagctggtcgcacactgtgcctccctcctcaccgcccatcgtaatgaattattttgaaaattaattccaccatcctttcagattctggatggaaagactgaatctttgactcagaattgtttgccgaaaagaatgatgtgactttcttagtcatttaggatgatttaaggatatagtattcctggtcatttaagaatgttcattcattgaagccggagctgtctctgccacaggagagccacatggtcggtagtaaccagggcctctccaagcccagctgtgagtcactgcccagtgagtcccgcgcttcctttaaggtgctgggagcaaagagagggtgactgaggcagaccccaacccctgctctgcaccatctgggccctcgccgtgtttgaacctggctgaatgagtggagggcgctgtgttctcaatcagcgcctccgaggagccgtggggttccttcggcattagttcacggtttttgagagaggccttagttactgcagtgaatttctttcctgttgcaaagacgcttccagcctcactttactttctgtggcctgatgaggaccatgggtgattttgtgtacccaaagcgctggggactgcccaccgtgtggcccagtcactgggaaggagccccagagagccggctgtctgacatgatggctcagggtggtcatccaggttgaaaactgaccgtgtgatgtttgatttgggcttcatttcgtgtgtaggagcacggttagactcactgttaaggaagctggatgcacttctctaaaaggctgcactttccgtgagcacttttcgtggtacaatccacatgacccactttctcccctgggggacgttggttcagaggttggtagcacttggggagagtatcttaacacagtttcttgacagcagctctggaacttagtatttctgccccgagttttgccacactgagactttgagtagctcctggtggactcaaccctgttcaactcagagacgggcctcctctcactgatgcaaagctttaaggcttctctgactgttctgaaactcttcgtattcttgtcaagtctaaagagactgaagaaaagatttaaatactaataaaaatcagtagataatttctgtaggttctgctggaggaatacaaactgtttggtgttttaaatttaagtgtagaaattgtagaatgtggaattagcacagatccttcctggctttctgtttcacttgatcatttagcccagaccacccaggatgttttccaaaatgttccacaggcgtgtcccgctggatccatttgtccttgtcacttggagaaaggccagtccctgtgacggggcagccctctctgtccctcggtcagctcgtgtgaatcctgggacctcttccggtcggctctgcccgctgttctggggtcgactgccacgacttttgattcaagaagcttcctccaggcgggagcggctatttttcctaaatgagaattgttacattgcaaattgttgaataaaatattttgcgctccttcaagcac

SEQ ID NO: 32326 - DNA, 7123 bp, Homo Sapiens
atggagccggctggggaggaagagcggccgccaccggcggccgaaggagaggacgacgaggaggaggtggcagcggcggcccagacctcagggccggcccacggaaggagtgcctcctcgctggaggacgcggacgatcaggaggaagagatggaggcgatggtgatcggaggcggttgctgcaaggagcaggagctgacctacgagctacagcagggctaccgcatcctgggcgagttcctgcaggagaagcaccggggcctcaccgccccctttctgcagcccttggggggcgttgccaccgcggaggaggaggtggcggaagggccgcgcagcgggggccggggcggtcgcgccttcccgcagcagcccggacagggcatgtgtctgctgcagatggaagagaagttcgccagcggccagtacgggggcatcaccgagttcgtggcggacttcaggttgatgctggagacgtgctaccgcctgcacggagtggaccactggatctccaaacagggccagaagctggagatgatgctggagcagaagttagcgcttctctctcggcacttgagagaaaagacaacgatagcagttacatctagaggctattatggattggaggatgagaagggaactgcatgtacctcaacaaggcgtcggtcaacaccgcgaagtttggcaggcttgacaagtggagtttttgaatctataatggttcaagttttgagacaggaagaacagctgagagcaaaagaagaaaaaagagcttcacagaactactcctactataggaaaggagggcttatggaaaggggagcaagtcagttggtgctaactttggcctaccaggcaaactgtgtttctgtctcttatactgacctgctaggaaaacctgggggaagttatttcacctttctgtatgtccttaatattcgcagcaggcttcgggagcaggaaagaaaagaagcagaagaagctagtcaaaaggaaatagaagaatgggaaagaaaacttctagctcaagcagctccaacttgtatggagaccatgtgggaaattccagctattgggcatttcctttgtttagctcagcaaattctaaatttgccagaaatagtcttttacgaattggaacgttgtcttctgatgcctcagtgtaatgcttttctatcgaaaataatgacttctctattaagtcctccccatcgcagacctaccttacatcgaagacctactttgccttataggacctgggaagcagcgctgaggcagaaagtacaacagtggtacactgctgtagggcaaactgaaaatcctgataactgtgctgaaaaactggggttgtgtcctcagttttttaaagttcttggagaagttaatccattggaagaaaaaccttttcacgaactacctttttaccaaaaagtgtggctacttaagggtctttgtgactttgtgtatgaaacacaaaaggaagttcaagatgctgtacttggacagcctatccatgaatgcagggaagttattcttggttatgattatttggagaatgcttatgtacattttccacagttctgtggtgcagatgtacggatttataaacagagaccctttcaggccccagaatttccaattccacccattaaaatacaaagagtacctcggattaaattggagaaattgaagtgtgactatgttagtacaagtaatggagaacatagatgtagcagagatagcctgccctcttccttcaagaaagagcaggaaaataattttgatccagcttgctgtcctgctaaaatgatcttggataatcatgacatctctgttgaaatgggagtaaaatccaactatgaaattagaattcgcaggccttgtgaaattaaaaaaactgattgttgtaaagaaaatttagagaaaccaaggagtccaggggaagttactggctttggagagcctcttagtccaggtgaaataaggtttatagaaaatcaggaaaaatacggtgaagcttccagaataaagattgaacccagtccattaaaagaaaatactctaaaatcttgccaaatacatgtaaatggaagtcacagtgatcatccagaaattaactgccacaaagttgtaagggatattctattagagcagtcactacagagccacaagaaactcaaactaactaaaatgagggcaaaaaagaagaaaaagaaaaaaaagaaattgaaagatgttttgaatgaaaacttacagagaaagcgtgaaggtcttcattctcttgcattcaagtcttacaaacctgagatccagaataagttattgatcatcaaaaaaaaagcaaaacacaagaagcacaaatctggaaaaaaatccgtctctaaaaaagcaatcacaaagaagaggaaaactgtcataaagtcacctactgtaccagagtttcagcttatttgcactaatcttgatgaactcagggaattaatcacaaaaatcgagaatgaactcaaagatctggaaaacagtagaaaaaaatcgggaaaatggtatcatcggaggcaagctgtaaaagaattacatagtacattgatacgtcttttaaatgaattgctgccatgggaaccaaagttaatgaaggctttccaaagaaacaggagccgcctgaagaaagactatgatgatttcagaagacaacctgatcatgatacatttaatagagaactatggaccactgatgaaggtgaaggagatcttggaaaagactctcctaagggagaaatcagtaagtctatagactcaacagaacctctggatatcctggagaaagatcactttgattcagatgatatgaagttgtcagaaatagattttcctatggctagaagcaagctgttgaaaaaggaattgccttcaaaagacttaccgaagacactgcttaaaacacttaaacgacagtccaaacaaactgattatgtggatgacagcacaaaagagctttctccaaggaagaaggcaaagttaagcacaaatgagacaacagttgagaatctagaaagtgatgtgcagattgactgtttcagtgaatcaaagcatacagagccatcatttccagagtcatttgcctcattggattcagtaccagtgtctactctccagaaagggaccaaacccattcaggctttgcttgcaaagaatattgggaataaagtgaccttaacaaatcaactgcctccttccacaggtagaaatgctcttgctgtggaaaaaccagttttatctcctccggaagcaagcccgataaagccagcattgacctgccacaccaatacaaaaggtcctttacaaatggtatacaaaatgccctgtggccagtggttgccaatagatcttcaaaatagctctgtaaagattcaggtgcagcctatggtggatcctaaaacaggagaaaaaatcatgcagcaagttcttattctgcctaagaattttgtgattcagcataaagaaggaaaagcagttgcaaaagaagtgccaccacttcaacagaaaggtacagaacaacattgttcatctttcccacagacaacaaatataaattcttctttagcatcagtttttgtcaactcaccaggaactgtttctacccaactaccaaatacagctttcaacaaaacaattacacctttatcaaatataagtagtgctagaccacagcctttgtcgcctgtaacctctgtaagtaacttattaacaccatcagttaagactagccagagtgaggcaggaaaagccaagaatgcagtttcagcagccacattctccttgcccagtgcttcaccgaccatttcctccacaggtcagcctctgtcatcaacaacaacactaaatgggtctacaaatcctggtagttccttcaactgttttgcacaacagactgctgattcttctgaagcaaagcaagagctgaaaactgtgtgcataagagattcacagtcaattcttgttaggacacgaggtgggaacactggagttgtaaaagtacagaccaacccagatcaaaattcacccaatactgtatcttcaagttcagttttcacttttgctcctcagctgcaggcatttctggtgccaaaatcaacaacttcttcctctgctttttcacctgtagctggaacaactactacatctagtctttcaccttttagccaaacaccaacttctgtttccattccagctagctttgccccatccatggggaaaaatctcaaacttacattaggccacaccactggcagtggtgatttgggccacgtgatagataaaacttcacacatgccctcttctcccttgaagtcctctatttgttctagtactctactaccatcaacaacaagtagttcggtaagtgtaattagcatatcagcagcaaattttggacaaaacaatgcaaatattattcatactccaactaaacagcaacaagtagattatatcacaaaaagttaccctgttacaaggtcagaagcaacagcagcaacaaatggagatgtaatcagtgggactccagttcagaaacttatgctggtatcagctccatctattctttcttctggcaatggaactgcaattaatatgacacctgcgctgacatctacaggtgtttctgcccagaaattagtttttattaatgccccagttcctagtggtacatcaaccccaactcttgttgcagaatcattaaaacaaactcttcctcctccattgcataaagcatatgttaagactccagagcaaccccaaatagtactgattccgtctacagtgggcacaccaataaaaataaattcatcaccagctgtgtctcagataaaggatgtgaaaattggactaaacataggtcaagcaattgtaaatacttcaggcactgtgccagctataccatcaattaacatattacaaaatgtaaccccaaaaggagaagacaaaagtagcaagggctatattttgccattgtcaacaagtggtaattcagttccagtaagctcaaattttgtgagtcagaatattacccctgttaatgaatcagtggtttcttcagcaagagcagtaaatgtgctttcagttaccggagcaaatttatctttgggttcctttccagtgacctcagcctctgcttcagctggggcacaacctcctgttttagtcagtggaaatgatacctcttcaagaattatgcctattttgtcaaatagactttgctcatcaagtctcggaaacactgtggctatatcaactgtgaaaacaggacaccttgcatcatctgttctgatttcaactacacaaccagtagtgtctcctaaatgtttaacatcagctttgcaaattcctgttacggttgccttacctacacctgcgactacatcccctaaaataataaacacagttccacattcggcagcagtaccaggagccacacgttctgtatctatttctaaaagacaatctcggacttcactccagttccattcaccagggatttcaactacagtgccaacaaatgtaaacacaaataaacctcaaactgaattgtcgtccctttcaacaagtccaggtaaaataactaatacgtccaattttgcttctctgccaaatcagcaagctttagtaaaaacccccagttacagttctgctccaggtggcactaccattcacacggcttcggcaccatccaatgtaactagtctagtcgggagtcagttcagtgaaccttgtattcagcaaaaaatagtcatcaataccagtacacctttggcacctggtactcagattatgattaacggaacccggtttattgttccaccacaaggtcttggagctggcagccatgttctccttatatctactaatccaaaatatggagcccccttagttcttaacagtggccaaggcattcaatctacaccaatagataactctgcccagaagatcacactagcatcaaataattccttaagtggccaacctctacaacatcctctaagaagccctacaaaatttataaactcttttgggaatgcaagttctatacccacagtacatacatcaccacaactcataaacacaactgctaaggttcctgttccacctcctgtaccaacagtatcactgacttcagtaattaagtctccagctactcttttggctaagacatctttggtttctgccatttgccccagtaatcctccactgccaagtagcacttcagtgtttcatttggacccacctgtcaaaaaattgttggttagcccagaaggagccattttgaataccataaatactccagcatctaaggtttcttcactctctccatctctctctcagattgttgtatctgccagtcgaagtcctgcgtctgtcttccctgcttttcagtcgtcgggcttagagaagcctgacagagctgcatcttgaatttagactaaaagagccagtttttaaataatggggcattgttttgactcccataaaaattttcaatgtttattatactgttgaaagcatactatacattgtgtgtgtgtgtgtgtgtgtgtgtgtgtgtgtgtgtgtgttttaatgtatcttttcattagcttgcaacaaggctttgttttcttggggagggaaagatctgttccatttcacttactgttctgaggagggtttcaaggttctgtgtttaaagtcaggatttacctgtctgtagaacataaagtgaacaaagtttgaatagtttagagtaagctagccttttgcacatttacattgacatgtttcttcttgaatttggactgttgcagcatatctatgatatggtattcagtgtcattagtgaaatcttatttttgtttctgtaaaaaaaaaaatacatatatatatttatgcattgtgaaaaatgcagtccatgatgtaaaattgtacatattccagaatccctaacaacctgtactaaatatatgtacaaagaactatgctgtcttatttatgttttgtttacataatgtatagttttttaagtattttagtaattttggaccagtgaactgttagcaacaatgcagaagaatctgcatgtaataaactgagttgctgt

SEQ ID NO: 32327 - DNA, 3132 bp, Homo Sapiens
atggaggattgtcttcatacctcatctgagaatctgtccaaattggtcagctgggcccatagccatgggactatttgcagcctcattccaaacctgaaacacttgctttctgaaggttcccatgggaacctgacagcaatgtggggctgtagtgctggccatgcttatcactggccactaacagctacttgcagagctgggtcccaagagagggtctgtttccaggataacagaagttttaactctgatagtcccagtataatcggggtgccctctgagacacagactagccctgttgaaaggtaccctgggagaccagtgaaagcaaagctagactgtaaccggaccagagactcttgtgacttctcctactgtagtgagccctctgaactggatgaaactgttgaagaatatgaagatgagaacaccctgtttgacatggtttgtgagtcttctgttacagatgaggatagtgactttgaaccccaaacccaaaggcctcaaagcattgctcgcaaaagacctggggtagtcccatcttccctccattcaagctcccagacgcagatggttgacgaatgcagcaatgatgtcatcatcaagaaaatcaaacaagaaatccccgaagattattacattgtggcaaatgcagaactgacaggaggagtagatggaccagccctgtccttgacacagatggcaaaacccaagcctcagactcacgctggtccctcctgtgtagggtctgctaaactgattccccatgtcacatctgccatcagcacggagctagacccacacggtatgtctgcatccccctctgtgatctccagaccaattgtccagaagactgctagggtatctctggcttcaccaaacagaggaccccctggtacacatggcaccaaccaacaggtggccatgcaaatgcctgtgagcacatcccatcctaacaaacagatcagtatccccttgtctgccctgcagctgcctggacaggatgagcaagttgcctctgaagagttcctgtcccatctgcccagccaggtctcctcctgtgaggtagccctttctccctcagttaacacagagccagaagtgagctccagtcagcagcagcccccagtcgctccagccataaccactgaggccacagcacagtgcataccagaccaggatgaaagagcagctgagctcagcagggagcagaacgagaaaaccatccggagcacgcagaccgcgctccgcaatttccgtgagttcctcatctccaagtatccttctgaaacaagagagatttatgtcatcccttgcaaggagttggatgcctaccttgcctctttctttgttgatgccaggcagaaggatgggtccgaatacgaacccaacagcttggccaattaccagtgtgggctcgaaaggtacctgaaagaacacaggtatggctatagcatcaccagggataaggaattcaagcgttcccaagaggccctgaagcagaagcaaattgaactccgctgtaaaggaaaaggaaataagccacacaagtccatgaagctcacctttgctgacgagctcatcctgcggaaaaggggactgctaagccgatataaccccgagggtttgctcaacctagtctggctcaacaacacaaaagcttttgggcattgcacaggcttccatggatctaccttaaaatggggtgatatccggctccgggtaacagagacgggtctcgagtacttggagtggatgggtcaggacactggagacttgaatgccaaaaccaagagaggggggacagactcccgtgtgtatgccacccagcacgccccacagacctgccctgtccaggactataaggagtatgcccagcggcggcctcccgccatgcgctacgaggatgcccctttctacttatccatcaagccagtcgtgaacctggcggctctgcattggtacaactgccaggcccttggcaagaacaagctggccaagatggtgaagaccatgtgtgagaagggcaacatccctggcaggaaaaccaacttcagtgtgtatcagagctgcagcaccttgtctgaggcccagagcaaccagctcgtgctgatctgtaacaatctgagccagcaggctgcccatgcagtaagcccaaatactaccaaagccacgcggtacgccttgaatgtgtggcgttattggtgcatgaccaacgggctcaaagaccacacagacatcaccaagcccctggtgaggattagaaggaaggaggggtctggctgtgtgagtgtcaagtgtgtaacctccgtgtttgtctcatttgagatccctgcagtgaagttgaacgagctgctcgagaacttttatgtcaccgtcaagaagagcgacggctcggacttcctggccacctcgctccatgctattcgccgaggcctggaccgcatcctgaagaatgcaggtgtcggcttttccatcaccagcagcaccttcagctcctccaccaagaaactcaaggagaagctgtgggtgctgagtaaggcaggcatgtcgggcgcgcgttctcgcaacatcgtctacttctccctttctgacgaggaggagatgtggcaggcagggtgtctgggggatgacagccctatcactctcctgtccactgtggtcaagtacaacagccagtacctgaacatgcggacgctgcaggagcatgcggatctgatgtatggtgacatcgagctgctcaaagacccccaaaaccagccctactttgcccggacggacagcgtcaagcgggagagtcggagcggctccaccagagtgtgtcacgggaagatctaccatgagcattcccggggacacaaacagtgcccttactgcctcctctacaagtacatgtacatccaccggccgcccacccaaatggaggccaagtcccccttctacctgactgccaggaaggaggccacagacatgggcagcgtgtggtatgaggagcagaggatggggctgcgctctcttcggggaattgtcccaaacttagccaagaaggtcaagctggaaaactgtgagaacttcacctttgtctcgttcactcaggtctcccggaggcttggctcccacagctgctgccagtga

SEQ ID NO: 32328 - DNA, 2794 bp, Homo Sapiens
agtgctagcgctcctctccagcatgctgcggcggggcagccaggcgctccggcgcttctccactggccgggtttatttcaaaaacaagctgaagttggcactaattggccagagcctctttggacaagaagtctatagccacctccgcaaagagggccaccgagtagtaggggtgttcacagttccagacaaggatggaaaagctgaccctctggctttggctgcagagaaagatgggacccctgtgttcaagcttcctaaatggagggtcaagggcaagaccatcaaagaagtggcagaagcctacagatccgtgggtgcagagctaaatgtgctccctttctgcactcagttcattcccatggatataattgatagtccaaagcacggctctatcatttatcacccatccatcctgcccaggcacagaggagcctctgctatcaattggactctaattatgggagataagaaagctgggttttctgttttctgggctgatgatggcttggatacaggacccatccttcttcagagatcatgtgatgttgaacccaatgatacagtggatgcactttataatcggtttctttttcctgaaggaatcaaggccatggtagaagctgtccaactcatagctgatggaaaagctcctcgtataccccagccagaagaaggggcaacatatgaaggtatccagaaaaaggaaaatgctgagatttcttgggaccagtctgccgaagttttacataactggattcgaggtcatgataaagtccctggagcttggacagagataaatggacagatggtcactttctatggctcgacattactgaatagctctgtgcctcctggagaaccactggaaattaaaggtgccaagaagcctggtctcgttaccaaaaatggacttgttctttttggtaacgatggaaaagcactgacggtgagaaatctgcagtttgaagatggaaaaatgatccctgcctctcagtacttttcaacgggtgagacgtcagtggtagaactgacagctgaagaggtgaaagtggcagagaccatcaaggtcatctgggctggaattttaagcaatgtccccattattgaagactcaacagacttctttaaatctggagcaagctcaatggatgttgccaggctggttgaagagatcagacagaaatgtggtgggcttcagttgcagaatgaagatgtctatatggccaccaagtttgaaggctttatccaaaaggtcgtgaggaaactgagaggagaagatcaagaggtggagctggttgtagattatatttcaaaggaggtcaatgaaatcatggtaaaaatgccataccagtgtttcataaatggacagttcacagatgcagacgatggaaagacttacgacactatcaacccaacagatggatctacaatatgcaaagtatcctacgcttctttggcggatgttgataaagcagtagcagcagcaaaagatgcttttgaaaacggtgaatggggaagaatgaatgcaagagaaagaggaagattgatgtatagacttgcagacctactggaagagaaccaagaagagctggcaactattgaagcccttgattcaggggctgtctataccttggccctgaagacacacattggaatgtctgtgcaaacattcagatattttgctggctggtgcgacaaaattcagggttctactattccaatcaaccaggcccgtccaaatcgcaatctgaccttcaccaagaaagagccactcggtgtctgtgccattattattccctggaactacccgctgatgatgctggcatggaagagtgctgcgtgtttggcagcaggcaataccttagtgctcaagccagcacaggtcacgcccttgactgctttgaagtttgcagaactgtctgtgaaagcaggctttccaaagggggtcatcaacatcattccaggctcaggtggcatagcaggacaacgtctgtctgaacatcctgacatccgcaaacttggtttcactggatccactcctattggcaaacagatcatgaagagctgtgctgttagcaacttgaagaaagtttcccttgagcttggtggcaagtctccacttataatatttaatgactgtgaacttgacaaggctgtgcgaatgggcatgggagcagtatttttcaacaaaggagagaactgtattgctgctgggcggttgttcgtggaagaatccatccacgacgaatttgtgacaagagtggtagaagaaattaaaaagatgaaaattggtgatccacttgacagatccactgatcatgggccccaaaatcataaggctcatctggaaaagctgctgcaatactgtgaaactggagtgaaagaaggggccactttggtgtacgggggaagacaagtccaaaggccaggctttttcatggagccgaccgtgttcacagatgtggaagactacatgtacctcgccaaagaggaatcctttgggcctattatggtcatttctaaattccaaaatggggacatcgatggagtgttgcagcgagcaaatagtacagagtatggtttggcctcaggggtttttacaagagacataaacaaagctatgtatgtgagtgaaaaactggaagcaggaactgtttttattaacacatacaacaagacagatgtggcggccccatttggcggagttaaacaatctggctttggaaaagacttaggtgaggaagctctaaatgaatatctcaaaaccaagacggtgacactggaatattag

SEQ ID NO: 32329 - DNA, 3033 bp, Homo Sapiens
agcagtccccgggcttgcgcggcgcggagagggaggcgccccgcggcggggcccccactcggtcagcccgcgcgtcggtccccgcgcggccgccatgacctggagcgccacggcccggggcgcccaccagcccgacaacaccgccttcactcagcagcgcctccccgcctggcagccgctgctgtcggccagcatcgcgctgccgctcttcttctgcgcgggcctggccttcatcggcctgggcctgggcctctactactcctccaacggcatcaaggagctggagtacgactatacaggcgacccgggcaccggtaactgctcggtgtgcgccgcggctggccagggccgggcgctgccgcccccctgctcgtgcgcctggtacttctcgctgcccgagctcttccagggcccagtgtacctctactacgagctgaccaacttctaccagaacaaccggcgctacggcgtgtcccgcgacgacgcgcagctgagcggactccccagcgcgctgcgccaccctgtcaacgagtgcgccccctaccagcgcagcgcggccggcctgcccatcgcgccctgcggcgccatcgccaacagcctcttcaacgactccttctcgctttggcaccagcgccagcccggcgggccctacgtcgaggtgccgctcgaccgctccggcatcgcctggtggaccgactaccacgtcaagttccgcaacccgccgctggtcaacggcagcctggcgttggccttccagggcacggcgcccccgcccaactggcgccggccagtctacgagctcagccccgaccccaacaacaccggcttcatcaatcaggacttcgtggtgtggatgcgcacggcggcgctgcccacgttccgcaaactgtacgcgcgcatccgccagggcaactactcggccgggctgccgcggggcgcctaccgcgtcaacatcacctacaactacccggtgcgcgcgttcggcggccacaagctcctcatcttcagcagcatctcgtggatgggtggcaagaaccccttcctgggcatcgcctacctggtcgtcggctccctctgcatcctcaccggctttgtcatgctggtcgtctacattcgctaccaggaccaggacgacgacgacgaggagtgattccggctttccagggatccctcctgcttcttgccaaaactcttgcaaggtgcttttggcatctcctcctcgcccgtcacccaattccaacctcgcctagcttttcctccctttgtgaatgaggggaccagataagggaattaccccccttgctcttggggggctgctagactgtcttgccgcggggagggatgttgactgcagagtgaaacatccttgcaaactcttcccacctccttcacgacactgagttgccatgtgaggttcttcaagtctgagagtggaagggatccctatggagactcctattaaacccctattagaggaagagattgagagacctagcaatgtgaagtaacaaagatcaggcagctgcaagtgactcctgaatcttgagtccagggctttcgccactacagtacagtggttttcttttctttggtcggggagagtgggctggaatggagagtgaggcccacaaattacctgcagagacgtggaggcgtgagggagaacatgcttgttaaatatgcaggtagattaggagacaccaaacagagattcagacacagtaaggctgggatgagatcctcgaagctgtgttttaacaaactccactggagagtcccatattccctcaaatttgggaatcacgaccctgaaccaggttgggcctgaagcagtcaactgaattcactttttcggatagtaatttgttcccaggggcagtgacaaccatgatgttccaggtttggtctggcactctgccttgaacgtaggaagctcttgattttattgattaacatcaatcagtatgtttaaagttattctaagaagcaatagtttatttttaaaaaccttgtatagcaaaataacttaaaaccctttgtgatatcatcttaccagtttatttggtaaaaacaaacagttatttggtatttgtcagaattcttcagtgcctgctattacagctattttccaattactaacttgattatactcactcaaggcagtgcaagatcttgaagtactttttagcagttaagtaatattgaattgtattgaatagtttacatagtttattctagtctttgaaaattactgaacatggacaatgtgcatgtcattgacatctgccttagaacttctgggacaatcctgattcgagagattctatcccattatttacatataccaaaaatactttgttaatttaatgtgttggcttcccaactcctgaacacgacacaattttattattagattttgtatggtgattttaggctatgaaaacatgatcattatatgtatatagatacatttttatttgttacaaatgtttgagcagctcactagcccacccctcctctattttgggtaagagaatttactaccttttttaactatgtagttgagagcaacatgtattttgttatttttagaatggtcagtatattgctataaaattttaaatgagactatgaaagttaaagtattctgattctggttaaattaacgaatatggttccaggccctgttctctgggtttttgagagagaataaaggttatgtttgtcttacctttgttatcgagtttgctgaattcttttgaacgatgatcttaaaggcacaaacaccaccagccactttgctaatttcttaatagcagatttacattgcagcaagaaaaccatcttttatagtaacattcagttaaaatgaactcaattcattgttaacttcctaaaacagaatttgaactttatcaacctcaacgtgtatataaactagatagtcctcaatactttatcaacctcaacatgtatataaactagatagtcctcaaatactgtttgaatttaataaatgtcaatttaaaaatt

SEQ ID NO: 32330 - DNA, 4279 bp, Homo Sapiens
atgagagatcggaaggcccaggaaaatgttggacttctggtagtgtccacattgctcttcctggctctatgcacaaaggaagtggcatctgtcaaagatgccagatacattggaggttccctagaagggcattctgacaaggatgactcaaaaaagaaggaggagactgcggcgcagcagcgactagtgggagtccgatgtgggagaggggctgcggccaccgccaccgccgccgccaccaggaaggcggaggacgcaggagccaagagcaagggacgccgccacggtcatcttcgcctgccccgccgccctcttagagacactcattgcctatggaaagatggagatgaacctctaacacagtggaaaggaaccgttctggatcaggtacctgtaaatccctctctgtatcttatcaaatatgatggatttgactgtgtttatggattggaacttcacagagatgaaagagtgtcatcacttgaagtccttcctaatagagttgcatcatctagaatcagtgatacacacttggcagaaataatggttggcaaagcagtggaacatatttttgagacagaggaaggttccaaaaatgaatggagggggatggtcttagctcaggcacctgtcatgaacacatggttttacattacctatgagaaagatcctgtattatatatgtaccagctcttagatgattataaagatggtgacctccgcatccttcaagattccaatgattctcctctggcagagagggagccaggagaagtcatagacagcctggtaggcaaacaggtggaatacgccaaagacgatggctccaagagaactggcatggtcattcatcaggtagaagcaaaaccctctgtgtacttcatcaaatttgatgatgatttccatatctatgtctacgatttggtaaaaacatcttagaggtcatcttgaaatttgccaaatatatgagactctaaatctgtagacacagaaagtcttgattgctttccagtttgtaagaaccatcttctccctttttgcacgttttgcttggcaaaaaaattggaacttctgccctctcatacgtttttggaagaaaccttttgcccatctgtccaaccttttcactggttcctctccgcaatttaactgattagtgagaagggtaaagtctgacatccattggctcatacttttttttatcttgggtggtgttaatagattaaaggtagctgaacacctctcacctcactctttttggcacttggactctacactcattgaggtgtgaagcttgctgagatatcccatgtgactggctgggtaagtgtctttgcaatctcaaatctcccccaagtggcttcaaaaatctaacttgggaaagagtgggaagcccattttggtctcttgttcaagttgcattctcagttctaactgtactaaaagtaaggctaataattttgctctctttccggttctttcacctattgctcaactgttttagaattaagaaggtaattactttgcattttagtacctaaccataggctgagaaaccttgcaaaactgataagaagacaagcatttggggaccaaactccaagtggagagatcaagatttctggtggagcttaagtgaaaggttttagtcatcagtggcattagggtctctcttgtctccaatagctctggctggtatctgcagacatggagtaggttttaactgatagaagctgtgcaggcagactttagcacaaatggtctttgccagcccagaggagcattaagccaggctctagctagagccctcagtcacaggcaaaggctgggtttggctgggtttggacagatctgtccagaacctcaaaatgaaagaggagaaacctagaatcaaactgagatacagatttctttgctgtgctaagagagactcaagttttagatttgattcttaggagactgaattcagagtcccagcatgtgaggtgggcaaggcacttgtgagaaccaagaatggctgaaagcaggctatacttccttgcagggactggtgggctcatctattatggtatcccagcaggacttggaacacagtcagtggtaggtaatctgtaggcttaatgatgttttaagtgctggcattggtagatagaaatctaatagatttttgttagtgtttggatttttaactatcctgtttcttggctggccctaagaaacttatatgcagataagggtgagttctactgtggcagaaaagtaaacaatggaagggcctttgagctttccattattaaagagccattggcggaggttaaccaaagcctaggaaagaaaagttgaagtacaagcatggtttttgagagaagcacctggccaaaaccaaagctttctcattgaggttctcacagaagctccattagcagtaacagcctaataaggccatggagttctgcacatttggggctgggactcaaggcagtacaatcatattgggactgtactgcaagatatcttccaaattagtttaagttcacaggtcatggagtccagactaccggcacagattggcatcctgctgaggatgaaacaaagaagatgttctcttttctcctatgttttatctgtctacttttgctttttgatgccactaagtctctactatgatgtttgactgacaacagcaatgtgggtctgtattgccctatgttctaagtcctggggtcatatatttgcttaaaaaaactgttctagtggctggggactagtgtgctttctaatttttttgatgtgaggttgatattgtgataatcttatgtcttcttgaccctttggactctttaatatgtatgacatgcaattgtggggttagattaattcaactcctgaggtcctgaaggaacttcacccagtcaagaggaagacagccaaggctgcagctgctgaaggaaccccatatctgggcagacatctttgtgagatctatatggctgaaatgagaaaaacgagaaattgggaaaggcagaattttggactttaattattttggactttgaattagaaatttaattttgggcagtcctttttcccttggagtttaatagttgatggggtgggggtgaggtcatatagttcaaactaaggcatttttattatgttgttgatattgtattatttggagtattttaatgctatctttgggagtcattgtataattgttgtcagctatgtcaggaaatatggctggacataattgtaaattagggctgcaattgtgatcaaattttcagtctagggtgtaatgtagccttagagttaatttaattactgttctattttgacttatttcagagcctcttgggggcaaaaacaactgctcaccaatcttacattgatgggagcagaacttttctaagatactgttggtctccctggaaggggacagccacagccctgtttgttgaccagagtcttgagcattaaccattgtggcttaagagaatgaaaatgtacaagggtatgatgggatctatcctcttcctctctccatgctcctgactcaagaaaaggaaaagacttgcatctctcaaaaatgtttggaagaaagttctacccatcttctcttacactcattcaatcttatgcttgggaggaggaataacttgatgagattgagaaaatggttataatggataggcagcttaggccactcttggatcttgagttcgttccacacagcaagatgtgggaaagactgcagtccttcactacatggctgggtaaacatctgctttctagacccaactatctctccttggggtgggggaatcccaaagtcgttagacttatgatagaagttcatttcagcctcaggtccaagccatgttctccaatccagctctatcagctataaagctggtatctattttgattcttttttacagttttaatatataaattgttttttagaaaaataacacatgcctatggtaaaagtcaaacagtataaaagggtatactattaaaaagtaagtctctcttcctccttctcacccctggcctcagttccctggtcccattttcaaaaagtaacaactgttaccagttactgatgtatcattccagagatattccatgtatttacaagcatattgtgtgtgggtatgtgtgtatcaggttttttttttttttttacacaaatggtggcatactatacatgctgttctgaattttgcttttttcactgaacaatatattaaagctgatatcttaatcccta

SEQ ID NO: 32331 - DNA, 554 bp, Homo Sapiens
agaattgatagttttaattctacccattttcacctggcacatcagatcagtggcaatcatttattttatggggtgtggaggggaaagggatagaaagcggatagaaagctagaatccactgaagtccctgtcctaaaaatctcagagctgtgtttacttagcttgttttaaaaaaaatctcgccgccatgtatgacaagtgttactgcaagaaattcatcagccttctacagatacttccagttttgctgtaatgatctgcagaagagaactgccatcactttctcacatcccaaggtgttgcaggaactcagagagaggggagagtggctgaaacgcttaattaccggaggcgaaggaggggcgcgcgggggaccgaaggagaggggagtgaagaaggaaggtcctttaccaggcttgtacctggagaaagctttgaatcgcttctctgctatatttggaaaaggtatgcttgctttttaaaaaaatgcctttagggcaaagtgatacccttgtgtaataattaactcagacaataaaaataattggaaaatc

SEQ ID NO: 32332 - DNA, 749 bp, Homo Sapiens
cccatcccccggactccacccccagcgggaggccacggggccgctgtgcgcacgcgccgccgcacaccgggggctctcgggcacccgcgcggcgccggttggccttcccggcgctcgcccgggggcgcgcttgcgcgccagcggctgcggacaccagcctgcgtccccggcgcggcgggccatggaggccctgaggagggcccacgaggtcgcgctccgcctgctgctgtgtaggccgtgggcctcgcgcgccgccgcccgccccaagcccagcgcctcggaggtgctgacgcggcatctgctgcagcggcgcctgccgcactggacctccttctgcgtgccctacagcgccgtccgcaacgaccagttcggcctctcgcacttcaactggccggtgcagggcgccaactaccacgtcctgcgcaccggctgcttccccttcatcaagtaccactgctccaaggctccctggcaggacctggcccggcagaaccgcttcttcacggcgctcaaggtcgtcaacctcggtattccaactttattatatggacttggctcctggttatttgccagagtcacagagactgtgcataccagttatggacccataacagtttattttctcaataaagaagatgaaggtgccatgtattgaaagtgtgcgtcaaagaacataaatatcagtggattttctctgtgtatatgtgcagtatttatttttgatcctttaaaataaaacttttgcaaat

SEQ ID NO: 32333 - DNA, 10354 bp, Homo Sapiens
cttgaatcgagtgaaattacacaaaggagcgccgcggaggaggcggcccggggacccggacaccctgaaactcaccagagacccgttcgcccccggccaactccgtgcccgtggattcagccccctggccgcagctgccgagccaactccggagcccgctctgcgttttgttttcccctcggcactaggcagcggaggagcccgaccgacccggacctatatccagactttgcctgacactgcagggtccaagagaattaaagaaatatggaatgacatgaagaagattagttaaggattataggctttgagggcaaacacctcagtgaagtgaagcacaggcaagctcctgagctgtggtttggaggagccgtgtgttggaagaagatggcagatccaggaatgatgagtctttttggcgaggatgggaatattttcagtgaaggtcttgaaggcctcggagaatgtggttacccggaaaatccagtaaatcctatgggtcagcaaatgccaatagaccaaggctttgcctctttacagccatcccttcatcatccttcaactaatcaaaatcaaacaaagctgacacattttgatcactataatcagtatgaacaacaaaagatgcatctgatggatcagccgaacagaatgatgagcaacacccctgggaacggactcgcgtctccgcactcgcagtatcacacccctcccgttcctcaggtgccccatggtggcagtggtggcggtcagatgggtgtctaccctggcatgcagaatgagaggcatgggcaatcctttgtggacagcagctccatgtggggccccagggctgttcaggtaccagaccagatacgagccccctaccagcagcagcagccacagccgcagccaccgcagccggctccgtcggggccccctgcacagggccaccctcagcacatgcagcagatgggcagctatatggcacgtggggatttttccatgcagcagcatggtcagccacagcagaggatgagccagttttcccaaggccaagagggcctcaatcagggaaatccttttattgccacctcaggacctggccacttgtcccacgtgccccagcagagtcccagcatggcaccttccttgcgtcactcggtgcagcagttccatcaccacccctctactgctctccatggagaatccgttgcccacagtcccagattctccccgaatcctccccaacaaggggctgttaggccgcaaacccttaactttagttctcggagccagacagtcccctctcctactataaacaactcagggcagtattctcgatatccttacagtaacctaaatcagggattagttaacaatacagggatgaatcaaaatttaggccttacaaataatactccaatgaatcagtccgtaccaagataccccaatgctgtaggattcccatcaaacagtggtcaaggactaatgcaccagcagcccatccaccccagtggctcacttaaccaaatgaacacacaaactatgcatccttcacagcctcagggaacttatgcctctccacctcccatgtcacccatgaaagcaatgagtaatccagcaggcactcctcctccacaagtcaggccgggaagtgctgggataccaatggaagttggcagttatccaaatatgccccatcctcagccatctcaccagccccctggtgccatgggaatcggacagaggaatatgggccccagaaacatgcagcagtctcgtccatttataggcatgtcctcggcaccaagggaattgactgggcacatgaggccaaatggttgtcctggtgttggccttggagacccacaagcaatccaggaacgactgatacctggccaacaacatcctggtcaacagccatcttttcagcagttgccaacctgtcctccactgcagcctcacccgggcttgcaccaccagtcttcacctccacaccctcatcaccagccttgggcacagctccacccatcaccccagaacaccccgcagaaagtgcctgtgcatcagcattccccgtcggagccctttctagagaaaccagtgccggatatgactcaggttagtggaccgaatgctcagctagtgaagagtgatgattacctgccatcaatagaacagcagccacaacaaaagaagaagaaaaagaaaaacaaccacattgtagcagaggatcccagtaaaggttttggtaaagatgacttccctggtggggtagataaccaagaactaaataggaactcactggatgggtcccaagaagaaaaaaagaaaaagaaaaggtcaaaggcaaaaaaagacccgaaggaaccgaaagaacccaaggagaaaaaagagcccaaggaacccaagaccccgaaagcccctaagattcccaaagagccaaaggaaaagaaagcaaaaactgccacgccaaaacccaaatccagcaaaaagtcaagtaataagaaacctgactcagaagcaagtgctttgaagaaaaaggtcaacaagggaaaaacagaaggttctgaaaattcagacttagacaaaacacccccaccatctcctcctcctgaagaagatgaggacccaggtgttcagaagagacggtccagcagacaggtgaagagaaagcgctacactgaagacctggagttcaagatttctgatgaggaggcagatgatgcagatgctgctgggagggattccccctccaacacctcccagtcagaacagcaggaatctgttgatgcagaaggcccagtggtagaaaaaattatgagcagtcgttcagtaaaaaagcagaaggaatctggagaggaggtagaaattgaggaattctatgtgaaatacaaaaacttctcttatcttcattgtcagtgggcatctatagaagatctggaaaaagataagagaattcagcaaaaaattaaacgatttaaggcaaagcagggccagaacaagttcctttcagagattgaggatgagctttttaatccagattatgtggaggttgaccggataatggactttgcacgtagcacagatgaccggggagagcctgtgactcactatctggtgaagtggtgttcacttccttatgaagacagcacgtgggagcggaggcaggacatagatcaagcaaagatcgaggagtttgagaaactaatgtccagggagccggaaacagagcgtgtggagcgacctcctgctgatgattggaagaaatcggagagttccagggagtataaaaacaataacaaactcagggaataccagttggagggagtaaactggctacttttcaattggtacaacatgcgaaactgcattttagcagatgaaatgggtttgggaaaaactatccagtccattacatttctctatgagatatatttgaaaggaatccatggcccttttttagtaattgccccattgtccacaatccccaactgggaaagggaattccgaacctggacagagttgaacgtggttgtgtatcatgggagtcaagctagtcgtcggaccattcagttgtatgaaatgtacttcaaagatccccagggtcgagtgataaaggggtcctataagtttcatgccatcatcactacatttgagatgattttgactgattgtcctgagctgcggaatattccatggcgctgtgtagtcattgatgaagcccacaggctgaagaacaggaactgcaagctgttggagggactcaagatgatggacttggaacacaaagtgctgctgacgggaaccccactccagaacactgtggaagaactcttcagcttgcttcatttcttggaaccaagtcgcttcccttcagaaaccacatttatgcaagaatttggtgatctaaaaacagaagagcaggtgcaaaaacttcaagctattctaaagccaatgatgttgagacgtctcaaagaggatgtagaaaagaacttggcccccaaagaagaaactattattgaagttgagctaacaaacattcagaagaaatattaccgagccatccttgagaagaatttcacatttctttccaaaggcggtggtcaagctaacgtacctaacctattaaacactatgatggaattgcggaagtgctgcaatcatccgtaccttatcaatggtgctgaagagaaaattttggaagagtttaaagaaacacacaatgcagagtctccagattttcagctccaggcaatgatccaggctgctggcaagctagtgctgattgacaagctgctgccaaaactgaaggctggtggccacagggtgcttatcttttcccagatggtgcgctgcttggacatactggaagactacctcattcaaagacggtacccatatgaaaggatcgacggccgagtaagaggcaacctccgccaggcagctatcgacagattctccaaacctgattctgataggtttgttttcctcctgtgtacaagggcaggaggtttaggcattaacctcactgctgctgatacctgcatcatctttgattcagactggaatccccaaaatgacctccaggctcaggctagatgtcatagaataggacagagcaaatctgtgaaaatctacaggctgattacaagaaattcctatgaaagggaaatgttcgacaaggctagtttgaaactgggcctggataaagctgtgctacagtctatgagtggaagagaaaatgctaccaatggggtacaacagctttccaagaaagaaatagaggatcttctacgaaaaggggcctatggtgcactcatggatgaggaggatgaagggtctaaattctgtgaagaagatattgatcagatcctcctacgtcgaacccacaccattaccattgagtcagaagggaaaggttccacatttgctaaggccagttttgttgcatctggaaataggacagatatttccttggatgatccaaatttctggcaaaagtgggctaagaaggctgaattggatattgatgccttaaatgggaggaacaacctggttattgatactccaagagtgagaaagcagaccaggctctacagtgcagtgaaggaagatgagctgatggagttctcagacttggaaagtgattctgaagaaaagccctgtgcaaagccacggcgtccccaggataagtcacagggctatgcaaggagtgaatgtttcagggtggagaagaatctgcttgtctatggttggggacggtggacagacattctttcccacggacgctataaacgccaactcactgagcaagatgtagaaaccatctgcagaaccatcctggtgtactgtcttaatcattacaaaggggatgagaatatcaaaagcttcatctgggatctgatcacacccacagcggatggccagactcgagccttggtcaaccattccggtttgtcagctcctgtgccaaggggaaggaagggaaagaaggtgaaagcccagagcacacagccggtggtgcaggatgccgactggctggccagctgcaacccagatgccctgttccaggaggacagctacaagaaacacctgaagcatcactgtaacaaggtcctgctgcgtgtccgcatgctgtactacctaagacaagaagtgataggagaccaggcggataagatcttagagggtgctgactcaagtgaagccgatgtgtggatccctgaacctttccatgctgaagttcctgcagattggtgggataaggaagcagacaaatccctcttaattggagtgttcaaacatggctatgagaagtacaactccatgcgagctgaccccgcgctgtgctttctggaacgagtcggtatgcctgatgccaaggccatagctgccgagcaaagaggaacagacatgctagcagatggtggtgacgggggagaatttgatagagaagatgaagacccagaatataaaccaaccagaacaccgttcaaagatgaaatagatgaatttgcaaattctccttcagaggataaggaagaatccatggaaatacatgccacaggcaagcacagtgagagtaatgctgagttaggccaactttactggcctaacacttcaaccctgactacacgtctgcgccggctcattactgcctatcagcgcagctataaaaggcaacagatgaggcaagaggccctaatgaagactgaccggcgcagacggcggcctcgagaggaagtgagagctctggaagcggaaagggaagctattatatctgagaagcggcaaaagtggacaagaagagaagaggctgatttttaccgtgtggtatccacctttggggttatttttgaccctgtgaaacagcaatttgactggaaccaatttagagcctttgccaggcttgacaaaaaatctgatgagagtttggagaaatacttcagttgttttgtggccatgtgtaggcgagtatgtcgaatgcccgtcaagccagatgatgaaccgcccgacctctcctccataattgagccgatcacagaggagcgagcctctcgaactctgtaccgcattgagctgctacggaagatccgcgagcaggttctccatcacccccagctgggagagaggcttaagctctgccagccaagcttggatctgccagagtggtgggagtgtggacggcatgaccgagacttgctggttggtgctgctaaacacggggtcagtcggacggattatcacatcctcaatgaccctgagttatccttcttggatgcacataaaaactttgctcaaaacagaggggcaggtaatacatcttccttgaacccactggcagttggatttgtccagactcctccagtcatctcatctgctcatattcaagatgagagggtactggaacaagccgaaggcaaagtggaggagcctgaaaacccagctgccaaggagaaatgtgagggcaaagaagaggaagaagaaaccgatggcagcgggaaggagagcaagcaggaatgtgaggcagaggccagctctgtgaaaaatgaactgaaaggtgttgaggtcggcgcagacactgggtccaaatctatttcagagaaaggttccgaagaggatgaagaggaaaagctggaggatgacgataagtcggaagagtcttcccagcccgaagcaggagctgtctctagagggaagaattttgatgaagaaagcaatgcttccatgagcactgctagagatgaaacccgagatggattctacatggaggacggagatccttcagtagctcagctccttcatgaaagaacatttgccttctcgttttggcctaaggatagagtaatgataaaccgcttagacaacatctgtgaagcagtgttgaaaggcaaatggccagtaaataggcgccagatgtttgatttccaaggcctcatcccaggttacacacccaccacagtggacagccccttgcagaagaggagctttgctgagctctccatggtcggccaagccagcattagtgggagtgaggacatcactacgtctcctcagttgtcaaaggaagatgccctcaacctctctgtccctcgccagcggaggaggaggaggagaaaaatcgaaattgaggccgaaagagctgccaagaggcgaaatctcatggagatggttgcccagcttcgagagtctcaggtggtctcagaaaatggacaagaaaaagttgtagatttatcaaaggcctcaagagaggcaacaagctctacctcaaatttttcatctctttcttcaaagtttatcttgcctaatgtctcaacaccagtgtctgatgcctttaagactcaaatggaactgctccaagcaggcctttcgcgcacacccacaaggcatctccttaatggctccctagtggatggagagcctcccatgaagaggaggcggggaaggaggaaaaatgtggagggacttgatctgcttttcatgagccacaaacggacgtcattgagtgcagaggatgctgaggtgaccaaagcttttgaagaagatatagagaccccaccaacaagaaacattccttctcccggacagctggacccagacacacggatccctgttatcaatcttgaagatgggactaggctggtgggggaagatgctcctaaaaataaggatttagttgaatggctgaagctgcaccctacttacactgttgatatgccaagttatgtaccaaagaatgcagatgtgctgttttcctcatttcagaaaccgaaacagaaacgacatagatgtcgaaaccctaataaattggatataaacactttgacaggagaagaaagggtgcctgttgtcaataaacgaaatgggaagaagatgggtggagctatggcgcctccaatgaaggatctacccaggtggctggaagaaaatcctgaatttgcagttgctccagactggactgatatagttaagcagtctggttttgttcctgagtcgatgtttgaccgccttctcactgggcctgtagtgcggggagagggagcgagcagaagaggaagaaggcccaaaagtgagatcgccagagcagccgcggccgccgctgctgtggcctccacgtcagggatcaaccctttgctggtgaacagcctgtttgctggaatggacctgacgagccttcagaatctccagaatctccagtcgctccagctggcaggcctcatgggcttccctccaggactggcaacagctgccaccgccggaggcgatgcgaagaaccctgctgctgtgctgcccctgatgctgccaggaatggcgggcctgcccaacgtgtttggcttgggcgggctgttgaataaccctctgtcagctgctactggaaacaccactactgcttctagtcaaggagaaccggaagacagcacttcaaaaggagaggagaaaggaaatgagaatgaagacgagaacaaagactctgagaaaagcacagatgctgtttcggctgctgactctgcgaatggatctgttggtgctgctactgccccggctggattgccctcaaacccgctagccttcaaccctttcctcctgtccacaatggccccgggcctcttctacccatccatgtttctacctccaggactggggggattgacgctgcctgggttcccagcattggcaggacttcagaatgccgtgggctccagcgaagaaaaggctgctgacaaggctgagggaggaccctttaaagatggagagacccttgaaggcagcgatgccgaggagagcctggataagactgcagagtcctccctcttagaagacgaaatagcacagggtgaagagctagactcacttgatgggggggatgaaatagaaaacaatgaaaatgatgaataaccagtaccagttccagttcaagtgtttaaaacttttgacaagtggtagtcctactgtttacactcacagttaatgttcatacctagttttataagctgttctgtaacatagtgtagcaaaaaaaaaagttcaagtcatgttatacaggtgtgtcaaaaggtatcttggtcattaagtattgtgcagtgcattatttattatccctaggagagatgaaatttgagaggtgatcatgtctttttaaggaaacttacataatgctctgctttttttttttctcttggtaccattggtattataataaagagcaatttgtaactgagtggcactaatggaagaaagtgctgctcaaaggaagtatgaagttatatatttaattttttaattttaatttttaatttttttgctgtgaaggtcaagctgaaatttaccatacatatcatacttgctcatttgtttccctttttgactgtatgggggttcccacactcgtgcatacacacacatccatacactctgacaatctccacgctagtgtgaacgcctctgtcccgaggcgcagcaataataaggcagctgttgaatgtgaagggtccctttggaaaattaacctactgggagggttcttgccagacagaactacagttccattgtctcgtggtcttgtaatgcactggtaaaaacaaaataaatagatgaataaataaagagtgagagaagagagaatcaggtaccttttttaaattaaaggactttgttactttagccacaaagctaaaacagcattacctcagctctaaactagccttgaagtttacagacatgactttgtaaatgtattgtttttctttgttgtgatgtccttttatttttttctttgaaaactgctatcatgtaagataaaatgtaaattgctgccaactgtagtaatgatgcttttaataaaagtgacccatgatatgcagagatgtaa

SEQ ID NO: 32334 - DNA, 2318 bp, Homo Sapiens
cttgaatcgagtgaaattacacaaaggagcgccgcggaggaggcggcccggggacccggacaccctgaaactcaccagagacccgttcgcccccggccaactccgtgcccgtggattcagccccctggccgcagctgccgagccaactccggagcccgctctgcgttttgttttcccctcggcactaggcagcggaggagcccgaccgacccggacctatatccagactttgcctgacactgcagggtccaagagaattaaagaaatatggaatgacatgaagaagattagttaaggattataggctttgagggcaaacacctcagtgaagtgaagcacaggcaagctcctgagctgtggtttggaggagccgtgtgttggaagaagatggcagatccaggaatgatgagtctttttggcgaggatgggaatattttcagtgaaggtcttgaaggcctcggagaatgtggttacccggaaaatccagtaaatcctatgggtcagcaaatgccaatagaccaaggctttgcctctttacagccatcccttcatcatccttcaactaatcaaaatcaaacaaagctgacacattttgatcactataatcagtatgaacaacaaaagatgcatctgatggatcagccgaacagaatgatgagcaacacccctgggaacggactcgcgtctccgcactcgcagtatcacacccctcccgttcctcaggtgccccatggtggcagtggtggcggtcagatgggtgtctaccctggcatgcagaatgagaggcatgggcaatcctttgtggacagcagctccatgtggggccccagggctgttcaggtaccagaccagatacgagccccctaccagcagcagcagccacagccgcagccaccgcagccggctccgtcggggccccctgcacagggccaccctcagcacatgcagcagatgggcagctatatggcacgtggggatttttccatgcagcagcatggtcagccacagcagaggatgagccagttttcccaaggccaagagggcctcaatcagggaaatccttttattgccacctcaggacctggccacttgtcccacgtgccccagcagagtcccagcatggcaccttccttgcgtcactcggtgcagcagttccatcaccacccctctactgctctccatggagaatccgttgcccacagtcccagattctccccgaatcctccccaacaaggggctgttaggccgcaaacccttaactttagttctcggagccagacagtcccctctcctactataaacaactcagggcagtattctcgatatccttacagtaacctaaatcagggattagttaacaatacagggatgaatcaaaatttaggccttacaaataatactccaatgaatcagtccgtaccaagataccccaatgctgtaggattcccatcaaacagtggtcaaggactaatgcaccagcagcccatccaccccagtggctcacttaaccaaatgaacacacaaactatgcatccttcacagcctcagggaacttatgcctctccacctcccatgtcacccatgaaagcaatgagtaatccagcaggcactcctcctccacaagtcaggccgggaagtgctgggataccaatggaagttggcagttatccaaatatgccccatcctcagccatctcaccagccccctggtgccatgggaatcggacagaggaatatgggccccagaaacatgcagcagtctcgtccatttataggcatgtcctcggcaccaagggaattgactgggcacatgaggccaaatggttgtcctggtgttggccttggagacccacaagcaatccaggaacgactgatacctggccaacaacatcctggtcaacagccatcttttcagcagttgccaacctgtcctccactgcagcctcacccgggcttgcaccaccagtcttcacctccacaccctcatcaccagccttgggcacagctccacccatcaccccagaacaccccgcagaaagtgcctgtgcatcagcattccccgtcggagccctttctagagaaaccagtgccggatatgactcaggttagtggaccgaatgctcagctagtgaagagtgatgattacctgccatcaatagaacagcagccacaacaaaagaagaagaaaaagaaaaacaaccacattgtagcagaggatcccagtaaaggttttggtaaagatgacttccctggtggggtagataaccaagaactaaataggaactcactggatgggtcccaagaaaaaaaaaaaaaaaa

SEQ ID NO: 32335 - DNA, 5402 bp, Homo Sapiens
gtctgcctcccctgcccccttctcttctggattcctcgctgcccaccctcattctcccggtggaagcctcgcaacgaagggccggagccgcctttctgctcccggaatgcttcacctgtccgcagctccgcccgccccacccccggaagtgacggcgaccgcgcggccctgcctttgttccgttgggcgtcgcggcgacggcgggaagatggcggcggcgggagccctggaacggagcttcgtggagctaagcggagctgagcgcgaaaggccgaggcactttcgggaattcacagtctgcagcattgggactgcaaatgccgtggctggcgccgtaaaatacagtgaaagcgcgggaggcttttactacgtggagagtggcaagttgttctccgtaaccagaaacaggttcattcattggaagacctctggagatacattggagctgatggaggagtcactggacataaatctgttgaataatgccattcgcctaaaattccaaaattgcagtgttttacctggaggggtttatgtctctgagactcagaatcgtgtgataatcttgatgttaaccaatcaaacagtgcacaggttacttttaccacacccctcccggatgtataggagtgagttggtagttgacagtcagatgcagtcaatattcactgacattggaaaagttgatttcacagatccttgcaactatcagttaattccagcagtacctggaatatctcctaattccaccgcctctacagcctggctcagcagtgatggggaggccctgtttgccttaccatgtgcttctgggggaatctttgttcttaagctacctccttatgacatacctggtatggtgtcagtcgtggaactgaaacagagttcagtaatgcaacgattgcttacaggctggatgccaacagctatcaggggtgaccagtcgccttcagatcgtcccctcagtcttgctgttcattgtgtggagcatgatgccttcatctttgctttgtgtcaggatcataaactacgaatgtggtcttacaaggagcaaatgtgcctaatggtagctgacatgctggagtatgtccctgtgaagaaagaccttcggcttactgctggaactggacacaaattacggcttgcttattcccccaccatgggactctacctggggatatacatgcatgcaccaaaacgaggacagttctgcattttccagttggtgagcactgagagtaatcgctatagtctcgatcatatttcttcactgttcacttctcaggagacactgattgactttgccttaacttccacggatatctgggccctgtggcatgatgctgagaaccaaacagtagtgaaatacatcaactttgaacataatgttgcaggtcagtggaatccagtttttatgcagcctctgccagaggaagagattgtcatcagagatgatcaagaccccagagagatgtatctgcaaagtctttttacaccaggacaattcacaaatgaagctttatgtaaggctttacagattttctgccgaggaactgagaggaatttggatctttcctggagtgaactgaagaaagaagttactttagctgttgaaaatgagcttcaaggaagtgtaacagagtatgaattctcccaggaggagtttcgaaatttacaacaagaattctggtgcaagttctatgcctgttgtcttcagtatcaagaagccctctctcaccctcttgccctacatttgaatccacacacaaacatggtgtgcctgctgaaaaaagggtacctgtctttccttattccctcatccttagtggatcatttgtatctcctgccttatgagaaccttttgacagaagatgagacaaccatatctgatgatgtggacatcgctcgggatgtcatatgtcttataaaatgcctccggctgattgaagagtcagtaactgtggatatgtcagttataatggaaatgagttgttataacctacagtctccggaaaaggctgcagagcagattctggaagatatgatcactattgatgtagaaaatgtgatggaggatatttgtagtaaactgcaagagattaggaacccaatccatgcaattggactacttatacgggaaatggattatgaaacagaagtggaaatggaaaagggattcaatccagctcagcctttgaatattcgaatgaatcttacccagctctatggtagtaacacagcagggtatattgtgtgcagaggggtgcataaaatcgccagtactcgtttcctgatctgcagagatcttttgatcttacagcagctgttaatgaggcttggagatgctgtgatttggggaactggtcagctctttcaagctcagcaagacctactacatcgaacagctcccctactcttatcttattacctcattaaatggggaagtgagtgcttggcaactgatgttccacttgacacactggagtctaatctccaacacttatcagtactggaattaacagactctggtgctttaatggcaaataggtttgtatctagtcctcagactattgtggagttattcttccaagaagttgcaagaaaacacattatatctcacctcttctctcagccaaaggcacctctgagccaaactggattgaattggcctgaaatgattactgcaattaccagttatttattgcagcttttatggcctagcaatcctggttgtctctttctagaatgtttgatgggaaattgccaatatgtacaattgcaggattatattcaactgctacatccctggtgtcaagtcaatgttggttcctgtcgatttatgctgggaaggtgttacctagttacaggagaaggacagaaggctctggaatgtttttgtcaggcagcatctgaagtaggcaaagaggaattcttggatcgcttgattcgctcagaggatggggagatcgtgtctacccccaggctgcagtattatgacaaggttttacgactactagatgtcattggtttgcctgaactggttattcagttggctacatcagccataactgaagcaggtgatgactggaaaagtcaggctactctaaggacatgtattttcaaacatcatttggatttgggtcacaatagccaagcatatgaagccttaacccaaattcctgattccagcaggcaattagattgtttacggcagttggtggtagttctttgtgaacgctcacagctacaggatcttgtagagtttccctatgtgaatctgcataatgaggttgtgggaataattgagtcacgtgctagagctgtggaccttatgactcacaattactatgaacttctgtatgcctttcacatctatcgccacaattaccgcaaggctggcacagtgatgtttgagtatggaatgcggcttggcagagaagttcgaactctccggggacttgagaaacaaggcaactgttatctggctgctctcaattgtttacgacttattcgtccagaatatgcgtggattgtgcagccagtgtctggtgcagtgtatgatcgccctggagcatcccctaagaggaatcatgatggagaatgcacagctgcccccacaaatcgacaaattgaaatcctggaactggaagatctggagaaagagtgttccttggctcgcatccgcctcactttggctcagcatgatccatcagcggttgcagttgctggaagttcatcagcagaggaaatggtcactctcttggttcaggcgggcctctttgacactgccatatcactctgtcagacttttaagcttcccttaacgccagtctttgaagggcttgccttcaaatgcatcaaattgcaatttggaggagaggcagcacaagcagaagcctgggcctggctagcagccaatcagctctcatctgtcatcactactaaggagtctagtgctacagatgaagcatggcgactattatccacttacctggagaggtacaaagtccagaataacttgtatcaccactgtgtaatcaacaagctcttgtctcatggagtgcctctgcctaattggcttataaacagttacaagaaggttgatgctgctgaattgcttcgtttatacttaaactatgaccttttagaagaagctgtggatttggtgtcagaatatgtggatgctgtattgggaaaaggacatcaatacttcggaattgagtttccactgtccgcaacagccccaatggtgtggcttccatactcctctattgatcagcttctccaagctctgggagagaacagtgccaacagtcacaacatcgcactgtcccagaaaatacttgacaaattggaggactaccagcaaaaagttgataaggcaacacgggatttattatatcgtcggaccttgtgatttggattgtcacctagcctttgtaaccgcttggtgcctcttaggacttaagactaccctacaggaaccctgtactcaaggccgatttttgtaactgtaaatgatgtgtacaacattcaagtctgcattctgcacaagataggagggcggaagagtcagaggaccctgtgcttgctggtggtgctaacacaatttctggtgttcaaccttggtctcaaatagctgcttttgtatatgattcacgagcttttttagagtttatatttttttaaactaccgaagacattcattatctgcaaattaagactcaccttcactttccaaaatagctgagggttgttggcttgttgtagctgaccaccaaaagcagtcactgcaaatcttttaattcttccctatcaccttttgtattttaatgcaattattttggtccagaactgacctgtattttctgtattgtacacaaaagctaataattttgtgtactttttatttattttggaggttttatatgatcttcaattgagtattaaataatttgcctagattaagcctaaaatgatgaccagctaattaaagaagatattttgaatctggttctgagctaaagttgagtaaattcttagctaagaaaaaattggaaatccatcatctatattagcaacagattctcagagtaaattgttaacttctatgatttatgataatcaagctggacttgatcatacaagttagtctcataatgtattggaccaaaatgtaaacttcattggtcagatttagaagcattcatgctcacaagttttgggaaagtgaaaaataataaaatcatcttggattttattctgtatattaaaatttatcttttaaggaaacaatctgtatactacttgcttgtatagccttttgacccttcttgagtttttcagaagcctttaatttttatactttcaataccatatttacattatatactttaattaac

SEQ ID NO: 32336 - DNA, 5845 bp, Homo Sapiens
atgtgctctgtgtctgcatcgcaggtgtttgagatcctgctgagccgaggctactcggagaacagtttccgggaagacctgaagagcctctatttgaaacttgggattgagaacaaagcgatgatctttctgttcacggatgcccatgtggctgaggagggcttcctggagctcatcaacaacatgctgacctcaggaattgtacctgcgcttttttctgaagaggagaaagagtctatcctgagtcagattggacaggaagctctgaagcaaggcatggggccggccaaggagtctgtgtggcagtacttcgtgaacaaaagtgcaaataacctgcacattgtcctgggcatgtcgccagtgggggacaccctgaggacctggtgcagaaacttcccaggtatggtaaataacactggtattgactggttcatgccctggcctccccaagccctccatgcggtcgcaaagtcctttctagggtataatccaatgatcccggcagaaaatatagaaaatgtggtgaagcatgttgtcttggttcaccaatccgtggaccactacagccaacagtttctacagaaattgaggcgcagcaactatgtcactcccaagaactaccttgattttattaacacctattcaaaattgctggatgagaaaactcagtgtaatatagctcagtgcaagcgtctggatgggggactggacaagctgaaggaggccaccatccagctggacgagctgaaccagaagctggccgagcagaagatcgtgctggcggagaagtccgccgcctgcgaggccttgctggaggagatcgccgtcaacaccgctgtagccgaggagaagaagaaactggcagaggaaaaggccatggagatagaggagcagaacaaagtcattgccatggagaaggccgaggccgagacgaccctggcagaggtcatgcccatcctggaggccgccaagctggaactgcagaagctggacaagtcggacgtgactgagattaggtcgtttgctaagcccccgaagcaggtgcagacggtctgcgaatgcatcctcatcatgaaagggtacaaagagctgaactggaaaacagccaagggcgtgatgtccgacccgaatttcctgcggtctctgatggagattgattttgattcgattacccagagccaagtgaaaaacatcaaaggcctcttgaagactcttaataccacaactgaagaaatggaagctgtcagcaaagccgggctggggatgctgaaatttgttgaagctgtaatgggctactgtgatgttttcagagaaatcaagcccaaaagagagaaggtggccaggctggagcggaatttttacctcactaaacgggaactggaaaggatccagaatgagttggcagcaattcagaaagagctggaaacattgggtgccaaatatgaggccgccatactggaaaagcagaagctgcaggaagaagccgagatcatggagaggcggctgattgccgcagacaaactcatctcgggtctggggtcagaaaacatcaggtggctgaacgacctggatgagctgatgcaccggcgcgtgaagctgctgggggactgcctgctctgcgcggctttcctcagctacgagggagccttcacctgggagttccgtgacgagatggtcaatcggatttggcaaaatgacatcctggagcgggagatccccctgagccagcctttccggctggaaagcctgctcacggatgatgttgagatcagcagatggggatcccagggccttccccccgatgagctctccgttcagaatggcatcctcaccacccgggccagccgcttccctctgtgtatcgacccccagcagcaggccctcaactggatcaagagaaaagaggagaagaacaatctgcgggtcgcttcctttaatgaccctgacttcctcaagcagctagagatgtccataaagtacgggacccctttcctgttccgcgatgttgatgaatacatcgatcctgtgattgacaacgtcttagaaaaaaatataaaagtctcccaaggacggcagtttattatcctgggagacaaggaagtggactatgattcaaatttcagactgtacctgaacaccaagctggccaatcccagatattccccatccgtgtttgggaaagctatggtgatcaattacactgtcacgctgaagggcctggaggaccagctgctgagcgtgctggtggcttacgagaggcgggagctggaggagcagcgggagcacctcatccaggagaccagcgagaacaagaacctgctcaaggacctggaagattccctccttcgggagctggccacgtccacggggaacatgctggacaatgtggacctggtgcacaccctggaggagaccaaatccaaggcaacagaggtctcagagaaactcaagctggcggagaagacagccttggacatcgacaggctgcgggatggctaccggccagcagccaggaggggggccatcctgttcttcgtcctgtctgagatggccctggtgaactccatgtaccagtactccctgattgccttcttagaggtcttcaggctgtcactgaagaagtcgctgcctgattccatcctcatgaaacgcctgaggaacatcatggacacgctgaccttcagcatctataaccacggctgcacagggctgtttgagaggcacaagctactcttttcttttaatatgaccatcaagatagaacaagcagaagggagagtccctcaagaagaactagatttctttttaaaaggaaacatttccctggagaaaagcaaaagaaaaaagccctgcgcttggttgtctgaccaaggatgggaagatatcattcttttatcagaaatgttttcagacaactttgggcaacttcctgatgatgttgagaataatcagactgtctggcaggagtggtatgacctggattcactggagcagtttcccgtccccttgggttacgataacaacatcacccctttccagaagttgcttattttgcgctgtttccgtgtggatcgggtctatcgggccgtgactgactatgtgactgtaacaatgggagagaagtatgtgcagcccccaatgatcagctttgaagctatttttgagcagagcactccacattcgcccattgtgtttatcctgagtcctggctccgaccctgccactgatcttatgaaattagcagagcgaagtggttttggaggaaatcgcctcaaattccttgcaatgggtcaaggtcaagaaaaggtggccctgcagctgctggagacggcggtggctcgggggcagtggctgatgctgcagaactgccacctcctggtcaagtggctgaaagatctggagaagtccctggagaggatcaccaagccccacccagacttccgcctgtggctcaccacggaccccaccaagggcttccccattgggattctgcagaagtccctaaaggttgtcaccgagccacccaatgggctgaaactcaacatgagggcaacttacttcaagatctctcacgaaatgctggaccagtgcccgcaccctgccttcaagccgctggtctacgtgctggcgttctttcatgctgtggtgcaggagagaaggaagtttgggaagattggctggaacgtgtactatgacttcaatgagtctgacttccaggtctgcatggaaattctgaacacgtacttaacgaaagccttccagcaacgggacccaaggatcccgtggggcagcctcaagtacctaattggagaggtaggggtgaccggggatccttccgcaggtgcctctggggctacagagctgtggcctcgtgcccctattttcctctgagccctcagaaccagcctcttctgcccctgtgttccccttgggtttctgtgacaattctctctgctctcacctggttgttctttgtcctaagtgagctctgttcacatggaggttccctgagctggatccatggctggggatccaggcaaggcatcctctagccccttgcctcagctgttgctgtatacagagctcacaggaagcatccccggtggtctgcacacggctcaggcagtgacatcaattccaaagacagaagcagctgctggcttcttcagctgtttgtttgatgtgtttgggggactttgcctgctgcacaggagctcccaacacttcctgagggcttcttactgctttgggccctatcccttgggaagccagcaaagccacagatcaattgtgtgaacagtggcccgaaaggttatgcaagtcaacaggttcaagccttgcagcagccaggctgctggagtctcttgaccctgggtgagcctctggccccgggcccccagggtgcacacagtaggttctgagctcctggctggctctcaggccctctaatttcaggtcatgtatggaggacgggccatcgacagctttgatcgccgcatcctgaccatctacatggatgagtacctgggggacttcatttttgatactttccagccattccacttcttccggaacaaggaagtggactacaaaatccctgttggtgatgaaaaggagaaatttgttgaagccatcgaggccctcccgcttgccaacacgccagaagtgtttggtctccaccccaacgctgagattggctattacacgcaggcggctcgagacatgtgggctcacctgctggagctgcagcctcagacaggggaatccagcagtggtatcagccgcgatgattatattggccaagtggccaaagaaatagaaaacaagatgcccaaagtctttgacttggaccaggtgaggaagcgcctcggaacaggactctcccccacttcggtggtgctcctgcaggaactggaacgcttcaacaagcttgtggtccggatgacgaagtctctggctgaacttcaaagggccttggctggagaagttggaatgagcaatgagttagatgatgtggccaggtctctttttatcgggcatatccctaatatctggagaaggcttgctcctgacaccttaaagtcccttggaaactggatggtctacttcctgcggcggttcagccagtacatgttgtgggtgaccgagagcgagcccagcgtgatgtggctctcggggctgcacatccctgagtcctacctcacggcgctggtgcaggccacctgccggaagaacggctggccactggaccgctccaccttgttcacacaagtgaccaagttccaggatgcagatgaagtgaatgagcgggcgggacaaggatgctttgtctcaggactgtacctggaaggtgctgactgggatatagaaaaaggatgtcttatcaagagcaaacccaaggtgctggttgtggacctgccgatcctgaagatcatccccattgaagcccatcgcctcaagctgcagaatactttccggacccccgtctacaccacctccatgagaaggaacgccatgggagtcggcttggtttttgaagctgatctctttaccacgaggcacatttctcactgggtgctgcaaggagtatgcctcaccctgaattctgattaacctttgggtgaagaaaactgcttaatgaattcggagcctggggttgtcagagtgatcgggtctgctgtcatttcttggggcctctcaagaggcaggagggggactgacactgatttttcatttgaaatcagccacttaaatctctttccatacaaattaacctgaatggttttgtttttaatactactttttaaaaggaatttatataatcaaaaagtaaatattggagagt

SEQ ID NO: 32337 - DNA, 2158 bp, Homo Sapiens
atggagtccgtatccgagcgggtctccagtgtgcatcgccaaggggggctctcttctttccttgtggagtccgaagcgtggccacgccccggtcaccggaaaaatccgtgtgacgtcacaaaaacctacgcgtcgcgcggtgggcgggagttggcggacggtccctggctgggttctggaggccctgggaccgcggaagaggcttcagacgctgcagcgatgcctcgcccacggcgggtcagtcagctcctggatctatgcctttggtgcttcatgaagaatatttccagatatctcacagacattaagcctttgcctcccaacataaaagacagactgattaaaataatgagtatgcagggacagataacagattcaaatataagtgagattttacatcctgaagtccaaactctagatctacggagctgcgatatatcagatgctgctctcctgcacctgtctaactgtagaaaactgaagaaattaaatttaaatgcttcaaaagggaaccgagtttctgtaacttcagaaggaataaaagctgtggcttcatcttgttcatacctacacgaagcttctttgaaaagatgctgcaatctcactgacgaaggagtcgttgctcttgcactcaattgccagctgctaaagatcatcgatttaggtggctgcttaagtattactgatgtgtccttacatgcattaggaaaaaactgcccatttttgcagtgtgtcgacttttcagctactcaggtatctgacagtggtgtgattgcacttgttagtggaccttgtgcgaagaaattagaggagattcatatgggacattgtgtaaatctgactgatggggctgtcgaagctgtccttacttactgtcctcaaatacgtatattactcttccatggatgccccttgataacagatcattcccgagaagtgttggagcaattagtaggcccaaacaaactaaagcaagtgacatggactgtttattgatgcttttttgaagatgatcaatgctaggaaagcttatcaaaactactttcccaggaaaccatctatagagatttgcattctacttaatgttaacactatttttaattattttattgtcttaagttataactctcagagaattagctaagtcttggtatatacatggtttgtgctttactcttaaacatctttaaagtgctattattctatatctgttggatgagtcattatttttgaaatgataatcctagcatgaactctgatctatggtgttggattctgtttcttaaataactttaaaattaactgttttcccttgagatttccttctcctatgtaggtatttgagctattgttctaagtttacctgtaagtataaaccttgggagaatctaagtaaacatatttctaaaagcatagttaccttcctattttctggctcttaccttcttggagtatttaaatgcccatttgccaaaagcagacctgaacatcaagcctgttaattcttcaaagaatttaggtatttgtttcaccgaaatgaagtgacttattagccattcagcgtattagtattacagaggctcttgcccagccacatccattcattgatttttatggctactcttcccagttacattttatgcatctgtaagctttccttccttagcaaaattgcattcaaaaatgtgtaaaaatgagtaaatacagaatatcactacagagacttgtatcctcaggtttattgatttcacattgtgaaataaacagcaaaggtcttagttttcaagtgaaaactttttggtaatcacaaaattacctgacacataccacgcttaaaccaacccccaaatttagcatattcattttgccatgagccagtcttgagattttcttaaaagatttcttattttgcctctgatgtagtgaaaaacggggtaagtatgctaactttcttgtatatgttggggggtacttattcaactccatttcttgtccttacaagatttataaatgtggtatgtttatagtgtggatatatatgttgccactgcaaaggtggtgcatatgtatatatgtgcaaaatgggtaaggcctgttctaactatgaaatttttctaaagacaaattcaataaaatttaatactgaatatttaaccaa

SEQ ID NO: 32338 - DNA, 5975 bp, Homo Sapiens
gagaggcgtcctccggctctgggctccggtcggtgggtgcctcggctcggctttccccggcgctggctgggctcagcggcccctgagcccaagcgacacacgccccgcggtccccgatccggcccctgggagagccgcgccgttctggaacccgggagcccccaacttcgcgccaagttcggagccgccttctgagggagacatgaaaaagatgagcaggaatgttttgctacaaatggaggaggaggaggacgacgacgatggggatatcgtgttggaaaaccttggacagacaattgtccccgatttgggatcactggaaagtcagcatgattttcgaaccccggagtttgaagaatttaatggaaaacctgactccctcttttttaatgatggccagcgaagaattgactttgttctagtatatgaggatgaaagcagaaaagagaccaataaaaagggtacaaatgaaaaacaaaggaggaaaagacaagcatacgaatctaaccttatctgtcatggcctgcagttagaagcaacaagatcagtattggatgacaagcttgtatttgtaaaagtacacgcaccatgggaggtgttatgtacgtatgctgagataatgcacatcaaattgcctctgaaacccaatgatctgaaaaaccggtcctcagcctttggtacactcaactggtttaccaaagtcctcagtgtagacgaaagcatcatcaagccagagcaagagtttttcactgccccatttgagaagaaccggatgaatgatttttacatagttgatagagatgctttcttcaatccagccaccagaagccgcattgtttacttcatcctctctcgggtcaagtatcaagtgataaacaatgttagcaagtttgggatcaacagacttgtaaactctgggatctacaaggcagctttcccactccatgattgcaaattccgccgtcagtcagaggatcccagctgccctaatgaacggtaccttctgtacagagaatgggctcatcctcgaagcatatacaaaaagcagcccttggatcttatcaggaaatactatggagagaagattggaatctactttgcttggctgggctattacactcagatgcttctcctggccgcagttgtaggagtggcttgctttctctatggatatcttaatcaagataactgtacatggagcaaagaagtttgtcatcctgatattggtggcaagatcataatgtgtcctcagtgtgataggctttgtccattctggaaactcaatattacttgcgagtcctcaaagaaattgtgcatcttcgacagttttggaaccctggtctttgcagtatttatgggagtatgggttaccttgtttttggagttttggaagcgacgccaggcagaacttgagtatgaatgggatactgttgagttacagcaggaagaacaagcccgaccagaatacgaagcacgatgtactcacgtagtgataaatgagattactcaggaagaagaacgcattccctttactgcctggggaaaatgtatacggataaccctctgtgccagtgctgtctttttctggatcctattgatcatcgcttcagttattgggatcattgtctataggctctcggtgttcattgtattttctgcaaaacttcccaagaacattaatggaacagacccaatccagaaatacctgactccacagacagccacgtccatcacggcctccatcatcagctttataattatcatgattctgaacaccatatatgaaaaagtggcaattatgattactaacttcgaactcccaaggacccagactgattatgagaacagcctcaccatgaagatgttcttattccagtttgtcaactactactcttcatgcttctacatagcattctttaagggcaaatttgtaggctatccaggagacccagtttattggttgggaaaatacagaaatgaagagtgtgacccaggtggctgtcttcttgaactgacaactcagctgacaataatcatgggaggaaaagcaatctggaataacatacaagaagtattattgccctggatcatgaatctaattgggcgatttcacagagtttctggatcagaaaagataaccccacgatgggaacaggactaccatctgcagcctatgggcaaactgggattattttatgaatatcttgaaatgattattcagtttgggttcgtcaccttatttgtggcctcttttccactggcccctctgttggctctcgtgaacaatatattggaaataagagtggacgcatggaaactgaccacccagtttagacgcctggtaccagagaaagcccaagacattggagcatggcagcccatcatgcaaggaatagcaattctggctgtggtgaccaatgccatgatcatagctttcacgtcggacatgatcccccgcctagtgtactactggtccttctccgtccctccctacggggaccacacttcctacaccatggaagggtacatcaacaacactctctccatcttcaaagtcgcagacttcaaaaacaaaagcaagggaaacccgtactctgacctgggtaaccataccacatgcaggtatcgtgatttccgatacccacctggacacccccaggagtataaacacaacatctactattggcatgtgattgcagccaagctggcttttatcattgtcatggagcacgtcatctactctgtgaaatttttcatttcatatgcaattcccgatgtatcaaaacgcacaaagagcaagatccagagagaaaaatacctaacccaaaagcttcttcatgagaatcacctcaaagatatgacgaaaaatatgggggtgatagctgagcggatgatagaagcagtagataacaatttacggccaaaatcagaataagagctttatgttctgagaagcactttaaggaatttagctttgtcaaaatatattaggaatcactaatgagaatgtgtaagttaaatcactttggcaaatatgagtctcaactattgccatttcctcatgtattatttttcagtttcagctagcgatgcagaaactggaaaatgtaaaacttagatcatgaagggcataaaacttatcacccggaaaacctcaatgttacctttttctgataaattggaattttacagaaaaagtccctcagtgtgcttaaaaaccaccccttctaaagtagaatggattcttttttttctgtttgattattttcatttctgtctattctcaggcgcatgatctcctttatttttaagccatgtttcatttcttcacttggctagatctgttccagggtcatcttttccttacagtaccatcattatagatttaatttaatagctttcatgtgattaaaaatagctaactagactcaaggattcacaatatttaggtgtattttcaatacctccagaaaggaaacctcagttaatcagaggaaatagtttcagtcttcatttgagcatgtctttccatctcaaaaaaatactcttagtaggttggagtgaagatagcaaggttttgaagcatatttgtcctaatccacagtgacactttttatcttccaggagcactcctaggaggttccgtgcctaatcaatgttgactgctttgcagatctcaagggaataaaatgacaaaagcagggaaagttacagattcaaacagcattttaactcatgttgatctggataattaatcttttctaaagatgtgtagtttcttggaaaacagtgatatcacatgattaaaattacatttttatcaacataattgtctggaaaagataagcccctcaattttctaccagttgacttttattcattagatacagaaggtgcagtattacacatcaccagctgcctttgtgaatggctcactacacagccattggggtacaactgtgtgcatgggcagaaacagcaagtgccctcattgtggtcattgggtggggagtgccttttgtcaaggagtctgcaggaattggcttatttctgtatgccaaagtgatcaacacaccaaagtctctgccataaagaatgtggcttccttgcatcctccatcctgttactctgggcccagtaatttgatgtaactgtctgattgtactagagacaggagtatacccagcttattcataatcaagtaaagagactcagattagatttgattttttagcctcctctagagccaatcaggcagttaagagtaataaaggaaaagggtttggtcacaaaccctaccattatctggagattacttcctgctgcactcctgtcttgccatgcacgtcttgccccctcacttttgctcagcctagcagtctacttcactttattgccttgtaagtgtcaggcctcctgggcgctctggaaaagacagggagccaggccctctcacccctactggtaacaggtcattgctgggtgcacaagagggaggtgatttgcatcatggtcatgctgcatgggcttcactgggatgctgttaaacaccagaggagccaacctatcagaatcccagcagcaaaggaaaactcagattttagaggctttttacaataaagtagcgtaactctaggtcatgattgatttcaaatgcctgccatgaatgatttgtaagtaattatgtaggatccatcaaagcagtattgtaggcttttgaattgtcccagtggatccgggaccccatttcactgtctctcttgatcgtgttaatgatgcaatcagagttcaagacaggccccatgaagtctgactgcactgggatggagaaatgaatttcttcccactgaaggaaactctttctcattcgcagccaagacgggagtgccactgttcctctcttcactcctgagatactgcttctggaagcgggtgtcacttcctctctagtacctcttctcttctctgaagtgtgtgactatctcctagtgtttaaatttggcagttactcgccatgtatgtcagcatagaaaaggaaatgtttttaccttatctcctgtatgtatgatagaacttaaaagaaatgtgcatttgttttcatagccccagcagagaaaatcctcttcatagattaaatgtgctgctgtggacaggaggggaaaaaaaaccctctacatattgaaaggcaccaaatgtaatatctgacactgttaagatgcccaaaagagcaaagttgtagtggagatgcagggtcatttccccatgccatccacagtgtttgttagtgagtccacggctgacttgcagtgataaagaaaagcatggagctgtgtctgcagacaatggtggctgcatctgtaagtggcttcagaggcagcagccctggggaaattgatgggtgtggcagtggacctgtgaagagggagaatctagccttcagcctgtccagtgttaaccactagagaaactgagctttatatccttttttaatgcctgtgaattttagcatattgaaacattagagcaaatactcaggggatttttcattaaacatccctcagataatttagctatatatcattagaaagggaaagctatcatttttattttaaaactaaacaaggccatcttataaactgtcaccaaagtcttcccttttttattgcatgtgtgccttgaatttcataaaacattaattcacaatgggggtcagaatgtactcttgttgaaacacttcttgtaccattttatgttcatattatgtttgagagggtaaaaatgtatgagcagcttaactgaagtagaactattcatgatgcttttcacacattgtggcataagatgtaaagtttgtaattaatgttaatttctgtgcattttaatattcttttataattattaatgttaatttctgtgcattttaatattcttttataattatgagcattttaataaattcatttttacaaacaata

SEQ ID NO: 32339 - DNA, 2142 bp, Homo Sapiens
atgctgctgccgctactgcggagtagctgcttcccttcctcctctcccggcggcggcggcggcagcggcggaggaggaggaggaggggacccgggcgcagagagccggccggcggcgcagttgcagcgcggagcccacgggccgccggggccgctccagcgggcggaagccgagcccggggccgaccccccgcgcgcggcggaggccgagggggcgccggggcccggggcgcgcagccggggggcgggcggcggcgggcggcgggccgagcgggagccgcatgcgtgtatggatccgggcgccgcgctgcagaggcgggccgggggcggcggcggtctgggcgcgggctccccggcgctgtcgggcggccagggccgccggaggaagcagccccccaggccggccgacttcaagttgcaggtcatcattatcggctcccgcggcgtgggcaagaccagcctgatggagcgcttcaccgacgacaccttctgcgaggcctgcaagtccaccgtgggtgttgacttcaaaatcaaaactgtagagctaagaggaaagaaaattagattacagatctgggacacagcaggtcaggagagattcaacagcattacctcagcttattacagaagtgccaaggggatcatattagtatatgatatcactaagaaggagacatttgatgatttgccgaaatggatgaagatgattgataagtatgcttcagaagatgcagagcttctcttagttggaaataagttggactgtgaaacggacagagaaatcaccaggcagcagggggaaaagtttgcacagcagatcactgggatgcggttctgtgaagcaagtgccaaggataacttcaatgtggacgagatatttttgaaacttgtcgatgacattctgaaaaagatgcctctggatattttaaggaatgagttgtccaatagtatcctgtcgttacaaccagagcctgagataccgccagaactgcctccaccaagaccacatgtccgatgctgttgatttcctactttggagacaaagtggaaatgattcctggaaaggggaaaaaacgttctattctgcactacaatcattttgacaatttcctttcgcactttgtaatccaagtcagagctatacactaacttgtaaatatgcatatatgcaatcctgggtaagttttggttataagttacctatttccctccaaattattatatttcattcattaccccagtgtctagtgtacatacactgggaaacctagtacttctaatatgaagaatgggagaaatgaaaggtataatgtttcttgaaataaataatataattgtccttattaattatattatgaggacagaagatattctgataagagagaacgtggtgctttgcttaccgttttaaagaaaatttgtaaaactaaagactttttgaaaaaaagctatcttaagtgctttttctttatttacaagacatttcccccagtggtagcatctgaagtattggagtgtttctgccacgaagcaaagctccattcatggccgtcatggaaggttatttattaatgttacataatggtagaatattactagttagagggttggatttgacttggtcctaaggccacagaatctctctcatggcttcctaagggatgtacctttatgcttttaagaactacaaagattcaataaagaaagaaatgtttttgaaactatagaaaaagattttaaaacacgctgctgtcctaaacaaatcctgtttaaaggaattttaaagagatgcattttactatatcaaagaacatacgtgtatttgcctaaacactctgtacctttgtaatgataaaacttcccccttctttacggtgaagcttattctgattaagcctagactgtgttctttttttttttttttttttttttttttttttttttttttttttttggtctgatgatgaatttgtgaactctatctttggtatatcttttattaaactgcactgttttgtttagtcaaggtaattaagtaattatgtatttgaataacttggtgtgtcttgagtgttgtggtatgaaaagcattgtggtctttctacactaatgaagtgcaaataaaattttgtatttatgaatg

SEQ ID NO: 32340 - DNA, 1874 bp, Homo Sapiens
atggccaatgacattgatgagctcattggcattcccttccccaaccacagcagtgaggtcctgtgcagcctcaatgagcaacggcacgatggcctgctgtgtgacgtgctcctggtggtgcaggagcaggagtatcggacccaccgctccgtcctggctgcctgcagcaagtacttcaagaagcttttcacagccggcaccctagccagccagccctacgtctatgagatcgactttgtccagcctgaggctctggctgctatcctggagttcgcctacacctccacgctcaccatcaccgctggcaatgtcaagcacatcctcaacgcagccaggatgctggagatccagtgcatcgtgaacgtgtgcctggagatcatggagcctgggggggacgggggggaggaggatgacaaggaggacgatgacgacgacgaagatgatgatgatgaggaggacgaagaggaggaggaggaagaggaggaggatgacgatgatgacacggaggactttgctgaccaagaaaacttgcctgacccccaggacatcagctgccaccaaagcccttccaagacagaccatctcacagagaaggcctattcagacacccccagggacttccctgactccttccaggctggcagtcctggccatctgggggtgatccgggacttctccatcgaatctctgctaagggagaacctgtaccccaaggccaacatccccgacaggagaccctccttgtctccattcgccccggacttctttccacacctctggccaggggacttcggtgcctttgcccagctgcctgagcagcccatggacagtgggccactggatctggtcatcaagaatcggaagatcaaggaggaggagaaggaggagctgcccccacccccaccgccacccttccctaatgacttcttcaaggacatgttccctgacctgccgggggggcctctgggacccatcaaggcggagaacgactacggtgcctatctcaacttcctgagtgccacccacctgggaggcctcttcccaccctggcccctggtagaagagcgcaagctgaagcccaaggcctctcagcagtgccccatctgccacaaagtcatcatgggggccgggaagctgccgcggcacatgaggacccataccggggagaagccatacatgtgcaccatctgcgaggtccgcttcaccaggcaggacaagctgaaaatccacatgcggaagcacacaggggagcggccctacctgtgcatccactgcaacgccaagttcgtgcacaactacgacctcaagaaccacatgcgcatccacacgggcgtgcggccctaccagtgcgagttctgctacaagagcttcacgcgctctgaccacctgcaccgccacatcaagcgccagagctgccgcatggcacggccccgacgcggccgcaagcctgctgcgtggagggccgccagcctgctcttcgggcccggcggcccggcccccgacaaggcggccttcgtgatgccccctgcgctgggcgaggtgggcggccacctgggcggcgcagctgtgtgcctcccgggccccagccccgccaagcacttcctggcagcgcccaagggcgccctgagcctgcaagagctggagcggcagttcgaggagacacagatgaagctgttcgggcgcgcgcagctggaggctgagaggaacgcggggggcctcctggccttcgcgctggccgagaacgtggcggcggcgcggccctacttcccgctgcccgacccttgggccgccggcctggccggcctccctgggctcgccggcctcaaccacgtggcctccatgtccgaagccaacaactaggctggtccctgtcg

SEQ ID NO: 32341 - DNA, 3809 bp, Homo Sapiens
ccttccacgcggagagccatggagggagtgagcgcgctgctggcccgctgccccacggccggcctggccggcggcctgggggtcacggcgtgcgccgcggccggcgtgttgctctaccggatcgcgcggaggatgaagccaacgcacacgatggtcaactgctggttctgcaaccaggatacgctggtgccctatgggaaccgcaactgctgggactgtccccactgcgagcagtacaacggcttccaggagaacggcgactacaacaagccgatccccgcccagtacttggagcacctgaaccacgtggtgagcagcgcgcccagcctgcgcgacccttcgcagccgcagcagtgggtgagcagccaagtcctgctgtgcaagaggtgcaaccaccaccagaccaccaagatcaagcagctggccgccttcgctccccgcgaggagggcaggtatgacgaggaggtcgaggtgtaccggcatcacctggagcagatgtacaagctgtgccggccgtgccaagcggctgtggagtactacatcaagcaccagaaccgccagctgcgcgccctgttgctcagccaccagttcaagcgccgggaggccgaccagacccacgcacagaacttctcctccgccgtgaagtccccggtccaggtcatcctgctccgtgccctcgccttcctggcctgcgccttcctactgaccaccgcgctgtatggggccagcggacacttcgccccaggcaccactgtgcccctggccctgccacctggtggcaatggctcagccacacctgacaatggcaccacccctggggccgagggctggcggcagttgctgggcctactccccgagcacatggcggagaagctgtgtgaggcctgggcctttgggcagagccaccagacgggcgtcgtggcactgggcctactcacctgcctgctggcaatgctgctggctggccgcatcaggctccggaggatcgatgccttctgcacctgcctgtgggccctgctgctggggctgcacctggctgagcagcacctgcaggccgcctcgcctagctggctagacacgctcaagttcagcaccacatctttgtgctgcctggttggcttcacggcggctgtggccacaaggaaggcaacgggcccacggaggttccggccccgaaggttcttcccaggagactctgccggccttttccccaccagccccagcttggccatccctcacccgagtgtcggaggctctccagcgtctctgttcatccccagcccgcccagcttcctgcccctcgccaaccagcagctcttccggtctcctcgacggacctcaccctcctcattgcctggccgcctcagccgggccctctctctgggaaccataccctctctgactcgagcagactccggctatctgttcagcggtagccgcccaccatctcaggtgtctcgatctggggagtttcctgtttcagattacttctctcttctgtcggggagctgcccctcctccccactcccttccccagcgccttccgtggccggctcggtggcctccagctccggctctctgcgccaccgcaggcccctcatcagccctgcccggctcaacctgaagggacagaagctgctgctgttcccgtcaccccctggagaggcccccaccacgcccagcagctccgatgagcactcgcctcacaacggcagcctcttcaccatggagccgccccatgttccccggaagccgcccctgcaggacgtgaagcacgccctggacctgagatccaagctggaaagaggcagtgcctgcagcaaccgctccatcaagaaagaggacgactcttcccagtcatctacctgtgtggtggacaccaccaccaggggctgctcggaggaggccgccacctggagaggtcgtttcggcccttccctggtccggggcctcctggccgtgagcttggccgccaacgccctgttcacctcggtgtttctgtaccagagcctgcgctgacccaccgttggagcccctcggaggggagcaacccggtgcctgctgcttcaccactgccggcctcaggaccctccctggaggggctgccacctctgccctcatctccagggccttgacctcactggactgtgactgtcctcaggacacctgcccctcctcacctaacggactgcagggctgagcatgtgtctgaggtcacactctctgcccactcacctccttggctgacatcggttgtgtttggtgctgacactctgatcccgaagccagggagccccaaggggctgcatgaccctggggtgccccacacagttcagccctgcctggcagggacgccagtactactgtaactgcagcaggagctgcccggcctgccttctggccccacgcccacaggcgtagtcacatctttgtactgtactcccctgtctcacctggggcaacctcagagccccactaagctgaaggccccctgggggagggggaagcatggtccttatcatctgccctatcttgccccttcctgtggagtgggcagaagggctcccgggatcctcagagctcccaggtctgagcagccaaaggcccagctgggcctccaggaccagcgcgagcccctgccccaccctcccctgccccatgtgccctgctttgtgacctctgttgaccttcctggaagcagccccattaccctgagaatgcggagcgccctggcccacctcgccctgtgtttccaggcctgcacgtctggtccttcagctgcacatggaactgcagggcaggctggcggggggccttcagatctcagatgagactgcaccccttcgaccaccctactgggcacctgcctccagcccctgagaactccatcttcccctagttctgcccaggagcccctgagaaccccatcttcccctggttctcttgcccactcccctgctggggctccttcctggcactgaggaggggcgctcccaatgctgtgaggcagcggggagggaccgtgcacccgtggctatcagagcccctccgctgtcccaccctgggcctgggacacgggcctggggcagtgtgtgtctgctggtcatgtgctggtgccagttggggaggaatcagctgtctcggtggattctgagactcactgtggggcgggaagaagggtcttcactctgccattcagggataaagtttaattttatttttctacacattttgccaggtcaggcattttgctagtaagcaggatgcccccaactctccctgccatggaggattcttttttttaagctttgggtgcttttttaatacttttttttttaatgtggggaaggagcttgctctgacgtcaccctcctctcccctgactcctgtcctgagagctgtggatgccgcctcctgccctgcctacccctgaaacgtggggaatgggggccccaggacagcatcaggacttttgagtccagctgccagcaatggttccaactcggaggcagcgcctcttggtccccatttctgtatagcaggcgtgtgtgtgtgtgtcgaggttttttattttttgcttaatcaaactccattcccaaatgcactccatctctggctctgagggcgctccctcctctcagccgggcagcctggcctctcctgcccagacctgcggtcccagcatcccccagagccagggaacaggcccagcgggagggggttttatgttttgtttcaaacagaaaacacaaccttatttttctttacaaaagcaaaaaaggaaaccaaaaaagatacagcctttgaat

SEQ ID NO: 32342 - DNA, 1827 bp, Homo Sapiens
agaatcgaaactgagagctcctgggcaggctcggcagggcaggcagctccaggagggcttcgaaccgtggccaacagttccagtggactgcgtggacccgtgagctcaggagcctcagacgcctccctggagagccaagctggtgttcgaggtggcgcctccagggtccaccctgctgcccaacagccccgcggccaccagagggccgtccctggcccggctgtgtgccctggtggacctgtgtctgggctgctcccgctgcacccagcggctcaatgaaagcacctacgtcctccgtagggtggagcatgactgctcccgcgagatcctgctggcccgctttaagcaggccaccaagagcaaggtctggcgcgtggtgggctgccggcccaccttcccaaggcccctgtgctaccaagtctgccactactacagccctgggctcggctgccggcgccaccgaaaccggtgcacctttgcccgcagtcgcgaggaggccctggtctggaccttcgagcgtcagcacaacctccagcgcctatggctgaaggcggaggtgcagggcagcggggcccagggaggggcaggccgggcggccgacgccatccttacggagtttggcggccgcttcgagctgctttgctccctctgcttcaggcgctgtcccccatgcatctgtcgcgtggacccccaggggcagtgccctgagcacggagcctgcccctccctcctggcccacgtgagcgccgagggccgccgcaagcaacagtttgtggtggtgaggccgcggccccgggccggccagcctcctgcctactgcaggtttgtggggcgtgggcagccgtgctggcgtggggagtcccgctgccagtttgcacacagcgccgtggagatggctgtgtgggaggccgagcagctgggtggcctccagcggggggacctgctcacaccccctgcccctgatggcgacgggcgcacggccccccttggccagccccctggggcccagctgtactgcccggcctgcttggtcacctgccactctcaggaggccttcgagaaccactgcgcatcctcggagcacgcacagatggtggccttcgaccaggccctgccctgggagcaccgttccccacccccgggactctccaagttcgagctctgcccaaagcctgacctctgtgagtatggggacgcctgcaccaaggcacactcagcacaggagctgcaggagtgggtccggcgcacgcaggctgtggagctgcgggggcaggcggcctggcaggacgggctggtgccctaccaggagcggctgctggccgagtaccagcgcagcagcagtgaggtccttgtgctggcagagacccttgatggagtgcgtgtcacctgcaaccagcccctgatgtaccaggcccaggagaggaagacccagtacagctggacgtttgccgtccactctgaggtgagcggagaacagctccgactgggcggagggagccctggggaagtggtgacttcagcccgggcagacgtcaacagcctgggtcatggagctaataccgaggcactgccgctcagcacctgcgtgacctgcagcaggtcccttagcctctctgcctcagtctcctcacctagagacagggggccaggacagtcccaccttggcagggttattctatggagtatatgggttaaaacaaggatttggccaggtgcggtggttcacgcctgtaatcccagcactttgggagaccgaggcaggtggatcacctgaggtcgggagttcgagatcagcctggccaatagggtgaaactccgtctctactg

SEQ ID NO: 32343 - DNA, 8831 bp, Homo Sapiens
ggtctaggagggagcgcgccgcacgcgtgagtaaacagccggagctgggaaagtcgagctctggcagcgtctgggtgctgaggggcagaggcggagagaaccctgtcctgatcttcctagggtggccgacatgacggccaggggtcagagccccctcgcgccgctgttggagactttggaagacccttctgcctcccatggagggcagactgacgcttacctgactctgaccagtcgtatgactggagaagaaggaaaagaagtaattacagaaattgagaaaaaacttcctcggctgtacaaagttttaaagactcacatttccagtcaaaactcggagctgagtagtgctgctctacaagccctggggttttgcttatataatcccaaaattacctcagaattatcagaggcaaatgctctagaattgctttcaaaattgaatgataccattaagaattcagacaaaaatgtacgtactagagcactttgggtgatatctaagcagacatttccctctgaagtggttggcaaaatggtatccagtataattgattcattagaaatactgtttaacaaaggagagacgcattctgctgttgttgattttgaagcattaaatgttatcgtaaggctaattgaacaagccccaattcaaatgggagaagaggcagtgaggtgggcaaaactggtcatacctttagtggttcattcagcacaaaaggtacatttgcggggagcaactgctctggagatgggaatgccattattgcttcagaaacagcaagaaatagcatctattacggagcagcttatgactactaaattaatctcagaacttcagaagctatttatgagtaaaaatgagacttacgtgttaaaattatggcctttgtttgtcaaactacttggaaggaccttgcatcgaagtgggagtttcatcaattctctcttgcaactagaagaacttggatttcgtagtggagcacccatgattaaaaagatagcttttattgcttggaagagtttaatagataattttgctttaaatccagatatactatgtagtgcaaaaagactcaagttgttaatgcagcctttgagttccatccatgtgagaacagaaactctagcattaacaaaactagaagtctggtggtatttactgatgagacttggacctcatcttcctgctaattttgaacaggtttgtgtgcctctgattcaaagtacaataagcattgattctaatgcctcacctcagggcaattcgtgtcatgtagctacatctccaggtttaaatcctatgactcctgtacacaaaggtgcttcctccccgtacggagccccgggaactccccgaatgaacctgagttcgaatttaggtggaatggccacaatcccatccattcaacttttgggacttgaaatgttgcttcatttcttgttgggtccagaagccttgagttttgctaagcaaaataaacttgtgctgagcttagagccattggaacatccgttaatcagcagcccttcctttttttccaaacatgcaaatacacttatcactgctgttcatgatagctttgttgcagttggaaaagatgcccccgatgtggttgtcagtgctatctggaaggagctaattagcttggtgaagtcagttactgaatcaggtaacaaaaaagagaaaccaggttctgaagttttgactctcttattaaagtctttggaaagcatagtaaagtctgaagtatttcctgtatcaaaaacgctggtcctcatggaaattacaattaaaggacttcctcagaaagtattaggttcaccagcatatcaggttgctaatatggatattcttaatggaactccagctttgttcttaattcaattaattttcaacaatttcttggaatgtggtgtatcagatgaaaggttctttctcagtttggaatcacttgtaggctgtgttctttctggtccaacttcaccactagctttcagtgactcagttttaaatgttattaatcaaaatgcaaagcagttggaaaataaggagcatctctggaaaatgtggagtgttatagtcaccccattaactgaattgattaatcagaccaatgaagtaaatcaaggtgatgccttagaacataattttagtgccatctatggtgcattgactttaccagtaaaccacattttttcagaacagagatttccagtggccaccatgaagactttgcttagaacttggtcagaattatatagagcatttgctcgttgtgctgctttggtggcaacagcagaagagaacttgtgctgtgaggaactttcttccaagataatgtccagtttggaagatgaaggcttttctaatttgttgttcgtggatagaattatttatattattactgtaatggttgattgcattgacttctcaccatataatattaaatatcagcccaaagttaaatcaccacagagaccttcagattggtccaaaaagaagaatgagcccctagggaaattgacttctttatttaaacttattgtgaaagtgatctattctttccacacactgagcttcaaggaagcacattctgataccctcttcactattggcaactcaatcaccggcattatttccagtgtacttgggcatatttctttgccttctatgatccgaaaaatatttgcaactttaacaagacctctggcattattttatgaaaactcaaagcttgatgaagttcctaaagtatatagttgtctgaacaacaagttagaaaagctactgggagaaattattgcttgtctgcaattcagctacaccggaacttatgatagtgaacttcttgaacaactctccccactattatgcataatatttctgcacaagaataaacagattcgaaaacagagtgctcagttctggaatgccacttttgccaaagtgatgatgttggtttatcctgaagagttaaaaccagtactaacacaagccaaacaaaaatttctgctcctgttgcctggtttggaaactgttgaaatgatggaggaatccagtggaccatattctgatggaacagaaaattcacaactaaatgtgaagataagtggcatggagagaaaatcaaatggaaaaagagattcatttttggcacaaacaaagaataaaaaagaaaatatgaaaccagcagccaaactgaaacttgaatcttcgtctttaaaagtaaagggtgaaattcttttggaagaggaaaagtctactgactttgtgtttatacctccagaaggaaaagatgcaaaggaaagaatattaactgatcatcaaaaagaagttctcaaaacaaagcggtgtgatattcctgccatgtataataatctggatgtttcccaagataccttatttactcagtatagtcaggaagagcctatggaaattcctactttaaccagaaaaccaaaggaggattctaagatgatgattacggaggagcaaatggacagtgacattgtcattcctcaagatgtcacggaagactgtggtatggctgaacatcttgaaaagtcctccctttcgaataatgagtgtggttctcttgacaaaaccagtccagaaatgtcaaacagtaataatgatgaaagaaaaaaagctttaatttcatcaaggaaaacatcaactgaatgtgcatctagtacagaaaattctttcgttgtcagcagtagttcagtttctaataccactgttgctggaactcccccataccctacaagtcggaggcaaacctttattactttggagaagtttgatggttcagaaaatagaccttttagtccatcccccttgaataatatttcatcaactgttacagtgaaaaataaccaggaaaccatgattaaaacagattttctaccaaaagcaaagcaaagagaagggactttttcaaaatctgattctgaaaaaatagtgaatggaactaagagatcaagccggagagctggtaaagctgaacaaacagggaataaaaggtctaagcccttaatgagatctgagccggagaaaaatactgaggaatctgttgaaggcattgtagtcttagaaaataacccacctggtttgcttaatcaaacagaatgtgtgtcagataatcaggttcatctttctgaatctacaatggagcatgacaatacaaagcttaaagcagcaacagtggaaaatgctgtattattggaaactaatactgtagaggagaaaaatgtagaaattaatttggaatccaaagagaatacacccccagtagtaatatcagcagatcaaatggtaaatgaggatagtcaggttcagataactccaaatcagaaaacccttagacggtcttcaaggcgacgttcagaagtagtagagtctaccactgaaagccaagataaggaaaatagtcatcaaaaaaaggaacgacgtaaggaagaagaaaaacctcttcagaagagtccattgcatataaaagatgatgtgttacctaaacaaaaactgattgctgaacaaactctacaggagaatttaattgagaaaggaagtaatttacatgagaagactcttggggaaactagtgctaatgcagaaactgaacaaaataaaaaaaaggcagaccctgagaacattaagtctgagggggatggtacccaggacattgtagataagtcctctgagaaactagtcagaggccgaacacggtatcaaactagaagagcatctcagggtttgctttccagcattgaaaactcagaatctgatagttcggaggcaaaagaagaaggttctaggaagaagagatctggaaaatggaaaaacaaaagcaatgaaagtgttgacattcaagatcaagaagagaaagtggtgaaacaggaatgtataaaagctgaaaatcagtcacatgattataaagcaacttctgaagaagatgtaagcataaaatctccgatttgcgaaaaacaagatgaaagtaatactgtaatatgtcaggattctacagtaacttcagatttgttgcaagttcctgatgatttaccaaatgtgtgtgaggaaaaaaatgaaactagcaaatatgcagaatattcctttacaagtctacctgtgccagaatcaaatctaaggactagaaatgccattaagagattacataagcgagactcttttgataattgtagtttgggagaatcctcaaaaatagggatatcagatatttcttcgctttcagaaaaaacttttcaaacacttgaatgccaacacaagagaagtaggagggtgaggagatctaaaggttgtgattgctgtggggaaaaatcacaacctcaggaaaagtcactcattgggttaaagaatacagaaaataatgacgtagagattagtgaaacaaaaaaggcagatgtgcaagcacctgtaagcccatcagaaacttctcaagctaatccatattctgaaggacaatttttagatgaacatcatagtgtgaattttcatttgggtctcaaagaggataatgatactattaatgattcattaattgtttctgaaaccaaatcaaaagaaaacactatgcaagaatctcttccttctggaatagtaaactttagagaggaaatttgtgatatggattctagtgaagcaatgtctcttgaaagccaggagtcacctaatgaaaattttaaaactgttggcccgtgtttaggagactcgaaaaatgtttcacaggaatctttggagacaaaagaagaaaaaccagaagaaaccccaaaaatggaactgagtctagagaatgttactgttgaaggaaatgcatgtaaagtaacagaatccaatctagagaaagcaaaaactatggaattgaatgtaggaaatgaagctagctttcatggacaagagagaaccaaaactggtatttctgaagaagcagcaatagaagaaaataaaagaaatgatgactctgaagcagacacagctaaactgaatgccaaagaagtagcaactgaggaatttaattcagatattagtctttctgataatactacacctgtaaaattgaatgctcaaactgagatttctgaacaaacagcagctggggaactagatggaggaaatgatgtatctgatctacactcatctgaagaaacgaataccaaaatgaaaaataatgaagaaatgatgatcggcgaggcaatggctgaaactggccatgatggtgaaacagagaatgagggcataactaccaaaacctcaaagcctgatgaagctgaaacaaacatgttgactgcagaaatggacaactttgtttgtgacacagttgaaatgagcactgaagaaggaatcattgacgctaataaaactgaaacaaatactgagtatagtaaatctgaagaaaaattagataacaatcaaatggtaatggaaagtgatattttacaggaagatcaccatacttcacagaaagtggaggaaccatcacagtgtctggcatctggaacagctatctctgagctaataatagaagacaataatgcatctcctcaaaaactaagggaacttgatccttcacttgtgtcagcaaatgacagtcctagtggcatgcagacacgctgtgtctggtctcctttggcttctccgtctacgagcattttaaagagaggactaaaaagatcccaagaagatgaaatctcatcacctgttaataaggttcgccgtgtctcctttgcagatccaatataccaagcaggattggcagatgacattgatagacggtgctctattgttaggtcccattcttccaatagttctcccataggaaaaagtgttaaaacttctcctactacacaatctaagcataataccacttcagccaaaggatttctgtccccaggatcacgtagccctaaatttaagagctcaaagaagtgtttaatttcagaaatggccaaagaatccataccatgcccaacagaaagtgtttacccaccattggtgaactgtgtggcaccagttgacatcattttacctcagattacatcaaacatgtgggcaagaggcctgggacaactcattagagctaagaatataaaaactattggtgatttgagtactcttacagcatctgaaataaaaactcttcctatccgttctccaaaagtgtccaatgtaaaaaaggctctcagaatatatcatgagcagcaggtgaagactcgtggactagaagagattccagtttttgatatttctgaaaaaacagtaaatggaatagaaaataaatctttgtcacctgatgaagaaagacttgtctcagatataattgatcctgttgctttagaaattccattatccaaaaaccttctggcacagattagtgctcttgctcttcagctggattcagaagatcttcataattattcaggaagccaactatttgaaatgcacgagaaactaagttgtatggcaaactctgtaataaaaaatctacagtcacgttggagatcaccatcccatgaaaattctatttagtattttcagagaaaattgaaggtttttttaaacatcactggatttcttgattgaggaaacaagttctgaaataatagcacaatttcaaagaagagactctttgcaaagttgataacatttcaaaccctgaaggacagtgacttattatgtaagttcaattttgtaagttcattatgtaagatccttttttttttcataatatgtattcttggctgctatgcgtggtttttcaggaaatttaattatcttactgagatgtgaaagcaaaactagtaacagaacttacattttatttcatgctttcttaaacccgtgcatattctggtgaaacatgtaaaatactttaagtaaaattgaacatttttatttgaatttttgctgaactgataaaggtgtttatatttttgtttgttggtttgtttaattcatgtttgttgggactgaggtttaggaagtttgttactggttaaaaacctcaaatgaaatgcgaaagaatttgaatttttcctgcatatgtcaactttggacagctttcaagaaaaatgagaaaagtttcaacttctggcggttaaaatattaatgcagaatttactaagattttattcatttgcattagcaaatattcatgcagcagcagttgactgaaaatttattcttatgagacgtatagtattcatttttaaatgcatgattgtacattatgtatagacgacaatgtttttaatttataaatttcattctttgttaattgcatgggtttttctgcagcttattgtgaataccttggttctgttcaatagaaacattttgtatatattaaatactgaaatatcagtatcgacggtggaagtgcttcatgggcttgctgcacatatttgtaggatactgtatctgcaaatgcaacaacaaatagttttgtacttggttaacagtcttagttaaaacatgagtttattttctaaaagtatccagaataagtaaaattatagaaataagaaaatgttacacaactttgctgttcatacccttaccttcttactacttttggtttggaggagggtatcaccactagaaagtgtgcctccttaagatttcttaaaggaaagttagtttcagtatttcacagcaagttggactacaaaatctagagttgatctgctttttaaaccttcatttaaaagcaaacttggaagaaatttgaaactgatgtttttaatatatgtctgtgttgcctaggttttctttttttaaagaggtatgtaattaaaacctttgtaaaatt

SEQ ID NO: 32344 - DNA, 6212 bp, Homo Sapiens
cctttcttcttattctttcttccctttcactaatttatcccgatgttagcacattctgtctcgttactagcggacgcctgtaggtttgctacatgggatcattactgatcacggtgactctgaagtctggaactgaaggcggaatgagaagttgggaaaacttttttctctaaactctctgttttttaaaaaactattattctcgatgcttgttaagaggaaaaaaaaacctttggtgcttctgttgtgaatgtgaaacattattttccagctgtacagtgacacattttttttaaggagaaaaggactgattcgtttgccaaaaggggggtggggaggtggaataatgttatcgagtgattattctggctgagatgtgttatttggtttcttccttcttgatcatttggtgtttaagtaaaatgaggcacaggcttgtttgccgagtggagtgggaaaggcattttgatttgctggcctaattaaaaaatgataaaggattaaaaggaaaaggtggacctggactgagggtgtaaaatccctggacacattcgtggggcaggaaaaagaagaggaagattagaagattttttttttctttgagagaaagcccagcggagataaacgaatgtcccctcatctccaaagaaaagttcatcggatttttattctagagagctcatcttcaggatgtcagtgaacatttctactgcaggaaaaggtgtggatccaaatacagttgatacttatgacagtggcgatgattgggaaatcggggttggaaatttaataattgatttggacgctgatttggagaaggacagacagaaatttgagatgaataattccaccaccaccactagtagcagcaactccaaggattgtggaggtccggcctccagtggggctggtgctaccgcagccttagctgatggcctaaaatttgcttctgttcaggcctctgctccccaggggaattcacacaaagagaccagcaaatcaaaagtgaaaaggagtaaaacttctaaggatgctaataaatctctgccttctgctgccttgtatgggattcccgagatcagcagcactggcaagaggcaggaagtccaagggcgccctggagaggcaactggcatgaattcagcgctgggtcaaagtgtgagcagcggcggcagcggcaacccaaacagcaatagtaccagcaccagcacctctgccgccaccgcgggggcaggctcctgtgggaaaagcaaagaggagaagccaggtaaaagccagagcagccgaggcgccaagcgggataaggatgcggggaaatccaggaaggacaagcacgacctgcttcagggccaccagaatggcagtggcagccaggccccttccggggggcacctctatggctttggggccaagagcaatggaggtggcgcgagccccttccactgcgggggcactgggagtggcagcgtcgccgctgcaggggaagttagcaaaagtgccccggattcagggctcatgggaaactctatgttggtaaagaaggaagaggaggaggaggagagccacaggcgaatcaagaaactgaaaactgagaaggttgaccccctgtttacagtgccagcgccaccaccgccgatttccagcagtctcacgcctcagattctaccctcctacttttccccatcttcatccaatattgcagcaccggttgaacagcttttggttcggactcgttctgtgggtgtcaatacatgtgaagttggagtagtgacagagccagagtgtcttgggccctgtgaacctgggaccagtgtgaatttggaagggatcgtgtggcatgaaacagaagaaggtgtcctagtggtcaatgtcacgtggaggaacaaaacgtacgtgggaaccctactggactgcaccaagcacgactgggcccctcccaggttttgtgagtcaccgacaagtgacctggagatgagagggggccggggcagagggaagagagcgaggtctgctgctgctgccccgggctccgaggccagcttcacagagtccagagggctgcagaataagaacagagggggggccaatgggaaagggaggcggggcagcctcaatgccagcggacgaaggacacccccaaattgtgctgctgaggatatcaaagccagcccttcctccaccaacaaaaggaaaaacaagcctccaatggagctggacctgaactccagctctgaggacaataagcctggaaagcgtgtccgcacaaattccagaagcactcccactacccctcaagggaaaccagagactacttttttggaccaaggctgctcttctccagtgttaatcgactgtccccacccaaactgcaacaaaaagtacaagcacattaacggcctgaggtaccaccaggctcatgcacacttagacccagaaaacaagctggagttcgagcctgacagtgaggacaagatctcggactgtgaggaaggattgagtaatgtggcacttgaatgcagtgagccaagcacaagtgtatctgcttatgaccagttgaaggcaccggcatcccctggtgctggaaacccacctgggaccccaaagggaaagagagagctgatgagcaatggcccaggttccattattggtgctaaagctgggaagaattctggcaaaaagaagggccttaacaatgaactgaacaaccttccagtaatctccaacatgacggctgcgttagacagttgctcggcagcagacggcagtttggctgctgagatgcctaaactggaagcagaaggattaattgacaagaaaaatttaggagataaagaaaagggcaaaaaagctaccaactgcaaaacggacaaaaacctctctaaactgaaaagtgcccggcccattgcccctgccccagcccccactcccccgcagctaatcgctatacccactgcaacctttacaacgaccaccactgggacaatacccggactgccctccctcacaacaactgttgttcaggctacaccaaagagtcctccgttaaaacccattcaaccaaagcccacaattatgggagagcccatcaccgtgaacccagctctggtgtcactcaaagacaaaaagaaaaaggagaagcgaaagctaaaggacaaagaagggaaagagacgggaagcccaaaaatggatgccaagctggggaaactagaggactccaagggggccagcaaagatttacctgggcattttttaaaggatcatctcaacaagaatgaagggctggcaaatggactgtcggagtctcaggagagccgcatggccagtatcaaagctgaggccgataaggtttacactttcacagacaacgctcccagcccttccatagggagcgcctcgaggctggaatgcagcactttggtgaacgggcaggcaccaatggcacctctgcatgtgttgacccagaatggggcagagagttcagctgcaaagacaagcagcccggcctattcagacatatctgatgctgctgacgatggtggttctgacagcaggtcggagggtatgagatcaaaggccagttccccatcagatattatttctagtaaggacagtgttgtaaaagggcattcttcaactacagcacaatcatctcaactgaaagagtcccattctccctattaccacagctatgatccttattattctccaagttacatgcaccctgggcaggtcggtgcccctgcagctggaaatagtgggagcacgcagggaatgaagatcaagaaggagtctgaggaagatgctgaaaagaaagacaaggcagagcagttagattctaagaaagtggaccacaattctgcatccttacagcctcagcaccagtcggtgatcacacaaagacatcctgccctggctcagtcactttattatggccagtatgcatatgggctctatatggaccagaagtctctgatggccaccagccctgcctatagacagcagtatgagaagtactatgaggaccagaggctggcagagcagaaaatggcccagactgggagaggagactgtgaaaggaaaagtgagctccccttgaaagagctgggcaaggaggaaactaaacagaaaaatatgccatcggccacaatctcaaaagctccctctactccggagcctaacaaaaaccattctaaactagggccatcagtgcctaataaaactgaggagacaggtaaatcgcagcttctctccaatcaccagcagcagcttcaggccgacagcttcaaagctaagcagatggaaaaccaccagcttattaaggaggctgtagaaatgaagtctgtcatggactctatgaagcagacaggtgtagacccaacctcgagatttaaacaagacccagattcaagaacatggcatcattatgtataccagcccaaatatctggatcagcaaaagtcagaagaacttgatagagagaagaaattaaaagaggatagtccgaggaaaactcctaataaagagagtggtgtgcccagccttcctgtatcgttaacaagcattaaagaggagcccaaagaggccaagcatcctgattctcaatcaatggaggagagcaagctgaaaaatgatgatcgaaagactcctgtgaactggaaggactctcggggaacaagagtggctgtctcctcacccatgagtcagcatcagtcatacatacagtacttgcatgcttatccttacccacagatgtacgaccccagccatcctgcataccgggctgtttctcccgtcctaatgcacagttatcctggggcatatctctctccaggatttcattatcctgtttatgggaagatgtcagggagagaagagacagagaaagtcaataccagccctagcgtcaacacgaaaacaaccactgaatctaaagcactggatttgctccagcagcatgctaaccaataccgcagcaagtctcctgctcctgtggaaaaggctacagctgagcgggaacgggaggcagaaagggaaagggatcgccactcccccttcggccagcggcacctgcacacgcaccaccacacccacgttggcatgggttacccgctaatcccgggtcaatatgacccttttcaaggcttgacctctgctgcccttgttgcctctcagcaggtggctgcccaggcatctgcatctggaatgtttcctggacaaagaagagaataacaagattggacatgtacattgtcatgtgactggatcacatggggaagcgctttatacagacatcagttccatggtgttaatttgaaatgccttaatggcaggcaaaaaccagtcatttcatttttgtaaattacagattttatcacagagtaacaaatgttgctgtaattaaacttctgttttatatatatatacgtatacatatctgtatatatacatatatatatatataaatataaatatattctttactttttgtatcagtaaccaggctcgcacacacagggtctgctgccacgtcgcaaaccactcagtaaaggaaattaaaaatgtatttgtcatgttaaaaagtgttagccacaaaaggctacttactttcttttccttttcctttaaaattgtaaataaataatgttatgtatcagtgtgcctgaaccttgcatatccttcacatatttcccataagcccctcagaaaggctaactgtgatgatgacactttggtacaatttagatgtctatttggtggctcctgttaaagacgcaccagtgtaaaatgttcctgtagtcactgtttgtacttgtgtattgtggaaaaagtacttttggaaggcatggggttgccagtaccacaaaaactgtgttgtatataatgtaaagattaaaatggggaaataatgagcatctgtgaataatgaggtgtcattttttgataatcttgaatggcaaataacccaatagcctgcgtaccagagacatctgtgattgttctattacttgaatagttctacagtctttttttttttttaatgtttacaattatccagttttagaagagagagactttaacgccattgcctggttacttgttttatgctgtaatctagtttattttatgtaaaatgtatattgaatgctttccttttttatacctgccttaaataatttggcaatcagaattaaaaagtttttttttttttaaat

SEQ ID NO: 32345 - DNA, 1613 bp, Homo Sapiens
gacagagcggacccaggccctcggccgccccgcgtcatggccgcgccggccccggtcacgcggcaggttagcggcgccgccgccctggtcccggccccgagcggccccgacagcgggcagcccctggcggccgccgtggccgagctgccggtgctggacgcccgcgggcagcgggtaccgttcggcgcgctgttccgggagcgccgcgccgtggtggtgttcgtgcggcatttcctgtgttacatctgcaaggaatacgtagaggatctggccaaaatccccaggagtttcttacaagaagcaaatgtcacccttatagtgattggacagtcatcctaccatcatattgagcctttttgcaagctgactggatattctcatgaaatctatgtcgatcctgagagagaaatttataaaagattgggaatgaaaagaggtgaagaaattgcttcctcaggacagagcccccacataaaatcaaatctactctcaggaagccttcagagcctgtggcgggcagtgactggccctctctttgattttcaaggagacccagctcagcaaggtggaaccctcattttaggtccaggtaacaacatccattttatacaccgcgataggaataggttggatcacaaacctatcaactctgttttacagcttgtaggagttcagcatgtgaactttacaaacagaccttcagttatccatgtgtgacttaaaatgcactcagtcactttcaactggaccttctggaatgtgaccttcaatgcctgggtgtaatatcctcgtgcagtgtctaacctgctgtcccttcccagcctttgaggagttagggaagcataaagggggcttgaacctgttgaattgcatgctgggaagcatcagttgtcaaaatatgttatatacttccattttataacttttaacattttatacaaaaaaaatgaatatacaaaatataactttaaaagctataaaatcataaatactctaaattattttacattatggtatattcagtcaatgaaagagttttttggcaatataaattctgacagtatataaggggacaggagaacaacacaagaccattatattcagtgaagaaggcaaaatatcaaatctgtcaacaatgtaactgcatttttatatgtatatatttgtatttttgtatgctttggaaaaagacaggaaataaacaccaaaatgttgccagtaggtatctctgtgttaagattagtgttattattttcttttctgtacttttctgtatttcccaactgttatataatgagcatgattaatattgtagggccaggaaaaggtctttaaacattataggacaattttatgccacataacaaccttcacaaaagagcaaaattatataagctgtagtccacttttccatcgtaattgctttactcagaggaagtgtggcaatccgaacatttcacatatagccagtgtccacagcaccttctcaaactacatacttgctatccgtttcactaggattttggggggttgggggagctatggagaaaaaaattgttttagatatttaagatatgtatttaaaaatatggtcagtgtgctttttgaaaggg

SEQ ID NO: 32346 - DNA, 669 bp, Homo Sapiens
cattcttcgttgtaaattgcttctaaacacttctgaattttaaattgctaccgagaaggtccagaaaccgttctcatccaatttagtcacttttattacgttccactttgcctcccccaatcactgcggcggctcccagtttcagcgtggccgcatttggaaaaggctgaaggtagaaaactctggaatggagaggctggcgactggagcaggatccaggggctttaaattttaacctgaatgcgatcgaatgcgcgactcccagaagagatagccaggcgtccgcccggccgctcaacccccgccaggactcggaatgccttgcttttggttcttttctacaaggatgtctgcgtggatatccctggacactcgataccccccggggacctgcttttcccgcagctccgcagacgcggcgggagggcgcgctggccccggcgctgctgggacagaggtgagcagcggggtggacattgaccgattcgacaacgttcgggctctaagggctcgggaagggacccggcattttaccctccagattcccaatctatttttaaaaataatgttcaaaacatatgggaaaaataagtgattgctccttttcatggtcacagattgtatttattttttcagactggttttccaacctaacgagggaatgggtag

SEQ ID NO: 32347 - DNA, 4159 bp, Homo Sapiens
gtgcgcccttgcttcgtgccctcaacccgcatggcggagccgctggcgcgccgcggagaggccgggcgagtcgggcggtttcggcgcccgcgctgagccgcggaggaggggcggaggacgcccctgcagccggtgcgtctgccctcagtgaggcggggcgcgcggcggacgcccccgggcaggggcgggagtggtggaggcgccggcggttggcactgacaggggcggtgagcgagccgctccggtctccgggcgaggcttggccttccgagcagagacggcgggaagcggcggcggcagcggcggccctagggccggctggtgaggcgatggcggcgccggccccgggggctggggcagcctcgggcggcgctggctgtagcggcggcggcgcgggcgcgggcgcgggctcgggctctggggccgcgggggccgggggccggctgcccagccgggtgctggagttggtgttctcttacctggagctgtccgagctgcggagctgcgccctggtgtgcaagcactggtaccgctgcctgcacggcgatgagaacagcgaggtgtggcggagcctgtgcgcccgcagcctggcagaagaggctctgcgcacggacatcctgtgcaacctgcccagctacaaggccaagatacgtgcttttcaacatgccttcagcactaatgactgctccaggaatgtctacattaagaagaatggctttactttacatcgaaaccccattgctcagagcactgatggtgcaaggaccaagattggtttcagtgagggccgccatgcatgggaagtgtggtgggagggccctctgggcactgtggcagtgattggaattgccacaaaacgggcccccatgcagtgccaaggttatgtggcattgctgggcagtgatgaccagagctggggctggaatctggtggacaataatctactacataatggagaagtcaatggcagttttccacagtgcaacaacgcaccaaaatatcagataggagaaagaattcgagtcatcttggacatggaagataagactttagcttttgaacgtggatatgagttcctgggggttgcttttagaggacttccaaaggtctgcttatacccagcagtttctgctgtatatggcaacacagaagtgactttggtttaccttggaaaacctttggacggatgacagtggctttcttgtgatgacagacagaatggaggagagatctgcttatgggaagtagaaccatgaagtgactgtcacacatgcatgtccaagaaacatcctgaaaacacatgaagtcgtaaactggagaagcagctctacagcagagattatcttcgtgtttcctctttctactgggccagaaaaatcctcagggttgcagttggttgagtgggcagttgacatatgcatgttgcacccgatgttgtctctaagttagcaatgtgttatttccagctttaaaggtgagattgtagagatgctgtcaaagggataaggaaatagcaagatttttaagtagtgtgtttgtgaagactgatcccattttacaactgcctgttctttctccagtccttttttttccagccagcttgactattagaaaagtatgaaactggttgggttttatttaatatttttaatatattgagaagcatggtctgcctggactgcacttctctaaaagtgagatataaaattgtgcagctattttaaaagttgtatataatatgtgtgtaaaaaaaaaaaactgtaaaaaagaaaggacaaacaggttgttttgttctagttctaatttcttaaaaaccactacatggttacaaaattggaataacatttggggacaactgggttaactacaaagaagaggattttaagaggagatgtgttgtattgactcattttgtattatttttggcttacagttcccatagctgttagagtctggtttgtttttgtttttactctcaaaatcatagtaaagatctctcagtctcctggctaaagattgaaggaaggcaaatctatttctaattatacatatatcagtaaggatgatctcaacataatagtaatgtgtatcttttggtatccagttttatttttggccttctaagaaagtgtctcataacacagaacattgccatttgctcttgtaggcctcaaatatgaaagctattagtcatagagcctaggaaaaaaagaattgattaatggtccttttattttgtaaccttataaatgctgtagatattatcaaaaaaattttaatttcatattgtttacatcatgcaactaatctaagcctcaaactcgttattggggctataaagaaaacgtttacttacccagctgaaacaggttaagaatattcttaatctcattatagataattgcccccatgggacttgaaatacaacaccttgtgctgaaaacttcaggttggcaatatttgaaggtttcgttgtagaagagtttaacattaactcctattttgacttacaaatcttgtttctcatcactaaaatgcttttgaattaataatccaacccacatgagctgagagtttttcttttgttagaaaagaaacagacatctttctgtatgaaagtataaattgtatggttttagatacataagaattgacaaaagcgagcgaaatctttgtacttctgagttcttgctgtatgtatgttttgttttaaatctgattagggacacccagcagctggccgggattcttggattgctccttgggagttaagattgtcaatactcctgtgaagcaagggatttcagccatagaacaaagatttattgttgccacctgaaaagtttacaagtatttattgtgtatttgatacattgcttgaaaagatgaaatctgttaaagattcttttcgatgtccaggttaagaagaaacctccttgtattgagtgaaattatatgttaaatgtattagagaatgtaggtggtatagaaattgatttttcttggtgtagaacaactcagttcggcaaagtttaaaatttgattaaacaagagaagtggttcaggttgaagatggacttgttaggaagtgatcaagtcctttaagtacttgtttctttttcaggttgtgatgtggccattccgaattttgttgagagtttggtttataattgtctcttttgtcttgttagtaaacattcatttgcaacagttttgaaggtgctgagtggaaaaccgaaacacatggttattgcgtattggacctagaatgaaataattgcctcaatatttaacaacaagccattcttatctcaaagatttaaattcccgaatgtcccattcgcaaatcatatgcaattgaagtgagcagcatgagcatctgggtcatgagggccttcatttacgtaaatttgtcactaaaacccagtagtagctctacaaaatcttaaactgctgcagtgctcaaggagatggaatatctttgtcattggtgctgaggagagcatttcggtagaagacagttgcgcctgaagattgagtgtaaatcattcaaaccagtggttctcagtgttggctgtatacactttgtagtcactttggaatgttggaagacacatcgatgcttgggttccgtatgccaagattctgatgttggtctggaatatgagctggtcataaggatttttaaaaactttctggtcatttcaatatgctgccaaggttgagaaccactgttgtaaaattcaccttgagttttctcatctgcaaaatagaaaaaaaaaaatccttgctccctcccttcactacctcacaaggatattgagggtaaaggagaaaataatgggaaagtgcttgtgccgtggatgaaaagtgctattaaaagtcaaaggagtgttctgtttcaattcatagtatgatcagggaaagtgtaactgagtatactttgttgacttgggaaacctggagcactttctttggttggttaacgaagcatgcagatgtggaagcagacgttactattatccctactatggtcttctgtcatactgagacaggctgttttaattacctggttttacataggaaagaagaaatattaaggcttaaagtttgtaatgatcaatggctcataattcattaaatcttttcatacaaggaa

SEQ ID NO: 32348 - DNA, 1225 bp, Homo Sapiens
actccctgagcacaggcctctgatgtcatttcctgacctgcctccccctccccgcccgacccgcgggtgcccgagatctgactcaccgtccccctccgggcttagccggcggaggtggggcgggtgccgccgaggtagccacgcagcccctgtgcgcctccggcccggcccagcgacctcctctcgggcctgccgttacccggtcccctcctgccaccacccgctacccggccaccccgagtccgcctggggtggccgaacgtatggagctgggctccagggtgcacggggatggggggtgaggagcggggcgttctccctcccagcaccccccagctgactctgtgcccggagggggtgtgtgagccggaacctccagcattcttggggatacgaacttccaacgctgggcagcctcttaaggcttctaggaattcgcatccccagcgccccagccagcagatcggttgcgagagggaccgttcgggtccgcggggccgggaatggaggtgggagggcggggccgaggcggcggccgcctgcggactggagacccgggaggacggacgcggacgcgggctgctcgtcttttacggcccttcaacgcccaccacgacccactcctcttggagaccccgggcgacggtggggctcttgggcattctgagactgcgcttggtggagaccccgggcgacggtggagctcttgggcattctgagactgcgcttggtggagccccctactggccagactggatttctcagcctgcgactcagccccaggctacacgaaagaagccagacctggcttttactgcctcctgaggccttcgtcttgttcacactgagtgtccagtccctccaaatccggctacactctactggcaaggagcacctgggccatgttttagagatcatccgaggactaaccccaaaagtttatgaagagaaagcagaggccgagctgaagagatggacccgggtcacacccaggtaaaggcaggatctaaactgaaactggtgtcagatctggttgccttgcacccctgatatcaggtgaagcaacactgggcaggatagagcagagtgaggtcagagtgtgaagatccagcctgatgcccaaactgacgcctcttcattctcccctgctccatctgtaaacgtcacggttaatccatctactttattgcattatatagagaaataaatgaaatgtcatagctgt

SEQ ID NO: 32349 - DNA, 1384 bp, Homo Sapiens
agagccccgtgggctggaacgcgccggaatctgaggtgtgagtagagcctgggggagagtggatccaggtgaagggggcagaggactgggagttttcatcctcttgaataagaactcgacaacagagtgggaactttctgtcttgtgatccattgcctggtgagtcacagctcacaccatggatttaacctgagagcttcaacttctgctttggccctggagttcccatgccctggtgtcttctaccagttcttaggctttctgtatttgtctgaatgctttcacgggagtgtgttgcactggagcacagaggacactcgatcgtgcggcgcgcagggcggggggccgccgctgcctccccgcgggatggctggcactgtgctcggagtcggtgcgggcgtgttcatcttagccctgctctgggtggcagtgctgctgctgtgtgtgctgctgtccagagcctccggggcggcgaggaattgggaattaccaagaataaatgggaatgcacccagctggtacctgtctaggaagaaggactttgggatgaagaggttctctgtcatttttttattcttcggtgctgtgatcatcacatcagttctgttgcttttcccgcgagctggtgaattcccagccccagaagtggaagttaagattgtggatgactttttcattggccgctatgtcctgctggctttccttagtgccatcttccttggaggcctcttcttggttttaatccattatgttctggagccgatctatgccaaaccactgcactcctactgaccactcttcaggaaaacgaaaacctgttctctccttcattgtgatgacattgatgagcaggaaggcactattcagagccttgttttgacagccctcatgccttaaggttagaggagtatctgtccatcactaagacaaatctctggagtcctggcttccagaaacaggattgccaaattgtccctgtggggctagattcttaccagcttaagaaggatattgctatcttcttagtacccgtaccttaggatttccaactgttttgaaagggaaatagtaacagtgatctgcttagagtggattttcactcaagtccttagtaagtggattttggggaaaaaagcacctgggcttctggttctttttgataatatataaaattattcattatgaggttgcagttgtttgcaaaggagaggcactcaaatttgaaaggttattttaatgtgataatttggaagacttactcagatgttggtcattgaccactctgtgcatatatttctgcagagctctgtgaaggcaatgagtgtcacttccctctgctctaataaagcaataaataatagctaaagggctgactttcacttcg

SEQ ID NO: 32350 - DNA, 5642 bp, Homo Sapiens
ggcgcggtcgaggcccggaggcggcggcgcaggaggaagcggaggaggtcgggcgctcggggcccgggaggcgggccgcgcagcgccgcagccccgggctcgccatgctcctggcctcggccgtggtggtctgggaatggctgaacgagcacggccgctggcgtccctacagcccagcggtgagccaccacatcgaggcggtggtccgcgccggcccccgcgcggggggcagcgtggtgctgggccaggtggacagccgtctcgcgccctacatcatcgacctgcagtccatgaaccagttccgccaagacacgggaactctccgcccagttcgccgcaactactacgacccctcctcggcccctgggaagggcgtggtgtgggagtgggagaacgacaatggctcctggacgccctacgacatggaagtgggcatcaccatccagcatgcctatgagaagcagcacccctggatcgacctcacttccattggctttagctacgtaattgacttcaacaccatgggccagatcaaccgtcagacccagcgccaacgccgcgtccgccggcgcctcgacctcatctaccccatggtcacagggaccttgcctaaggctcagtcctggccagtcagccctgggccagccacctcgccccccatgtccccctgctcctgtccccagtgtgtcttggtgatgagtgttaaggcagccgtggtcaatggcagcactgggcccctacagctgccagtgacccgcaagaacatgccgcctcctggagtggtcaagctacccccactgccaggctctggggccaagccactggacagcacaggcaccattcgaggcccactgaagaccgccccatcgcaggtgatccggagacaagcctccagcatgcccactgggacaaccatgggctctcctgccagtcccccaggacccaacagcaagaccggaagggtggccctggccaccttgaatcgtaccaacctgcagcgactggccattgcccagtcccgggtgctgatcgcctctggggtccccacagtcccagtgaagaacctaaatgggtccagtcctgtcaaccctgccttggcaggaatcactgggatcctcatgagtgcagcggggctgcctgtgtgtctcaccaggccaccaaagctggtcctacacccaccccccgtcagcaagagtgaaataaaatccatcccaggggtttccaacacaagccgcaagaccaccaaaaaacaagccaagaaaggtaaaaccccagaggaagtgctaaaaaaatatctacagaaagtccggcacccaccagatgaggactgcaccatctgtatggaacgcctcacggccccctcaggctacaagggcccgcagcctacggtaaaacctgacctggtagggaagctgtccagatgcggccacgtctaccacatctactgcttggttgccatgtacaacaatgggaacaaggatggaagtttgcagtgtccaacctgcaagaccatttatggggtgaagacaggcacccaacctccagggaagatggagtaccacctcatcccccactccttgcctggccacccagactgcaaaaccatccggatcatctacagcatcccccccggcattcagggaccggaacacccgaatcctgggaagagtttcagcgcccgaggcttcccacgacactgttaccttccggacagcgagaaagggagaaaagttctgaagctgctgctcgtggcctgggatcgccgcctcatttttgccattggcacctccagcaccacaggcgagtcagacaccgtcatctggaatgaggtccaccacaagacagagtttggctctaatctcactggccatggctacccagatgccaattacctggataatgtgctggctgaactggctgcccagggcatctctgaggacagcactgcccaggagaaggactgaggccagaaaagctttgaggtgggaggggccatggagactgcaggacaggaagtgaggagagtgagtcaatgtagaagaagttggtgtcctgccctcccaactttctatcctcccctcctgccctgtgtccatccctcatccctcccaaccacagtgggagccagactgaatatagcgacatcattcataaatctcatccaacacaaagggagatgggatgagggccatcctgggtctgttcccatggagtttttggtgctgggtaggcaggaatcccctccctaccccacctcccaagtaggggcatggtcagcacacctagggtatgggcagtgcttaggcactccatatcctggctttgggaagccggggtttcttgcctcagccggcttcttgctacttccactctgctttgagactggagtttctgctattctccctctgctggaggcagggagctctcactgtgcaaggttggggggtgggcaaaggggtgaatcactaaactgctgtgacatcagaaactgatgccttggtgtagagcaaggaagcacttcttcccaagagggtcggagaaggaaaagcctctgggagcacattctgctgtcatcacagtccttggcttctctgggccctcctctcctcctcacagctctcacctgtccaaagaggcatctggttctctcatgtggatggatggactctggggttcctctttggagtggcatcccatgatgctgtttctagaccctctctgatcaaaccagagcctgcatcccactgagcatctgaactgtcctcagggagaggagcccacagccttcttcccaactcattctagaccagctcaaagattccatgagtttcatcgagtcactgtgagtggagcccatgctgggctctgtgccctctgtgtctgtgcatgcgcgtgtgtgtgtgggcgtgtgtgcattgctgggccagcttgaagggaaggcccgtcatgtccctgcactctgttttgcaagatgccaaaccccagttctgatggggctccaacagccaggctgtggtcctttgacgttcctcacctgttgccaacctatcccgtagtgaactgaaaccccaatgaagacagaactgtgcctggggagatgcaatgaggtgagggctgaactcatccttttatatttcttttcaagattggatcagagctcatctccatccagtcttgtttctatgaaggcttcaatctgtttccatgcaaatttgctaatcagagcccagagctgctgggtccctcatctccctcatctattatagattgacttacagcagggagagaatctctttagctcattcctaatggagttgggatcacaatatggtctggtccaatctgcatcttgttgtgtcccaagaccctatctcctccccaacattcttattgcctttggctcccagtaaggaacgaattgggggccagggaggagaacaggggggatcaagaagggaaacccaattccccctttgaaagtgggttctttgaactatgtgtttgggggaagttcctctggatactaatttgaatttatatacctcatgttttgggggtttgacgtatatatatatatatatatatgcatatatatttcataatatttggaaggtttttgatgctagaaaaatggaaacaagagaaccttcaaaaatggtacttagatgggaactggaggccaatctttcataaagccagccccatagctgcttgctgttaggcctccagccattttgacattggggtggatagtcgattcacctgcctgtcagtcgattcacctgcctgtcacccagttctgtggatgtgctggtgctgagcctttgctctctttccaaatggttacagggatgttgatcagctccaccagagggagctctgatgggaggaattgctctgccatccttgtccctgtgtctcctgtcggcaggcagccattgtatctcaccagcagaccaggagactggtcccaaggttactgcaccacagggcaatttcctgccatagttaggaaggaaacacctgaactaaatggaagagacatccctgcggtgtttaatatcacacccatgccctttgtcaggttaccatgtacagagattacttggagagcctcatgccgtctctaccttcgcacactggtcaagtatctgctgagcttcttggccgcaaggatgcagaaataggctgagggtccatgggaagaaagacacaatgaggcagtaggaggtggggaagaaaagaagacagactttcaaaatggaattaggcactggggagagatcagtttccccacatcagggagaagaaggtataggtggggaagggggtggccaggagcagaaggaagaagactcaagatggaaagggagccgctgtgcctgtggcaataccacttggagaggtcgacttcataccttcaagccttttcccctgggcttttgattgtgtctgtgccccctttcttgtcctctctgcagatgcccagtaggggctacctcatcctcgtgctgttcttgtgtggctttctgggcagtagggatcttgaatttcctttctaacactgtgcccggcaaggcggggagcattcctctgccctttgtcttgtgccaacctggaaaggtgcagtctagatttcagtgagaaccctgccagctgagccctgtgcatctactaccttgacacagagtgttttcccactagaagctctgctctgctctcctggcccaagtaggggattccatgccttccctttcatggtcttagcaccagcagcctagtttctcccttccagagtctccagggatgacaaattggattggagacaaacctcgtcagatgctcatcccctaaaaggttaattgtgtatttgtggctgcgtgtgcctttgtgttttcattctcttcccatttttgtacattttggtcttctctgtggttttatacttggtcaaaagtactcgtcttggtattgcactgttgtgtgcatgagaaaactgggggaaggctcactggtacaagaaaggacccctgacccctttccttctctgtggtccccggcattagattgggggttctgggagaggcaggtgaatgtcctaagtgaattgttctgtttgtaactggaatgtttttgaagtctttggtgttgctccgtgaaaggacatcgccacctggtgctcatgaggtgtctttgcagaacaataaatggcaaatgaacaaccacaaaattgttactcttgttggccttctgctgtttgtagattagtgcacctatctgtgagggatttgggttacctccctgagtctgtaagcaaccacaagccctgccactgggtgggggaagtccctccccaaccacttaaaaacaaattttccacatattacccacccacacatttgacctggctagactttgtttgcctaaaggaacagaccacattgctgggaaaatgagtaagtgaacgtgtgggagaaaaacacttttagaatcacgaatattcacttttaaaggtctctttgcctggctgcaatatagtgtgtgtttaaattatttacaggctgttgtttctcaaataaatgtttaatattaatcattcccaaactgacaagaacacaaaaataaaatgcaaatacagagcc

SEQ ID NO: 32351 - DNA, 2648 bp, Homo Sapiens
aagattatagagacttgctttagaaccacaagaagaaagaggaggccggcttttcagctagcatcatggcgtggccgtgcatcacgagggcctgctgcatcgcccgcttctggaaccagttggacaaagcggacatcgctgtgccgctggttttcaccaagtactcggaggccaccgagcacccgggcgccccgccgcagccaccgccgccgcagcagcaggcgcagccggcgctcgcgcccccctcggcgcgcgcggttgccatagagacgcagccagcccagggcgagttggatgcagttgcccgggcaacggggccagcgcctgggcctaccggcgagcgcgagccggcggcgggccccggccggagcgggccgggcccgggcctgggctccggctccacctccggccccgcggactcggtgatgcggcaggattaccgagcctggaaggtgcagcggcccgagcccagctgccggccgcgcagcgaataccagccctccgacgctcccttcgagcgcgagacccagtaccagaaggacttccgcgcctggccgctgccgcgccgcggggaccacccgtggatccccaagcccgtgcagatctctgcggcctcccaggcgtcggcgcccattctcggggcgcccaagcgccggccgcagagccaggagcgctggccagtgcaggccgccgctgaggcccgggagcaggaggcggcccccggcggagcgggtggcctggcggccggaaaggcgtccggggcggacgagcgcgacacgcgcaggaaggccgggcctgcctggattgtgcgccgcgccgagggcctggggcacgagcagacgccgctgcccgcggcccaggcccaggtccaggccaccggccccgaggctggcagggggcgcgccgcggcggacgccctcaaccggcaaatccgcgaggaggtggcgagtgcagtgagcagctcctacaggaatgaattcagggcatggacggacatcaagcctgtgaaaccaataaaggccaagccccagtacaagcccccagatgataagatggttcatgagaccagctacagtgctcagttcaaaggagaggccagcaagccaacaacagctgacaataaggtcattgatcgcagaagaatacgcagcctctacagcgaacccttcaaggaacccccaaaggtggaaaaacctagtgttcagagttccaaaccaaaaaagacctcagcgagccataagcccacgaggaaggccaaagacaagcaggcggtgtcaggccaggctgccaagaaaaagagcgcggagggcccgagtaccaccaagccagacgacaaggagcaaagcaaagagatgaacaataaactggctgaggcgaaagagagcctggctcaacccgtcagtgattcaagtaagactcaaggtcctgtagccacagagccagacaaggatcaaggttctgtggtcccaggccttctgaaaggtcaaggtcctatggtgcaagagcctctgaagaagcaaggttctgtggtcccagggcctccaaaggatctaggtcccatgatcccattaccagtcaaggatcaagatcacacggtccctgagcctttaaagaatgaaagccctgttatctcagcaccagtcaaggaccaaggtccctcggtcccagttcctccaaagaatcaaagtcctatggttccagcaaaagttaaggatcaaggctctgtggtaccagagtctctaaaggatcaaggtcctaggattcctgagcctgtgaagaatcaagctcctatggtcccagcacctgtcaaggatgaaggtcccatggtctcagcatctgtcaaggatcaaggtcccatggtctcagcacctgtcaaggatcaaggtcccatagtcccagcacctgtcaagggtgaaggtcccatagtcccagcacctgtcaaggatgaaggtcccatggtctcagcacctatcaaggatcaagatcccatggtcccagagcatccgaaggatgaaagtgccatggccacagcacccataaagaatcaaggttccatggtctctgagcctgtaaagaatcaaggtttagtggtctcagggccagtcaaggatcaagatgttgtagtcccagagcatgcaaaggttcacgattctgcagttgtggcacctgtaaagaatcaaggtcctgtggtccccgagtccgtgaagaatcaagaccccattctcccagtactagttaaggatcaaggccccacagtcctacagcctccaaagaatcaaggtcgtatagtccctgaacctctgaagaatcaagttcctatagtcccagtgcctctgaaggatcaagatcctctggtgccagtaccagcaaaggaccaaggtcctgcagtccctgaacctctgaagactcaaggtcccagggaccctcagctacctactgtctcacctctaccccgagtcatgatcccaactgccccccatacggaatacattgagagctccccttgacactcaccccttgacacaccaatgaaggagctgacagtgagagtgctcccctcccaggggcagtgaagacacatatttaatctgcatgaaacatgtacagtagtcttgctggaatctaataaaaatggtccctctggctca

SEQ ID NO: 32352 - DNA, 6023 bp, Homo Sapiens
attccccctcctcccccgggagcggcggcggcggccgggccggggccccagcgcgggccgggagggggcacggcggaggccacggaggcaggcgcgggagaagaccgcgctccgcttcccgggccgcgccgacctgctcggcggcctgcccgcccgcgcccaggggccccgaacggtggggccgggcaggcggctgaggcctgtcccctcagttcccaggtgccatgaggaagcctcgtcggaagtcccggcagaatgccgagggccggcgttccccgtccccctacagtctcaagtgctcacccacccgggagaccctgacatatgcccaggcccagcggattgtcgaggtagacattgatggacgcctgcatcgtatcagcatctatgacccactcaaaatcattactgaagatgagctaactgcccaggatatcaccgaatgcaatagtaacaaggaaaacagtgaacagcctcagttccctggcaagtccaagaaaccctcatccaagggcaaaaagaaggaatcctgctccaagcatgcatctggtacttccttccacctcccacagcccagcttccgtatggtggactcaggcatccagccagaagcacccccgctgcctgctgcctactaccgctacattgagaagccacctgaagacctggatgcagaggtagagtatgacatggatgaggaggaccttgcctggctggacatggtgaatgaaaaacggcgagtagatgggcacagtttggtgtctgcagatacctttgagctgctggtagaccggcttgagaaagagtcatacttggagagtcgcagcagtggggcccaacagtcactcatcgatgaagacgctttctgctgtgtgtgcctggatgatgaatgtcacaatagcaatgttattctcttctgtgacatctgcaacctggctgtacaccaggagtgctatggcgtcccatacatccctgagggccagtggctatgccgctgctgcctgcagtctccctcccggcctgtggattgcatcctttgccccaataagggtggcgccttcaaacagaccagtgatgggcactgggcccatgtggtgtgtgccatctggatccctgaagtctgctttgctaacaccgtgttcttggaacctattgagggcattgacaatatcccgcctgcccgctggaaactaacctgctatatctgcaagcagaaagggctaggtgcagccatccagtgccataaggtgaactgctacacagcattccatgtgacatgtgcacagcgggctgggctcttcatgaagattgagcccatgcgcgaaaccagcctcaatggcaccatctttacagtgcgcaagactgcctactgtgaggcccactcgccaccaggtgcggccactgctaggaggaagggcgactcccctagaagcatcagtgagactggcgatgaggaagggctgaaggagggtgatggagaggaggaagaagaggaagaggtggaggaagaagagcaggaagctcaaggcggggtgagtggctccctcaagggagtgcccaagaaaagcaagatgagtttgaagcagaagatcaagaaggagccagaggaagcaggccaagacacaccctccactctccccatgcttgctgtcccacagataccctcttacaggttgaacaagatctgtagtggtctctcctttcagaggaaaaaccagtttatgcagcggcttcacaattattggctgttgaagcggcaggcacggaatggtgtccctcttatccggcgcttgcactcccatctgcagtcccaaagaaacgctgagcagcgagagcaggatgagaagacaagtgcagtgaaggaggagctgaagtattggcagaagctccggcatgacttggagcgggcgcggctgctgattgagctgattcggaagagagagaagctcaaacgagagcaggtcaaagtccagcaggctgccatggagctggagctgatgccattcaatgttctgttgaggacaacactggacctgctgcaggagaaggatcctgcacacatcttcgcagaaccagtcaacttgagtgaggttccagattacctggaattcatatccaagccaatggatttttctactatgaggcggaagctggagtcccacctgtaccgcaccttggaggagtttgaggaggactttaaccttatagttaccaactgcatgaagtataatgctaaagacacaattttccaccgagcagctgtccgcctgcgggacctgggaggggccatcctacggcacgcccggcggcaggcagagaacatcggctatgaccccgagaggggcactcacctgcccgagtcacccaaattggaagacttttaccgcttctcctgggaagacgtggacaacatcctcatcccagagaaccgggcccatttgtccccagaggtgcagctgaaggagctgctggagaaactggacctggtgagcgccatgcggtccagtggggcccgcacccgtcgtgtccgcctgctacgccgggagatcaatgcccttcggcagaagctggcacagccaccaccaccacagccaccatcactcaacaagacagtatccaatggggagctgccagcagggccccagggggatgcagctgtgctggagcaggccttgcaggaggagccagaagacgatggggacagagatgactccaaactgcctcctccgccaaccctggagcccactgggcctgcaccttccttgtctgagcaagaatcccccccggagccccctactctgaaacccattaatgatagcaaacctccaagcaggttcctaaagcccagaaaggtggaagaagatgagctcttggaaaaatcaccactgcagctagggaatgagcctttgcaacgcttgctcagtgacaatggcatcaacagactatccctcatggcccctgacaccccggccggtaccccacttagtggtgtgggtcgccgcacatcagtcctcttcaagaaggccaagaatggggttaagctacagagaagcccagacagggtcctggagaatggcgaggaccatggtgtggcaggctctcctgcctctccagccagcatcgaggaagagcgccactcccggaagcggccaaggagcaggagctgtagtgagagcgaaggggagaggtccccccagcaggaggaagagacaggcatgaccaacggctttggaaaacacaccgaaagcgggtctgactctgaatgtagtttgggtctcagtggtggactggcatttgaagcttgcagtggtctgacgccccccaaacgcagccgtgggaagccagccctgtctcgagtgcccttcctggaaggtgtgaacggagactctgactacaatggctcaggcagaagcctcctgctgccctttgaagaccgcggagacctggagcccttggagctggtgtgggccaagtgccgaggctacccctcctaccctgccttgatcatcgatcccaagatgccccgggagggcctcctgcacaatggcgttcccatccctgtccccccgctggacgtgctgaagctgggagagcagaaacaggcagaggctggagagaagctcttccttgtcctcttctttgacaacaagcgcacctggcagtggcttccaagggacaaagtcctgcccttgggtgtggaagacaccgtggacaagctcaagatgctggaaggccgcaagaccagcatccgcaagtcagtgcaggtggcctatgaccgtgcgatgatccacctgagcagagtccgggggccccactccttcgtcacttccagctacctgtaagggcagggctgggcctgcatccgcttgccctgcctccatcccgcagggcacagagaagcctcttctgcccctgccagatgtatggccggcagcttccccctctcatggtaggccagggactgggctttctccccactaagggcaaggccccagttttgaccaatcgcatggttctcctggcaggcctgctgtgtgccaaaaactcccacccaaggtccctcaggggatatttcactgaagaaccagttagaagtagaaacagctgtggggcttgggcccagcttaggagattgcccagatggcaagaggtcctgggctccttcttgaggggctgcctggcccgctccatcctactcccactaactacacctcagggcgggtgaggttccgacactgatcccagagatgccgtggatacgccagggtcccagggggaatctccccaagctcacactctctcccgcttatcgcctattctcacacctcttctcggtcccatcttctgcacccattgcccagtcttgctttctctttcccatattccttttctttttctcttgtgccaaactgacagaaaccgtcaccacactggtctttttctttaatgtctcattccccttgaggccagctgctatgccaggtggtgtctctgccaggctcctcaggcccagacagaggccagcccacaacctatgaccccctcccccaggacaccacctcccacccacagaccttccctttagctgttgacacaacttcccagctctgcaagtgtgccccctggatcaaggcgggtcccctcttgtttttttctttgctgccacgaggtggtccaagccttcagggtgggctcctatcaggctgggtgtgcgagtgtccatctgtccacatggatgtcgagggtggtttgtgtggagctgtgctcgtcagctgggtctgccctcttcccccttttctccttcttctctcctcatggactttttctgcaattgcagtcttaagcttcactctccaccacctggatggcatggcgcctgccaccaaacatcttcctggcctgcgctctgccctgccctgcctagcctctgctactcccacttcccaactccagggaatgcattacttttatttcaaaccctctgcctccttccttctttctcttcaaccccctccccaccttcaccttctcaaaaatggaaggaaaaaaaaactgtgaatggggaatgctgactgacaaaccaacacaactttcagaggcttcagtgtctgttctctggacatttcttttcacctcctgagcaccaaagtcgcagggccagttgcaggccgctgattgccatgttgatttttaacctgatattctttttaattgttttaaatttttcataggggagttttggacaaaacagtcactggggagatcactgccatttttacacacttgactttttaaaaatacaaccaaccaaccaccacaacttcttatacatttgggacatgagccagagtttaaaagggaaccaacaaaacactataacttaaaaggatggggttttggattttgtataataataaaaacaatacagcatatggctagggaaggacatggtgtatataattgtaaaatactgttctaaattattcaggcctatagtttccattactggagtcctccattgtgtggccacacagtgtcgttgatttaaaggagccagtgcttcccctctccccaggtagttggtcagctgtggactctgtgacctttgtctaaacctgtgttgtaagatcttgggacttcctctctttctatgtctatctcttccccccaacactttctcttcttagtctctctctttatttttcaatctctgaatattttagtctctctctgagtctcattttttaaaatgctcttttagaacgggaaacggctcagatcctgctgtggcacggggcctatgtgtctctgtcgcgtctgctgtgaagcacatgatgctctatttattgtagagagtgactttatttgctttctagaattgtttataacagatggtataagagaggtaataaacagagaaaaatctatgcttgtaaagaatacaaaagttaattttacctactataatatgactgtctgaaacttattttctctctgagaaataaatgttctaatgggcagta

SEQ ID NO: 32353 - DNA, 7120 bp, Homo Sapiens
atgctgatgagccatggttaatacaattttatctcactaaatgtcgtcaggatttaagggaagaccttcacacagatttttctgtatctacgtgatgatcattttcctgcttttcctttctgtcccatcttcactcctccacagtcatgttacactagtatagtcatgtgagtgtgcccatgagtgactccaagttgagttctaaaaagcagatttcacttagccagctgcccttgtcagtttcagccttgggagtcaccttttggtatcttttcccactgcttcttcctcctttctcaaccatcatttctcctctccactggattctactcacagggtttgtaatctcccagatcattcagcatctgaatgaattcagccgccaaggggaagatcactggcagatcccagtgggggtacttaccccttccagactcttcctgaggaaagcaagttaccttccatgtagcaggagtacattttatactagtttggccttgtgactgttagagtgggaagtctgagggaactggagaagagatgcagttttaacagaggaaaaacatttagtagagactgtcccttctgccttcgggcgtgtccctcttctgggcatcttttcaggatttcattcctacgtccaactgccgttcacaactgccctttccaactgctccagaactcttggccctggcattccgtgatgtaaattattccacacatggctcaaaagggtgtgaagctgtgtgccaggtgtcggatcactagtttgtcatggatgatgatgatgactcgtgtctccttgatcttattggagacccacaagcattgaactattttctacatggacctagtaataaatctagcaatgatgacttgactaatgcaggatattctgcagccaattcaaattcaattttcgccaactctagtaatgctgatcctaagtcatccctcaaaggtgtaagcaaccagcttggagaagggcccagtgatggactgccactttcaagtagcctccagtttcttgaagatgaactcgagtcttctcctcttcctgatctcactgaggaccaacctttcgacattcttcagaaatccttgcaagaggccaatatcactgaacagacattggcagaagaggcatatttggatgccagtataggttcaagccaacagtttgcacaagctcagcttcatccttcttcatcagcatcctttactcaggcttctaatgtttctaattactcaggtcagacgctgcagcctataggggtgacgcatgtgcctgttggagcatcgtttgcaagcaatacagtgggtgtacaacatggctttatgcaacatgtggggatcagtgttcccagccagcatttgtctaatagcagtcagattagtggttctggtcaaatacagttaattgggtcatttggtaatcatccttccatgatgactattaataacctagatggatctcaaatcatattaaagggcagcgggcagcaagccccatcaaatgtgagtggagggctcctggttcatagacagactcctaatggcaactccttgtttgggaactctagttccagtccagtagcacagcctgttaccgttccatttaacagcacaaattttcaaacatctttacctgtgcataacatcatcatacaaaggggtcttgcaccaaattcaaataaagtcccaattaatatacagccaaagcctatccagatgggtcagcaaaatacatacaatgtgaacaatttgggaattcagcagcaccacgtacaacaagggatctcttttgcttctgcaagctcaccccagggctcagtagttggtccacacatgtctgtgaacattgtaaaccaacagaacacaagaaagccagtcacctcacaggcagtgagcagcactgggggcagtattgttattcattcccccatgggccaacctcacgcaccccaaagtcagttccttatacctacaagcctttctgtcagttccaactcggtacaccacgtccagactataaatgggcaacttcttcaaactcaaccctctcagctcatttctggccaagtggcctcagagcatgtcatgttgaacagaaactcttccaacatgctcaggaccaaccaaccatatactggaccgatgcttaacaaccagaatactgctgtccacttagtgtctgggcagacatttgctgcctctggaagtccagtgatagccaatcatgcctctcctcagcttgtgggtggacagatgcccttgcagcaggcatccccaactgtattacacctgtcacctgggcagagcagcgtttcccaaggaagacctggcttcgccaccatgccatcggtgacaagcatgtcaggacctagtcggttccctgctgtcagctcagccagcactgcccatcctagtcttgggtctgcagttcagtctggttcatcaggatcaaactttacaggagatcagctgacccagccaaacaggactccagtaccagtcagtgtgtctcatcgtcttccagtttcttcttccaagtctaccagcaccttcagtaacacacctggaacaggaacccagcaacaattcttctgccaggctcagaaaaaatgtctgaatcagacttcccccatttctgctcccaagaccacagacggcctgaggcaagcacagatccctgggctcttgagcaccacactgccagggcaggattctggaagcaaagttatatccgcatccttaggaaccgcacaaccacagcaggaaaaagtagttggatcatctcctggccatccagctgtgcaggtggagagtcattcgggaggacaaaaaaggcctgctgcgaaacagctaacgaaaggagctttcattctccagcagttgcagagggaccaagcccacactgtgacaccagacaaaagtcacttccgatcactaagtgatgcggtacagagactgctctcctaccacgtgtgccagggctccatgcccactgaagaagacttgagaaaagtggacaatgaatttgagacagttgccactcagctcctaaaaaggacccaagctatgcttaacaaatacagatgcctgctcctagaagatgccatgcgaatcaatccctctgctgagatggtgatgatcgataggatgttcaaccaggaggaaagagcttccctgtcccgagacaagcgtttggcacttgtagaccctgagggttttcaggctgatttctgttgttccttcaaacttgataaagctgctcatgagacacagtttggccggagtgaccagcatggcagtaaagcaagcagctctctgcaaccgccagccaaggcccaaggcagagaccgagccaaaaccggtgtgacggaacccatgaatcatgaccagtttcatctagtgcctaatcacatcgtggtctctgcagaaggaaacatttctaaaaaaacagaatgccttggcagagcactgaaatttgacaaagtgggcttagtgcagtaccagagcacgtctgaagagaaggccagccggagagagcctctgaaggccagtcagtgctctcccggccctgaggggcaccggaaaacctcatccagatcggatcatggtactgagagcaaactgtcaagcatcctagcagattcgcacttggagatgacgtgtaacaattccttccaggacaaaagtctgaggaattctccaaagaatgaagttttacacacagacatcatgaaagggtcaggcgaaccccagccagatctccagctgacaaagagcttggaaaccacatttaagaacatcttggaactcaaaaaggcgggacggcagccccagagtgaccccacggttagcggctctgttgagttagatttccccaacttttctcctatggcttcacaggaaaactgcctggaaaagttcatcccggaccacagtgaaggtgttgtagaaactgactccattttagaagcagctgtaaatagtatcctagagtgttaatagcagcagtcctccccctaccccgccccgagaccccaccccgagaccccaccccggaccagttacattcgttcctggcaaaagcaaatggaaatggtctcctgtctccagcctgcttgatctttcatcacaggttattctttctaatctcaatcctgttctttgtttaagagcaatacttgtcgtgattacagggagatcctttagtaaaattaatccttggcagaaagcagtctgataggccccactcatttcaagtgttatgaaagtgcttataggcattttgtttatttgttttgttttttaaaaacactgtaactcaatgagaccacagtatacttggcccttggtaaaattttgacaatcataagtcatttgaaaagaacagacttactaaaatcaaacgagacggatagaagctactttttaaagaatatcccactgcatctgcaaatttagttttgggtttttttattattattattttgagtttttttgtgtgtgttttgttgttattgttgaggggaagaccacatggttcttccccctcagccatctttgagcagtaaattgctggctgtgctgccagggacccgcagccctggtggaaaagccagtagcacatacgcagggcattgcagggcttccctattgatggttcaagtgcttttctgatgcttccggagcaaaacctcatgcttttaggcatatctatgttgaatttcacctagggaatgttctgttcttagttacagcagcaaaatttgaaataatttcaccaggctaaataaaggaaaatggaaaccagttaagaggcacagtgtacagaggaggccgggatagagccatgagggttataatattaatatgtatatatgtaaaagcatatatatgttaactattgagaaaaaacaagttttgcattttataattggatatagtcaacatataatgtatgtttttgtttgttgctggattttgtttcatttaacctctctttgcaccctctcccacaacaaataccaagcatcaaaagcactttcatttgaaaattattatgttgtaatttttcagtttaaactttaaggagactctggccttgtttatgcttcttgtctgagaacagtagtgacccctggcagcaattcattaccaaaacacagacaaaccaaaggtaaccagctagcccaccactgaaaggaaagatctgagacatgggattcccatttgagagccaaaggatatgccctgtcatggtttctgtttggcctgtgttcatattagtgagcatggcttactgctttatttatttttatttcttgtcagggagtattctccgttttcctttctcgtatacctgccccaggttatcccatttctgttgttacctttattcttaatgtcattgtaaccatcacttatctcctctcattgggaaagctacatgatagtatttttatgcactcttctcccacacatacacacacgtgcatgtatctgagctgctcggatccagaggtcatttttgttacagtgtgtgcacactcactctccttcttagtgtgcatactctctcatttattctgtttatctccctggctctggaggtgcagccactggtcttcactttaatgtgttgccagaatctgcttctggctgtcgccaacatggggatgacccccattgtcatcatgttgggcatttcttttccagattggcctgtgatggaaaggaaggcttctaattagaaaacacagcaacagaagacctataccccggtgcccctgtgtcccactacacacagaaaaccctgtgagatggccagtcttcataatagcaacgtaccttcaccccagccacatgccccagccaatacaaattggaaaatctggcccattttagggttaccattttttccttatttgtgccaatgtccaagttgcagatttcccctttttcctgtattgtaacatattagataagttggtgtcgccagttggtactttctgtttgggtagtcctagggtaacaccctgccctaaactccatgatttcataggcttttcttcccttggggctcatgctcccctaattcctagcaagatgatccttcctaatcaaattcttctcattgcagaactttatccctggaagccttcatgtgggctgctagtgagttacattaattactgcaaatcagtggaattctcaagagacaagataagcttcatgtacatttgtcacctctctttcttccctatcctgccctgctgtcccaatcctagcttttctatataccatcctaaagggtttttaagccctaacacttgtctagcaaatggagagcctaatttaccaaaatgaaacttgtaaatttttgtgtcattgtatgtaagtttactttttatggaggaaggattctagataatgacaaatgaagattatgacatgtatttcactcctgtgattaggttctacgcacatgggtcataactcgcatgtcgagccccctctagtgaagggtaggagagctcagcctcggatggccaacattcagttgttcaggttcattcgtcaaagttaagttttagaactatttgtactcagtaacaaaaatcattttctttttttttttttttttctgttgtggaaaagcgtgaatttgttattaagcatttgattttctgtgtccttaagtacttcctgaagatgaagcaaaattttaatctggcaattatgaaaaagaaatattttagctctgaaggatttagtagattctgttagattagggaggccttacagactgactttacttaaagaggacgcgtcactcgctgtcagtgtggtgtgggctttatttgcttaaataccttcatttgtatagtacgtctcacttgaaattgctttgtatacattttgtaaaaatatttataaaatgttttgtaaaaaaaaaaaaactataacaaattgcagtttattttgttatgttggataaatactgttaaaagaaaccagtcagtaactatattgttaatccatggttaggaaatgtttagttggagattacaaattgaaacaaccattgcaatacagccaaagatttggg

SEQ ID NO: 32354 - DNA, 7567 bp, Homo Sapiens
atgactgccatcgtgtccagcactggtggaacgggtaggtgtaccttccggtttcccagcacggccatcaagatccagttcacgtcgctctatcacaaagaagaggccccagcctccccgctgcggccactgtacccccagatctcccctctgaagatccacatcccggagccggacctccggagcatgggtccacagttagaactacacactggcttctcttggaacacagccatcaggggcacagctcctctaccctgctttgccgacaagttaccagtgacctacaagttacaagggcactttacagctcttagcggctgtgaggctcgagcagcctctgcttcccgcctccgtcagctgcaggcctggtatcgggggccttggtatcaggagcctggtaccaggcacagccccgtggccgaggcccgcctgcggaggacagttgaatggggcttattgagagacgggctgctccgagggctggaggagccatgtgaacaaacacatgtggtccctcagcccagggcgatggcacctccacagcctctttccaggatctgcctctgtgaccacacggggttgtcctgggcccgagccttttcccacagcgccgccttgtggacacctgtgcaggagccagcagcccgcggaggctacctgctccgggtgcacatccttgtccccaactcctgcccagccagtccacgcggtgccggctcctccagttaccgctttgtgcagaacgtgacctcggacctgcagctggcagcagagtttgcagcaaaggccgcgtcggagcagcaggcagacacgtctggaggagacagccccaaggatgagtcaaagccgccgttctcctacgcgcagctgatcgtgcaggccatctcctccgcccaggaccggcagctgaccctgagcgggatctacgcccacatcaccaagcattacccctactaccggacggccgacaaaggctggcagaattctatccggcacaacctctctttgaaccgttactttatcaaagtcccacgttcccaggaggagcctgggaaggggtccttttggcgaatagaccctgcctctgaagccaagctcgtggaacaggcattccggaaacggaggcagaggggtgtctcctgcttccgcacccccttcgggcctctgtcctcaaggagcgctccagcttcgcccacacaccccgggctgatgtcccctcgctccggcggcctgcagaccccagagtgcctgtctcgggagggctcccccattccacacgaccctgagtttgggtccaagttagcttctgtcccagagtaccggtattcccaaagcgcacccggctcccccgtcagcgcccagccagtgatcatggccgtgcctccccgaccgtccagcctcgtggccaagcccgtggcctacatgcccgcctccatcgtaacctcacagcagcccgcgggccacgccatccacgtcgtgcagcaggcccccaccgtcaccatggtcagggtggtcaccacatctgccaactcggccaacggatacatcctcaccagccagggcgcggcggggggctcccatgatgcggcgggcgcagccgtgctggacctgggcagcgaggccagaggcctggaggagaaacccaccattgcgtttgccacaatccccgcggctggtggagtcatccagacggtggccagccagatggcccccggggtccccggacacacggtcaccatcctgcagcccgccacacccgtgaccctcgggcagcaccaccttccagtccgggccgtgacccagaacggaaagcatgcggttcccacgaacagtttagccggcaacgcttacgccctcaccagccctttgcagctccttgcgacccaagcgagttcatccgcgccggtggtggtcacccgggtgtgcgagccccccgaattgagtcgtttctatggcactaacctttccatgggaaataagctctttgtggaagtccgtacctgttgccctggccacgtaaggccgctgcgctcacgtgacgcggtcccggaagttgaccggggtgcggagctcctgggctgcagctcctggagtttccgaggttcgtgcgcgtctggtggcggcggcgtgatgttctcggcaggagcggagagtttgctccaccaggccagggagatccaggacgaggagctgaagaagttctgttcccggatctgtaaactgctgcaggcggaggacttggggccggacaccctcgactccctgcagaggctcttcctcatcatctcagccacgaagtacagccggaggctggagaagacatgcgtagacctgctgcaggccaccctcggcctgcctgcatgccccgagcagctccaggtgctttgcgccgccatcctgcgagagatgtccccctctgacagcctcagcctggcctgggaccacacgcagaacagccggcagctgagcctggtggcctccgttctcttggcccagggtgacagaaacgaggaggtcagagccgtgggccagggcgtgctacgagcgctggagagccggcagcctgagggacccagcctcagacacctcctccccgtcatggccaaggtcgtggtcctcagcccgggcaccctccaggaggaccaggccaccctgctcagcaagcggctggtcgactggctgcgctacgccagcctccagcaagggctcccacactccggcggcttcttctccacgcccagggcccggcagccgggccccgtcaccgaggtggacggggcggtagccacagacttcttcacggtgctctccagcggccaccgcttcacagacgaccagtggctgaacgtgcaggccttctctatgctgcgggcgtggctgctgcacagcggccccgagggcccgggcaccctggacacagatgacaggtcagagcaggagggctccactctgtcggtgatctccgccacctcctctgccggccgcctgctgccgccccgggagcggcttcgggaggtggccttcgagtactgccagcgcctcattgagcaaagtaaccgacgagccctgaggaagggggactccgacctgcagaaagcttgcctggtggaggccgtgctggtgctggacgtgctgtgccggcaggacccgtccttcctgtaccgaagtctctcctgcctgaaggccctgcacgggcgggtgcgcggggacccggcctctgtgcgggtgctgctgcccctcgcccacttcttcctgagccacggggaagcggctgcagtggactcggaagccgtctaccagcacctgttcaccaggatcccggtggagcagttccacagccccatgctggcctttgaattcatccagttctgcagggacaacctccacctgttcagcgggcacctcagcaccctcagattgagcttccccaacctctttaagttcctggcctggaacagcccacccctcacctccgagtttgtggcgctcctcccggccctggtggacgctggcacagccctggagatgctgcacgcgctgctggacctgccctgcttgacggcggtgctggacctgcagctcaggtcagcaccggctgcatccgagaggccactctgggacacctctctcagggcccccagctgcctggaggccttccgggacccgcagttccagggtcttttccaatacctgctgcgccccaaggccagtggcgccactgagaggttggcgccactccaccagctgctgcagcccatggccggctgtgcccgcgtggcccagtgtgcccaggccgtgcccacgctgctgcaggcattcttctcagcagtgacccaggtggctgacgggtccctgatcaaccagctggcgctgctgctcctgggcaggagcgactcgctctacccggccccagggtacgctgccggtgtgcacagtgtgctgagttctcagttcctggccctgtgtacgctgaaaccctccctggtggtggagctggcaagagacctgctggagttcctgggcagcgtgaatggtctctgcagcagggcgagcctcgtcaccagcgtggtgtgggccatcggcgagtacctgtcggtgacctacgatcggaggtgcaccgtggagcagatcaacaagttcttcgaagccctggaggctctgctattcgaggtcacccagtgccgcccctctgctgccctgcccaggtgtcccccccaggtggtcaccgtgctgatgaccacgctgacgaagctggcctcccggagccaagatctgatccccagggcctctttattgctgtcaaagatgaggaccctggctcacagtccagccaccagctccacgcacagcgaggagggcgcggaagccatccgtacccgggccacagagctgctgaccctgctgaagatgcctagcgtggcccagtttgtgctcacacccagcacggaggtgtgcagcccccgctatcaccgcgatgccaacacggccctgcccctggccctgcgcacggtcagccggctggtggagagggaggccggcctcatgccagggtgaagggacagtggccagggacttcggtgcagattaagagcctgggcagccagcttgctactgaggccaggctgataggagctcaggagggcgcgggagtcctgggagaggaggcaaggcccacggtgggcttggcaccctcacagacacgcggggctggcccccctgctcaccctctgggctttgtctccgagccttttgctcccaggcaacactgagctgagctgaggggtgccatggagcggctctgattggaggcttgaggccctgtggctgggtcgggtggaggctgctgggtctgtttcctagtcttttgtttttggacagttgatgggcaagaagagctgcagtaaaagtaaatctcctttaataagcgtctgtatgaagagtgcgcgatcagttccgttacctgccctgcaccctggggagaggaccagggatgggaacccctggcagctgctgccagtcctggaggctcagcccggcgtgccactgctgctacagaaaccaggtcatttgtgcacagcccggaaggcagcggcgcgagttcccgggtgtggtcaccgctctgggtggtgcgcttgtcaatgccccttttgatgcccttgaatagcctgaagatgaaggggaccgggggagggttgcaagcgccatggcctatgcaggctgcggcctctggccattcggagggaaggccccagggagccacctgagtggagctcagaacactggattcgcgcgaaggggaggtgtctgggcgtgcggccccagccccgccaccttcctgggccctgtggtcccaccctccggactaccaaggcacagctgtgtcgcacgttccgcccggtgcctgggacgggctcagccgccagggggcgccgccgccccgagagcctcacgccccgcccccaggctcaaactcttccccctccccactctggctccgcccccggtctcctcttttgctctggccccgcccacctcccctccggcctcggccccgcccccaatcccccatagctctgcgactaagaaaccacaggctgaaggcgactgcagggtcctgccccttgcccagcctcaggactatggagggggcgagtgacgcgcaaggaacggagcaggggacaccgtgcgggctcaggagctccccagatgcccgagccgaaccgcggggtcctcaccgccaggttccagcccaggaagcgctcgcctgccccacagcctgggccttgggtcgcgttccgagctccaggacggctggtgtcccccgcggcctgcgatgacagcccagggccgctgagccggggccgcaggaaaggctggcgctggcaggcgcttccgtcggcagcactgtgtttgtgtttccacgtggaaacagcagcgcacgtgtacaactgtgcataccaaggcgtgcgtgccagtgcgcgggtctcgggatcacttcccagtgcggtgcacgaccccgcctgcagcagtgggtgtgggggcgctgctgggctcatcccgaagctcagagagcgtggggctgcccctaggctcggaatgagtctcccactgagtccgcagctcccctcctgccctggggcggggcttccctgacctgaaggcgtcgggggtgtcctggctcccagctcccaggcactcgtggggccaccgcccaggccagctggtgctaagtccgcagcctgtgcagcagcgcccggcttaggactgggagtgtgacttgaagggccgtcccgctcatccaagggacaaggaggagctcatggccacagggcctcggagggcatgaccccagcccagggaggagcaaccttcaggtggcctccaggaggcagctgggaaaagggcaaagctcaccagctctcaactttttttttaaataaactgaaattttagaatagtttttcagatttacagaaaagatgataaaccttagaaacattatatgctaagtgaaagtgagaagtgacagcctgctggcagtcctcacagccctcgctcgctcttggcgcctcctctgcctgggctcccactttggcagcacttgaggagcccttcagcccgccactgcactgtgggagcccctttcagggctggccaaggccggagccggctccctcagcttgcggggaggtgtggagggagaggcgcggtgggaaccagggctgcacgcggtgcttgcgggccagcgcgagttccgggtgggcgtgggctctgtgggccccgcactcggagccgccggctagccccgccagcctgggcagtgaggggcttagcacctggaccagcagctgctgtgctcgatttctcactgggccttagctgccttcctgcggggcagggctggggacctgcagcccgccatgcctgagcctcccccctcccctccgtgggttcctgcgcagtccgagcctccccaacgagtgttgccacctgctcagggcacccagtcccatcgaccacccaagggctgaggagtgcctttggagcagggcacgggactggcaggcagctctacctgcagcccctgtgcaggatccactgggtgaaagccagctgggctcctgagtctggtggggacttggagaacctttatgtctagctaagggattgtaaataaaccaattggcactctgtatctagctcaaggtttgtaaacacaccaatcagcaccttgtgtctagctcagggtttgtgaatgcaccaatagacactctgtatctagctactctggtggggacttggaaaacctttttgtcaacactctgtatctagttaatctggtggggacatggagaacctttgtgtctagctcagggattgtaaacgcaccaatcagcaccctgtcaaaacagaccactcggctctaccagtcagcaggatgtgggtggggccagatgagaataaaagcaggctgcccgagccagcagtgacaacccactcgggtccccttccacaccgggatgctttgtttgttcgctctttgcaataaatcttgctgctgctc

SEQ ID NO: 32355 - DNA, 3941 bp, Homo Sapiens
ggcggagatgagcaggtccgcgacgctgctgctgtgcctgctgggctgccacgtctggaaggcggtgaccaagacgctgcgggagcccggcgccggagcccaagaggtgacgttaaaggtgcacatcagcgacgccagcacccaccagcccgtagcagatgcgctcatcgagatcttcaccaaccaggcctccatagcctctggcacctcggggactgatggcgtcgcctttatcaagttccagtataagctgggcagtcagttgattgtcaccgcctcgaagcatgcctacgtgccaaactctgccccatggaagccaatccggttacctgtattttcctctctgagccttggcctgcttccagaacgctctgccactctaatggtatatgaagatgtcgtccaaatagtatcaggattccaaggtgcccggccacagcctcgcgttcatttccagagaagggctctgaggttgcctgagaacaccagctacagtgacctgaccgcgtttctcacggccgccagctccccttcggaggtggacagttttccttatttgcgaggattagacggaaatggaacaggaaacagcaccaggcatgacctgaccccagtcacagccgtcagcgtccacttgctgagcagtaatggaacgccggtgctggtggatggtcccatctatgtcactgtgcccctggccacgcagagcagcctgaggcacaatgcctatgtcgcggcgtggcggtttgaccagaagctgggaacgtggctgaagagcggtctgggtcttgtgcaccaggaaggcagccagctgacgtggacatacattgccccccagttggggtactgggtggccgccatgtcccctcccatcccaggtcccgttgtaacacaggacattaccacgtatcacacggtgtttcttttggccattttaggaggaatggctttcatacttttggttttgctgtgtctccttttatattattgcaggaggaagtgcttgaaacctcgtcagcaccacagaaaactgcagctccctgcaggactggagagttccaaaagagaccagtccacgtccatgtcacacattaacttgctgttttcacgccgagcgtcagaattccctggcccgctgtccgtcaccagccacggccgccccgaggcccccggcacgaaggaactgatgagtggagtccatttggaaatgatgtctccgggcggcgaaggggacctgcacacccccatgctcaagctctcctacagcacctcccaggaatttagctcccgggaggagctcctctcttgcaaggaagaggataaaagccagatctcctttgataacctcactccaagtgggacgctggggaaagactaccataagtcagtggaggtttttcccttaaaggcaagaaaatctatggaaagagaaggctacgagtcctcgggcaatgatgactacaggggtagttacaacaccgtgctctcacagcctttatttgaaaagcaggacagagaaggtccagcctccacgggaagcaaactcaccattcaggaacatctgtaccccgcgccttcatcacctgagaaagaacagctgctggaccgcagacccactgaatgtatgatgtcgcgatcagtagatcacctcgagagacctacgtccttcccacggcccggccagttaatctgctgcagttctgtcgaccaggtcaatgacagcgtttacaggaaagtactgcctgccttggtcatcccggctcattatatgaaactccccggggaccactcctatgtcagccagcccctcgtcgtcccggctgatcagcagcttgagatagaaagactacaggctgagctgtccaatccccatgccgggatcttcccacacccgtcctcacagatccagccccagcccctgtcttcccaggccatctctcagcagcacctgcaggatgcgggcacccgggagtggagccctcagaacgcatccatgtcggagtctctctccatcccagcttccctgaacgacgcggctttggctcagatgaacagtgaggtgcagctcctgactgaaaaggccctgatggagcttgggggtgggaagccgcttccgcacccccgggcgtggttcgtctccttggatggcaggtccaacgctcacgttagacattcatacattgatctccaaagagctggaaggaacggaagtaatgatgccagtttggactctggcgtagatatgaatgaaccaaaatcagcccggaagggaaggggagatgctttgtctctgcagcagaactacccgcccgtccaagagcaccagcagaaagagcctcgagccccagacagcacggcctacacgcagctcgtgtacctggatgacgtggaacagagtggtagcgaatgtgggaccacggtctgtacccccgaggacagtgccctgcgatgcttgttggaggggtcgagtcggagaagtggtggccagctgcccagcctgcaggaggagacgaccagacggactgcggatgccccctcggagccagcagccagcccccaccagagaagatctgcccacgaggaagaggaagacgatgatgatgatgaccaaggagaagacaagaaaagcccctggcagaaacgggaggagaggcccctgatggcgtttaacattaaatgagctatcgcagacccacctgactgtggaatataaaattgccaaatatcctttctcatggaagcgcgtacccgttcgtggaggaaacggaacggcagcccagccgtgggacggacgtggacgtttactgcattcctgtttgccgtgtaaatgttagaaaggaattaaagttattactcggaataaaggatgactttggcggatgtcgcccctgcaaggaggtggctgaaagtggtgtccagatgtccttccgaggactcggcgtatccgccaccagggacattaagaaaccgcacgtgatgtcgctatgctctaacgatcacctcagttctccctcggattctgggaacagatgaaactttttgcatcgcttgagtcatttttatcacaataatcctactgtgaagctgtcgttgagaacttaggttggcacgtagcgtctcaaggtatgcgttctctcaaaggaaagctatgcatcgctgcttcgttgtctgattttgcttagattttgctttggttaggttgcgttttggggtttgcctttttttgttgtcgcttaaatgcaatttggttgtaaagatttgattcctttgtgttcatctgttccgcttctcagcggtccatctcagcgtctcccttcaggaaccgctgagtgtcctctcttaacatccaagccttttaatgaaatcgtactgaaatctgtatcagctaagagtcctccaatcctggtcccattaactccaagtgcctttttgacagtgacaacagacagtccctcgctttttgttgttgttggttttcttaacccctttaatggaactgcctggattttatacagttattaaaggatgtctcttttgctttaaactgcatgctgccaagtgccatttggggtcagcatcctcgtttcaacacagtgtgctctctagttatcatgtgtaacgtgggttctgtttagcgaagatagactagaggacacgttagagatgcccttccctgctccatccctgtggcaccattatggttttttggctgtttgtatatacggttacgtattaactctggaatcctatgggctcatcttgctcacccaatgtgggagtctggtttgagcaagcgagctgaatgtgactattaaaaaaaatttaaaaaaaaaaaagaaaatcttatgtactatccaaaagtgccagaatgactcttctgtgcattcttcttaaagagctgcttggttatccaaaaatgaaaattcaaaataaactctgaa

SEQ ID NO: 32356 - DNA, 4220 bp, Homo Sapiens
cacagcggacctacaggcgctcagagaagcccaccttccccctctctgtcccgagaaggcttagagtggtacctgcttgctcaagcaacctgctgcctccacccagagcagccgctcctctcctccctcccttccggaagatgctgaggatgacagcttttagcctgactcttacatttctttggcagagcagttagaggccagactgtcctgtgaaggcttctccttccttcttcctctgctcaggagaaaacttacaaacttttaaatgtaagaggcagatgagctgggaacctggaagtgggttgcatctgactctgaaagttcctccctctcgctggcattacctcatgctgccacaaagtgaacggatcactggggaaggcagagtctccccggcactgctgggaccctcccttgaagagcccccatgtcctgtaggcagagccttgtagtctgtccgcttggttactgactcgggctgtctgaccagcccctcttctgtgccttgtctgaggtccttgtccatctctgtgattgggcagcttctctctctggattgggtcacgtgaagcgggaaactgaagccattactctccaaaccctgtttcatcttcccaagcatgtcggaaagctggcaacagccgccacagacgcagccgcagcagccacagccaccgcagcctcagcaccatgcagagccaccgccagccctggcagagcacacgctgcctccgggcacggcggagaaccccctgggctgtgccgtctatggcatcctcctgcagccagaccccggcctgcagcccccacaacacgcacccctgcaggcagcaggagagccaggccccaaatgtggcgtgtgtggtcacgacctggcgcacctgtccagtccgcatgagcaccagtgtctggcgggccatgaccgctcattccagtgcacacagtgtctcaagatcttccaccaggccactgacctgctggagcaccagtgcgtgcaggctgagcagaagcccttcgtctgtggggtctgcaagatgggcttctcactactcacctcactggcacagcaccacagctcccacagtggcctggtgaagtgttccatctgtgaaaagacctacaagccagctgaggcagcggagccagccaccacagccgccccgtcgcttcccgcagcacccgcgccttccactgtcacccctgctgaacaggccgacaagccctacagctgccccatctgccaaaagcccttcaagcacctgtcggagctctctcggcatgagcggatccacaccggtgagaagccctacaagtgcacgctgtgtgacaaaagcttcagccagtcgtcgcacctggtgcaccacaagcgcacgcacagctccgagcggccctacaagtgcgcagtctgcgagaagaccttcaagcaccgctctcacctggtgcgccacatgtacgcgcactcgggcgagcaccacctgttccgctgcaacgtgtgcgagttgcatttcaaggagtcgtcggagctgctgcagcacccgtgcacgccaagtggggagcggcccttccgctgcggcgagtgccagaaggccttcaagcggccctcggacctgcggcagcatgagcgcacacacagcgccgagcggcccttcaagtgcgacctgtgccccatgggcttcaagcagcagtacgcactgatgcgccaccggcgcacacacaagaccgaggagcccttcaaatgcggcctatgtgagaagggctttgggcagcccagccacctgctctaccaccagcacgtgcacaccctcgagactctcttcaagtgccccgtgtgccagaaaggctttgaccaatctgccgagctgctgcggcacaagtgcctgcccggcgcggccgagcggcccttcaagtgccctgtgtgcaacaaggcctacaagcgcgcgtcggccctgcagaagcaccagctggcccactgtgcggcggcagagaagcccctgcgctgcacgctttgcgaacgccgcttcttctcctcttccgagttcgtgcagcaccgctgcgatccggcccgcgagaagccactcaagtgcccagactgcgagaaacgcttcaagtacgcgtcagacctgcagcggcaccggcgggtacacacaggcgagaagccctacaagtgccccaactgcgacaaggccttcaagcagcgggagcatctcaacaagcaccagggcgtgcacgcccgcgagcagcagttcaagtgtgtatggtgcggggagcgcttcctagacgtggccttgttgcaggagcacagcgcgcagcacagtgccgccgccgcggcagcggagggcgcctaccaggtagccgcctgcctgccctgactctgcggctgtggcccctaccagcctgacctgagtcggcgccgtgggcccagcaggcctcgcgcagcctagctcctcacagctgccttgcaccaagggccccacccagctcggtgttctgagacctcgggagtgaggacgcaggggtatgaggcagggagagggtgtgccgctcgtactcctggcaccagcgggcagtgcgggcggccagattgctgtggcccatcctgattccacaaacctctttcccatgacaagattcactttcttgagagccatcagcaccccccttatttccggggcactggagccaggctggaagtcaagtggcttctccctgccctaaggagggtgtgatgccagcccaaccttcccatatctttcaagctagcagccacataggttaggaaagcggaggctcatggtggggctggggccccagaggtgggctaggtgtaaggcatcagttgccgtgtgggggagaaggccagctttaagacgtaggcctggggactgggagggcagagggtgagtcacagccctctccgtctgctctagccaggggcgacgtgtccccaggtttctggcaggggagatgtgcagggtgggtcttggggctgggtctgcctggagaccagtgggcccagggggaagggggaagctgagaagttcgtgtgacaccctcagccaagggacagtgccatccttggggacaggaggaaaagcagcctgtctctgctaagggcaaatcctccggttttggaagcgcccctcccacctttgtagtgcagttcctaggtgtggtggggaatgtgccgtgctctcagcagacagaactgctggtgtgaaaggcagggattgtcagcccacctgaggctgggaggaagcaggaccaggcctaggatctccccagcagatgcaaacaagtgtcctcccctgaattgtgtgaaccaaagcgtcaggggcttggggcacagccccagtcagctcaacccagtcctgcttcagagccaagactaggccagggtggggacccccccagtaccctccctacatcaatgtggctgctggcctggaccccaggggtctggtacagccaagatgttctggacaacatccagctacttcaaaggccagagtgtcctttgggtcctcctagagtccccctaggtctctggctgcccatgaggctcatgaagcagagggtatcccagtcatagggagcagaaagagcaagtgggttaaggaagcctgtgggggacctggtggatggagttgaccaacatcgctgggtggctacggccctccttaggaagcccagaaggacctttattattaaaataatcattttgaaccctgctctatcccctgccctcttccagccccacccctccctggtcttgaaagaagactaatcagtgggcacaccaagggccctgaggggcagggagatgccaccatgcttctctgtcaccgtaagaaggctgaccagccacgcccacctcctctgtctgactgagttccttcctgtggccacagggaggggctggtccttcccctcggtgctggctctctgtcacaatgcctcaaaagacatggaacccaggcctacaaccgtcccaactgctaattcttttcctttcattttgctttctgaaagcagtttgttatactattcataacattgtagagtttaatttcatgtcattttggatcttatataaaaatgtgaggatttggatttttaaaaagaatgactccattttaggtagccacttttgatgttaatatatagtgagtccaatgtatgctttagaagtaaagacattgaccgtcacagaccactgc

SEQ ID NO: 32357 - DNA, 5731 bp, Homo Sapiens
tgctcaaggcctccccgtgggccacaggaactttatccacggccacatccatctctcaagtgcctttccccagagcagaagcagccagcgctgtgctcagcaattctccacactccagagacctggctgggtggccacttggtgtcccccagctcgcctctcctgctcctggccacagggaaaatgcacctatgacactcactacctccccccatgacacactcatctctgaaacattgctcaactctccagtcagttccaacacctcaaccaccccgacgtccaagtttgccttcaaggttgaaaccactccacccaccgtgttggtctattcagccaccactgagtgcgtgtatccaacgagctttataatcaccatctcccaccccacctccatctgtgtgaccacgacgcaggtggccttcaccagctcttacacctcgactcccgtgacacagaagccagtgaccaccgtcaccagtacttactctatgaccactactgagaaaggaacgtcagccatgacatcttctccctctaccaccactgcaagggaaactcccatagtgacagtgacaccctcctctgtgtcagccacagacacaaccttccacactacaatctcatctacaactagaaccacagaaaggactcccctgcccactggaagcatccatacaaccacgtccccaaccccagtatttactactctcaaaacagcagtgacttccacttcccccatcacttcttcaatcacttccacaaatacagtgacttctatgacaacgaccgcctcccagcccacagccactaatacattgtcatcacccactaggaccattttatcttccacacctgtcctgagcacagaaacaatcaccagtggtatcacaaacaccacccccctatccaccttggtgaccacactccccactaccatcagcaggtctacacctacatctgagaccacctaccctacttctcccaccagcactgtcacagactccactaccaaaatcgcctactccacaagtatgacaggtacattgtccacagagacttctctcccacccacctcttcctctctcccaaccacagaaacagccacgactcctatgacaaacttggtaaccaccaccactgagatctcctcccacagtactcccagcttctcttcatcaaccatctactccacagtcacctcacacagtactcccagattcacttcttcaatcaccactaccgagaccccctcacacagtactcccagattcacttcttcattcaccaataccaagaccacctcacacagatctcccagcttcacttctttgatcaccaccacggagaccacctcacacagtactcccagcttcacttcttcgatcaccaccaccgagaccacctcacacagtgctcgcagcttcacttcttcgatcaccaccaccgagaccacctcacacaatactcggagcttcacttcttcgatcaccaccaccgagaccaactctcacagtactaccagcttcacttcttcgatcaccaccaccgagaccacctcacacagtactcccagcttcagttcttcaatcaccaccactgagacccccttacacagtactcctggcctcacttcgtgggtcaccaccaccaagaccacctcacacattactcctggcctcacttcttcaatcaccaccactgagactacctcacacagtactcccggcttcacttcttcaatcaccaccactgagaccacctcagagagtactcccagcctcagttcttcaaccatctactccacagtcagcacatccacaactgccatcacctcacattttactacctcagagactgcggtgactcccacacctgtaaccccatcttctctgagtacagacatcccgaccacaagcctacgaactctcaccccttcgtctgtgggcaccagcacttcattgactacaaccacagactttccctctatacccactgatatcagtaccttaccaactcgaacacacatcatttcatcttctccctccatccaaagtacagaaacctcatcccttgtgggcaccacctctcccaccatgtccactgtgagaatgaccctcagaattactgagaacaccccaatcagttcctttagcacaagtattgttgttatacctgaaaccccaacacagacccctcctgtactgacgtcagccactgggacccaaacatctcctgcacctactactgtcacctttggaagtacggattcctccacgtccactcttcatactcttactccatcaacagccttgagcacgatcgtgtcaacatcacaggttcctattcctagcacacattcctccacccttcaaacaactccttctactccctcattgcaaacttcactcacatctacaagtgagttcactacagaatctttcactaggggaagtacgtctacaaatgcaatcttgacttcttttagtaccatcatctggtcctcaacacccactattatcatgtcctcttctccatcttctgccagcataactccagtgttctccactaccattcattctgttccttcttcaccatacattttcagtacagaaaatgtgggctccgcttctatcacaggctttcctagtctctcttcctctgcaactaccagcacttcttcaaccagctcctctctgaccacagctctcactgaaataacccccttttcttatatttcccttccctccaccacaccctgtccaggaactataacaattaccatagtccctgcctctcccactgatccatgtgttgaaatggatcccagcactgaagctacttctcctcccaccaccccattaacagtctttccctttactaccgaaatggtcacctgtcctacctccatcagtatccaaactactcttactacatatatggacacttcttccatgatgccagaaagtgagtccagcatctcacccaatgcttccagttccactggcactgggactgtacccacaaacacagttttcacaagtactcgactgcccaccagtgagacctggctgagcaacagttctgtgatccccctacctcttcctggcgtctctaccatcccgctcaccatgaaaccaagcagtagcctcccgaccatcctgaggacttcaagcaagtcaacacacccctccccacccaccactaggacttcagagacaccagtggccactacccagactcctaccacccttacatcacgcaggacaactcgcatcacttctcagatgaccacacagtccacgttgaccaccactgcaggcacctgtgacaatggtggcacctgggaacagggacagtgtgcttgccttccggggttttctggggaccgctgtcagctccagaccagatgccagaatgggggtcagtgggatggcctcaaatgccagtgccccagcaccttctatggttccagttgtgagtttgctgtggaacaggtggatctagatgtagtggagaccgaggtgggcatggaagtgtctgtggatcagcagttctcgccggacctcaatgacaacacttcccaggcctacagggatttcaacaagaccttctggaatcagatgcagaagatttttgcagacatgcagggcttcaccttcaagggtgtggagatcctgtccctgaggaatggcagcatcgtggtggactacctggtcctgctggagatgcccttcagcccccagctggagagcgagtatgagcaggtgaagaccacgctgaaggaggggctccagaacgccagccaggatgcgaacagctgccaggactcccagaccctgtgttttaagcctgactccatcaaggtgaacaacaacagcaagacagagctgaccccggaagccatctgccgccgcgccgctcccacgggctatgaagagttctacttccctctggtggaggccacccggctccgctgtgtcaccaaatgcacgtcgggcgtggacaacgccatcgactgtcaccagggccagtgcgttctagagacgagcggtcccgcgtgtcgctgctactccaccgacacgcactggttctctggcccgcgctgcgaggtggccgtccactggagggcgctggtcgggggcctgacggccggcgccgcgctgctggtgctgctgctgctggcgctgggcgtccgggcggtgcgctccggatggtggggcggccagcgccgaggccggtcctgggaccaggacaggaaatggttcgagacctgggatgaggaagtcgtgggcactttttcaaactggggtttcgaggacgacggaacagacaaggatacaaatttccatgtggccttggagaacgtggacaccactatgaaggtgcacatcaagagacccgagatgacctcgtcctcagtgtgagccctgcggggccccttcaccaccccctccgccctgccccggacacaagggtctgcattgcgtccatttcaagaggtggccccaggacgcgggcagcccaggctcctgctgttcttgggcaagatgagactgttcccccaaatcccatccttctccttccaacttggctgaaacccacctggagacgcagttcacgtccaggctcttccactgtggaatcttgggcaagtcagtaacgagcctcagtttcctcacctgcaaaacgggtacagcattcctgtatgatagctcacgccgtcgttgtgaaaaccacatagacttggtcaattctcggtcctactctgccctcccgtctcagccctcgtgttgccattgcctctctcggatcctccaatcctcacgtccttcacctggtctctggccctggttcttattttctctcaattccctactgcctgtttcttactttgaacctggaggcagcctgcagccccatcccatctcctgccctctcctgatctaactccctgctgcatctcttgctctcattccttagacgtcctccccttttgaccccgttccttcatccatcctgcaccccagtcccccagccctaaatcctccctcctctcctcacatcctggtccctagcaaggtatagatagcctctgtgtcttaggataccccgggtgctgttccctcggtcaccctgttgcccagttccccgtttctcttgctctcattccttgtatcctttccccttttgagcccgtccattcatcggttctgcccccgactccccctgacctaaataccccagctcctaattcccccctcaccccgttgctcaattccccgtttctcttgctctcattccttgtatcttctccccttctgagcctgtccattcatcggtggttctgcccctactcccccagccctaaataccccagctgctgttcctccccatcacccagccaccggattctccattcacccctttctctcacccctggagccccgtgggtgggggcagggcatgagttccccagtccccaaggaaaggcagccccctcagtctccctcctcctcattcccttccatctccctcccctctgccttttaaacccatcccctccgattcccctcctcccccctctctccctggtgtcaactcgattcctgcggtaactctgagccctgaaatcctcagtctccttggcggggaagattggctttgggaacaggaagtcggcacatctccaggtctccatgtgcacaatatagagtttattgtaaaaagc

SEQ ID NO: 32358 - DNA, 2248 bp, Homo Sapiens
atggtctccggccccgccatcatggaggatgatgaccaggaagtcgattcagcagatgaatctgtctccaatgatatgatgacagcgacggatgagccctccaagatgtcatcggccaccgggcgccgaatccggcgctttaagcaggaatggctgaagaagttctggttcctgcggtactccccaaccctcaatgagatgtggtgccacgtctgccgccagtacacggtgcagtcctcacgcacctcggccttcatcattggctccaagcagtttaagattcacaccatcaaacttcacagccagagcaacctgcacaagaagtgcctgcaactgtacaagctccgcatgcacccggagaagacagaggagatgtgtcgcaacatgaccctgctcttcaacaccgcctaccacctggccttggagggcaggccctacctggacttccggcccctggcggagctgctgaggaagtgtgagctcaaggtggtggaccagtacatgaatgagggagactgccagatcctcatccatcacatcgcccgggccctgcgggaagacctggtggagcgcatccgccagtcaccttgcctcagcgtcatcctggatgggcagagcgacgacctgctggccgacacggtggctgtctatgttcagtacaccagcagtgatgggcccccggccacagagttcctgtccctgcaggagctgggattctctagcacagaaagctatctccaggcacttgaccgggccttctcggccttgggcatccggttgcaggatgaaaagccaactgttggcttgggtgtagatggagccaacatcacagccagcctccgtgccagcatgttcatgaccatccgcaagacgctgccctggctgctgtgcctgcccttcatggtgcaccggccccacctggagatcctggatgccatcagcgggaaggagctcccatgcctggaggagctggagaacaacctgaagcagctgctgagcttctaccgctactcaccgcgcctcatgtgcgagctgcggtccacggcggccaccctttgtgaggagacagagttcctgggcgatatccgggcagtgcggtggatcatcggcgagcagaacgtcctcaacgctctcatcaaggactacctggaggtggtggcccatctcaaggaggtcagcagccagacccagcgggcagacgcctcggccatcgcactggccctgctgcagttcctcatggactaccagtccatcaagctcatctacttcctgctggacgtgattgctgtgctctcgcgtctggcctacatcttccagggcgagtacctgctggtgtcccaggtggatgacaagatcgaggaggccatccaggagatcagccggctggctgactccccgggagaatacctgcaggagttcgaggagaatttccgagagagcttcaacgggatcgccatgaagaacctcagggtggctgaagccaagttccagtccatcagggagaagatctgccagaagacccaggtcatcctggctcagaggttcgactcccgcagccggatctttgtgaaggcctgccaggtgtttgacctggctgcctggcccaggagcagtgaggagctgatgagctatggcaaggaggatatggtgcaaatatttgatcacctggaggccatcccgaccttttcccgggatgtctgtagggaagggctggacccccggggtagtctgttgatggagtggcgagaactcaaggctgattactacaccaaaaatggcttcaaagacctgatcagccacatttgcaagtacaaacagaggtttccactcttgaacaagatcatccaggttcttaaagtcctccccacttccaccgcttgctgcgagaaaggccgcaatgccctccagcgagttcgcaaaaaccaccgctcccgcctgaccctggagcagcttagcgacctgttgacaatcgctgtaaacggaccgccaatcaccaactttgatgccaagcgagccctggacagctggtttgaggagaagtctgggaacagttacgcgctgtctgcagaagtcctcagtaggatgtctgcgctggagcagaagccagcactacagaccatggaccacgggacggagttttaccccgacatttagggagctggcgctgcagagttcactaagctgttgaatatttttttaatctatactcataagctttgatatattatataaatatatattatattat

SEQ ID NO: 32359 - DNA, 3665 bp, Homo Sapiens
ttttttccttttctccagcggcctcaggttcttgttacaactgagtccgggttggaggaggtgtggggccgctgccgccaggaaaaacagcactggaggcaatgtttctataaatcaaagaagagacagtgtgagaatgtcagccctcaactggaagccgtttgtgtacggggggctggcctccatcactgctgagtgcggtacatttccaattgatttaaccaagacacggctccagattcaaggccagacgaatgatgcaaaatttaaggaaattagataccgaggaatgttgcacgcattagtgaggataggcagagaagaagggctgaaagcactctactcggggattgcccccgcgatgttacgccaggcatcctatggcaccatcaagataggcacttaccagagcttgaagcgactattcattgaacgcccagaagatgaaactctaccgataaatgtgatatgtggaattctgtctggagtcatatcttcaaccattgctaatccaactgatgttttgaaaattcggatgcaagcgcaaagcaacaccattcaaggaggaatgataggcaacttcatgaacatttaccagcaagaggggacaagaggactgtggaagggtgtgtcccttactgcgcagagggctgctattgttgttggtgtggagctgccggtctatgacatcaccaagaagcatcttattctctcaggcctgatgggagacactgtgtatacccacttcctctcaagcttcacctgtggtctggcaggggccctggcctcaaaccctgttgatgttgtgaggacacgtatgatgaatcagagagtgcttcgagatggcagatgttctggctacacaggaaccctggattgcttgttacagacatggaagaatgaagggttttttgctctctataaaggcttttggccaaattggttgagacttggtccttggaatatcattttctttgtgacatacgagcagttgaagaaattggatttgtgacaagccaaggctgcatgagacatctttctgaaaatggtaacttctgaaacagcaaagcttcctgtgtttcactctgcttctcactgcttggctcatcacagattctgggatgtgagcaacagatgaagactgggttagttgagattgctgtgtgttggcattggatgctcttcatcaaacgtttaatggcataaactaacatccaaacactagtctttaccactgaagtgcccttcaacatcaaagataatatgtgaaatgcatgtttcttgctaaagaaaacttgcaagaaaatcaggagcgatgtattgttttattcagggagagtagctcctgatgcatctcagctcatgactgagaatcagactgctctagaaaagctcactggaaccatggaatggagcctccgagaaggtgttatggtttctgaatttctgggagattttgctccttgtcaactgaagaaatttcatgtatggagacctggactgttcaaccccaggtataaacggtgcaggaaatggatcctaggaatatcacactgctttatcatttcctattttggcaggatcttccacttataataagtgattttaagctttgaagacttgacatttgtgagaaattgttacaaagtaataatctctaaattcgtggtggtgttatgtgttggctttgaaggttgcaaggtctgtattggtggggggtgttttcaagcagcttaggttctgtcttaggtcatgttagtaattagctttatgatttttagcaaagcatatgtatttctcaatgagtaaaatggggataataacgtctattgatgtagagggtcaaatgaagaacaaatagtagctgctgctacttgactggaaaggtaaatgtgtttacatcatgctgtggaacagctctaaacagtctatgtagaagaggggcatgttctcatgggcttctcatggtaattgtgaatgaagccctttgttaaggtcttgttgaagaaagaacactgtataagttcaggctttagtacattttccttagcaaaatgttggtagtgaatcaaagagttgatttttccaggtttccagtttttactttagtttatgttgtgcctgtcttggactttctgtttagtttggatggaaaatacctgcttgaaattttaaaaatgatttctttagtgcatctatttagctagtttctgataggtggtatgtaatattttccctttttctttccttctgtagacacaataagtcattctccctcttctttttttctttttctattttcttattctttactctaacctgcttcagagaaagagccctcttccttcttgtcttcatcttagtcttttcaaaataaaagatgactgtgagaaccccaagaacttccacttctgggaggcagccacaggacagggaacatatttatttgggtctcttcagttccccctttgagaacaacattaaatacatgttagctggggctccagggcattctccttccacagtagtgcggccaaattcccagtctggccagtctctttgttgagactgaatagaaggactgcaggtttttttggaggatgagataatttttcctcgcaggcatttttcccttgccttccttatgcatgaatggtccctttgaatattatttccaaaagtgagagctaagacaaagtcatcaaaaagagaggataacagaaggtgggggcgggggcggggtgcagtggggtagggttacctgttaattgctgagactcagatgaaagtccagctctccctgggcaaccctagagggcagcagaggaccccagagctcattcaggccttgctgcttgttctaaactacaccttaggattttttcttctttccaaaacattccattgattttataaagactttctatagagaggctttcacttttgagttctttgagtttaaagattgcttttcttgaaatgctctttttttaatgtagaaaaattttactttttcaaatatgcatacaatttttaaaacagtagaagcaaattcattttaatgaccatgtaaagagcgaatgtcagacagtattattaccagtttattcaaattacatacatgttcctaccaaggtggaaagaaattcaaacctcatggtaaaacttaagcacgatttaagataaaagcatagtatttcttcagtgtagacttattaagtgccttattgaacaggatcttaacctgctttttctgtttttttgaaagagttaatgcaattgttgaagcttctaaccaagaaacaacttaaggaattgggagacttggtcccctcgttgtcagggttctggctataagtacctccccacctttgggttttcttaaatatgccaaaaggaattctagtttttataaccaatgggtttttttgtttgtgtgcttatggatttgtgtaatcattgatgcttaatgttgtggattcataatataaaaagtggctcctgtcctttatatttattcatgtgctagaaatagtatgcattatataaagagtatgaagttttcataagcctttatatttcaagctctttatttaaacattgttggaatatgtggcataagccttgtttcatttatttaataaactggagtaatatataataat

SEQ ID NO: 32360 - DNA, 3665 bp, Homo Sapiens; identical to SEQ ID NO: 32359

SEQ ID NO: 32361 - DNA, 2145 bp, Homo Sapiens
tcctagagaggaggggcatggaaaacgcacttccggcggagggtctcaagctttccccggtgtcggcggcaggtggaatttccacgctttatctgcgcctgcgccgcgcgggattcgcggtccgagctgaagagtttcacttctccgaaccctgaggcagtgtgtgaagctgggacgccagccatgttccagaccgcttggcgccaggaaccagtgacctttgaggatgtggctgtgtacttcacccagaatgaatgggccagcctggactctgtgcagagggccctgtacagggaagtgatgctggagaattatgcaaatgtggcttccctggcattcccattcaccacgcctgttctggtctcccagctggagcaaggggaactgccatggggcctcgatccctgggaacctatgggcagggaggctctcagaggtatctgtccaggggatgaggccagaactgagaaggaaggattaactccaaaggatcatgtgtccaaagaaacagagtccttcagactgatggtggggggcctgccagggaatgtttcccagcaccttgactttgggagcagcctagagcagccacaaggtcattggataattaagacaaagtcaaagaggagacatttcacagatacctcagccaggcaccatgaggcctatgaggtcaagaatggagagaagtttgagaaattaggaaaaaatattagcgtcagcacacaactcactacaaatcagacaaatcctagtggtcagatatcttatgaatgtggacaatgtggcagatatttcattcaaatggcagacttccaccgacatgagaaatgtcacactggtgaaaagtcttttgaatgcaaagaatgtggaaaatacttcagatataactcattacttattcggcatcagataattcacactggaaagaaaccatttaaatgtaaagaatgtggaaaaggtttaagttcagacacagccttgattcagcatcagagaatccacactggagaaaagccctatgaatgtaaggagtgcggcaaggccttcagtagcagctctgtcttcctccagcaccagaggttccacactggggagaagctctatgaatgtaacgaatgttggaaaactttcagttgcagctcaagtttcactgtccatcagcgaatgcacactggggagaaaccttatgaatgtaaagagtgtggaaaacgattaagctccaacacagccttgactcagcatcagcgaattcacactggggagaagccctttgaatgtaaggagtgtgggaaggcattcaatcagaaaataaccctgattcagcaccagcgagttcacactggcgagaaaccttatgagtgtaaagtgtgtggtaaaaccttcagctggtgtggaagattcattctgcatcagaaactacacactcagaagacacctgtccaagcatagggctatccatagttaggcccactgtgcctctccttttttctctttattttcatgctttttatcagtgtcctcgctgtccttcctggttagacacttggctttcatcatgaactcttctttaagttttttgaacctgtttccccaacatgaagtctctttatggttagagaagaccaaaaaacaaacaaacaaacttagaaacataaaaggaaatgtaagtttccagatttaaaggacatgctgggtgcccagcaggatggattcaagggaaacctacattaaggaaaattgctgtgaattatgaaaacaccaagtttgaataagaggatcatggagaaaaaatgagaccctaaaaagtttctagagagagaaaacaaaagatcagaaatgaaagcggggccaggcgcggtggctcgtgcctgtaatcccagcactttgggaggctgaggcgggtggatcatgaggtcaggagttcgagaccagcccgcccaatatggtgaaaccccgtctctcctgaaaaaaaaaaacacaaaaattagccaggcatggtggcgcatgcctgtaatcccagctactagagaggctgaggcaggagaatcacttgaatccctgaggcagaggttgcagtgagctgagatcgcaccactgcactccagcctgggcgacagagtgagactttgtctcaaaaacagt

SEQ ID NO: 32362 - DNA, 6941 bp, Homo Sapiens
cagagatcccatatttccagaactctgcctaaacctaggagtaaggttcctggagttgtgtctggagccatgtcaggagctgtgcttcaaaatgtgcctacaagtgcagtctgggttgctggccccaagatcactgagaacccaccatcgcgccgacgccgactcagcatcatcccacctgttatccaacctgaaataatttctaagaacttggtagaaatctctctcgatgatgagtcacctaagaatccacaaaagaaggctttaccacataagagtttgacagcgactcagagcttctctgagttatcatctggacctgattgctcacagtccttgactgcatttgccacacttgcctctaccagtagcacccagctgcccattggtttcagcaccccagccaccacccagggctgtttggattcttcagctgctcgccacaaaatgactttaaatccccgcaaacaaaagaagaaccttcaagtgattgtggaaccaaaggaggaggagccaaaccttccattggtttctgaagaagaaaagagcataaccaaaccaaaagaaatcaacgaaaagaagctgggaatggacagtgcagattcctcaagccagaaacagaacaacaaaactgagatgtatgataagaagacaacagaccaggctccaaacactgatgcttctcggagtcagggctatccaatgtcagcagcatatggaagaagatggagaagaaaaggagcaagtgtttcaggattgagtgggtgtgaattcaaaggaagaagccttaaacaatccagtgaagggtatggcctgggcgatagagctgggtcttcacctaccaataagactgccaggaatgtccctttctcgcacttgtccttagagaaggacaacatggagcagcctacaacttcacaaccagaaaccactacccctcaggggttgctttcagataaagatgacatgggaaggagaaatgctggcatagatttcggatccagaaaagcatcagcagcacagcccatacctgaaaacatggacaattccatggttagtgatccacaaccataccatgaagatgcagcttctggagctgagaagacagaagccagagcttctctctcactgatggtggaaagcctttctacaacccaagaggaggccattctctcagtagcagcagaggctcaggtgtttatgaatccttctcatatccagttagaagatcaagaagctttcagctttgatttacaaaaggcccaatccaaaatggagtcagcccaggatgttcaaactatctgcaaagaaaagccttctggaaatgttcaccagacctttacagcaagtgttttgggtatgacaagtactacagccaaaggagatgtttatgccaagactctgcctcccagaagcctttttcagtcctcaaggaagcctgatgctgaagaagtctcctcagattcagagaatattcctgaggagggggatggttctgaagaactggctcatggtcactcttcccagtccttggggaagtttgaagatgaacaagaagtcttctcagaatcaaaaagttttgttgaggacttgagcagctctgaggaggagctggacctcagatgcctctcccaggctttagaggagcctgaagatgcagaagtcttcacagaatcaagcagttatgttgaaaagtacaacacttctgatgattgcagcagctcagaggaagacctgcctctcagacaccctgctcaggccttgggaaagcccaaaaaccaacaagaagtctcctctgcttcaaataatactcctgaagagcagaatgattttatgcagcagctgccttccagatgcccttctcagcccattatgaatcctactgttcagcaacaagtccccaccagttcagtgggcacttctataaaacagagcgattccgtggagccaatccctccaagacaccctttccagccatgggtgaaccctaaagtggagcaagaagtttcctcatctccaaagagcatggctgttgaagagagcatttctatgaagcctctgcctcctaaacttctttgccagcccttgatgaatcctaaagttcaacaaaacatgttctcaggttcagaggacattgctgttgagagagtcatttctgtggagccactactccccagatattctcctcagtccttgacagatcctcaaatccggcaaatctcagaaagcacagctgttgaggaaggcacttatgtggaaccgctgcctcccagatgcctttcccagccctcggagaggcctaagttcctggactcaatgagtacttctgcagaatggagcagtcctgtggcaccaacaccttccaaatacacttccccgccatgggtgacccctaaatttgaggaactgtatcaactctctgcacatccagaaagcactactgttgaagaggacatttctaaggagcagctgcttcccagacatctttcccagttgactgtgggaaataaagtccagcaactgtcctcaaatttcgagcgggctgctattgaggcagacatttctgggagtccattgcctccccaatatgctacccagttcttaaagaggtctaaagttcaggaaatgacctcacgactagagaaaatggctgttgaaggcacttctaacaaatcaccgattcccaggcgtccgacccagtcattcgtgaaatttatggcacagcaaatcttttcagagagctctgctcttaagaggggcagtgatgtggcacctctgcctcccaatcttccttccaaatctttatcaaagcctgaagtcaagcaccaagttttctcagattcagggagtgctaatcctaagggaggcatttcttcaaagatgctacctatgaagcaccctttacagtccttggggaggcctgaagacccacagaaagttttctcttattcagagagagctcctgggaagtgcagcagttttaaagagcagctgtctcccaggcagctttcccaggccttgaggaaacctgagtatgagcaaaaagtctcccctgtttctgccagttctcctaaagagtggaggaattctaaaaagcagctgcctcccaaacattcttcccaagcctcagataggtctaaattccagccacagatgtcatcaaagggcccagtgaatgtacctgtaaagcagagcagcggtgagaagcacctgccttcaagtagtcctttccagcaacaggttcattcaagttctgtgaatgctgctgctaggcgatctgtttttgagagcaattctgacaattggttcctaggaagagatgaagcttttgcaatcaaaaccaagaaattcagccaaggttccaaaaaccccataaagagcattccagcccctgctaccaaacctgggaagttcaccattgctcctgtcaggcaaacatccacttctgggggcatttactctaagaaagaagatcttgagagtggtgatggtaataataaccagcatgcaaacctatccaatcaggatgatgttgaaaagctttttggagttcgactgaaaagagcccctccctcgcagaagtataagagtgagaaacaagataacttcacccagcttgcttcagtgccctcgggcccaatttcatcctctgtaggcaggggacataaaatcagaagcacttcccaggggctcctggatgctgcagggaacctcaccaaaatatcttacgttgcagataagcaacagagcaggcccaaatctgaaagcatggccaagaagcaacctgcttgcaagaccccaggaaagcctgctggtcaacagtcagattatgctgtctcagagccggtttggataactatggcaaagcagaagcagaagagtttcaaggcccacatttctgtgaaagagctgaaaactaagagcaatgctggagccgatgctgagactaaggagcctaaatatgagggagctggctctgcaaatgaaaaccaacctaaaaagatgttcacttccagtgtccataaacaggagaagacagcacagatgaagccacctaagcctacaaaatcagttggatttgaagctcagaagatactgcaagttcctgccatggaaaaagaaaccaaacgatcttcaactctcccagccaagttccagaacccagttgagccaattgagcctgtctggttctcactggccaggaagaaagccaaagcatggagccacatggcagaaatcacgcaataaagagctcttgtgtggagcatcagcatttattttatttagtttttttttttttttttttttttgagacagagtctcgctctgttacccagattggagtgcagtggcgcgatctccgctcactgcaagctccgcctcccgggttcacgccactctcccgcctcagtctcccgactagctgggactacaggcgcccgccatcacgcccggctaattttgttttcgtatttttagtagagacggggtttcaccatgttggccaggatggtcttgatctcctgacctcgtgatccgcccgcctcagcctcccaaaagctgggattacaggcgtgagccaccgcgcccggccaagcatcagcgttttaaatgataattgctaatagctgtattaattctatgtagtgatctttttactgtgaccacttgtattaagcaaaataagtattaagcaaactaagaatttattaagcaaaataagaatttattaagcaaaatagccttagaaatgcaaattaaaacataattatttgaatgaaataaatgccatgaatgcttaaccttccacgtagtcactgccagcacccagaaacccagcatttcctctattaaaactatcgaaaacatttgcactgctgtaaaattgcaaaatctttaactttggacaatgtgctttagaagggagaaagcaaaaacattttgttggagcaactagaaaattgtcatttccctcaaccaaataaagtaattctaatggaaacattcagatgatttgacctaaagattggcctttaggttttatgagcctagatagatgccgcaattatttggttgttgctctaagctttgcaagggatcctaaaagaggcggtggaagtgaaaattctgggtctccaagaaaatttctgcacagccagttctccaatcagcctatcaccccttgaaacatcttccctgtgtccctgggggcccctgatgctttctccttgggtgatagtaacatgcagagcacttacacaaagctccctctttggacataccccacgtcgacctgtcacaggcctggctgtagcgagcacctccctatgacgcagaatgcttcttgggaattatcttactcctctggagggttagtccatcaatgttttgcttcttgtcccaatactactgtgaccctctctgatcgcacagaaatcactgcctatcacatatatcctgttaagcactgaagaccctattgaaattagagttctacagatgccaaaagctgtactttccatcaggcagatggcaagcttactgccttgatgcacatctggagccactggagctccttcctctctggttccagcattaaggtggagaactccatgtagcttcttgtcctttcccctcagctgtctttgcttcacaaggttttagcccaaagcaagagtgcaatcccaaagccacagagaaatgaactttccgctacctggaagctttaagtgagtaaatcagcttttcccctctcattcctagaggcacacacctcaaaagttactaggctggagagaccctaccttccagtgacccactcatcccccagccacggagaagagggaagaccaaaaagggagagtgagaaagaggatgagagggatggtcagctgtgaggggagggggcaagtggcccagcaaatgttgatgcctcccttcccatcttgccacacggtctttttcttttgtagcacagcctccattaataactcctcggctgaggatgaagatgtaggcacctttacccccagagccagttccttaattggctggctttctgagatgcagaccaccctagaatctcatctaggttcactagaagttagttaaatcttcctttctctgtctttctcttcattccatcccccaaacccaccaaacactaagggagagctccctttggatgtctgggcagtaaacctagctcatttttctaggagacccagaagtgacttctgagtagttatcactgtgtctgcctctgttacactgtgctgctttgcttaaacagaaatgcaggcctggacatctgactgtgcctttatattctgagtggggtgctgccccatgcaaaaaaatccagagaggtagtgaggtgtcagagctaaacacttggtgctgggttttgttgatgctggtataatgtgacacagtacaattacatgctaaattttgcattttctctatataacatctatttttcctgatactgtgcctttgccattttgataatgctattttgattgagtgaattttatttcctttgtattcccatagtgaacaatatattaaggtagatgccctttatctgggtactcctggtagattagctgttacacctcccttcccttttttacagtgaacctgtattcagttattgtcactctgagaactctccaataacaatttcttttccacagttaacaacacagctgttacacctcccttcctttttttcacagtgaacctgtattcagctattctcactctgagaactctccaataacaatttcttttccacagttaacaacaaagttctgtttttaaatgaagagattaagttctttttaaatgcctaaaggcatattctgacaacttttctacttctttaacttttttgatttaagatatatgcaaagcaaataaattcaataaagcct

SEQ ID NO: 32363 - DNA, 3811 bp, Homo Sapiens
gcggccgagaagaggctggggctcgcggcgcggctgcagccgtcctgtgcgcgcggcgcgcggctccggagaggcgcccgcagtccagggcggcgcgcaccgcctcgctggcgctcagagcggtgccttttccccgagactcccggcacctcttcagcgcaaagattatttaatgtaatggcaactccacgggggaggacaaagaaaaaagcatcttttgatcattctccggatagccttcctttgaggagctccggtaggcaggcgaagaagaaagcaacagagacaacagatgaggatgaagatggtggctcagagaagaagtacaggaaatgtgaaaaggcaggctgtacggcaacatgtcctgtgtgctttgcaagtgcttctgaaagatgtgccaaaaatggctacacctcccgatggtatcatctctcctgtggggaacatttctgtaatgaatgctttgaccattactacagaagccataaggatggatatgacaaatatactacatggaaaaaaatatggactagcaatggcaaaaccgaacctagtcccaaagctttcatggcagaccagcaactcccctactgggttcagtgtacaaaacctgagtgtagaaaatggaggcagcttaccaaggaaatccagcttactccacagatagccaagacttatcgatgcggtatgaaaccaaatactgctattaagcctgagacctcagatcattgttccctcccagaggatctagaagctcttactcctcagaaatgtattcctcacatcatcgtccggggtctcgtgcgtattcgatgcgttcaggaagtggagagaatactgtattttatgaccagaaaaggtctcatcaacactggagttctcagcgtgggagccgaccagtatcttctccctaaggactaccacaataaatcagtcatcattatcggggctggtccagcaggattagcagctgctaggcaactgcataactttggaattaaggtgactgtcctggaagccaaagacagaattggaggccgagtctgggatgataaatcttttaaaggcgtcacagtgggaagaggagctcagattgtcaatgggtgtattaacaacccagtagcattaatgtgtgaacaagtatctgctcgctcgtgggaccacaatgaattctttgcccagtttgctggtgaccacactctgctaactcccgggtactcggtgataattgaaaaactggcagaagggcttgacattcaactcaaatctccagtgcagtgtattgattattctggagatgaagtgcaggttaccactacagatggcacagggtattctgcacaaaaggtattagtcactgtaccactggctttactacagaaaggtgccattcagtttaatccaccgttgtcagagaagaagatgaaggctatcaacagcttaggcgcaggcatcattgaaaagattgccttgcaatttccgtatagattttgggacagtaaagtacaaggggctgacttttttggtcacgttcctcccagtgccagcaagcgagggctttttgccgtgttctatgacatggatccccagaagaagcacagcgtgctgatgtctgtgattgccggggaggctgtcgcatccgtgaggaccctggatgacaaacaggtgctgcagcagtgcatggccacgctccgggagctgttcaaggagcaggaggtcccagatcccacaaagtattttgtcactcggtggagcacagacccatggatccagatggcatacagttttgtgaagacaggtggaagtggggaggcctacgatatcattgctgaagacattcaaggaaccgtctttttcgctggtgaggcaacaaacaggcatttcccacaaactgttacaggggcatatttgagtggcgttcgagaagcaagcaagattgcagcattttaagaattcggtggacccagctttcttctgtaccccagatggggaaatttgaatcacatgttaaacctcagttttataagagggggaaaaaaccgtctctacatagtaaaactgaaatgtttctaaggcgatatgataatgcaaacctatttcatcactctaaaagcactgacctcaaaaaaccttataagcacttagatttaattgcattttccataggttcaactactgctgaaagtctggatttcagaataaagcagaatgtaagtttcagttgaggccatggatttgattgttccatggctggaagttccctttagatttcacattttatatggctgatcaattttcatacattgagaaaccaagtcaatcaagcaggaatcatttaaaaaccagataaagccatgtttttcttctgtgacaatttatcagtatctttaccaatgagccttaatttttatataggtccaatattgagcttttacttaaaatttagatagaacttttttttggatacagcacaaactccagttgacagtaaaatgaagcttctaggtattttgtattgtacatatttcctcctactgggtgttcaaaagaaatttaaattcaagtaccttttgtgataaaatgttttagatttgtgcacccattggcaaaacaggaaagtttccagataggtattgtatcattgagaatgcagcacagatagtgtgggcttcacactatagacacagaatatagctttttcttaaagccaaatttgggtgataggacactttaaatatccttaattttggcaaccactagcaaaaaaacttgtcagaataatttaaccaagcccctctccacttcttttatttaaaagcactgattcaattgctaggaatatttttgcagatttttctttacagtattccataggcaggtccactggaaaactgcagaaaaatgtgagctctcctggtaaatagtatacattttataagctatattttaaaggcctaagaacatggcaagtatttacttttatcttttttttaaaaacactcatgacagaaaacagtttaataatatctcattctaaaataaaacactggttgcagggtcttcaggatgcctattttgccaagaaacttcagtatacaggttagaaatatgcttttgtttttgaacaataatatactggtttgctttaaagaagggactaaatatgactttaaagagacttcaaaatattgagtattttaaaaatttaaaagtaggtcagtttataacgagtaaatacctaacacaccaagaatgtgcagtgaacctcaggcatttaagacacctcccccaccgcccgccccccgccccccccaatcaaagtgtggtcccaaaacaagccaacagctgtatatctcaaaagttaacccaagacaactctgatatttaggttatttgttgagactcattggtactgactggcaagtattctgctttaaagtatcatgtattaaaatgtttagacagcatgtgttttaaagtgataaatgcaaaatgttaagtttgaaatggttaacagtaaattattatgttagtttccaggcacttgaactgtgctacaagtaggggaaaacctactttaaagtatggtaaatgtgtgttttaaacttcctatcaagtgacatacttcatttgattttttgtttaagaagccatggtacttttttcttgagttactttggatatgttttttcaatgccatctgaagattttgtaattgagtagcagtaaatatacagatttacaatgttttaactacagttcatgaatagctggttgtgtaaaactaataaaaaactagactttcacatgt

SEQ ID NO: 32364 - DNA, 6971 bp, Homo Sapiens
atgcaaaggggcatcagggttcccacggtctttgctcgctgtggaaagcggggacgggcgctgacgcaggccaactcctacatcttcaccagagccctggaccaaatcctgcagaacgtaggttcagcagacagcagacctgaacccgtgtccctgagggtggtcacaatctcagccccaggcaaggtccggcacaagggctctgctggggctgagatccgtgaaggcagatgcggagaggcgccgctggattgcgagcaggcccaggtgcggggccagggccagacgggcccagccagcaccaagatgagtgccacgtcctggttcctggtgagcagcagcggcgcccgccaccggctccctcgggagctcatcttcgtggggcgtgaggagtgtgagctcatgctacagtgtccttgtgcccagtgcaagcctggcacagagctggtgcccagcgaacaggcgttaaatgacgcaggaacgtggacccaggcaggacttcctgctgtggctgtcactcctgtggtggcccaggctgtggtccaggagaccacagcctgggcaggccctgaccttctgtgccccgtgcatcgagccggtctgctgcgggtgcctgtggccgccaatggggaactcggcgtggacaagcagcatgccgtcatcaactacgaccaggacagggacgagcactgggtgaaggacctgggcagcctcaatgggacgtttgtgaatgacatgcgcatcccggaccagaagtacgtcacgctgaagctcaacgatgtcatccgcttcggctacgattccaacatgtatgtgctggagcgtgtgcagcaccgagtcccggaggaggcactcaagcatgaaaagtacaccagccagctgcaggtgagcgtgaagggtttggcgcccaagaggagcgaggcactgccggaacacacaccatactgcgaggcctcgaaccccaggccggagaagggggaccggagaccaggaacagaggcagcctcttaccgcacacccctgtatgggcagccctcctggtggggtgaggacgatggtagcacgctgcctgacgcccagcgccagggagagccctacccagagcgccccaagggaccagtgcagcaggacggggagctccacggcttccgcgcccctgctgagcctcagggctgctcgttccggcgggagcccagctacttcgagatccccacgaaggagaccccgcagccgtcgcagccccccgaggtgccggcacacgagatgcccacgaaggatgcagaggcaggtgggggcggagcggcccctgtggtgcagagccacgcctccttcaccatcgagtttgatgactgcagccctggcaagatgaagatcaaggaccatatcaccaagttttccctgcgccagcggcggcccccgggcaaggaggccacacctggcgagatggtgtcggctgagaccaaggtggccgactggctggtgcagaatgacccgagcctgctgcaccgggttggccctggggatgaccgccacagcaccaagagcgacctgcctgtccacacccgcaccctgaagggccacaagcacgaggacggcacgcagagtgactcagaggaccccctggccaaggcggcctcggccgctggggtgcccttggaggccagcggggagcaggtgcggctgcagaggcagatcaagcgggacccccaggagctactacataaccagcaggcctttgtcatcgagttcttcgacgaggacacaccccgaaagaagcgctcccagtccttcacgcacagcccgtccggggaccccaaggccgacaagcgccgtggcccaacgccggccgatagggaccgccccagtgtcccagccccagtccaggcagggggccgcagctcggggccacagagggccggctcgctcaagcgggagaagacagaggaacggctgggcagcccctcgcccgcctcccgaacccctgcccgccccttcggaagcgtggggcgccgctcccgcctggcccaggacttcatggcccagtgtctgcgggagagctccccggccgcccggcccagccccgagaaggttcctccggtgctgcccgctcccctgacaccccatgggaccagccccgtgggccccccgaccccaccgcccgcccccacggacccccagctgaccaaggcacggaaacaggaggaggacgacagcctcagtgacgcagggacatacaccatcgagaccgaggcgcaggacacggaggtggaggaggcccggaagatgatcgaccaggtctttggggtgttggagtcccctgaactctccagggcatcttcggccacctttcgcccagtcatcagaggggacagagatgagtctgatgacgggggcgtggcccagcggatggcgctactgcaggagtttgcctcccggccactgggtgcggccccccaggcggagcaccagggcctcccggtgccgggctcccctgggggtcagaagtgggtgtcccgctgggccagcctggctgacagctactcagacccgggcctcacagaggatggcctgggacgtagaggcggggagccggaggggtccctgcctgtgcgcatgcggcgacggctccctcagctgcccagtgagagggctgacagccctgcgggcccagagagcagcaggaggagtgggcctgggccaccggagctggacagtgagcagcccagccgcctcttcggccaggaggagttggatcctgacagcctcagcgatgccagtgggtcggacgggggccgaggccccgagccaggggtggagccacaggacagcagacgcaggagcccccaggaggggcccacgtggagcaggggtcggcgctcaccaagggcccccggggagccaactcccgcctctttcttcattggggaccagaatggggacgctgtgttatctaggaaaccgcttgcggctccaggggatggggagggcctagggcagacagcccagcccagccccccagcacgggatggcgtctatgtcagtgccaatgggagaatggtcatccagctacggcctggacggtccccagaacccgacggccctgccccagcctttctccggcaagagagcttcactaaggagccagccagtggtcccccagcgcccggcaagcccccccacatctccagccacccgcttctacaggacctggccgctacccgggccgcacgcatggacttccactcccaggacacccacctgatcttgaaggagacggagacggccctggcggccctggaggcccgactcctctctaattctgtggatgccgagtgtgaggggggcagcaccccgaggccgccggaggacgccctgtctggggactcggacgtggacacagccagcaccgtcagcctgcgtagtggcaagagcgggcccagccccacaaccccccagcctctgcgggcacagaaggagatgtcgccatccccgccagctgcacaggacccgggaggcaccgccctggtcagtgcccgtgagcagtcctcagagaggcagcatcacccacttggcccgacggacatgggccgtggagagccggtacggcgctcagccataaggcgtggccacaggccccgagggtccctggattggcccagtgaggagcgtggccctgtcctcgcccacctacccagctcagatgtgatggcctccaaccacgaaacccctgaggccaccggggcaggacggctaggttctcgccggaaaccagcggccccaccgccatccccagctgcccgggaggagcagagccgtagctcagccagctcccagaaggggccgcaggccttgacccgctccaacagcctgtccacccctcgccccacacgggcctcccggctgaggcgggcccggctgggggacgcttcagacactgaggctgcggatggtgagcgggggtccctgggcaaccctgagcccgtgggccggccagctgctgagcaggccaagaagctgtcacgcctggacatcctggccatgccccggaagcgggccggctccttcacagggactagtgaccccgaggcagcccctgcccgcaccagcttctctggccgcagtgtggagttgtgctgtgccagccgcaagcccaccatggccgaagcacgggctgtctccaggaaggctgccaacacagccaccaccacgggtccccgccagcccttcagcagggcccgctcaggcagtgcccgatacacctccaccactcagaccccgagggctggcagctccagccgggctcgttcccgggcccccggcccccgggacacggacgacgatgaggaggagcctgacccttatggtttcatcgtgcagacggcagagattgcggagattgccaggctgagccagacgctggtgaaggacgtggccatcctagcccaggagatccacgatgtggctggggacggtgacacactgggctcctcggagcctgcccacagcgcctccctcagcaacatgcccagcacccccgcctcgaccatctctgcccgggaggagctggtgcagcgcatccccgaggccagcctcaacttccagaaggtgccgcccggctcgctgaactctcgggactttgaccagaacatgaacgacagctgtgaggacgccctggccaacaagacgcggcctcggaaccgagaggaggtgatcttcgataacctgatgctgaacccggtgtcccagctgtcgcaggccatccgtgagaacacagagcaccttgccgagaagatgaagatcctctttcagaacacagggagagcttgggaggacctggaagccaggatcaacgccgagaacgaggtgcccatcctgaagacatctaacaaggaaatcagctccatcctgaaggaactgaggcgggtgcagaaacagctggaagttatcaatgccatcgtggaccccagtgggagcctggacctgctcacaggaaacaggagcttggccagctctgcacagccggggctggggaagggccgcgtggctgcccagagcccaccctcacccgcctcagccgaggccctgctgccagccctgcccctgaggaatttcccacagcgggccagctgtgggcctcccagcctcccggaccccaccttcctccctgatgccgagaggttcctgatctaggccccagacctggccaggccagcctccctgtgcgtgtgcgtctctgccttccgtccgccgcacacccgcctgcctggccgcaggtggttctccctgaagacccccacatgtgccatatccctgtgggcgggtgcctcccacgcccttgccccctcgtcagctcccagccagcaccctactcaccctgtccagccccatggccacccccacccctgcctcgccccctacaggcctctgggcccagctcctggccaggctgctgccaaggtcaagccctcaagggcattaccccgcctcctcttcatcactgttatttttgtctttagctttaaaggaaagagttgttggtgccattgcaggtgccccctccaggcctgactggctccgccaggcactaacctgccataaccctttgtgctggcctgcggccaggcagaggaagagaggtcgactgtggggtcatttggtgccaaacatggaggtgggcaggctcacctgttcctgggactgtctgagatggcagggcacttgccctggtggctcccacctgaccccaggccttttataggcaggagccccactgcttccagcctctggtgccaacacagttgccaaacccattgagcttggggctgccctgtggaggcctcctgggtatggaccaggggcttgttgagagctgagccatgcacacaggtgcagacaccccccaactcccatgcacacggctagtccaggcgcctccacgctgcaccgtgaggactgcagggcatgtccccgtgaggggctatgggcctctgtaggtgggcttccaaggtcctgggtgcagccgggtgcatggcagcccttctggcgggggtgagcgcacgaccaaagtcactggaagccgggtttccggaagctcgcagcttggcctgcaccacacgccctccccttttggcttcacgccatcaggcctcaagtgggcatgggggcagggacgggcccaggaactgttgttttctcaggattctttcagctgggaacatggcaggtgagcagagcttggtgcctctgccgtggcccctgctggggcagcccgtgttgccggagcctctaagccaaagagcccgttggccgtggttggtgggggtggacgtgggggtgtcccacctggaccagactggcgtgggtgagctccacaccctgcctggcaatggtatgagagtcggacctggacagggccagctgctgggggagcggcactggggactggaggctggaagcgggtggtgtgtgtcccctgtttacttttagctgagctggggttgggtgtacgggttctgttcctctgagcctgcggcccacctgatgtttacgtgtgtgtgtgagggggggcgggggtggcaggtgtccccccctggtccccgccccaagagcctgctgtctgtatggaggaggtgctagcccggtccaccgggctgctgcccacccctgcatgccccagttgcccaccccgcctgcccctggacatgaagtggtcacgcttcatccacggctccttcccacccctcggcagtggctgtgcaatgttttaagttcacaagttcctgctcctccccacactgagctcctttgttcctccccctccagcctttgcctgggaactggtccttgtttgccgggcttctcggagggttcactgtacattcgttctcaggtggtcttgtggctgtctttcggaaaatggttattttatatgatttgtcatggaatttgttctaataaatcattcttctatc

SEQ ID NO: 32365 - DNA, 2063 bp, Homo Sapiens
gtttccaacaacagaggctgcagccacccagccccgaagcagggcccagcgagacagggcccagccccaagcgtgacccagctgcagagaagctgagacggtgattcggactgactggactctggcctccaggtgtctgcacctcacactggacccacctggagactccacgggctcccggcagctccggctgcttgggtggatccgggtgcccgcaggggctgtgggagggccccggggcctgcactgctcccccgatggcctgctcttcctcacggccggggctgcaccctgtgtccacgtgctagatctggagggacgccccatctgcctcctgccctgccgcactccggggagcggggccttcgttccagaggacgtggctgtgacagcgtcagggcttgtggtggtcagcgatcccatccatggggctgtccatgcactccagcacacagcccgggaccccgggggccactgggtgacagtgggcaccttcctgtctccccgagggctggctgtggatgccctcaaccgcctcctggtgacggactacttgcctggggctgtgcacagcttctcgttgggtcctgcttgggagcccctggccccagcctccatgctgggtctggagggcccctgctgggtgggcccagggcctgatgggggccttgctgtgagtgaggagtttggggatgtgaggctgtttggcagtgcccgccaacccctgggctccctggggggctggacggggcacactttcggctgcccagcgggcatctgctccaactcagagggcaatgttattgtggcagacgagcagaggcgccaggtgaccctgtttccccgggctgggccacccatctgcctggtgtcagaggggcttgggcagcccttgggagtggcctgtgcaccccagggccagctcctggtggctgatgccaaggacaactccatcaaggtgtaccagggcctcaaggagctggcctgacctgaggctgggttggagcagccctcctgtgcctgaggccagctcccaggcccttggatcaccgcgggaggaaccctcaggatgggtggagcctccaggctatgggcattgcctgcctgatgccagcaccacctgggctgggccctgggcttggctcgagttctcctgctggtgaggctccggatctcaggagcagccctgagtctgcttcccaggctgcccctgccaggcctgcagcctccccagccagggctgctctctgctgtccccattcagtgccctggcccctgcattcatgccccccacaccccctcaggccctgtgcctggactttggggctggcagctgaagccttgagatcctgggccagctgccggcacacagctaggcagactctcccaccaggtgcccctgcccaggcctcctaatcgggggcagacaggcagggagggtgtggctgggctgggctgggcggggcggcctggggcaggggtgtggcccctaaatgtccccaacctcagagggacctagagtcctgagcctccagtagcttctctgggcctggcagaggtaagggggaggcaaccctggagtgtctggaggcccatggctggctgaaccctggatgccttttcttccgcgtccccatgaatgaaagctgtctgggccttcattctgcagacagggacaaacagctccatgctgtttgtcctcccagtgcagccgtgctgggagggtctgggggagcttcctacaaggagagactcctgctgctttggaaaactgagaaaaaataggggtctaaccctctcctcccattttacaagtggggaaatgaggcgtgaaaggagaggcgtctgggttactccgtgggtctggggtccagggaagggcctgtatgggggagggagctgggaggggacggtgtctggctctacccctgtggggtggggaggtggggctcccctgtatcacaggacatcccccctgagaggtccctcatatgtctgggtcctgtgggtgggggactaactgcgcaatgtagttaggtgctcaataaacggagttgccgctg

SEQ ID NO: 32366 - DNA, 1577 bp, Homo Sapiens
ggcgggcgcggagctctgcgcgcggctcgccggctccggggtctgctccgggggtcgcggacgcggggccgggcggcggagccggcgccagagcatgcggggcgcggcgcgggcggcctgggggcgcgcggggcagccgtggccgcgaccccccgccccgggcccgcccccgccgccgctcccgctgctgctcctgctcctggccgggctgctgggcggcgcgggcgcgcagtactccagcgaccggtgcagctggaaggggagcgggctgacgcacgaggcacacaggaaggaggtggagcaggtgtatctgcgctgtgcggcgggtgccgtggagtggatgtacccaacaggtgctctcatcgttaacctgcggcccaacaccttctcgcctgcccggcacctgaccgtgtgcatcaggtccttcacggactcctcgggggccaatatttatttggaaaaaactggagaactgagactgctggtaccagacggggacggcaggcccggccgggtgcagtgttttggcctggagcagggcggcctgttcgtggaggccacgccgcagcaggatatcggccggaggaccacaggcttccagtacgagctggttaggaggcacagggcgtcggacctgcacgagctgtctgcgccgtgccgtccctgcagtgacaccgaggtgctcctagccgtctgcaccagcgacttcgccgttcgaggctccatccagcaagttacccacgagcctgagcggcaggactcagccatccacctgcgcgtgagcagactctatcggcagaaaagcagggtcttcgagccggtgcccgagggtgacggccactggcaggggcgcgtcaggacgctgctggagtgtggcgtgcggccggggcatggcgacttcctcttcactggccacatgcacttcggggaggcgcggctcggctgtgccccacgcttcaaggacttccagaggatgtacagggatgcccaggagagggggctgaacccttgtgaggttggcacggactgactccgtgggccgctgcccttcctctcctgatgagtcacaggctgcggtgggcgctgcggtcctggtggggccgtgcggtgagggccgcgcgctgggagccgcatgccctgggcccaggcctgaccctggtaccgaagctgtggacgttctcgccacactcaaccccatgagcttccagccaaggatgccctggccgattggaaatgctgtaaaatgcaaactaagttattatatttttttttggtaaaaaagaaatgtccataggaaacaaattcccgtgtcttaaaacgccttggtgtgccgtctgatactgttctctaaagacgttaggagtcacggcatctggcctgcggttgggtgaagcactggccgttgggcacagtggatgtgtgaaaaggtgccattcagagttgttattctcatgacggaagttttggagccaaataatacgttttttattttcattttatttttaaaggatgagctttggtccttttcaggccgccggttgtttccgttcccgagaataaagacgaggatccgacca

SEQ ID NO: 32367 - DNA, 1394 bp, Homo Sapiens
tatttcttataaacgggatcatacccctgtgaggtcctttcactcagcacatggacagtagtgttttgatttgtgctgactgggtggtggcttcactgggcagtgctctgacttaggttggagatcaagcctttttcctatgctcatgagccttttgtgttttcagggctccattggcctccagaggactgggagcctgccccggaaaaggggggagagggggagccagagaggatccccccgacctctgtccttccattgtactggtgaggatccccctgttccccacttccttcccacatcagcactcatcctgcagcagaggatggaggaaacccgcacctatgcctgcaggggagaagtggataggctcaggccagggtgtatccagccctgtaacctggtcccctctaccctagaatccctggaggcctcagctctcccgccagcagtgggggactccggcagataccccctctaccagctgctgaactgtggccgtgggaatagctgtggggccatccatccagacattgcccacatggagcggctcctgcagcaggccatggcggagagggagcggctgctcaaggcccgggaaggaacaagaaggggcacggaaggttcctcaggccctgctgttcctgccatcacggccccacccaccccaccccaccctccaggcccgcgaatcttggatctccggcagcatctggagggatggggccacaacccggaaaactgcccacatgtgcaggtgtctgggtgctgctgccgtggacccctggtgaagatgggcggccgcatcaagacctggaggaagcgatggttctgctttgaccgccaagcccgccgcttggcctactatgcggacaaggaagagaccaagctcaaaggtgtcatctacttccaggccattgaggaagtctattatgaccacttacgctgtgccttcaagagccccaacccccgcctgaccttctgcgtcaaaacctacgaacgccttttctacatggtggctccgagccccgaagccatgcgcatttggatggacgtcatcgtgaccgccgctgacgaaaaccacgccccctgagtggccccgccctcttggggggaagtcccttcgaggctccgccggcgcggggcgcgggggcgttcctaggccccgcccactgccggaaaacttggacgcaccgctttggaactctcccgggaattccgcaggcgcggcagttcagctggcctgagctgctgcgttctgggttgcaggtgccttgcccccgacgggatcgccggcccctaaggccctgcccggggcaggaggaagattgcaggggcgggaagaaactatttattggtgctcctgtgataccgaattaaatacggaggaaaaa

SEQ ID NO: 32368 - DNA, 2658 bp, Homo Sapiens
atggtccatggatcagtgacattcagggatgtggccattgacttctctcaggaggagtgggagtgcctgcagcctgatcagaggaccttgtacagggatgtgatgttggagaactacagccacctgatctcactgggaagttccatttctaaaccagatgtaattacgttactagagcaagagaaagagccctggatggttgtaaggaaagaaacaagcagacggtatccagatttggagttaaaatatggacctgagaaagtatctccagaaaatgatacctctgaagtaaatttacccaaacaggttataaagcaaataagtacaactcttggcattgaggccttttattttagaaatgactcagaatatagacaatttgagggactacagggatatcaagaaggaaatatcaatcaaaagatgatcagctatgaaaaactgcctactcatactcctcatgcttctcttatttgcaatacacataaaccgtatgaatgtaaggaatgtgggaaatactttagtcgtagtgcaaatcttattcagcatcagagtattcatactggagagaaaccctttgaatgtaaggagtgtgggaaagcctttcgacttcacatacaatttactcgacatcagaaatttcatactggtgagaaaccttttgaatgtaacgaatgtggaaaggcctttagtcttcttaccctgcttaatcgccataagaacattcacacaggtgagaaactgtttgaatgtaaggaatgtgggaagtcctttaatcgtagctcaaaccttgttcaacatcagagtattcattctggtgtaaaaccatatgaatgtaaggagtgtgggaaaggctttaatcgtggtgcacaccttattcagcatcagaaaattcattccaatgagaaaccctttgtatgtaaggaatgtgggatggcctttcgatatcattaccaacttattgaacattgccaaattcatactggtgagaaaccctttgaatgtaaagaatgtggaaaggcgtttactcttctgacaaagcttgttcgacatcagaagattcatactggtgagaaaccctttgaatgcagggaatgtgggaaggcctttagtcttctcaaccagcttaatcgccataagaacattcacacaggtgaaaaaccgtttgaatgtaaggaatgtgggaagtcctttaatcgtagctcaaaccttgttcaacatcagagtattcatgctggtataaaaccatatgaatgtaaggagtgtgggaaaggctttaatcgtggtgcacaccttattcagcatcagaaaattcattccaatgagaaaccttttgtatgtagggaatgtgagatggcctttagatatcattgccaacttattgaacattctcgaattcatactggtgacaagccatttgaatgtcaagactgtgggaaggccttcaatcgtggctcaagccttgttcaacatcagagtattcacactggtgagaagccctatgaatgtaaggagtgtgggaaggcttttagactttacctacaactttcccaacatcagaaaactcacacaggtgaaaaaccatttgaatgtaaggaatgtgggaaattctttcgtcgtggttcaaatcttaatcaacatcgaagtattcatactggaaagaaaccctttgaatgtaaggaatgtgggaaagcctttcgacttcatatgcaccttattcgacatcagaaattgcatactggtgagaaaccctttgaatgtaaggagtgtgggaaagcctttcgacttcatatgcaacttattcgacatcagaaattgcatactggtgagaaaccctttgaatgtaaggaatgtggaaagagtattcgtgctggtgtaaaaccatgtgaatgtaaggggtgtgggaaaggcttcatttgtggttcaaacgttattcagcatcagaaaattcattccagtgagaaactctttgtatgcaaggagtggaggacgacctttagatatcattaccacttatttaacattaccaaattcacactggtcattcatactggcgagaagccatttgaatttgagaaatgtgggaaggccttcaatagtggctcaaaccttgttcaacatcagagtattcatactggtgagaaactctatgaatgtaaggagtgtgggaaaactttcagatttagtttggtcctgactgcacatcaaagaattcatactggtatgaaaccctgtgaatgtacagaatgtgggaagacctttagttgtagctcaaacattgttcaacatgttaaaattcatactggtgagaaacgctataatgtaaggaatatgggaaagcatttgctgtggatgatcagctgtctcaacatcagaaaattcagaatagttagaaattttgtgacaataaggagtgtggacaagccttcactgtgtacgaaaaatttactcaacaccagagagctcatattgatgagaaatcttgtgaacataaaagaatgtgtgaagaactttcatcatggcctgggatttgctcaacttctgagtattcatacttctgagaaatctttgagtgtaaggaatgtggggcgttttatagccacactaaataccttagagttcggagaagataattcttgtgagaaagtctttgaatga

SEQ ID NO: 32369 - DNA, 3237 bp, Homo Sapiens
agttgtactcatgaggatgaaaatcaccaaagttttttctataagccttgtgcattttgtatgtatttgtatcaaaagatatttggaattcctatttagccagagggcagtgacttgatccagttatttgtggtaactctcttcttcccaatgatggagtagagcataaaggaggggagaaatggggcaagaaatgactgactgtcactacaagatatgtctttggtgttttttttggctttgttctgttttgttttggggggggacatggtctctctctgccgcctaggctggagagcagtggcatgatctcggctcactgcagcttctacttcctggcctcaagcagtctttccacctcagcctctcaacgcactggaattacagatgtgagccaccacactaggcctacaagtggtccttacaccagattaatttatcttgaaatggcgggcaactgaatcgcacacctcaatctatgatttgacttttaaagaattaattatattgactgagagagaggcccaggagagaaagaagaaagaaaaggagccagggatggctcttcctcagggatctttgacattcagggatgtggctgtagaattctctcaggaggagtggaaatgcctggaccctgttcagaaagctttgtacagggacgtgatgttggagaactacaggaacctcggcttcctgggactctgtcttcctgacctgaatattatctccatgttggagcaagggaaagagccctggactgtggtgagccaagtgaaaatagcgaggaacccaaactgtggggaatgcatgaaaggcgtgatcaccggtatctctcctaaatgtgtgatcaaggaattaccaccaatacagaacagtaacacaggagaaaaattccaagcagtgatgttggaaggacatgaaagctatgacactgaaaatttttacttcagggaaatccggaaaaatctacaggaagttgactttcaatggaaagatggtgaaataaattataaagaagggccgatgacccataaaaacaatcttactggtcaaagagttcgacatagtcaaggggacgtagaaaacaagcatatggaaaatcagcttatattaaggtttcagtccggtctgggtgaattgcagaaatttcaaactgcagagaaaatttatggatgtaatcaaattgagaggacagttaataattgttttttagcttcaccacttcaaagaatttttcctggtgtccaaaccaacatttctaggaaatatgggaatgattttttgcaactttcgttacctacacaagacgagaaaacacatattagggaaaaaccttacataggtaatgagtgtggcaaagccttcagagtgtcttcaagtcttattaatcatcagatgatacatactacagagaaaccttacagatgcaatgagtctggtaaagcctttcatcggggctcactactaacagtacatcagatagtccatacaagagggaaaccataccaatgtgatgtatgtggcaggatcttcagacaaaattcagatcttgtaaatcaccggagaagtcacactggagacaaaccctacatatgtaatgaatgtggcaagtcctttagtaaaagttcccaccttgcagttcatcagagaattcatactggagagaaaccttacaaatgtaatcgatgtgggaagtgctttagtcaaagttcctctcttgcaactcatcagacagttcatactggagacaaaccctacaaatgtaatgaatgtggcaaaacctttaaacggaactcaagcctcactgcacatcatataatccatgcaggaaagaaaccatatacatgtgatgtatgtggcaaggtcttttatcagaattcacaacttgtaaggcaccagataattcatactggagagacaccttacaaatgtaatgaatgtggcaaggtcttccgttatcgctcaggcctcgcacgtcattggagtattcatactggagagaaaccttacaaatgtaatgagtgtggcaaagcctttagagtacgttcaattctgcttaatcatcagatgatgcatactggagagaaaccttataaatgtaatgaatgtggtaaagcttttatcgaaaggtcaaacttggtttaccatcagagaaaccatactggagagaagccatacaaatgtatggaatgtggcaaggcgtttgggcggcggtcttgcctcactaaacaccaacgaattcattctagtgaaaaaccttataaatgtaatgagtgtggcaaatcttacattagtcgctcaggcctcactaaacatcagataaaacatgctggagagaaccttacaactaaactcaatgtggaaaggccgttagatgttgtcctaacctctgggatccccaaataatttatacttactcatatagcttgtatatttgtcctttccctttgaagtctcatgtggaattgtagtaatctccagtattggaggtggagcctagtgggaggtgattggatgatgggggtggctttctcaagaaagttttagtaccatccccttgttgctgtccttgtgatagttctcatgaggtctggctcatgcctgtaatcccagcactttgggaggctgaggtgggcggatcacttgaggtcaggagttcaagagcagcctggccaacatggtgaaaccctgtttctgccaaaaatacaaaaattagctgggcttcgtggcgggtactggtagtaccagctactcgagaggctgagtcaggagaattgcttgaaccctggaggcggaggttgcagtgagccgagatcgcgccactgcactctagcctgggtgacagagtgagactccatcacgcacacgcacgcacgaaagtgaatggcacctccctctttgctgggattacaggcgtgagccactgcgcccggccagaatatagctaagttttaagcaagtgttcactaggcataagaatatacatcctggagagaaatcacagaagtgtagtatatgtggcaagaatactacttaaaggtcaaaacttgtggatctataactcaaagtgcagatatgctttacaaatgaaatgagggtggcagaagcttcaccagagttcagtcactacttgagagtttatattggaaagaaatcgtataaatgtatgtgctagaggcttccccgaggtgtctgaactcactagacctcagaatatacatctttgacaaatgt

SEQ ID NO: 32370 - DNA, 595 bp, Homo Sapiens
agtctacaggctaggtgcacactggacagtcagggtggttgtgagctgatggagactgtaaatgaaccagaaacaggtgaagtgagcaaagatgcagtcattgtaaagcaggagaaaaataatgaatattgccttcaggatattgatgataaattgtcagaatcagcagaggatgatggtgaagatgataccaatgatgaagatgatgatgaagatagtaaccctaaaaagaatactcaggccccactagagttaatggcagaatttctgagagcagaaatggcccgagagtaccagctggcaaaaaaattatgtcagatgatcctaatctatgaaccagaaaatcctgaggccaaggagtttttcacacttattgaagaaatgttgctgatggagaaaactcagaatcatgagcaagacggtgaaaacagtgatgaagacagcagtggtgagagtaaaggagaaagcgatgaggagctgagtgacgagagctctgacgaaggtgaagatggatcatgagtgttgctgcaatacttgaagcttcatgtattttcattaatgtataccatgcaaatataaagacaagtgacatttt

SEQ ID NO: 32371 - DNA, 2179 bp, Homo Sapiens
gctggcggccccgccccgccccgcccggctgctccatggcgctgtgcgaggccgcgggctgcgggagtgccctgctctggcctcgcttgttgctcttcggggactccatcacccagttttccttccagcagggtggatggggagcatcgctggctgacaggctggtcagaaaatgtgatgttctgaatcgtggattttcaggttacaataccaggtgggccaaaattatccttccaagattaatcaggaaaggaaacagtttggacatcccagtagcagttacaattttctttggggccaatgacagtgcactaaaagatgagaatcccaagcagcacattcccctggaggagtacgctgcgaacctaaagagcatggtgcagtacctgaagtccgtggacatccctgagaatcgagtcattctcatcacgccgaccccactttgtgaaacagcctgggaagaacagtgcatcatacaaggttgcaaactaaatcgcctgaactctgttgttggtgaatatgccaatgcgtgtttacaagtggcccaagactgtgggactgacgtacttgacctgtggaccctgatgcaggacagccaggacttctcatcttatttatcagatggactacatttgtctccaaaggggaatgaatttttgttctcgcatctctggcctttgatagagaaaaaggtctcttctctacctttgctgcttccttactggcgggatgtagcagaagcaaaacctgaattaagtctgctgggagatggagaccattagccaatcacaggagacccaaatctgcttgttatctacagaactcaaagttgtcaatacgtagaggtacgcttttttcctcaggcttaaacctttgccactgatattaataataaaagtattagatgatttttcagggaagttttatacttaggtccattgtgtttcgacagtatttattaatgcagatatcagtgctacagctataaaatataccctgagcagcttgttaattctataaatgacaaagactatgtttttaaaaagtcacaattttataaaaatggtttttcttacattcttttgagaactgtttcactcatacatacacccacacaccccactcaaccttgtatcaaattccaaaagtgtaactaaagtataagaatatcatgactagttaaaagatagcaaataccataaggtacaagttcaagtattagtataacaagtatctgagtaacaaatgtccttggaaatggggggtaggaggagatatgattagtcacaggtttggttaactgccctcaaaatttacaagttaaaatgttttggctggtgagcacatttcagttcttaggggaaaaaaagcttttaatggcaatttatagaaatcagaatccaggctaatgatttttatccttcacacagtaaatgcagcccatccagaatcctggagcaataaagtaagaagtaattcaaatatctgcttgtgggtcaataaaaagggtttctgaagtatcaagtcttgtggggacagcccccaaccctaagggcaggtagtattctatctcctggctggctcatcacattcaaaacaacctgttttttttgttgttgttgttgttaagaaatatctcaccctcttattcaatagtgtttgaaaacaggcaatctttgtattttaaatattctaggtttgtagatagtgaattttttttttttttttttttttttgaggcagagtctcactctgtcacccaggctggagtgtagtggcgcaacctcagcctctccaagtgctgggattacaggcatgagccaccactcccagccaatagtgaattttctaagagcatgtatccctatcagtaacagggatacatgaagatacttataaaatacagaaaaactgcccagcaaatcagggccctaaacagttggtagattccataaattcaactggctaccatgtatagccctcactgtaaggtaggtggttaggtttctagagagcattagtcttagaattatgaagagccatattaacccaaatgatttctaaatttagatatatattttccctgctacataaaaactctgggtaataactagaaatagacccacaatttagagacaatgtatactagatttatctcctttgtttttagttgaaggca

SEQ ID NO: 32372 - DNA, 706 bp, Homo Sapiens
acgcgaaccaggccgctggcggagggctcagggggagcgcagaggcgacggcccccatgccggcggccaacatgatggagaaccggccgctgcccgccctgcaggtgcccgagccgcagggtgcgcccgagggcagcccggtctggtccagttcgtcgacccccacgcttcgccgccggcgcttcaagatgcgccgcatgaagaacgtacaggagcagagcctggaggccgggctggcccgggacctgcccgccgtcttggcccccggcaaggagttcctgcagctgccgtccatcgagatcacgccctccagcgacgaggacaccccgtggtccaactgctccacacccagcgcgtccccgcgccgaaaacgcttcctcctccgcaagtggctgagggtgagggagcggaaggagtgcagtgaaagcagctcaagcttgcggattttcactgcacaaagttgaaaatatgaagaggattaggagacccttttcttctccttaaaccctaggaaggaagaagtggaacaaatggtaaagacagcatggcttactaactttccagtgttcactggaatactccaagaccaatcatgttcatctttgtatcgtcacagcactgtacctgacctcttacagtgatctatagatctatagatgtttgttgatgagttaataatgagtaaataaatgattcctttttctct

SEQ ID NO: 32373 - DNA, 1601 bp, Homo Sapiens
ccggacggccgggccgccgcctcctctgggcctcgtctccccttcaagcccccggccttgtggggaagggggaatccttgacgcattttacagacggcacatagggtcggggcagtgctttaaccggagaccaggagcctgactcttccagggctctgtgagacagcctggtgcctggcgggggtgacacagccccactgtctgccccgcgtttacagccaggaaccacacctgagccatttccaagggtgacatgtgtcacagaactgtggggaaggggctatccagagattcccagtaggagacacggggagacctgcaggaatgatctctcgcagcacccaagtctgcaccctgcttcactcactcagcaatctgtccaggagctccttcaatgtcaagacatccagaaagatctgtcttcctccttttccaggcccctgtgcaggaaccccctgcacctggtcccccgtgatgggtgctcaggctcaggaccctatgggattgcacaggtcgcagcccaagcgcagtacttgcgcacaggtcccagccccttccctctctgggacttgtcttctggcccctcactcctgcgatgagcttttctttcagctggtgaaaggccgcagacttcgaacctctgggcctttgtccaggacgttccctcagcgctcagtgcccttcctggtggcctcctacatcttcagatcccggctgagctctgcttaaatccgggaccgggtagtcactggggcagccacttggctggggcgaggccacctcgctttgggtcttgtcgcgcccaggccagcgccagcccaggcttgccatggactggctcctgggcgttagatgaatgaatcgactcaacccgggccgccacgttgtgttcagaacaccgacagtcgctcccaggcaaccagcacctgctgcgccccgtttccagcgacctccccaaccgcgtggactcgcatccacgtgcccggcggggccgcagcagaaaggctcggaccccccaggacgatcggccggtgggggccggtggggccgcagactcggggggcggggggcgccaggcttccgggtcctgcccccgccccgtggggaacagcaggacggcgccgaggccgtttcgctttcctccgcgcccatttgccgggaggggaccccgtgctccgacctgaaggtgacggcagagcctgcgggaggcctaggccggtcccgccctacgggtcccgggggcgaccctcgcgctgacattggcgtccaggccgcggcccctgcctccgcgcccacccacgccgggcctggccctcgctcccccgggaaaagccccgccggcggccgcgagagcgcggaagcgcagccgtagtgaccgcgagacaaagacccggcggcgggggaggcggcggagagaccccgccagcgcggagaccccagggaagcttctctggaagacctggtgctggtccgctctcccgggacctcattttccttatgtggacaacgggggcggggtcacagcagcccctcgggcttatagccgggttgttctttccttaaatctcctccctctgccaaaataaaaaaccccacagggc

SEQ ID NO: 32374 - DNA, 763 bp, Homo Sapiens
agaccccagttactggattgggatccaccctcactcaatatggcctcagcttaatgaaagacatctgcagagaccctatttctactaaaagccacattctgagacttctcgtgggcgtgagtttttgagagacactgttctgctccatgcagggagggaattgggatctgaagacgttgcattcgaggtctcggggctcctgatgagcagcctcggcctgacctggggcaggtgtgatgtctgcggctcaccatctccaccctgcctgctgtggaatctccacaacgacaggtgctttggaggccagagtgcatgcgtacgggccctgcacacgctgaatgtcactgggaacaaggacacaccccgcttccaggagaagatagaacatgtcgaccccttttagccatccccagtgcaggacatgctattgacttccatgagacaaacacctacttggaaatcaggttttttctgtaccttttgaaggagcaggaatttcccagcatttcctggacaaagacggaggccacattcgctgcatcctttccagcaagatgtcattctgagatttttgtcattcctgggcgttatgaggactgccaagggacacaattccatgggaggaaagttttcttctaagctgcaagccagctctggcttctggagtttctccttaggattgcaagacagtagttccctgtcctttaggtcttctccagaaataccttaaaatagcaaataaaataagatataagcaaacaaa

SEQ ID NO: 32375 - DNA, 8393 bp, Homo Sapiens
gaggagtctaaattggtcgttcaactaccagcaaaggctaaagagaggctggagcccccaggacagccagaacgctgacactgcaaagggcctctgtccttactggggaagcccagtcctgctcagctgtcttcttcagcaacaaacagaagtccagaaagagaaacagttgtggaggaagctgttgtgatgataatttactgagcacctactatgtgccaggcacgccagccttaccagacaagatccttgggctcatggaattcactttctcgtgggacagacaaacaataacatgtagaaacatatcagctgttgcaggcagtaaccaagggagcgtggccaggcgctgaagtgaattcgggtccaaggagcctgctgggacccaggaaaacgagagaaggaacagaaattgtggtggaggcaaattcaagatcagaagattggggaggaggtgctaagagaggtctggagagatgctgggacccagaactggggcctcagtgagatcagcaggctgcagctaaactgtggtatccagaccatgcggccgatgccctgggagggagaccacttgcttaagtcctccaggagggcgatggaggagccggcattccaaccaggctcacggatgccaagatatggatgcagagagggaagccctgcagagcactgcctaccctgaagtgccagaccttctgccagaggcacggcttgatgtttgaggtcgttgatctgaggtggggtattcggaacattgaagccactgaccacttgaccacagaactctgcttggaggaggttgaccggtgttggaaaacatccatagggccagcttttgttgccctcatcggtgatcagtacggcccctgtctgattccctcgcggatcgatgagaaggagtgggaggtattgagggaccatctgactgccaggccaagtgacctggagctggtggcacgatacttccagagggacgagaatgcgtttcctcccacctacgtcctgcaggcaccaggtactggggaggcctgtgaaccagaggaggccaccttaacttctgtcctacgctctggagcccaggaggcccggaggctggggctcatcacccaggagcagtggcagcactaccaccggtcaggtgaggccgcagggactcccctctggagacccacaagaaactgaccacgtgttcagaatatccatcccctgttggcaaaaatgcaacagtctgcatttcttgcaaatgccaaaccagtcaacctctggtccctcggctctgagaaaggctgttttactgatccaagatagttcagccatgttcctgatcaatcttggtctcaggatcttcctctcctcgctggctctttcttcttgtctcccagggaggttcctggcacaggggccgtattagtctgttctcatgccactaataaaggcatacttgaggctgggtaatttacaaaggaaagaggtttaatggactcacaattccacatggctggggaggcctcacaatcatggctgaaggcaaaggagaagcaaagaggcacatcttacatggtggcagtcattgagtgggagatagagcggagcctgctgagctcagaggaccgggaacagggagccaccgtcttccttagagagatccaagacctccacaaacacatccttgaagactgcgcccttaggatggtggaccggctcgcggatggctgcctggacgctgatgcccagaaccttctcagcagcctcaaaagtcacatcactgacatgcacccaggggtcctcaagacccaccgcctgccgtggagccgcgacttggtgaaccccaagaacaagactcacgcctgctacctgaaggagctgggtgagcagtttgtggtgagggccaatcaccaggtcctcacacgcctccgtgagctggatacggccggacaggagttggcgtggctctaccaagagatccgccaccacctttggcagagctcggaggtcattcagaccttctgcggacgccaggaactcctggcccggcttgggcagcagctcaggcacgatgacagcaagcagcacacccccctggtactctttgggcccccaggcattggaaagacagccctgatgtgcaagctggctgagcagatgccaaggctgctggggcacaagacagtgaccgtcctgcggctgctggggacgtcacaaatgagctcagatgcccgtggcctgctgaagagcatctgcttccaggtgtgcctggcctatgggctgcccttgccccctgcccaggttctggacgcccacaccagggtggtccagtttttccataccctcctccacactgtctcttgcagaaacttcgagtctctcgtgctcctgctggatgctatggatgacctggactctgtccgccatgctcggagggttccctggctgcctctcaactgccccccgagggtgcacctcatcctctcagcttgctcgggggcactgggggttttggacaccttgcagcgggtgctcctggacccggaggcctactgggaggtgaagcccctttccggaaaccaaggccagcagatgatccaactcctgctggcagctgcaaggaggacgctgagcccggtgcacacagatttgctctgggccagcctcccagagtgtgggaacccagggcggctgaggctggcgtttgaggaagcccggaaatgggcctctttcaccgtgcctgtcccgctggccaccaccgcagaggaagccacgcaccaactctgcacccgcctggagcagacacacgggcagctcctcgtggcccacgtgctgggctacattgtgtcttcccgacacggtctctcggaggcggagctgaaggatgttttgtccctggacgacgaggtcctgcaggatgtgtaccgagattggaccccgcccagcaaggagctgctgcgcttcccgcccctgctgtgggtgcggcttcgtcgggatctgggatactacttggcccggcggcccgtggatggcttcaccctcctggccattgcccacagacagctggtcgaggtggtccgtgagcgctacctgtcaggatccgagagagccaagaggcatggcgtcctggccgacttcttctcagggacctggagccagggtaccaagaagctcatcactctgccacttgtggggaaaccactgaacttggaccgaaaggtggccccgcagcctctgtggttctcacatacggttgcaaacctgcggaagctgaaggagttgccctatcacctgcttcactcgggccgcctggaggagctgaaacaggaggttctgggcagcatgagctggatttcctgccggggcatctctgggggcattgaagacctgctggatgactttgacctgtgtgcccctcacctggactcccctgaggttggcctggtccgtgaagccctccagctctgccgccctgctgtggagctccgaggcatggagaggagcctcctgtacacagaactgctggccagactccatttcttcgccacctcacatccagcactggtgggacagctatgccaacaggcccagagctggttccagttgtgcgcacaccctgtgctggtgcccctcggaggattcctccagcccccgggaggacccctccgggcaactctcagcggctgtcacaaaggcatcaccgccatggcatggggtgtggaggagaagctgctggtgattggcacccaggatggcatcatggctgtgtgggacatggaagagcagcatgtgatccacatgctaactggacacacaggagaggtgaggtgtgtgaaaatatttgccaaagggaccctcgccaactctgcttcaaaggattacacgctgcacttgtggaacttactctctggccaggagaaatttaccatttgggatggaggctcaaaaaatcccgctgaacctcagatctggaaccttcatgtggatgaggcacacaaagttgtgtattcagcatctggctcaaagatcaatgcttggaatctggaaactgcagagccggtattccatatcctgggagatgcctctgatccttggatgtgcatggccgtgctggcctcccaggccacactgctgacagtgtccagggatggtgtggtcagtctgtggagctcagctacgggaaaacttcaggggaagcaacatatgtccagcatcaaagaagaaacacctacctgtgccgtctcagtccagaagcaaggaaagcttgttaccgggtttagcaatggctccatctctttggtttcctccaaaggggacagattgctggagaagcttccagatgctgtgaggttcctggtggtctctgaagatgagtccctcctcgccgcaggctttggaagatcggtgcggatattcttggcggactcgaggggctttcgccgattcatggccatggatctggaacatgaagacatggtggagacggctgtttttggtactgagaacaacctgatcatcacggggtcccttgatgcgctcattcaggtgtggagtctgtcagaacaggggacccttctggacatcctggaaggcgtcggggcccccgtgagcctgctggcccgcggcggggctttggtggcatctgcttccccacagtcctcatctttcaaggtctgggatctcagcgatgctcataggtcccgggtgcctgcaccatttctggaccgcaccggcctcaccgcagtgtcccacaatggaagctacgtctacttccccaaaattggggacaaaaacaaagtcactatttgggacttggcagaaggcgaggaacaagattccctggacacctccagtgagatcaggtgtctggaggttgctgagcagcgcaagctcctatttacgggcctcgtgtcgggggtcgtccttgtgttccccctgaattccaggcaggacgtgatatgcattccccctcccgaggcccggaaagcaatcaactgcatgtccctgagcaagtgcgaggaccgcctggccatcgcctatgacaacatcgtcctggtgctggacatcacctccggggacccctgcccggtcatcgatgggccaagatacaccttttacactcagctgcccgagaccctctccagcgtggccattctgacggactaccgcgtggtctacagcatgaccaatggggacctctttctttacgagtgtgcaacttccaaagcgtttcccttggagacccacaggagccgagttgcctgtgtggaggtcagccacaaggagcagctggtggtcagcgggtctgaggatgccctgctgtgtctctgggacctgcaggcacgcaagtggaaattcgagatgagctacacgagttcttactgcagaggggtccaatgtgcttgcttctccaaggatgacaagtatgtgtacgtgggcttaaaggatcgctctatacttgtttggagtgtgctggatggcaccctgctgacagtccagtttgtccatgctgtggtaaacagaatcatcccaaccaccagtggcttcattgcccccaccaggcatggttatctgatccgagagaatttccagtgcctttcagcaaaagcctcaccgcaggaccctcttaagaacttcaagaaggcaatgtggatggtcaaatccaggcagagagaggagctagttgcagctgcaggagctccccaggacttggagtcagaaagtgcccagggaaatgaaaccaaatcaaacaaatgctcacaagtgtgcctgatagtgtaaaaaaataaaaataaaaaaaccctgtgggggtatggggctccagtgagttagccccatttaatctagttaaagcaaaaagaatacgtttgctggtgtatatctggacccatggcttcagattatggcttcagaccttgtctcttctcatctttccattattctttcctctttttcattttcattctcagacttgccacccccaggttagcaacatggtggccaatatgctgctgtctccaatttcaatagaaaagagagcttctctttcccaacagtcctagcctcaactctactggtcccaattggcccatacgcctagccctaaaccaattattatatctgggagaatgcagagctctaatcggctagactgatccaatgtccaccactgggactgagaatagaagagattactcctgagatgcaaactggagttctggtaccagatgaagggggaacggatgaatgtgagatacagcaaatcactgatgtggaccacagaacctcacagtttataaagctgtaggtgctgtcatctgatcctcatcacaactcatactttagggagggcaggagtttctgtatctattttacagatgaggaaactgagccttgcggaagtagttataatttgattcaggtcacaagtccaaggtgcaagagctctgagagtgagccttctgtcccattcctgttagacctcactccaatttcagtctgcagagcacaaccatctcttccacaggcaccacactcaaatgctcacaggagctagtgactaatctagacacttccatgcacctgggtgagcagcagggagagacagagactggacatgtggaaggcagagattgtgtctagggtgggtatgagcagcctgactgtagcccagaatcaccatggccaaacaagcccactgctgtcagtgcttccagttgtaataagcaaagccagaaatccagacttttatgcaaaaatgttctgacttttaaagttggcgattggttgaatttatatctatagtgcatttggcatgtgcgtctttggttaatgagctgacttcaggactcacgctggcagtaaaacaatcaacatgttatagttcatccctctctattccttggctcccaaacttttgggataaagatgtgggtttttaatcttaaaaactggaggctcttggaagtagaaagagctgctgatctctccctgctttgcttttgaactgtctgccttgtgcaagttcaacagtcaaactgttttcattccacttaagtggatctttcttctttgcccacagccttctaaaagcccttctcagtcttctcaggcttttactttaatgctaggatagtctaaatcttcaaggtggctatcccttctcccctccgtggaattcctgatagagtctcaataaaagcaaccttagaaacagaggcttttgagctgaacaagaccctactgctgtcttattcatccattttccaaaccagttttccaaggcaggttttggtagttctgcaaatgttagtgtcaaatttcatttaaaaatattttaaactgtaattttaagatgtatgcttggatgtattgggcagcagcttctaaggtgttgaagattactaaggttggtgcaaaaagtaactgtggttttcgccattaaaaatattaaaaataatggcaaaaactggctgggcacagtggctcacacctgtggtcccagctctttggaaggccgaggcaggtggatcacctgaggtcaggagtttgagaccagcctggacaacatggtgaaacccttctctactaaaaatacaaaaatcagccaggcatggtggtgagtgcctgtaatctcagttactcaggaggctgagtcaggagaatcacttgaacccgggaggcggaggttgcagtgagctgagattgtgccactgcactccagcctgggtgacagagcaagactccatctcataataataataataatggcaaaagcctcggtggctcacgcctgtaatcccagcactttgggaggctgaggcgggtggatcacttgaggccaggtgttcaagagcagcctggtcaacatggtgaaactctgtctctactcaaaaatacaaaaattagcctggtgtggtgacgtacacctgtaattccagctacttgggaggctgaggcaggagaatggcttgaacccgggaggcggaggttgcagtgagccgagatcgcaccactgcactccagcatgagtgacagagactctgtctccaaaaaaaaaaaaaaaaaaaagtaatggcaaaaaccacaattaattttgcatcaacctaataatttaggattcttctgccattttcatttaactgatttaactgaagagcccaattaaattgtgaagggagccctgaaaaaattagctactctttgccactgcttctctgtgaatcaagggcttacccaatgcagaaataaagtagatgttgagaccaattaagatttcacctacaaattctgattttaaatgcctgtgtccatctccacagcctcagtgagaattgattgttttgtagataaatcctaatttaaacattggaaatgcctttttactaataaaatgctacaacaaa

SEQ ID NO: 32376 - DNA, 696 bp, Homo Sapiens
agacaggaagaagggcaaaggggaagaacacgatggcttttagcagcctgacgccttggtttttagtttctgtctctagtgacaggtggaaaagaaggatgaggaaggggctttactggcccaaccagaaatagtaactaagaacccatgactgtattctctcccttggacacccctgggaagctctgtactgaaaaaaaatgaaagccttccagatgtgttctgctatggtccacaggctggagggtgcatggaacccacccagaggtgctctgcaatcagcaattcagtgagccattcacagtccaaccagttgccttctgatgagaatgcatcacaccgcatgtggggagggccatgtgggaattctcacacctgttgcctagatgcctgtgtctggttagaaccactgcatgctttctttcagtctacattgaatacgtctttgctgctctgggatccatcctccagtcttcagtcagctaagaaaatgacctgtgggcacgttggcttcctttcttcggattaagtggttgttcagagagaggctgagtctgattgtttacacaagaaggaagtgaacactggctgtgtgcctggcactgttaggagccatcaaaccatgtccagaaaggacgcagggaaaggagatgtcgatgtttccagacattttgtgatgtgaagagagcgcctgaa

SEQ ID NO: 32377 - DNA, 365 bp, Homo Sapiens
gctgctccagctccacgtgcgcccggggatgcaatgcagccctgcagacaagcgtctccggcaggacgtgggccgcgggtctcggagcctccttcacttaggaatcctccggaatccgccccactgcacgccagcagtcggaggcctggggcgtgctgcccacgtgactgacggccgggaaggaaagatggcggcgactatgatggcttcagagagagggcaaccaacgagaggacgccgcccgccagagcgtccacaccgccgctttttctgcggttgcgtcctgggaaggcgcgaattgtgtggctacgggcgggtcgtcctctccaccattttttaatggaaaaaataataattctcaaaga

SEQ ID NO: 32378 - DNA, 6419 bp, Homo Sapiens
ggcgtctccatggcgaccgcgttggctgggtggcctccattgtcgggctgctgctctcagcggcggggctcgccagcgcttcagtgggcggggacgcggcaggtgactccagaccaaggaggatgagctgctgtccctggaagagaacggatggagggaagcagctcctacgaagttccctctgtggctgctgctgatctggaggagggtgctggtcagactaggagcttgcctgccaccccctccaaagatgttcacaagggtgttggaggcatcatcttttcctcctcaccgattttagacttgagtgaaagtggtctgtgccgtttggaggaggtctttagaatccccagccttcaacaattgcatctgcaaaggaatgccctgtgtgtgattcctcaagatttctttcagttgcttccgaacctgacttggctggacctccggtacaatagaattaaagcgcttccttctgggattggagctcaccagcatttgaaaactttgcttttagaaagaaatcctatcaaaatgttacctgtggagctggggagcgtaaccacgctgaaagcactgaacctaagacactgccctctggaattccctcctcagctcgttgtgcagaagggattggtggctatccagcgcttcctgcggatgtgggcagtagaacactctctccccagaaatccaacttctcaagaggctccaccggttagagagatgaccctccgtgacctcccgagcccaggactggagttgtctggagaccacgcgtctaaccaaggagctgtgaacgctcaggacccagagggggctgtgatgaaagagaaggccagctttctcccacctgtggaaaagccagacctgagtgaactcaggaagtctgcggactcctcagagaactggcccagcgaggaggagatcaggcgcttttggaagctgaggcaggagattgttgagcacgtgaaggcagacgttctgggagatcagctcttgacgagggaattacctccaaatctcaaggcggccttgaacattgagaaagaactaccaaagccaagacacgttttcagaaggaagacagcctcctccaggagcatcttacccgacctcttgtcaccgtaccaaatggcgatccgagcaaaaagactggaagagagccgagcggcggcgctccgagagctccaggagaagcaggctctgatggagcagcagagacgagagaaaagggcactgcaggagtggagagagcgagcccagaggatgaggaagaggaaggaagagctcagcaaactcctgcctccgcggaggagcatggtggcatcaaagattccctctgccacagatctgatagataacaggaaagtaccactgaatccgcctggaaaaatgaaaccaagcaaagagaaatcgccacaagcaagtaaagaaatgagtgccctgcaggagagaaatttagaagagaagataaaacagcacgtcctccaaatgcgtgagcaaagaagattccatggccaggccccactggaggagatgaggaaggctgccgaggatctggaaattgccacagagctacaggatgaagtattgaagctaaaattgggattaaccttgaacaaagatcgtcgacgggcggccctcactggaaacctttcgcttggcctgccggcagcacagcctcaaaatacattttttaacacaaaatatggagaatcaggaaatgttcgcagataccagtgacaccaggtggctggactgatggagacgtcttcagacaggagccgctcagtcttctttcccgggcgtcgcctcctgtgtggtgccggaagagcgccaggttcagtgttaccctgagggctgatttcgcgcagcctgttgttttccttagacaggtccacgtccctctcctgaggctgtggaagatttcagccgtattaaaagaaaggacactgtgagcacgtggtctcgccttcccttcttcctgcaggttcccgccaagccatgtgacagagtgctcacactcaggcacttgcctctctcctgtcctggagcccttgttacaaaagtactcacagctttccttcacttagttatttgagtgtgggagaggagaccaggtcacccgattcccgccaagccggaagtccctgcagcaccacctttggctaggagggaggggtgacagccaaaaagggcttcgggggagtggttaccctgctccctgcccagtgacaagccctcctttcccctgggggccctcctttcccctgctccctgcccagctacggggccctcctttcagccttgaccccttcctggttgctaccactcaggctgccactcagtggactccaccccagggacacggcagggtctgcagacctccccatgctagatcagccgtatttcatgctctgtctgcccaggctgtgtagattctgtgtgacttagtctcttgtgctgagtgtttgcttggatcttgaaaacatctttggtttgatttctttaacagaggtgagactattcagactttgtttatttttgtgttaattttggtaaatatggtttcagtgagtttcctcatttcatccaagttgtgcaatgtatcagcataaagttcctcttattttcagtatctttaggatccgtaataatgtcccctcttttattcttgacctggtgttcttcatcattcttgctatggatttatcaattttgttcctcttttccaaaagccccaggttttggcttcactggatttgctgtttgtcttctgtctcatgggtctctgcgccctgcacttcgtactttccgagagtttaactggtgcttagagagaaatgcatcacttccaaacccatgtattagagaagaagggcgtgaaatttatcacctaagctttccattcaggaagctagaaaaggtgtcagtgacctgttgcggcccagcggctggagcagcagacgtttgccatttctcacgcctgagggcaggcgttggagcagctcagccggcgttgctggtcagggtctcccgtgaggctggagtcagccgtgggttgagctgctctcctctgaaggtttaactgggcttggggctcagcttccaaggtgctcacctggttgttgatcagagagcgtgtccgttgtgatcccagtcctttgaaactgtgaagcctcgccccgcggcctgccgcaggatatgttttggtaaatgtagactgtgcacttgagaagaatgtattttgagttgttgggtacattgttttgtgtgtgtcaggtgacattgactaatcctgttgctcagagctcctgtacccttactgactgacttaagcctggtttctcagttactgagagaggcctgtgaacagttctagctatgatcatgaacatgtgttttcttcttagttatgtgagtttttgctatacgtgttttggggctattttgtcagatgcctacaaatttaggattgttttatcttcctgtcgaactgaccttgtcattattatgaactatttctcttcgcctctccttttcacttcttgccttctgtggattttgtctgatactaatccaggcacactgctgctgttttggtcagcgttttcataatgcatcttcttccctccttctactgtactggatttaaagcgcaccttatagagacatcatatactcgggactccttttctttctctagctgccagttctgtgtttcagttacagtgtttggccctcacatttaaggtgcgtgtgcgtacggcggattccgtgcccatctcatgtttttattccctttattcttcttttgctgctttctgatagtgatcaatttttttatttatatctcttgtattagagttttagtaatatcttttaatattattctcttgggtgttgccttagagatttcatacatgcccttgagttcattagcatttcctgaatgagccaatgaccctgagaaggtccctcccatctgccagttccctgccattgatgctgttgctctcgtccgcctcccttccacaggtaagcacgcaagacacaggtaccgtgtgccccaacggtgtcttgactcgctgttcctagacatcagtgtttgcttcactttacccatcccgatgctcttccttcctgcagcttcatgctccaatgagggctgattttcatttagctaaataacttttttttaagtatttctttgtatcatggttatgctttgactggccgtaagttctctcagcttttgtttgtctgaaaataaatttagttcgcctttattctgcacaggacagaattctaggtggatgatttttgccattcccagaactttaaagatgggctccactgtcttctggctcccatgtgttttgttaaaaattcagtgttcaggccgggtgctgtggctcacgcctgtaatcccagcactttgggaggccgaggcgagtggatcacgaggtcaggagatcgagaccatcctggctaacacggtgaaaccccgtctctactaaaaaatacaaaaaattagccgggcgtggtggctgtagtcgcagctactcaggaggctgaggcgggagaatggcgtgaacccaggagacggagcttgcagtgagccgagatcgcgccactgcactccagcctgggcgacagagcgagactccgtctcaaaaaaaaaaaaaaaagattcaatgttcattgttatttgttgctcctttgaaggtaatgggtcttttttctttgtcttaaaattgtttctccttatctttggttttcagcagtctgtgctgtgcctggatgtaattttctttttacgtatttttcttggaatatacagaactcaaatctgggagttagcatctttcatcagttttggaaaattcttagccattttttttttttttactattttttcccctgttctccctcttctccctgagacttcagttttgtgtgtgtgtgcacatgtgtgtatgcattcgtgcgtacgagtgtgtgcatgtgtgcgcccgtgtgtatgtgcatatgtgagtgtgtgtggctgtaacctgcacgtctcttctgtcatgtgttctatttttcattcctctctgtacatcaggctagatgcctcctgtctacgtggttttagatttacgaatcctgtcttctgttgtgtcccacagaaaaacccatgaggttttttaacattaaaaacagcagctttatgatagagaaaaaaacacaaacatagacgattgtaccattgcactcagaagaaacatcccaggccctgagcagcgtgtctttcctcggccgagtcaggcttcctggtgagcctcagggagtgcatggtctcagatgccatccttctcttctccagcatttccactcacctccgtgttcttggggagtgcgtggtgtcagatcccatcctgctcctctccagagtttccggtcacctccgtgttctcagggagtgcgtggtcttggatgccatcctgctcatctccagcatttcctctcacctccgtgttctcggggagtgcgtggtgtcagatcccatcctgctcatctccagcatttcctctcacctctgtgttctcggggagtgcgtggtgtcagatcccatcctgctcctctccagcatttcctctcacctccgtgttctcggggagtgcgtggtgtcagatcccatcctgctcctctccagagtttcctctcacctccgtgttctcggggagtgcgtggtctcagatcccatcctgctcctctccagagtttcctctcacctccgtgttctcagggagtgcgtggtcttggatgccatcctgctcatctccagcatttcctctcacctccgtgttctcggggagtgcgtggtgtcagatcccatcctgctcctctccagcatttcctctcacctccgagctctcggggagtgcgtggtctcagatcccatcctgctcctctccagagtttcctctcacctccgtgttctcgttctcatctctgccggaattccacatctgctcgtgcatgccatccaccttttccactagatccttttacatcatcattataatgatttttttttaataagtgttttctttcagttttaaatttcagatgttgtgtttttcaggtctaaggtgtctggtaattttttgtggatgccgattctctgttgaaattctccatcttttcatttcctttatatctcttttcttcttttttctataatatattacatttttctaataagtttttagtgagtgtccagcattgtataagttgacccttgaacaagagtttgaattataagggtccacttataagtggatttttaaaaaaatatatattgcaaaaatttttggaaatttgcaacaatttgaaaaactttgcagatgagccacatagcctagaaatatctg

SEQ ID NO: 32379 - DNA, 5482 bp, Homo Sapiens
atggagcggcggctgcgcgcgctggagcagctggcgcggggcgaggccggcggctgcccggggctcgacggcctcctagatctgctgctggcgctgcaccacgagctcagcagcggccccctacggcgggagcgcagcgtggcgcagttcctgagctgggccagccccttcgtatcaaaggtgaaagaactgcgtctgcagagagatgactttgagatcttgaaggtgatcggccgaggagcctttggggaggtcaccgtggtgaggcagagggacactgggcagatttttgccatgaaaatgctgcacaagtgggagatgctgaagagggctgagacagcctgtttccgggaggagcgggatgtgctcgtgaaaggggacagccgttgggtgaccactctgcactatgccttccaagacgaggagtacctgtaccttgtgatggactactatgctggtggggacctcctgacgctgctgagccgcttcgaggaccgtctcccgcccgagctggcccagttctacctggctgagatggtgctggccatccactcgctgcaccagctgggttatgtccacagggatgtcaagccagacaacgtcctgctggatgtgaacgggcacattcgcctggctgacttcggctcctgcctgcgtctcaacaccaacggcatggtggattcatcagtggcagtagggacgccggactatatctcccctgagatcctgcaggccatggaggagggcaagggccactacggcccacagtgtgactggtggtcgcttggagtctgcgcctatgagctgctctttggggagacgcccttctatgctgagtccttggtggaaacctacggcaagatcatgaaccacgaggaccacctgcagttccccccggacgtgcctgacgtgccagccagcgcccaagacctgatccgccagctgctgtgtcgccaggaagagcggctaggccgtggtgggctggatgacttccggaaccatcctttcttcgaaggcgtggactgggagcggctggcgagcagcacggccccctatattcctgagctgcgggggcccatggacacctccaactttgatgtggatgacgacaccctcaaccatccagggaccctgccaccgccctcccacggggccttctccggccatcacctgccattcgtgggcttcacctacacctcaggcagtcacagtcctgagagcagctctgaggcttgggctgccctggagcggaagctccagtgtctggagcaggagaaggtggagctgagcaggaagcaccaagaggccctgcacgcccccacagaccatcgggagctggagcagctacggaaggaagagctggccgagggtcgggcagggctgcaggctcaggagcaggagctctgcagggcccaggggcagcaggaggagctgcttcagaggctacaggaggcccaggagagagaggcggccacagctagccagacccgggccctgagctcccagctggaggaagcccgggctgcccagagggagctggaggcccaggtgtcctccctgagccggcaggtgacgcagctgcagggacagtgggagcaacgccttgaggagtcgtcccaggccaagaccatccacacagcctctgagaccaacgggatgggaccccctgagggtgggcctcaggaggcccaactgaggaaggaggtggccgccctgcgagagcagctggagcaggcccacagccacaggccgagtggtaaggaggaggctctgtgccagctgcaggaggaaaaccggaggctgagccgggagcaggagcggctagaagcagagctggcccaggagcaggagagcaagcagcggctggagggtgagcggcgggagacggagagcaactgggaggcccagctcgccgacatcctcagctgggtgaatgatgagaaggtctcaagaggctacctgcaggccctggccaccaagatggcagaggagctggagtccttgaggaacgtaggcacccagacgctccctgcccggccactggaccaccagtggaaggcgcggcgactgcagaagatggaggcctcggccaggctggagctgcagtcagcgctggaggccgagatccgcgccaagcagggcctgcaggagcggctgacacaggaggccgagaagcagagccaggccctgcaacaggagctcgccatgctgcgggaggagctgcgggcccgagggccagtggacaccaagccctcaaactccctgattcccttcctgtccttccggagctcagagaaggattctgccaaggaccctggcatctcaggagaggccacaaggcatggaggagagccagatctgaggccggagggccgacgcagcctgcgcatgggggctgtgttccccagagcacccactgccaacacagcctctacagaaggtcttcctgctaagcccggctcacacacgctgcgcccccggagcttcccatccccgaccaagtgtctccgctgcacctcgctgatgctgggcctgggccgccagggcctgggttgtgatgcctgcggctacttttgtcacacaacctgtgccccacaggccccaccctgccccgtgccccctgacctcctccgcacagccctgggagtacaccccgaaacaggcacaggcactgcctatgagggctttctgtcggtgccgcggccctcaggtgtccggcggggctggcagcgcgtgtttgctgccctgagtgactcacgcctgctgctgtttgacgcccctgacctgaggctcagcccgcccagtggggccctcctgcaggtcctagatctgagggacccccagttctcggctacccctgtcctggcctctgatgttatccatgcccaatccagggacctgccacgcatctttagggtgacaacctcccagctggcagtgccgcccaccacgtgcactgtgctgctgctggcagagagcgagggggagcgggaacgctggctgcaggtgctgggtgagctgcagcggctgctgctggacgcgcggccaagaccccggcccgtgtacacactcaaggaggcttacgacaacgggctgccgctgctgcctcacacgctctgcgctgccatcctcgaccaggatcgacttgcgcttggcaccgaggaggggctctttgtcatccatctgcgcagcaacgacatcttccaggtgggggagtgccggcgcgtgcagcagctgaccttgagccccagtgcaggcctgctggtcgtgctgtgtggccgcggccccagcgtgcgtctctttgccctggcggagctggagaacatagaggtagcaggtgccaagatccccgagtctcgaggctgccaggtgctggcagctggaagcatcctgcaggcccgcaccccggtgctctgtgtagccgtcaagcgccaggtgctctgctaccagctgggcccgggccctgggccctggcagcgccgcatccgtgagctgcaggcacctgccactgtgcagagcctggggctgctgggcgaccggctatgtgtgggcgccgccggtggctttgcactctacccgctgctcaacgaggctgcgccgttggcgctgggggccggtttggtgcctgaggagctgccaccatcccgcgggggcctgggtgaggcactgggtgccgtggagcttagcctcagcgagttcctgctactcttcaccactgctggcatctacgtggatggcgcaggccgcaagtctcgtggccacgagctgttgtggccagcagcgcccatgggctgggggtatgcggccccctacctgacagtgttcagcgagaactccatcgatgtgtttgacgtgaggagggcagaatgggtgcagaccgtgccgctcaagaaggtgcggcccctcaatccagagggctccctgttcctctacggcaccgagaaggtccgcctgacctacctcaggaaccagctggcagagaaggacgagttcgacatcccggacctcaccgacaacagccggcgccagctgttccgcaccaagagcaagcgccgcttctttttccgcgtgtcggaggagcagcagaagcagcagcgcagggagatgctgaaggacccttttgtgcgctccaagctcatctcgccgcctaccaacttcaaccacctagtacacgtgggccctgccaacgggcggcccggcgccagggacaagtccccggctcccgaagagaagggccgagttgcccgcggctccggcccacagcggccccacagcttctccgaggcgttgcggcgcccagcctccatgggcagcgaaggcctcggtggagacgcagaccccatgaagaggaaaccctggacatccctgtccagcgagtctgtgtcctgcccccagggatcgctgagccctgcaacctccctaatgcaggtctcagaacggccccgaagcctccccctatcccctgaattggagagctctccttgatgccctctgttagggcccaccccaatcccagggcagaaggacatgagggagcaaagagcttgaggaatgccatactccggctggtccgggacatggaaattcggactcagggaggacccgggctgggcaatgactgggagacttgcctgggttcccaggacttgggggtcctgactcccagccctcatcctgccttacccctctgttcccagccccagcctttctaagccattgggaatagaatggccccttttgttctggtgtccaggggtgattgtgccaaagctcttatttccagtgccaagcccccagaggcttgtaagagttgggatgagggatggagagggactgggtctctgggaacaggttggaggtcttatctgtggactgtctgactcccagctgaggccaagatggggcatgtccccgtctctgcttagcgtctgggtgagaaaaacaggctgtgatccagaagaagggaagatagagaaggagggaaaggatgtaggcgaaggaggtgagagacaggataggaggaaggaagtggaggaggaggtgataggaattggaaggaggtagaagccgtgcagaggaagaggggagagggacgaaggaggagcgatgaagaagaggagggagacaaaaagagggatggaggagagagggagtctggagaacaaagggtcctttctctggggaggggtgcagtgggcggggctgacactgtcagccaatcctcccatcggggaagagaatcctggacagggacaggatggggagggtatttataagggctttttggtgggagatgggtacccagtgggggccactggagggtctccgggcacactctggcccttcccagaaagggggtcgtttttctcgaatcttcaaccagttgtgtattggaaactagggcgcattttactattgatcacagtcattatattgttattatattactatttttattaaacctccccccactgaagtgtgg

SEQ ID NO: 32380 - DNA, 6396 bp, Homo Sapiens
atgcaaggcacagccctgaactccatcccgctacactgctgtgaaatctccaccctgaaatgttgcctggatgagcagctggtccatgcggagccggacggggatcgccggcgggcggcaagcggaggcggcccaggcccggcggtctccgagatgtcacgatggctgtggccatggtcaaactgtgtgaaagagcgggtctgccgctacttgctgcaccactacttaggtcacttcttccaagagcacctcagcctggaccagctcagcctcgatctgtacaagggcagcgttgccctgcgagacatccacctggaaatctggtctgtgaacgaggtgctggagtcaatggagtcaccgctggagctggtggaaggcttcgtgggctccatcgaggtggccgtgccctgggctgctctgctcaccgaccactgcacagtgcgcgtgtccggcctccagctcaccttgcagccccgccggggtccagcgccaggggctgccgactcacagagctgggcctcatgcatgaccacaagcctgcagctggcccaggagtgtctgcgggatgggctaccggagccctctgagccaccacagcccctggaggggctggagatgtttgcccagaccattgagactgtgcttcggaggatcaaagtgaccttcctggacactgtcgtgagggtggagcactctccgggtgatggggaacgtggtgtggccgtcgaggtccgtgtgcagagactggagtactgtgatgaggcagtgcgggacccaagccaggcgccgccggtggacgtgcatcagccgcctgccttcctgcacaagctgctgcagctggcaggggtccgcctgcactacgaggagctcccggcacaggaagagcctccagagccccccttgcagatcggcagctgctcagggtacatggagctgatggtgaagttgaagcaaaatgaggccttccctggccccaagttggaggtggcgggacagctgggctccctgcacctgctcctgaccccgaggcagctccagcaacttcaggaactgctcagcgccgtgagccttacagaccacgagggcctggctgacaagctgaacaagagccgcccgctaggtgccgaagacctgtggctgattgagcaggacctgaaccagcagctgcaggcaggggcagtggctgagcccctcagcccagacccccttaccaacccccttctcaacctggataacactgacctcttcttctccatggctggcctcacaagcagtgtggcctcagccctctctgagctctccctctccgatgtagacctggcctcctctgtgcgcagcgacatggcctcccgccggctctctgcccaggcccacccagctggcaagatggcccccaaccccctcctggacaccatgcgccctgactcgctgctgaagatgaccttggggggtgtgaccctgaccttgcttcagacgtctgccccatcttccggaccacctgacctcgccacgcactttttcaccgagtttgatgccaccaaggatgggcccttcggttcccgagacttccatcaccttcgaccacgcttccagagggcctgtccctgtagccatgttcggctaacgggcacagccgtgcagctgtcctgggagctgcggacgggcagtcggggccggcggacaaccagcatggaagtgcacttcgggcagctggaggtgctggagtgtctgtggccccggggcacctctgagcctgagtacacggagatcctgacctttcctggtacgctgggctcccaggcctcagctcggccctgcgcccatctgcgccacacacagatcctgcgccgtgtgcctaagagccgaccccggcgctcagttgcctgccattgccactcagaactggccctggacctggccaacttccaggcggacgtggagctgggggccctggaccggctggccgccctactgcgcctggccaccgtacctgctgagcctccagccggcctgctgacagagcccctgccggcgatggagcagcagacggtatttcggctctctgcaccccgggccacgctgcggctgcgcttccccattgccgacctgcggcctgagccggacccctgggcgggccaggccgtgcgggctgagcagcttcggctggagctgagtgagccccagttccggtcagagcttagcagtgggcctggtcccccagtccccacccacctggaactcacctgctccgacctacatggtatctatgaagatggagggaagccacctgtcccttgcctgcgtgtctccaaagccctggaccccaagagcactgggcgcaagtacttcctgccccaggtagtggtgactgtgaacccccagtccagcagcacacagtgggaggtggccccggagaagggagaggaactggagctgtcagtggagagtccctgtgagctgcgggaacctgagccctcgcccttctcctctaagaggaccatgtatgagacagaggagatggtgatccctggagaccctgaggagatgaggacgttccagagccggaccctggcactgtcccgctgcagcctggaagtgatcctgcccagtgtccacatctttctgcccagcaaggaggtctacgagagcatctacaacaggatcaacaacgacctgctcatgtgggagcctgcagatctgcttcccacccccgaccccgccgcccagccctcgggcttccccggcccctcaggcttctggcacgacagctttaagatgtgcaagtcagccttcaagctggccaactgctttgatctcaccccagactcggactcggatgacgaggatgcccacttcttctcagtgggggcatcaggtggcccacaggccgctgcccctgaggccccaagtcttcacttgcagagcaccttctctacactggtgacagtgctgaaggggcggatcacagccctctgtgagaccaaggatgagggtgggaagcggctggaggctgtgcacggggagctggtgctggacatggagcacggtaccctcttcagcgtctcccagtactgtggccagccaggacttggctacttctgtctggaagctgaaaaggcaacactctaccaccgagcggccgtggatgactacccgctgcccagtcacctggaccttcccagtttcgctcccccggctcagctggccccaaccatctacccatcggaggaaggggtgaccgagcggggagcctcgggccgcaagggccagggccggggaccccacatgttgtccactgctgtgcgcatccacctggacccccacaagaatgtgaaggagttcctggtgacactgcggttgcacaaagccaccttgcgccactacatggccctgcccgagcagagctggcattcccagttgttggagttcctagacgtgctggatgaccctgtgctgggctacctgcccccgacggtcatcaccatcctgcacacacacctgttctcctgctctgtggactataggccactctacctcccagtgcgtgtcctcatcaccgcggagaccttcactctctccagcaacatcatcatggacacctccaccttcctgctcaggttcatcctcgatgactccgccttgtacctgtccgacaagtgtgaggtggagaccctggacctgcggcgagattatgtctgtgttttggatgttgacctcttggaacttgtgattaaaacctggaaagggagcaccgagggcaaactgagccagccactattcgagctgcgctgctccaacaatgtggtacacgtgcacagctgtgccgactcctgtgccctgctggtcaacctgctccagtacgtaatgagcacaggcgatctgcaccccccaccccggccccccagccccacggagatcgccggccagaagctctcggagagtcctgcctctctgccctcgtgccccccagtggagacggccctcatcaaccagcgtgacctggccgacgccctcctggacaccgagcgcagcctacgggagctggcccagccttcaggtggccacctccctcaggcgtcgcccatctccgtctacctattcccaggtgaacggagtggggccccacccccttcaccacctgtcgggggccctgctggcagcttagggtcatgctcagaggagaaggaagatgaaagggaagaggagggcgatggagacaccctggacagtgatgagttctgcatccttgatgctcccggcctgggcatcccgccccgagatggggagcctgtggtgacacagctgcatcccggccccatcgttgtgagggacggttacttctcacggccgatcggcagcacggacttgctgcgggcacctgcccatttcccagtgcccagcactcgggtggtgctacgtgaggtctccctcgtctggcacctctatgggggccgagactttggcccccaccccggccacagggcaagaactggcctctcaggtcccaggagctccccttcccgctgctctggccccaaccggccccagaactcatggcgcacgcaggggggcagcgggcggcagcaccatgtcctcatggagatccagctgagcaaggtaagcttccagcacgaggtgtacccagcggagccagccacaggccctgcggcccccagccaggagctggaggagcgaccgctgtcccgtcaggtgttcatcgtgcaggagctggaggtccgagaccggctcgcctcctcccagatcaacaagttcctgtacctacacacgagtgagcggatgccgcgacgtgcccactctaacatgctcaccatcaaagcgctgcatgtggcccccactaccaacctgggtgggcctgagtgctgtctccgcgtctcgctgatgcccctgcggctcaatgtggaccaggatgccctcttcttcctcaaggacttcttcactagtctggtggccggcatcaaccccgtggtcccaggggagacctccgctgaggctcgccccgagactcgagcccagcccagcagccccctggaagggcaggccgaaggcgtagagaccactggttcgcaggaggccccaggaggtggacacagcccctcccctcctgaccagcagcccatctacttcagagagttccgcttcacgtctgaggtccccatctggctggattaccatggcaagcacgtcacgatggaccaggtgggcacttttgctggcctcctcatcggcctggcccaactcaactgctccgagctgaagctaaagcggctctgttgcaggcacgggctcctgggtgtggacaaggtgctgggctatgccctcaacgagtggctgcaggacatccgcaagaaccagctgcccggcctgctgggaggcgtgggccccatgcactcggttgtccagctcttccaagggttccgggacctgctgtggctgcccattgagcagtacaggaaggatggccgcctcatgcgggggctgcagcgaggggctgcctcctttggctcatccacagcctctgccgccctggaactcagcaaccggttggtacaggctatccaggccacagctgagaccgtgtatgacatcctgtccccggcagcccccgtctcccgctccctgcaggataagcgctctgcgcggaggctgcgcaggggccagcagcctgccgacctgcgggagggtgtggccaaggcctacgacacagtgcgagagggcatcttggatacagctcagaccatctgtgacgtggcatcgcggggccatgagcagaaggggctgacgggcgccgtggggggcgtgatccgccagctgcccccgactgtggtgaagccgctcatcctggccacggaggccacgtccagcctgctcgggggcatgcgcaaccagattgtccccgacgcccacaaggaccacgccctcaagtggcgctcggacagtgcccaagactgagcctggggtgcccggcacccagagggtgctgcccaccatgctcctgagcctcccaagagctgcagcccacgggcccggcccggcctggcccttcaggggatggccactgtgaaggacgccttcccagcctgcccgttgccaatctgctgtgagaggggggcctccctgccttggggccttagccctggctctgcacttttcctccggggagaaaggacactgcccctcccccgacctgggcccacactgctgccttctcccaggacggaggcttttggaccctcggaccccatcccactcagccaagtgtctttctgtgtctggggggaggaggggatgatatccgtgtggttcgatgtattatttttaagctccgtgagtgcgtgggtcagtgtctgcatgaagtggaataaactgcccaccgcc

SEQ ID NO: 32381 - DNA, 5521 bp, Homo Sapiens
gagcgcacggcggcggcagaggcggcggcggccgggcctaggagcgactctcggtcgtgcagcggcggcgagcgctcgcgagcggctgcgggacgcgaggtttccggagctgagctcaatgtgcagcaatggatgacgacagcctggatgagcttgtggcccggagcccagggccggatggacacccacaggtcggccctgcggacccggcaggtgactttgaagaaagcagcgtgggcagcagtggggactctggggacgacagtgacagcgagcatggagatggcacagacggagaagacgagggggcgtctgaggaggaagacctggaagacagatctggttccgaggattctgaagacgacggggagacattgctggaggtagcgggtactcaggggaaactggaagccgctggctctttcaattctgatgatgatgcagagagctgcccaatctgtctcaacgcattcagagaccaggccgtggggacgccggagaactgtgcccattacttctgcctggactgcattgtcgaatggtccaagaatgccaattcctgtccagttgatcgaactctatttaagtgcatttgtattcgagctcaatttggtggtaaaatcttaagaaagatcccagtggagaacaccaaagcgagcgaggaggaggaggacccgaccttctgtgaggtgtgcggcaggagcgaccgtgaggacaggcttttgctctgcgacggctgcgatgcggggtaccacatggaatgcttggacccccctctccaggaggtgccggtggacgagtggttctgcccggaatgtgctgcgcctggtgttgtccttgccgctgatgcgggtcccgtgagtgaggaggaggtctccctgctcttggctgatgtggtgcccaccaccagcaggcttcggcctcgagcaggtaggacccgggcgatagccaggacacggcagagtgagagagtgagagcaaccgtgaaccggaaccggatctccacggccaggagggtccagcacacaccagggcgcctcgggtcttccctgctggatgaagccatcgaggctgtggcgactggcctgagcactgccgtgtatcagcgccccctgacgccgcgcactcccgcccgacggaagaggaagacaagaagacggaagaaagtgccgggaagaaagaaaaccccgtccggaccatccgcaaaaagtaagagctcagcgacaagatctaagaaacgccaacatcgagtgaagaagagaagagggaagaaggtaaagagtgaagccaccactcgctctcgaatcgcgcggacgctgggcctgcgcaggcctgttcacagcagctgcatcccgtcagtgttgaagccagtggagccctctttggggctgctgagagcggatattggagctgcctctctgtctctgtttggagatccttatgagctggatcccttcgacagcagtgaagagctttctgcaaaccctctttcccctctgagtgccaagagacgggctctgtcccggtcagccctgcagtcccaccagcccgtggccaggcccgtctccgtggggctttccaggaggcgcctccctgccgcggtgccagagccagacttggaggaggagccagtgcctgacctgctgggcagcatcctgtcgggccagagcctcctgatgctgggcagcagtgatgtcatcatccaccgcgacggctccctcagcgccaagagggcggctccagtttcttttcagcgaaactcaggcagtctgtccagaggggaagaaggattcaagggctgcctgcagccccgagcactgccctccgggagcccggcccaaggcccgtcaggaaacaggccacagagcacagggctcagctgtcaaggcaggtcccgcacccccgcccgcaccgcgggggcgcctgtgaggctggacttgccagcagcccctggggcggttcaggctcggaacttgtcaaatgggagtgtgcctggcttcagacagagccacagcccctggttcaacggcaccaacaagcacaccttgccccttgcctctgccgcgtctaagatctcaagcagagattctaagcccccatgtcgcagtgtggtgccggggcctcccctgaagccagcgcccagaagaacagacatctctgagctacccaggataccaaagatcaggagagatgacggtggtggcagacgggatgcggccccggcccacgggcagagcattgagatccccagtgcctgcatcagccgactgactggcagggagggcaccgggcagccagggcgaggcacacgggcagagagcgaggccagcagcagggtgccccgggagcccggggtgcacacgggcagctcccggcccccagcccccagctcccatggcagtttggccccactgggaccatcaagagggaaaggggtcgggtcgacctttgagagcttccggatcaatattcctggaaacatggcacattccagccagctctccagccctggcttctgtaacacgttccggcctgtggacgataaggagcagaggaaggagaacccctcacccctcttctccatcaagaagacgaagcagctgcggagcgaggtctacgacccatccgaccccaccggctccgactccagcgcccctggcagcagccccgagaggtctggccccggcctcctgccctctgagatcacacgaaccatctccatcaacagcccgaaggcccagacggtgcaggctgtgcgctgcgtcacctcctacacggtggagagcatctttggtacagagcccgaaccccctctcggaccgtcctccgccatgtccaagctccggggtgcagtggctgccgagggggcctctgacacggagcgagaggagcccacagagagccagggcctggctgcccggctgcggaggccatcccccccagagccctgggatgaggaggatggggcgtcttgcagcaccttctttggctctgaggagcggacggtgacctgtgtgactgtcgtggagccggaagccccacccagcccggacgtgctgcaggctgccacccacagagtcgtggagctcaggcccccttcccggtcccgctccacatccagctcccgcagcaggaagaaggccaagaggaagagggtgtccagggagcacggacggacgcgctctgggacgcgctctgaatccagggacaggagctcgaggtcagcgtcaccatcagtgggtgaggagcgccccaggaggcagcggtccaaggccaagagccggcggtcctccagtgaccgctccagcagccgagagcgagctaagaggaagaaagccaaggacaagagcagggagcacaggcggggcccctggggccacagccggaggacgtcccggtcgcggtcggggagccctggcagctcttcctatgagcactatgagagtaggaagaagaagaaaaggagatcagcgtccagacctcggggaagggagtgctcccccaccagcagcctggagaggctctgcaggcacaagcatcagcgggaacgcagccacgagcggccagacaggaaggagagtgtggcgtggccccgagaccggaggaagcggaggtcccggtccccaagctcggagcacagggcacgggagcacaggcggcctcggtcccgtgagaagtggccgcagacccggtcccattccccagagaggaagggggctgtgagggaggcttccccagcgccccttgcacagggggagccagggcgggaagacctccccaccaggttgccagccttgggggaagcacatgtctcgccggaggtggctacggccgacaaggcccccctgcaggctccccctgtcctggaggtggcagctgagtgtgagccggacgacctggacctggattatggcgactccgtggaggccggacacgtctttgatgatttctcaagcgacgccgttttcatccagctcgatgacatgagctcgccaccttctcccgaaagcacagactcttccccggagcgagacttcccactgaagcctgcgttgcccccagccagcctggccgtggccgccatccagagggaggtgtcattgatgcacgatgaagacccttcgcagcccccacccctgccagagggcacccaggagccacatttgctcaggccggacgcggctgagaaggctgaggcacccagttccccggatgtggcgcctgcggggaaggaagacagcccctctgcgagtgggagggtacaggaggcagcccggcctgaggaggtggtttcgcagacccccctgctgcggtccagagccctggtgaagcgggtcacctggaacctgcaggagtcggagagcagcgcccccgccgaggacagagccccccgggcaccacttcacaggccacagaagccccgagaaggagcctgggacatggaggatgtggcccccacaggggtcaggcaggcgttctccgagctgccctttcccagtcacgtgcttccggaacccgggttcccagacacagacccctctcaggtttacagccccggcctgccgcctgccccggcccagccctcaagcatcccaccctgcgcactggtcagccagcccacggtccagttcatccttcaggggagcctgccgctagtgggctgtggggcagcacagaccctggccccagtgcccgctgccctgaccccagcctcagagccagccagtcaagccactgcagccagcaactcggaggagaagaccccggcccccaggctagctgcggagaaaaccaagaaggaggagtacatgaagaagctgcacatgcaggagcgtgctgtggaggaggtgaagctggccatcaagcccttctaccagaagagggaggtgaccaaggaggagtacaaggacatcctgcgcaaggccgtgcagaagatctgccacagcaagagtggagagatcaaccccgtgaaggtggccaacctggtgaaggcgtacgtggacaagtacaggcacatgcgcaggcacaagaaaccagaggccggggaggagccgcccacgcagggggccgagggctgaggccaggcaatcacgggctatgcccggggagctgtcgggagtggcgggaatcggggccatgcccggggagctgtcgggagtggcgggaatcggggccatgcccggggagctgtcgggagtggcgggaaatggggggcatcaccatgcctgccgtcgggttcctgcgctgacacctggtctgtgcacctgtgttgctcacagttgaaaactggacacttttgtatgtatattatagagacactgtttccattctaatttatcaaaaatggattatctttagaaacctcttgattgacttactacttggaagataaagcacttggtgatcaagaggggctcctggtggggtggcgcgtccttgataaatctctaggtggcctcccgccaacagctgctgtgtacctttggctctgaattaggaatatctttactttctcttttcc

SEQ ID NO: 32382 - DNA, 4502 bp, Homo Sapiens
gcctcgcggtgcctaggctggggctgccggaccgtgaggctgtgagtcgcgcggacggagccggacaaaagcgggcggcggcggcaggatgaacagcatcaagaacgtgccggcgcgggtgctgagccgcaggccgggccacagcctggaggccgagcgcgagcagttcgacaagacccaggccatcagcatcagcaaagccatcaacacccaggaggcccccgtgaaggagaagcacgcccggcgcatcattctgggcacacaccacgagaagggggctttcaccttctggtcctacgccattgggctgccgctgcccagcagctccattctcagctggaagttctgccacgtcctccacaaggtccttcgagacgggcaccccaatgtgctgcatgactgccagcggtaccgcagcaacatccgggagattggagacctgtggggacatttgcatgaccgctacggacagctggtgaatgtctacaccaagctgctgctgaccaagatctccttccacctcaagcatccccagtttcccgcgggcctggaggtgacagatgaggtactggagaaggcagctgggaccgatgtcaacaacatcttccagctcactgtggagatgtttgattacatggattgtgagctgaagctttctgaatcagttttccgacagctcaacacggccatcgccgtatcccagatgtcctcaggccagtgccgcctggcccccctcatccaggtcatccaggactgcagccacctctaccactacacggtcaagctcctgttcaagctacactcttgtctccctgcggacaccctgcaaggccacagggaccggttccacgagcagtttcacagcctcaggaacttcttccgcagagcctccgacatgctgtacttcaagcggctcatccagatcccccggctgcccgagggaccccctaacttcctgcgggcctcagccctggctgagcacatcaagccggtggtggtgatccccgaggaggccccggaagatgaggagccggagaatctcattgagatcagcacagggccccccgcgggggagccagtggtggtggctgacctcttcgatcagacgtttggaccccccaatgggtctgtgaaggacgacagggacctccagattgagagcttgaagagagaggtggaaatgctccgctctgaactggagaagatcaagctggaggcccagcggtacatcgcgcagctgaagagccaggtgaatgcactggagggtgagctggaggagcagcggaagcagaagcagaaggccctggtggataatgagcagctccgccacgagctggcccagctgagggctgcccagctggagggcgagcggagccagggcctgcgtgaggaggctgagaggaaggccagtgccacggaggcgcgctacaacaagctgaaggaaaagcacagtgagctcgtccatgtgcacgcggagctgctcagaaagaacgcggacacagccaagcagctgacggtgacgcagcaaagccaggaggaggtggcgcgggtgaaggagcagctggccttccaggtggagcaggtgaagcgggagtcggagttgaagctagaggagaagagcgaccagctggagaagctcaagagggagctggaggccaaggccggagagctggcccgcgcgcaggaggccctgagccacacagagcagagcaagtcggagctgagctcacggctggacacgctgagtgcggagaaggatgctctgagtggagctgtgcggcagcgggaggcagacctgctggcggcgcagagcctggtgcgcgagacagaggcggcgctgagccgggagcagcagcgcagctcccaggagcagggcgagttgcagggccggctggcagagagggagtctcaggagcaggggctgcggcagaggctgctggacgagcagttcgcagtgttgcggggcgctgctgccgaggccgcgggcatcctgcaggatgccgtgagcaagctggacgaccccctgcacctgcgctgtaccagctccccagactacctggtgagcagggcccaggaggccttggatgccgtgagcaccctggaggagggccacgcccagtacctgacctccttggcagacgcctccgccctggtggcagctctgacccgcttctcccacctggctgcggataccatcatcaatggcggtgccacctcgcacctggctcccaccgaccctgccgaccgcctcatagacacctgcagggagtgcggggcccgggctctggagctcatggggcagctgcaggaccagcaggctctgcggcacatgcaggccagcctggtgcggacacccctgcagggcatccttcagctgggccaggaactgaaacccaagagcctagatgtgcggcaggaggagctgggggccgtggtcgacaaggagatggcggccacatccgcagccattgaagatgctgtgcggaggattgaggacatgatgaaccaggcacgccacgccagctcgggggtgaagctggaggtgaacgagaggatcctcaactcctgcacagacctgatgaaggctatccggctcctggtgacgacatccactagcctgcagaaggagatcgtggagagcggcaggggggcagccacgcagcaggaattttacgccaagaactcgcgctggaccgaaggcctcatctcggcctccaaggctgtgggctggggagccacacagctggtggaggcagctgacaaggtggtgcttcacacgggcaagtatgaggagctcatcgtctgctcccacgagatcgcagccagcacggcccagctggtggcggcctccaaggtgaaggccaacaagcacagcccccacctgagccgcctgcaggaatgttctcgcacagtcaatgagagggctgccaatgtggtggcctccaccaagtcaggccaggagcagattgaggacagagacaccatggatttctccggcctgtccctcatcaagctgaagaagcaggagatggagacccaggtgcgtgtcctggagctggagaagacgctggaggctgaacgcatgcggctgggggagttgcggaagcaacactacgtgctggctggggcatcaggcagccctggagaggaggtggccatccggcccagcactgccccccgaagtgtaaccaccaagaaaccacccctggcccagaagcccagcgtggcccccagacaggaccaccagcttgacaaaaaggatggcatctacccagctcaactcgtgaactactaggccccccaggggtccagcagggtggctggtgacaggcctgggcctctgcaactgccctgacaggaccgagaggccttgcccctccacctggtgcccaagcctcccgccccaccgtctggatcaatgtcctcaaggcccctggcccttactgagcctgcagggtcctgggccatgtgggtggtgcttctggatgtgagtctcttatttatctgcagaaggaactttggggtgcagccaggacccggtaggcctgagcctcaactcttcagaaaatagtgtttttaatattcctcttcagaaaatagtgtttttaatattccgagctagagctcttcttcctacgtttgtagtcagcacactgggaaaccgggccagcgtggggctccctgccttctggactcctgaaggtcgtggatggatggaaggcacacagcccgtgccggctgatgggacgagggtcaggcatcctgtctgtggccttctggggcaccgattctaccaggccctccagctgcgtggtctccgcagaccaggctctgtgtgggctagaggaatgtcgcccattactcctcaggcctggccctcgggcctccgtgatgggagccccccaggaggggtcagatgctggaaggggccgctttctggggagtgaggtgagacatagcggcccgggcgctgccttcactcctggagtgagtttccatttccagctggaatctgcagccacccccatttcctgttttccattcccccgttctggccgcgccccactgcccacctgaaggggtggtttccagccctccggagagtgggcttggccctaggccctccagctcagccagaaaaagcccagaaacccaggtgctggaccagggccctcagggaggggaccctgcggctagagtgggctaggccctggctttgcccgtcagatttgaacgaatgtgtgtcccttgagcccaaggagagcggcaggaggggtgggaccaggctgggaggacagagccagcagctgccatgccctcctgctccccccaccccagccctagccctttagcctttcaccctgtgctctggaaaggctaccaaatactggccaaggtcaggaggagcaaaaatgagccagcaccagcgccttggctttgtgttagcatttcctcctgaagtgttctgttggcaataaaatgcactttgactgtttgttgtc

SEQ ID NO: 32383 - DNA, 3749 bp, Homo Sapiens
ggccggggtggggtggggcaggatgctggatggcccactgttctccgaggggcctgacagcccccgggagctccaggatgaggagtctggcagctgcctctgggtgcagaagtccaagctattggtgatagaagtgaagactatttcctgtcattatagtcgccgcgccccttctcgacagcccatggacttccaggccagccactgggctcgcgggttccagaaccgcacgtgtgggccgcgcccgggatccccacagccgccgccccgccggccctgggcctccagggtgctgcaggaggcgaccaactggcgggcggggcccctggccgaggtccgagctcgggagcaagagaaaaggaaagcggcgtcgcaggagcgggaggccaaggagaccgagcgaaaaaggcgcaaggctggtggggcccgacggagccccccgggtcgaccccgcccggagccccgcaacgcccctcgggtggcccagctggcagggctccctgctcccttgcggccggagcgcctggcgcctgtggggcgagcgccccgtccatccgcgcagccgcagagcgacccagggtcggcgtgggcggggccctggggaggtcggcggcccgggcccccaagctacgaggctcacctgctgctgagaggttctgccgggaccgccccacgacgccgctgggaccggccgccaccctacgtggctccaccttcttacgaaggcccccataggaccttggggactaagagaggccccgggaactctcaggtgcccacttcatcagccccagctgcgactccagccaggacagacggagggcgcacaaagaagaggctggatcctcggatctaccgggacgtcctcggggcttggggtctccgacaggggcaaggtctcttggggggatccccaggctgtggagcggccagagcaaggccagagcccggcaagggggtcgtggagaaaagcctggggctggctgctgctgacctgaacagtggtagcgacagccatccccaagccaaagctacagggagcgcaggcaccgagatagctcctgcggggtctgcaactgcggctccctgtgccccgcatcccgctcccagatccaggcaccacctcaagggctcgagggaagggaaagaaggagaacagatctggtttcccaaatgctggattccctcccctaaaaagcagccgccccgccatagccagacactccccagaccctgggctcccggaggcaccggatggagagaatctctgggtcttggagagggggcaggaccggagaccctggagggttggaaggcgacccgccgtgcccacaccttgccccgcagttcccagggcctgtcccgtggggaaggcgtctttgtcattgacgccacgtgcgtagtgatacgatcccaatatgttccaaccccccgaacccagcaggtgcagcttttgccctctggggtgacacgcgtggtgggggattcccccagccaatcgaagcccggcaaggaggagggtgaaggggccacggtctttccttccccttgtcaaaagcggctgtcgagcagtcgccttttacaccagcccggcgggggccgcgggggcgaagctgagggcgggaggccgggggactccacactggaggagcgcactttccgcatcttggggctcccggcccccgaagtaaacctgcgggacgcccccacgcagccaggtagcccagagcaccaagccttaggcccagcagcttcgggagcccagggcagagccgaggggtcggaagtggcggtggtccagcggcgcgccggccggggctgggcgcggaccccagggccctacgccggggccctgcgagaagccgtgtcccgtatccgccgccacacagcccctgactcggacacggacgaagctgaggagctcagcgtccatagcggctcctctgatggaagcgacacagaagccccgggcgcctcctggcggaatgagaggaccctgcccgaggttggaaacagttcgccagaggaagatgggaagacagcggaactgagcgacagtgtcggggagatcctagatgtcataagccaaaccgaggaggtcctcttcggggtgagggacatcagagggacccaacagggaaataggaagaggcagtgagaggccccttcttgtatttgtgtccccaacgcatccatccttgggtccactggtccccattcttccccacagacttcctttgcttctcttttccttgtatctttacccatacctgttctcatccttgaaatataaatgaaaggaagggaagcatatgcccattaatgattttgtttcaggagaggtgagaatgagcagatttaattaatgtctgttatgttcagggcacaagggtgagctcttcgcaggggctgatgcactgggtgtggagctgagcagagaggcctaaccaggatcaggcaggagggcagggatggtggcagccataggagggcagggtagggtagggcctctgaggaggagggaaaaagtgaaggagaggctttggacctggtgacagagtgatcagatgacagaggggttcttgggagaagaggcataggtccagcaacaaccaacaaagcagaaggagggctcaccttggtgtcacaagtcttggatttcaatcccaactctgccactgagttgctggttgactgaggccagtcactttccctctccaggcctccaggcctcctggtatataaaatgatggtattctaaggtccatccttccgtctctgacattttgagatctttggaaaggactctatctcatcctcccctcgacaagccaagaatgagaattgggaataagtgaacagagtttgagggtttctgggcggcctccgtgtcacccaaagtcatgatcaattcaggagactgcccaaggcttgcagaagaggtaagggagtgaggcactcctatcccagtctcccaggtttggttgagggctccccaaggcagggcaagatagcggccctgtcactgaccctggcctgtggtggtctgagctggggagggaaggacaccaatgaatcagcttgggacctctttaggccttccccttttcctccaccccgatgctccttagtgatgctctgaggcgtggccacgatctccctcccaggtggtatcgcccacctgaaaaaatcctgagaatttctcccatcttggcctcttccagaaaccggccaggcaaggaaagaggccggtcaccagaagccagcaggcgtggggtgtgatactctctatagccactacagggcgcgcgcaggtcgcggatctccccagttgctaatcccggctctgccactcaatcctatccctagttcccgagcgcgggtcccccgccttgcagtctccagccgtgcggggccgggagcaggcctccggcctcccagacttctagagcccgccgggcccatctttgtactcatccaccccagccggcttgggactcagacaccgaagtctttttttttttctctccgatccttggacacctcctctgtctgccatttattagccatgtgaacttggccacatcacttcacctccctgagcctcagtttcctcatctgtcaaatgggggtttataaacacctacctcgcagggttgttgtgaggatttaatgcgataatgtatgtaaagcgccttgcacactgcctggcacacagtaggcgctcaataaatctaagcttcccttta

SEQ ID NO: 32384 - DNA, 4551 bp, Homo Sapiens
agaggtctggctgggagttagggatggagcaggacaactccaaggctcccctctggcagccagacctgctcatgaagaaggctcctcggtgaggagggtgaggctcaaagagcagagttcctggagcgcccccagcaggcctgaattgcagttcctgtgccctggcactaagactggcacctcctgcggcccatgcccttcgcctgcattgcccactgagtcccactcgactgtcttcagcgcggttcacactgagacccagccctctcccgctggccccgagcaggcccacctttaggagggcgtgatggaaaggcccctggagaatggggatgagtccccagactctcagggccatgccaccgactggagatttgctgtgtgcagtttcagggatgcctgggaagaggaggaacctgcttcccagatgcacgttaaggacccaggtcctccaagaccaccagccggggccacccaggatgaggagctacagggcagccccttgtccaggaaattccagttacccccagctgcagatgagtcgggggatgcccagaggggcacagtagaaagctcctcagtcctgtcagaagggccaggcccctctggagtggagagtctcctatgccccatgtcctcccacctcagcttggcacagggtgagagtgacaccccaggggtagggttggtaggggacccaggtccaagcagggcgatgccatctggcttgagccctggggcattggacagcgaccctgtgggccttggagaccctttatcagaaatatcaaagctgctggaggcagcccccagtggatccggcctccctaagcctgctgactgcctcctggcccaagacctctgttgggagctgctggccagtggtatggccaccttgccagggactcgggatgtccaaggccgggcagtgctgcttctgtgtgcccacagcccagcctggcttcagtctgagtgcagcagccaggaactcatccgcctcctgctgtacctgcgaagcatccccaggcccgaagtacaggcactgggactgacagtgctagttgatgcccgaatttgtgctccaagttcttccctcttctctgggctcagccaactacaagaagcagccccaggggccgtgtaccaggtgctgctagtgggaagcacgctgctgaaggaagtgccttccgggctgcagctggagcagttgccttctcagagcctgctgacccacatcccaacggcggggctgcccacttcgctaggaggaggcctgccttactgccaccaggcctggctggatttccgaaggcggctggaagctctactacagaactgccaggcagcttgtgccctgctccagggggccatcgaaagtgtgaaggctgtgccccagcccatggagcctggggaggtcggtcagctgctacagcagacagaggtcctgatgcagcaggtgctagactcgccatggctggcatggctacaatgccaggggggccgggagctgacatggctgaagcaagaggtcccagaggtgaccctgagcccagactacaggacggcaatggacaaggctgacgagctatatgaccgggtggatggattgctgcaccaactgaccctgcagagcaaccagcgaatacaggccctagagttggtccaaacactggaggcccgggaaagcggactgcaccagattgaagtgtggctgcagcaggtgggctggccagcactggaggaggctggggagccctcgctggacatgctgctccaggcccaaggctcttttcaggagctgtaccaggttgcccaggagcaggtcaggcaaggggagaagtttctgcagccgctgactggctgggaggcggctgaactggacccccctggggcacgctttctggccctgcgagcccagctgactgaattctctagggctttggcccagcggtgccagcggctggcggatgctgagaggctgtttcagctcttcagggaggccttgacgtgggctgaggaggggcagcgagtgttggcagagctggagcaggaacgcccgggggttgtgttgcagcagctgcagctgcactggaccaggcaccctgacttgcctcctgcccacttccgaaagatgtgggctctggccacggggctgggctcagaggccatccgccaggagtgccgctgggcctgggcgcggtgccaggacacctggctggccctggaccaaaagcttgaggcttcactgaagctaccaccggtgggcagcacagctagcctgtgtgtcagccaggtccccgctgcacctgcccaccctcccctgaggaaggcctacagcttcgatcggaatctggggcagagtctcagtgaacctgcctgccactgccaccatgcggccactattgctgcctgccgcagaccagaggctggaggaggtgccctgccccaggcatcccctactgtgcctccaccaggcagctctgaccccaggagcctcaacaggctacagctggtgctggcagagatggtggccacggagcgggagtatgtccgggctctagagtacactatggagaactatttccccgagctggatcgccccgatgtgccccagggcctccgcggtcagcgtgcccacctctttggcaacctggagaagctgcgggacttccactgccacttcttcctgcgtgagctggaggcttgcacccggcacccaccacgagtggcctatgccttcctgcgccatagggtgcagtttgggatgtacgcgctctacagcaagaataagcctcgctccgatgccctgatgtcaagctatgggcacaccttcttcaaggacaagcagcaagcactgggggaccacctggacctggcctcctacctgctaaagcccatccagcgcatgggcaagtacgcactgctgctgcaggagctggcacgggcctgcgggggccccacgcaggagctcagtgcgctgcgggaggcccagagccttgtgcacttccagctgcggcacggaaacgacctgctggccatggacgccatccagggctgtgatgttaacctcaaggaacaggggcagctggtgcgacaggatgagtttgtggtgcgcactgggcgccacaagtccgtgcgccgcatcttcctttttgaggagctgctgctcttcagcaagcctcgccatgggcccacaggggttgacacatttgcctacaagcgctccttcaagatggcagaccttggtctcactgagtgctgtgggaacagcaacctgcgcttcgagatctggttccgccgccgcaaggccagggacacctttgtgctgcaggcctccagcctggctatcaagcaggcctggacagctgacatctcccacctgctttggaggcaggccgtccacaacaaggaggtgcgcatggctgagatggtgtccatgggtgtggggaacaaggccttccgagacattgctcccagcgaggaagccatcaacgaccgcaccgtcaactatgtcctgaagtgccgagaagttcgctctcgggcgtccattgccgtagccccgtttgaccatgacagcctctacctgggggcctcgaactcccttcctggagaccctgcctcttgctctgttctggggtccctcaacctgcacctgtacagagacccagctcttctgggtctccgctgtcccctgtatcccagcttcccagaggaagcagcactggaggctgaggcagagctgggcggccagccctctttgactgctgaggactcagagatctcgtcccaatgcccatcagccagtggctccagtggctctgacagcagctgtgtgtcagggcaggccctgggtaggggcctggaggacttaccctgtgtctgagcccgggactggacgagcagtagatccagcagcctgcagctccaaggaacattgcctctctggatctgctgtgaccagggtgtggctgacacctgggctacctccaacctacatgtgcaacgctgttgactaccctttctgatgtgtgtggccattggactaactggcacggggcctctctagggaagtctggttgtagagcctgaataggctcctggccccatgaccccttctcctgtccccagctcccatcccagttgtgggttaagaataggctagagcagacattgggtgtttccatgctgtaggctggtgggggaccatgtgcctctaggcagtgactagggtgcccccacccctcaggaagaacacaggtgggctcctagcagctgatccccaatgcctggccttaaagccgagctcagttaccatagggacaggtccacctctactgggccctcatgcttgcctttcctggcccccaggcccagcccctttttactggggcagtttcgttattttgacttgatgccttttgaataactttcaatagaattgtctaaaattatcttactggttgttaggcctttggtgtctcagagaaggagtctaggtctttgatgtgtgatttaatcttttatttgtttataataaaaaatagactgata

SEQ ID NO: 32385 - DNA, 3669 bp, Homo Sapiens
ggggcgtgtcggggctgattctctggctgtgtggggcgcacggtcccgggatactggggacggcggggtgggagggcgccgtcctggggccgcggcggccgggcgggggagatggcggcgcgatggagcagcgaaaacgtggttgtagagttccgtgactcccaggcaactgcgatgtctgtggactgtcttgggcagcatgcagtgctttctggccgcagattcttatacatcgtcaatctagatgcccctttcgaaggtcaccgaaagatctctcgccagagcaaatgggacattggagctgtgcagtggaatcctcatgacagctttgcacactattttgcggcttcgagtaaccaacgagtagacctttacaagtggaaagacggcagtggggaagttggcacaaccttacaaggccacactcgtgtcatcagcgacttggactgggcggtgtttgagcctgacctcctggttaccagctctgtggacacctacatctacatttgggatatcaaagacacaaggaaacctactgttgcactgtctgctgttgcgggtgcctcccaggtcaaatggaataaaaaaaatgctaactgccttgccaccagccatgacggcgatgtgcggatatgggataagaggaaacccagtacagcagtggaatatctagccgcccacctctccaaaatccatggcctggactggcacccagacagcgagcacattcttgctacctccagtcaagacaattctgtgaagttctgggattaccgccagcctcggaaatacctcaatattcttccttgccaggtgcctgtctggaaggccagatacacacctttcagcaatggattggtgactgtgatggttccccagctgcggagggaaaacagccttctcctgtggaatgtctttgacttgaacaccccagtccacaccttcgtggggcatgatgatgtggtcctggagttccagtggaggaagcagaaggaagggtccaaggactatcaactggtgacgtggtcccgggatcagaccttgagaatgtggcgggtggattcccagatgcagaggctttgtgcaaatgacatattagatggtgttgatgagttcattgagagtatttcccttctgccggaacctgagaagaccctgcacactgaagatacagatcaccagcacactgcaagccatggggaggaagaagccctaaaagaagatccccctagaaatctcctggaagagaggaaatcagatcaactggggctgcctcagaccttgcagcaggaattctccctgatcaatgtgcaaatccggaatgtcaatgtggagatggatgcggcagacaggagctgcacagtgtctgtgcactgcagcaaccatcgtgtcaagatgctggtgaagttccctgcacagtacccaaacaacgccgccccttccttccagtttattaaccccacaaccatcacatccaccatgaaagctaagctgctgaagatcctgaaggacacagccctgcagaaagtgaagcgtggccagagctgcctggagccctgcctgcgccagctcgtctcctgccttgagtcctttgtgaaccaggaagacagcgcttccagcaacccgtttgcactccccaactctgtcactccccccttaccgacgtttgcgcgggtgaccacggcttacgggtcgtaccaggacgccaacattccctttcctaggacttctggggccaggttctgcggagcaggttacctggtatatttcacaaggcccatgacaatgcatcgggcggtgtctcccacagagcctactccgagatctctctcagccttgtctgcttatcacactggcttgatcgcgcccatgaagatccgcacagaggcccctgggaaccttcgtttatacagtgggagccccactcgcagcgagaaagagcaggtctccatcagctccttctactacaaggagcggaaatcaagacgatggaaaagtaagcgtgagggatcagactctggcaatcgacagatcaaggctgctgggaaagtcatcatccaggatattgcttgcctcctgcctgttcacaaatcgctgggagagctgtacatattgaatgtgaatgatattcaggaaacatgtcagaagaatgccgcctctgccttgctcgttggaagaaaggatcttgtccaggtttggtcgctggctacggtagctacagatctttgccttggtccgaaatctgacccagatttggaaacaccctgggctcgacatccatttgggcggcagctgctggagtccctgttggctcactattgccggctccgggatgttcagacactggcgatgctctgtagcgtgtttgaagcccagtctcggcctcaggggctaccaaacccctttgggccttttcctaaccgttcttctaatcttgtggtgtcccatagtcgatatcctagctttacctcttctggttcctgctccagtatgtcagacccagggctcaacactggcggctggaacatagcgggaagagaggcagagcacttgtcctccccttggggagaatcctcaccagaagagctccgctttgggagtctgacctacagtgatccccgtgagcgagaacgcgaccagcatgataaaaataaaaggctcctggaccccgccaatacccagcaatttgatgactttaagaaatgctatggggaaatcctctaccgttggggtctgagagagaagcgagctgaagtgttgaagtttgtctcctgtcctcctgaccctcacaaagggatcgagttcggcgtgtactgcagccactgccggagtgaggtccgtggcacgcagtgtgccatctgcaaaggcttcacgttccagtgtgccatctgtcacgtggctgtgcggggatcgtccaatttctgcctgacctgtgggcacggtggccacaccagccacatgatggagtggtttcggacccaggaggtgtgtcccaccgggtgtgggtgccactgcctgcttgaaagcactttctgaacctacagaagttgggtattgtctgaaatcccagaggacccataagtgccggtgacaagctgtctgtcaggggagaggctccagaacctgggttcgtccccagtgagaccggaggatgatcccccaaggactgcgcagcatcagctcttggtgggcctctgccttctcttctgtttggccacctggtgtggatgtcactgtgtgaagataaggacagaagtgcagagctgcgctttgtgtgttgtctatgtcggctgagctaccaaggtggaagttttcatggagaaaagcacctggctccagggccagtgttacagtgttaccctgtaaggtgttagccttaaaccaccgagcagcgttctcttgatgccagtgcagagaccagagtcagatgcccgaggacagtgggtaggaatttcatcaacaaatggacctatggcatcatggctttagaagctggtacatttactgagctgatggacagtggccttctaaaatatgacacttaaattgtaaatatgcactgtacttaaggattcttaagatgtatttttttgttatttctcctccagctgctatcccttggctaataaaattctagtaatttgaaaaaaaaaaaaaagagagaaagtt

SEQ ID NO: 32386 - DNA, 4453 bp, Homo Sapiens
aggaccggccggagctttgcggagggcccggcttggcgggtccgggggggagccgaacccgcggggcaccgggtccgggcggggccgagccgggccggggcgggagccagccggggtggggcggggccgaggccgaggcaggcggtcggcagtgctgggggttcaggtgttgcggcggctccacgtagccaggcggcccgtgggctggagcgggcggagctcggcccgcggcttgcgtgagctcaggccggtcccagcgtccagagcgccggcccttcggcttcttctaggccatggcagggccgggcccaggcccgggggacccggacgagcagtacgatttcctgttcaagctggtgctggtgggcgacgcaagcgtgggcaagacgtgcgtggtgcagcgcttcaagaccggcgccttctcggagcgccagggaagcaccatcggcgtcgacttcaccatgaagacgctggagatccagggcaagcgggtcaagctgcagatctgggacacggccggccaggagcggttccgcaccatcacccagagctactaccgcagtgccaatggggccatccttgcctacgacatcaccaagaggagctccttcctgtcggtgcctcactggattgaggatgtgaggaagtatgcgggctccaacattgtgcagctgctgatcgggaacaagtcagacctcagcgagcttcgggaggtctccttggctgaggcacagagcctggctgagcactatgacatcctgtgtgccattgagacgtctgccaaggactcgagcaacgtggaggaggccttcctgagggtggccacggagctcatcatgcggcacgggggccccttgttcagcgagaagagccccgaccacatccagctgaacagcaaggacatcggagaaggctggggctgcgggtgctgaccaggggccgggccggcagactgggggttccccacctccttgctctccccagcctgccaagcccagccctccagagccagccctcctgggtaccggcaactacagcagccgggtgaagctctggagctctgcatcctgtggcctggctgcgggatggaggctctccttgaggaaggggaagcaggataccctggcgggccaccctgccagccagcagctggccctccaccatcttcacattccaagactggcctgaacccgccggtgtgggccacagtaggaggggccagcagtcctccctgtcccatgcctgctggctctgaccgtttcctctcatgggtttgctttacctgtggcagcaggttgctgctttccagggatgtgtccagtgccctgggttcttcccggtcatcctggggctctgcacagagcagcagagctagagccatgagacccacagacttggtgcctgagcgcagctccagggaagccccagccccttccaggcggggaacctgcttcctgccttcactgcccccgcagcactcacagacatctccctggggtctggctcactgccttatcaggacctctgagttttctgactttctgtgtagcttctcattttcatcagcacagcatggggtcacggcccacagctaggtggggtcacggcccacagctaggtggggactgtctgctggctcagggcccagtgttttgccactcaggttgcaaaattagctaatccttcagtgccagcactcagaagtctggcaggtgggggaatgagatgagaaagtggacatttaaggtccaagtagaagcttgcatccttgaggctcagggatgagagggcaccgcaaggcacccagccttaccccacaagcaggaatcctgccagccgagcgtgggtcccagtctatggaatcgagtctcccagacaaaaaaggagaggccctggcggtccttggcctggcccattttattccctggacccttaactgcctcaccctgagctgggcaccaaggttagaaggcaaaagtggggtagggggatgtgggaagcagcattgtcctctgggcatgtggctcagaggtatcacagtgacaaaagagccagggctagggctggaggggccaggtgatcttccttagccaatcccagtccgtctgtgtcagcccagctctgcctcgcagccccctcagcatgggtgcccccagaagtaagcagctcttggacccacgagcagggctgcgtcggtttgtggtctagctcccaggggcaggccaggcatggctcagtgcagtccctgggccagtgagaggcctcccccatgcctccctgccctctgcactaagcactttccaggcaggcctggccatagggcaagagcaggccttacagcagtgccacggtgacccaagaggcagggttggggcctggacagggtttcctctgctgagactgagacaagcagggcttgatgctggtggtggagccagcatctcacctgccaggcttccttttgggcagggaggctacctgtggaatggctgagcctggttctgcaggggaggaaggctgccaggagctgaggggctagcacctgcattgaggggagtctgggtgcatcagattggggggcgccagaggcgaggctgcctggctccctttctcagcagctttgcttgtggcaggggtgagagtggagctgagtggggtctgggctctgcccctgcgcctccactgcagtgcctgggctccccttgcagggcagacagtgcctggcactgaggggtgcccccagaccccgctgggactggatgtgccgtgggcagtgccttcctccagcctcacaacctttctgctggggctgaagtttctggggtcacatggtcagaaggggctgagctggtctttcactgcaggcccactctgaaagagaaatcccatgaagcctgtccttgcagagcccctctgtttttgggggaacagggagcattcacagggtcttgggaacaaaggcctgggcctccccgtttgaatttcagccccagttccagggcaagtcccagccacccaagcatacttaccagtactgcccaccaccacccactgcccacctctaagaagcccggctctcctactctgcttccaggctggggcctcacaggtggggctgttaccttcctcagggcttagggagggagggaggacatggacagggccttccaccctggctccttcacagggatggtagctgaccggtgatgggttcatttgtcaccttggactgtgagccacttccacttctcgccccccaggcaggagcaccctcactccaagggcttggcctggaaaggcaggctcacctgggactcaacgttccttcccccgccgccactgtgccccccgtccctccaccccagaagccctgacctcatttgggcaccttgctgtcctctgggcttctcctctgcccaggtcaccctgtggcaggcctgggccctcaggatgtttcaaaggctccacagctccaccgctccacctggcttcactccagcaccctgtccctggagcacctctgtcctgtctgggccaacctggtctccctgccccatgccctcccctggctcttagcaacctgcccttttattcatgccatttggggtcacagatgcctagctggacacagctcccagaactggctccaccctggggccttgcccctagtaccccctggcaggagcaacccaccccatggtcgaggttcccctacccctggatcctggactgaagccatttcctacagagaagcgttcccaccccctctcaggcacaaaagccggtgtccagggactcaagacctgtacctggggttgcaggggctcctgccctgctgtatcccaccaggagggggccccactgcccttccggcccttaaaactgggctgggagagaagacggggaagtgtgtgagacaaaacaaagccggcttgtttcctccccttggcaggctaagctctcccggcagcccgggctctggggcggaaggagaacagtgtcatctcttcctttgttgataaattgccaaagagtgggaacaggtggggtcaggggccagagtgcaggggagggggcaatggtggaggtggcggggggaagcagagggaggtgggctgaggcctcggtggggccagtgcgacgctggcttaaggagctggaggggttcctaatacacatttaattcagtttctcttccctaagaggctgccggagttggggcctcctccagcagagaccctcggacccctgcagggcctggacttggggtgaacagggcttcagtcagcgcaagtattccatttgcatttggtaatttttcatgccacctatttatgaatatataaatctttataccaaatctattttttaaaacatggaaaagttgcctttatggaaacttggcagagccagagtgtacacattcctaaaccattaaacagatttctataac

SEQ ID NO: 32387 - DNA, 3441 bp, Homo Sapiens
atgcctgggcagcagggctggaaccagagtgaggcagccgcagcggccatgggggccctgacgagccggcagcacgcgggcgtggaggaggtggacatcccgtctaattccgtgtaccgctacccgcccaagtccgggaccgaggctcctggggagcggggctgcggcgtcgtaggcgaggtcggcgccccgcacggacccggccggcccggcccaaagcctacctgcctcgcggggtccgagggccgcgagggaggcgacctcggcatccaaacaggcacttgcgccaggtgctatccctgcgctgccgtctcctggcctctggaaagcctctggattgtggtatcagcattggaggtggaggaggattttgacagcaaagcagagaatcacaaggtagttcagttatcaaagcaccgcaacatgaccgaaatgagcttcctgagcaacgaggtgttggtgggggacttgatgtcccccttcgaccagtcgggtttgggggctgaagaaagcataggtctcttagatgactacgtggaggtggccaagcacttcaaacctcatgggttctccagcgacaaggctaaggcgggctcctccgaatggctgactgtggatgggttggtcagtccctccaacaacagcaaggaggatgccttctctgggacacattggatgttggagaaaatggatttgaaggagttcgactttggtgccctgttgggtatagatgacctggaaaccatgccagatgaccttttgaccacgttggatgacacttgtaatctctttgcccccctagtccaggagactaataaggtgcccccccagatggtgaacccaattggccatctcccagaaagtttaacaaaacccgaccaggttgcccccttcaccttcttgcaacttcttcccctttccccaggggtccagtcctccactccagatcattcctttagtttagagctgggcagtgaagtggatatcactgaagaagataggaagccggactccactgcttacgttgccatgatccctcagtgcataaaggaggaagacaccccttcagataatgatagtggcatctgtatgagcccagagtcctatctggggtctcctcagcatagcccctctaccaggggctctccaaataggagcctcccatctccaggtgttctctgtgggtctgcccaccccaaaccttacgatcctcctggagagaagatggtagcagcaaaagtaaagggtgagaaactggataagaagctgaaaaaaatggagcaaaacaagacagcagccactaggtaccgccagaagaagagggcggagcaggaggctctcactggcgagtgcaaagagctggaaaagaagaacgaggctctaaaagagagggcagattccctggccaaggagatccagtacctgaaagatttgatagaagaggaaaaggaagagtcaggaagctattttgccagccacttcattatgggaggagagaagtttgactcaactcatcctgaaggttacctgtttggagagaacagcgatctgaactttctggggaacagaccagttgtgtttccttacgccgccccacctccccaagaacccgtgaagactctgagaagcctggtcaatatccgaaaggacacactgaggctcgtcaaatgtgctgaggaagtgaagagccctggagaagaggccagtaaagctaaagtccactacaatgttgagttcacctttgacacagatgctcgggtagccatcaccatctattaccaggccacggaagagttccagaatggtattgccagctacattcccaaagacaacagcctccagtcggagactgtgcagtacaagcgaggagtgtgtcagcagttctgcctgccctcccacaccgtggatccctccgagtgggccgaagaggagcttggctttgatttagaccgagaagtttaccctctagtggtacatgccgtggtggatgaaggagacgagtattttggccattgccatgtactgctgggtacttttgagaagcacacagatggaactttctgtgtcaagcccctcaaacagaaacaagtagtagacggggtcagctacctccttcaggagatctatggaattgaaaacaagtacaacacacaagattctaaggtggctgaagacgaagtgagtgataacagtgccgagtgtgtggtgtgtctctcggatgtccgggacaccttgattctgccctgtcgccacctctgcctctgtaacacctgtgcagacacgctgcgctaccaggccaacaactgccccatctgccgactgcgtaagccccagagcggcagggggactgccttccgggcactgcttcagatccgagccatgaggaaaaaattgggccccttgtccccaaccagctttaaccccatcatctcatcccagacatctgactctgaagagcatccatcctcagagaatattccaccaggctatgaagtagtatctcttctggaggccctcaacgggcccctcaccccgtccccagcagttcctccacttcacgtgcttggagatggccacctctcaggaatgctcccttcatatggcagtgatggccacctgccccccgtcaggacgatctcgcctcttgaccgcctgtctgacagcagcagtcagggactcaaactcaaaaagagtctctccaaatccacttcccaaaactcttccgtgctgcatgaagaggaagatgagcattcctgcagcgagtcggagacacagctctctcagagaccgtcggttcagcatctcggagaggaatgtggtgtgactccagaaagtgagaatctcaccttgtcgtcatctggagctattgaccagtcgtcttgcacagggacgcctctgtcatccactatttcctccccagaaggccctgccagcagcagcttggcccagtctgtcatgtccatggcatcctcccagatcagcactgacaccgtctcctccatgtctggctcctacatcgcccctggcactgaagaggagggagaggctctctcttccccccagcctgccagcagggccccctcagaagaaggagaggggctgccagcggagtctccagacagcaactttgctggcctcccagctggagagcaggatgcagagggaaatgatgttatagaggaagaggatggatcacccacgcaggaaggtggccagaggacgtgcgcatttctaggtatggagtgtgacaataacaatgactttgacatcgcaagcgtgaaagcactggacaataagctgtgctctgaggtctgcttacctggtgcctggcaggctgatgacaatgccgtcagtcggaatgcccagcgccggcgcttgtcatccagcagcctggaggactctgagacgaggccctgtgtgtggggccctttggctgtctga

SEQ ID NO: 32388 - DNA, 3336 bp, Homo Sapiens
atggcccagccctacccccccgcccagtacccccctccgccacagaacggcatccctgccgagtacgccccgcccccaccgcaccccacgcaggactactccggccagaccccggtccccacagagcatggcatgaccctgtacacaccagcacagacccaccccgagcagccaggctccgaggccagcacacagcccatcgccgggacccagacagtgccggctggggtctctcaggtctggcagagggttcagggtcatggtctgcagatctttcatccagggacccagaggagagagtcatcctccatgacctgcacccagggcagggctgcaggcagaagttacggcatcggcgtggtgccccacgaagaacaaagacctgggcctcctcagaggccatgcgctccccaaccttggagtatttgttcatgcagagccttcctaccttggaaggcagctggagagggtgttctagattccaggagctccttcctcccagaggctgcccggcactcacagctgaaggccgaacgcctccctgctggctcagatcttcgggataggaagtgggatgagttcagagctttggtccagacctgcctaggtcagagtgtcttcctgagctcccggggcactcgagggcccgtgtgcagccaccaagtaccctggtctcttccttccccaccatccctgaagtcctacccagcccaccccccccccgagagcctgctgcccaggttggcaccaggatcctcaaagacagcctgggccccagctccggaaaggccttcctggaatttctggaaccacgaggcctcttcctgctcctcctcccccgaggagggtttccagccagcaattggtgggaagtccgtgttcatccaactcagggcctttcccgacacctccaccacccagaggcccttgggcctgggcctaggtcgtgatgagctaatggccacctcggacagtcacccgtgcatccacccggccgatgctgatgaagcacctgccacatgcctggagttcctgctctgtggatacagccaggaccaagccagactgaaggccagccttgcccagacagacgaggcggcacagacggacagccagccgctccacccctccgaccctacagagaagcagcagcccaagcggctacacgtctccaacatccccttccggttcagggaccccgacttgcggcaaatgttcgggcaattcggaaaaattttagacgtggagatcatttttaacgagcggggctccaagggttttgggtttgtaacttttgaaactagctcagatgctgaccgagcccgggagaagctgaatgggacgatcgtagagggacggaaaattgaggtcaataatgccacggcccgagtgatgaccaacaagaagacggggaacccctacaccaacggctggaagctaaatccagtggtcggcgcagtctacgggcctgaattctatgcagtgacggggttcccctaccccaccaccggcacagccgttgcctaccggggcgcacatcttcggggccggggccgggccgtgtataatacatttcgggctgcgccacccccaccccccatcccgacttacggagcggtcgtgtatcaggatggattttatggtgctgagatttatggaggctacgcagcctacagatacgctcagcccgctgcagcggcggcagcctacagcgacagttacggcagagtctacgcagctgccgacccgtaccatcacaccatcgggcccgcggcgacctacagcattggaaccatgtgaaaccttccaccgtttccttctcggaccatgaagggcaaaaacaaaaaaacaaaaaaaatcacaaaacaaaaaaaacaaaaaaagatgttaagatccaagcaacaaaaaaaaaaccaaccaaaccaagaggcatccaaccaagtccaagtcccgcgtcctggccacacgcccgcaccgagggagcacgccggcaggggcgccgaggagcggccccaggacaggacggccccaccgcgtcctggctggcagcacagtgggaacacgcccctccgtctcaggcagtgggggagttggaggggaaggggcctcccttgtgggacccgtggggggctctgttttccatccagtcttcctttcccagcccccaactcccaagacagacagtgtggagcccagcggcggcggagcaggcccgggcctgagcaggcaggcgctgctagcaagacttgatctttgtggccagctgtgccagggggccggcggggctgaggggtgcgggcagctttcatcccaggggctccactgggccccgtcaccctcctgtcgcgtcccctgcgtcccacctccctcctgcccggcagtcccgcccgtgcccccagcctggcgaggaagccgtccaacagtagccccggggccagctcccaacagaaagggctgacgtggctccaggactcaggggcgctccatgggaggacgaaggaagcccagccagccaggagccactcctcacacctccaagtgtggccaagtgggccctgaggccaaggacttacttgctcttcctggccatctctccctttctggaggaggcccggggcctgtgtacaccaaggctgacctcgtgctgcctgctgggacccagccctccctgccgctcccctgtgagcccagtccaccgtgggcgcccagggccagggacgggccagcgcccggctgcatcgcgaggttgggagtcacagtggctgtgggcctggacgggcacagccagagcaggggcccatgggaagggcaagggatggggaagcctgggccggccccttccctgctcccaaggcaggtgtccaggtggcgggagcagcaccaaggacagccaggcttacccggtgggaggagcaggagcagagcaggtggcagggaggaacccctggcgaggcagggagcactgaagtagggaagcagcaaaaaatacaggctcccaacgtggctccactgtctcatgaagtgtcaaaaatttaaaaatacacctcactttctattcagcatcagctattgaaatggaattctccttttctattcccgttgtacatagccccacgccctgcctccggctttgtcctctgtacagagccccctgtcccctctgctgttccggacccttttcttgcagcagctcaaccccccgactcactcagatccccaggactgcagccgagccccgggcttcctttcttaccattctgtatgcttccaaggtgtgaccattcaaactaacagtattattaagattattaataaagatttctttcttcaaaccag

SEQ ID NO: 32389 - DNA, 4862 bp, Homo Sapiens
ctcagctttggcagggaaaggtcttctgagttctttgttcctccctcttagactgcccagtataatgaagagatgatatttgtattttaggaattatagaatgatctacttatcatttcagattctgaagacaggaataagatgaaggaatggaaatcaaagatggaaatttctgaagaaaagaagtcagcaagggctgcatccgaaaaactccaaagacaaatcacccaggaatgtgagttagttgaaaccagtaattctgaggacagattattgaagcactgggtaagccctttaaaggatgcaatgagacatctcccttcccaagagagcggtatcagggaaatgcatattatcccccagaaagccattgtgggagagattggccatggatgtaatgaaggagaaaaaatactttctgcaggagaaagctcccatagatatgaggttagtggccaaaacttcaaacagaagtcaggattaactgaacatcagaaaattcataatataaataagacctatgaatgtaaggaatgtgaaaaaaccttcaacaggagttcaaacctgatcatacatcagagaattcatacaggaaataagccatatgtgtgtaatgaatgtgggaaagactctaatcaaagttcaaatcttattatacatcagagaattcatacaggaaagaaaccttatatatgtcatgaatgtggaaaagacttcaatcagagctccaatctggtgagacataagcaaattcacagtggtgggaatccctatgagtgcaaagagtgtgggaaggcttttaagggaagctcaaaccttgtcctgcaccagagaatccacagtagggggaagccatatttatgcaataaatgtgggaaggctttcagtcaaagcacagatcttattatacatcacagaattcacactggagagaaaccctatgaatgttatgactgtggacagatgttcagtcaaagttcacaccttgtcccacatcagagaattcacactggagagaaacccctcaaatgtaatgaatgtgaaaaagccttcaggcagcattctcaccttactgaacaccagagactccacagtggagagaaaccctatgaatgtcacagatgtgggaagaccttcagtgggcgcacagcttttcttaaacatcagagattgcatgctggagagaaaattgaagaatgtgagaaaaccttcagcaaggatgaggagcttagggaagagcagagaattcaccaggaagagaaagcttattggtgtaatcagtgtggtaggaatttccagggcacctcagacctcatcagacatcaggtaactcatacaggagagaaaccatatgaatgtaaagaatgtgggaaaactttcaatcagagctcagaccttctgagacatcatagaattcacagtggagaaaaaccttgtgtatgtagcaaatgtgggaaatcttttaggggcagctcagatcttattagacaccatcgtgttcatactggagagaaaccctatgaatgtagtgaatgtgggaaagcctttagccagaggtcacaccttgttacacaccagaaaatccatactggagagaagccctatcagtgcactgaatgtgggaaagccttcaggcggcgttcactccttattcaacatcggagaattcatagtggtgagaaaccctatgaatgtaaggaatgtgggaagctcttcatttggcgcacagctttcctcaaacatcagagcctgcatactggagagaaacttgaatgtgagaaaaccttcagccaggatgaggagcttaggggagagcagaaaattcaccaggaagcgaaagcttattggtgtaatcagtgtggtagggctttccagggcagctcagacctcatcagacatcaggtaactcatacaagagagaaaccatatgaatgcaaagaatgtgggaaaactttcaatcagagctcagaccttctgagacatcatagaattcacagtggagaaaaaccttatgtatgcaacaaatgtgggaaatcttttaggggtagctcagatcttattaaacaccatcgtattcatactggagagaaaccctatgaatgtagtgaatgtgggaaagccttcagccagaggtcacaccttgctacacaccagaaaatccatactggagagaaaccctatcagtgcagtgaatgtgggaatgccttcaggcggcgttccctccttattcaacatcggagacttcatagtggtgagaaaccctatgaatgtaaggaatgtgggaaactcttcatgtggcacacggctttcctcaaacatcagagactgcatgctggagagaaacttgaagaatgtgagaaaaccttcagcaaggatgaggagcttagaaaagagcagagaactcaccaggaaaagaaagtttattggtgtaatcagtgtagtaggaccttccagggcagctcagatctcatcagacatcaggtaactcatacaagagagaaaccatatgaatgtaaagaatgtgggaaaactcaatcagagctcagaccttctgagacatcatagaattcacagtggagaaaaaccttacgtatgcaataaatgtggggaatcttttaggagcagctcagatcttattaaacaccatcgtgttcatactggagagaaacctcatgaatgtagtgaatgtgggaaagtctttagccagaggtcccaccttgtcacacaccagaaaatccacactggagagaagccctatcagtgcactgaatgtgaaaaagccttcaggcggcgttcactccttattcaacgtcggagaattcatagtggtgagaaaccctatgaatgtaaggaatgtgggaaactcttcatgtggcacacagctttcctcaaacatcagagactgcatgctggagagaaacttgaagaacgtgagaaaaccttcagcaaggatgaggagcttaggggagagcagaaaattcaccaagaagagaaagcttattggtgtaatcagtgtggtagggctttccagggcagctcagacctcatcggacatcaggtaactcatacaggagagaaaccatatgaatgtaaagaatgtgggaaaactttcaatcagagctcagaccttctgagacatcatagaattcacagtggagaaaaaccttatgtatgcaacaaatgtgggaaatcttttaggggcagctcagatcttattagacaccatcgtgttcatactggagagaaaccctatgaatgccctgaatgttggaaggccttcagtcagaactcacaccttgtcagtcatcaaagaattcataccagagagaaaccctttgaatgtagcaactgtggtaaggccttcagtgggtggacagcttttcttaagcaccagaaacttcacattggaaaggaatttgaagactgtaagagtctacaaacaggacctattctaataggtagcagaaacctaatgaatgcagtaaaactaggaaaagtctgatggagaccacatcttattgcactacaaatgagttttattagaaaaaaaccatgggaaggtgggaaagcagagaaaatacctactggatttttcaaacgtaagtataatcaagtggaaaagccaaaagctcttggacataatcaccttttttttttctgtctcagaactgacactagaatatggtcccaacgatacaattttttaaattatttattttttaacatacaaagagatgaggtctcactatgttgcccaggctggacttgaactcttgggctcaagcactcctccctcctcagcctcccaaagggttgggattaccggcatgagccactgcaccagccccaggggtctaattacttgagaatgttttaagggatgtctatcattattaaaatcattataaatcactttggcaacaaccccaaaactaaattattcatggaaagagccatttcaatcttgacttcctagtcgagtgacaagtttaaatgtgggaaaaaaccctgtgaaagtaatgagtgtaggccaggtgcggtggctcgtacctgtaatccagcactttgggaagccaaggtgggcagatcacgaggtcacgagttgatcatgaggagttactatgcccagccaacatactaaaaccccgtctctactaaaaataacaaaaattagccaggcatggtggggcacgcctgtagtcccaggtacttgcgaggctagggcaggagaatcacttgaacctgggaggtggaggttgcggtgagccaagatcatgccactgcactccagcctgggcaacaagtgcgaaactccatctcaaaaaaaaaaaaaagtctaactcttctgcttgtctttacaatgctgtacagtgagagctaatgtttataaggataaacaggatacttacagggatttgaaggtaatttaattcagtggtttccaactttttaatcaccaaggccttctttttactcccctatgtcctgtgtcttaaaagattatgtttaccaaactgcatttattaaagaattatattttgctacataaaggcatgtacaacacaaatcatgcttctgactggcaccatgtaggcagacctaggtactaaaattccagcccaaagcaaataatttaccattttcattagtctttttattccttttgtgggcaaacatatcgtctatgttaggctttttgaaatattaactatgacttgtaaactccagattaaaaactaaccaattcatctttgatggagcttgaatcaaactaagggtattggacttttgaaagattgaaatttttgttacagtatggaatgtttttaactgaatgttgaaataaaagttatttaagaatt

SEQ ID NO: 32390 - DNA, 6622 bp, Homo Sapiens
atgggtcgcatggaaatggagcttgattatgctgaagatgctaccgaacggcgccgtgtcctagaagtagaaaaagaagacacagaagagctgagacaaaagtacaaggattatgttgacaaagagaaggcaattgccaaagccttggaagacctcagagccaacttttattgtgaactgtgtgataagcaatatcagaaacatcaggaatttgataaccatatcaactcctatgatcatgcacacaagcagggccatgaaggaatgcaaagcctcacatactactttcagcaggctgaccagataaaagtggtcagactgagattaaaagatctgaagcagagagagtttgctcgaaatgtctcttcaagatcccgcaaggatgagaaaaaacaggaaaaagcccttcggcggctccatgagttggcagagcaaagaaaacaagctgaatgtgcacctggaagtggtcccatgttcaaaccaaccacagtggctgtagatgaagaaggtggagaagatgataaagatgaatcagctacaaatagtggcacaggtgccactgcttcttgtggcctgggatctgaattctccacagataaaggaggccctttcactgcagtacaaatcactaataccactggactggcccaggctcctgggttagcctcccaaggcatcagctttggcattaagaataatctggggaccccattgcaaaaattgggagtgtcattttcttttgccaaaaaggctcctgtcaaactcgaatcaatagcatcagttttcaaggaccatgcggaggaagggacctctgaagatggaacaaaacccgatgagaagagttctgaccaaggactgcagaaggtaggagactctgatgggagcagtaatcttgatggtaaaaaagaggatgaagaccctcaggatggagggtcccttgcctcaacattatccaaattaaaaaggatgaaacgagaagaaggagctggggctacagagcctgagtattaccactacatccccccagcacactgcaaagtaaaacctaattttccctttctactttttatgagagccagtgaacaaatggatggtgataatactacacacccaaagaatgccccagagagtaaaaaaggcagttctcccaagcctaaaagctgcatcaaggcggcagcaagccaaggagcagaaaagacagttagtgaagtctctgagcagccgaaggaaaccagcatgaccgagccctcagaaccaggaagcaaagctgaggcaaagaaggccttaggaggggatgtaagtgatcagagtttagaaagtcatagtcagaaggtttcagagacccaaatgtgtgagtccaactcttctaaagaaacctctctggccaccccagcagggaaagaaagccaagaaggacccaaacatcctactggtcccttcttcccagttttgagcaaagatgaaagcactgccctccagtggccatcagaactattaattttcaccaaggcagaaccctccatttcatacagttgtaaccctttatattttgactttaaactttcaaggaacaaagatgccagaactaaaggaacagaaaaaccaaaggatataggaagctcctcaaaggaccatctccaaggcctagatcctggtgagccaaataaaagcaaggaagtgggcggagagaaaatagtacgttcctcaggaggcagaatggacgcacctgcttcagggtctgcctgtagcggcctgaacaagcaggagcctgggggtagccatgggtctgagacagaagacacagggagaagccttcccagcaagaaagaacgatctgggaagtcccaccggcacaaaaagaaaaagaagcacaaaaaatccagcaaacacaaacgtaaacacaaggctgacacagaagagaaaagctctaaggcagagtcaggggagaaatctaagaagcgcaagaaacgaaaacgaaagaagaataagtcatcagccccagcagattctgaacgaggacccaaaccagaaccccctgggagtggcagtcccgcaccaccaagaagaaggcggagagctcaagatgactcccagcggagatccctcccagctgaagaggggagcagtggcaaaaaggatgaaggtgggggtggtagcagctcccaagaccatggtgggaggaaacacaaaggtgaacttccaccttcatcctgccagcgaagagcaggcaccaaacggagcagccggtctagccatcggagccaacccagtagtggagatgaggatagtgatgatgcttcctcacaccggctgcaccagaagtctccatcccagtacagtgaggaagaagaagaggaagattcaggcagtgagcattcccgcagccgctcaaggtctggccggcgccattcctcgcatcgttcctcccggcgttcttactcaagtagctcagatgcctcttcagaccagagctgctatagtagacagcgcagttactctgatgacagctacagtgactacagtgacagatcacgaaggcactccaagcgctcccatgactcagatgactcagactatgccagctccaaacaccgatcaaaacggcacaaatattcatcttctgatgatgactatagcctcagttgcagccagtcccgaagccgatctcggagtcataccagagagcgctcaagatcccggggccgcagccgcagcagcagttgtagtcgtagtcgaagcaagcggagaagccgtagcaccacagcccacagctggcaacggagccggagctatagccgggaccgcagccgcagcaccaggagcccttcccagagatcaggctccaggaagagatcatggggtcacgagagccctgaggagaggcattctgggcgtcgggacttcattcgttctaagatctaccgctcccagtccccccactatttccgatcaggccggggagaaggtcctgggaagaaagatgatggcagaggagatgacagtaaagcaacaggtccaccttcccagaacagcaacattggcacaggaagagggtcagaaggtgactgcagtcctgaagacaagaactctgtcactgccaaactgctactggagaagatccagtcaaggaaagtggagaggaaacctagtgtgagtgaggaggtgcaggccacccctaataaagctgggcccaagctcaaggaccccccacaaggttactttgggcccaagctccccccatctcttggcaataagcctgtccttccactgatagggaagctcccagctacccgaaagcccaataagaagtgtgaagagtctggcttggaaaggggggaagagcaagaacagtcagagacagaagaggggcccccagggagtagtgatgccctatttgggcatcagttcccttcagaggaaacaactggccccttattagacccacccccagaagagtcaaagtctggagaagctactgctgatcaccctgtggctccactaggcaccccagcacattctgactgctaccctggggacccaaccatctcccataactacctccccgaccccagtgatggggacaccctggagtccctggatagcagcagtcagccaggccctgtggagtccagcttgctgcctatagcaccagaccttgagcatttccccagttatgcacctcccagtggggatcctagtattgagtcaacagatggggctgaggatgcttcactggcccccctggaaagccagcccatcaccttcacccctgaggagatggagaagtacagcaagctccagcaggctgctcagcaacacatccagcagcagcttctggccaagcaagtaaaggcctttccagcctcagctgccctggccccagccacaccagccctgcaacccatccacattcagcagccagctacagcctctgccacctccatcacaactgttcagcatgccatcctacaacatcatgctgccgcagctgctgccgccatcggcattcaccctcacccccatccccaaccacttgcccaggtgcatcatattccccagccccatctgacccccatttctttgtcccacctcactcactcaatcatccctggccaccctgccacctttctcgctagccatcccatccacatcattcccgcctcagccatccatcctgggcccttcacctttcaccctgtcccacatgctgccctctaccccaccctacttgctccacggcctgctgcagcagctgccactgcacttcaccttcacccactacttcaccccatcttctcaggtcaggacctgcaacatccccccagccatggcacgtgagttgggggatgggatcctaggtagggccaggggaggagacccataaatgttcccttgggggtgttgagccattaataccagcaagtagaagctgggatgggcagtgtctgacagccaaagaattgagttttggcttgcaggggtgggtttagatttgaagtttgctttcagtttactatcagggatttctttttcctgtcctcctctcaatttgtccctccctcttctgtgtttctaagctagggaacaccagtaagtgctacccacccctctgcagcaacatctccaaactgtcaagtttagataatcccctcctccctctgcttttttcctctgctcttcccttctgtaaattttaaaacattttcctcccctctggccagtgggttgtcaccagagcacttgctgtgggcccatctggtcttgccttctcagcgccacagggaaggccaagctgttctagtggtggaagtgccaccattttggggtagtatctttgaccatctttggtgacgttacgttatcccaggtgaggtggaaagcgtctcacctggaacctgatataactcaggctgcaattccatccagttcccacatcaacggagccacacatttggcactgttatcttggtatccctcatcccagaagaggcatctccatatcccagaaaagaagatcctatcatgaataaaagctgtatggcccagagaggagctcatgtgtctaaagtgaagggtatattttcttctgttgtgttgatgtttccttcttaatttataggatttttttaatgtaaaaaattgcactgaactctataaacgtaaatgctgctttttgtagctcatataaaaaaggttccatatttgtagtatactgcaataatattttttacatccagctctttaagtgatcctcgttctggtggctttgtgtaaatatgtttgccctagttgaattaagaaactctaaaggttataaaatgaaaacaaaaaataaaatatttgttttctgctagatgcaaaactgactaagcatgtatattttaccaaacttatgtattttttgaagttatgaactataaaatgttaaaacattttttgctgggacaaaatgttaagtaatttgcagtatgtagtgcccccagtattgggatttttgagctaatgggcagcagtcagctgggggcttctgagggatgctcatctttaacagtctccctcatgtacttttgctgttttacacagagaaacaggtagaccccacagaggagaaggaggggattcaacagctttattgtctggaagcagtgagatttggtgattgtctggggggattcctgggtttccctgggtaccttgttccaggcagtcagtccatttgccttcctagtacttagccccctctgacaattttttttttaatgtgccttttgggttggtagaaacggaagtagaagtaggctggaggatgagttgggacagtcttccttttgttgggaggtgagcacatttacagatattttgcttcatagtttccatgccctctgcccagctcagtttagacagtaaacgttccttgtttcttttctcccatgacactgacaagaggaattaccacctcagcctcttttgcccctcttcttgcctttcacccaggctctcagccctaattaacacactgacccaaaggtgcttgtgttgcaggtcccatctcctttgatgaggttaacaattcccactttggcattttcctaactattcgtgtggctagaattggttggttggtcacttgacaagaaaaaccatacttacctgggccaaggctctgttcctgccttcgcaaattctcaaaagagtaaagtttatgaaaagaaagtggcaggcaaacacaactcttgactgccctcccaccctcctacctgttcagtactcatctgattcagaagcatcacttcttggataactagcactggaaaaatgaaatcatctgtgtaagtgaagggactcatttttctttgctttcagcccatgtaaataaataatacagtattaacattttcgtgctgcttcccattagcttgtagattgagccatactctggctgcctctttgccttcctaggggcattttctttaacttccagaatagtgattttaaaagtaaaaataaaaataaaccttacttacaagcataacagattgtatttaactttatcacatatgatagagatatatatgctgtaaaatgagggaaaggaactttctaataaaccaatgatttgtgg

SEQ ID NO: 32391 - DNA, 3156 bp, Homo Sapiens
ctggacccctgccagggaaggggtcctcagacttgaggttgccagctcagatgtggggctgctgatactaggtgactggactgatgttctgttctagatgaaactccttgaggggaccatttgaaaaggcttgatgtgctgcccaaagcccccttcagagctgacttctccacccccagctgccgtgagccttggctgctgacagctcatagctgagtccctcccgtgaagtcaccttctgctgaagggcgaagctggtccgttacatttgtaagcagaggcagtgcaagctgagcgtggctcccggtgagaggaccccagagctcaacagctacccccgcttcagcgactggctgtacactttcaacgtgaggccggaggtggtgcagcccacacaagatgtgatcagctatccattgttactgagagatgggagttttaaatttttcaacaccaagcaagtacagaagtgttagaaagcaagcaaaggccctcctcttccacttcgcggggataacaccttgttaacaggagatcccccgagacctcacgctggatgccctgctggagatgaatgaggccaaggtgaaggagacgctgcggcgctgtggggccagcggggatgagtgtggccgtctgcagtatgccctcacctgcctgcggaaggtgacaggcctgggaggggagcacaaggaggactccagttggagttcattggatgcgcggcgggaaagtggctcagggccttccacggacaccctctcagcagccagcctgccctggcccccagggagctcccagctgggcagagcaggcaacagcgcccagggcccacgctccatctccgtgtcagctctgcccgcctcagactcccccacccccagcttcagtgagggcctctcagacacctgtattcccctgcacgccagcggccggctgaccccccgtgccctgcacagcttcatcaccccgcccaccacaccccagctgcgacggcacaccaagctgaagccaccacggacgccccccccacccagccgcaaggtcttccagctgctgcccagcttccccacactcacccggagcaagtcccatgagtctcagctggggaaccgcattgatgacgtctcctcgatgagctccatgtgttctcaggggcagtggctgccccctggggaggctcaggatctctcgcatggatccccacagatggtacggagggatatcgggctgtcggtgacgcacaggttctccaccaagtcctggctgtcgcaggtctgccacgtgtgccagaagagcatgatatttggagtgaagtgcaagcattgcaggttgaagtgtcacaacaaatgtaccaaagaagcccctgcctgtagaatatccttcctgccactaactcggcttcggaggacagaatctgtcccctcggacatcaacaacccggtggacagagcagccgaaccccattttggaaccctccccaaagcactgacaaagaaggctcttgctcggagctgtgagatgctggtgccgttctcaggggtctcctctgtgctgtggctggggagccatggccacaggcatcctgaagccgggatcatgccaggcccatctcccatgaccgtgggcaaagcccttggcttccctgggcccttctcccctgagctctgcagtggggccatggagcaccctccggccatgaatcacctggactccagcagcaacccttcctccaccacctcctccacaccctcctcaccggcgcccttcccgacatcatccaacccatccagcgccaccacgccccccaacccctcacctggccagcgggacagcaggttcaacttcccagctgcctacttcattcatcatagacagcagtttatctttccagtgccatctgctggccattgctggaaatgcctccttattgcagaaagtttaaaggaaaacgctttcaacatttcagcctttgcacacgcagccccgctccctgaagctgccgacggtacccggctcgatgaccagccgaaagcagatgtgttggaagctcacgaagcggaggctgaggagccagaggctggcaagtcagaggcagaagacgatgaggacgaggtggacgacttgccgagctctcgccggccctggcggggccccatctctcgcaaggccagccagaccagcgtgtacctgcaggagtgggacatccccttcgagcaggtagagctgggcgagcccatcgggcagggccgctggggccgggtgcaccgcggccgctggcatggcgaggtggccattcgcctgctggagatggacggccacaaccaggaccacctgaagctcttcaagaaagaggtgatgaactaccggcagacgcggcatgagaacgtggtgctcttcatgggggcctgcatgaacccgccccacctggccattatcaccagcttctgcaaggggcggacgttgcactcgtttgtgagggaccccaagacgtctctggacatcaacaagacgaggcaaatcgctcaggagatcatcaagggcatgggatatcttcatgccaagggcatcgtacacaaagatctcaaatctaagaacgtcttctatgacaacggcaaggtggtcatcacagacttcgggctgtttgggatctcaggcgtggtccgagagggacggcgtgagaaccagctaaagctgtcccacgactggctgtgctatctggcccctgagattgtacgcgagatgacccccgggaaggacgaggatcagctgccattctccaaagctgctgatgtctatgcatttgggactgtttggtatgagctgcaagcaagagactggcccttgaagaaccaggctgcagaggcatccatctggcagattggaagcggggaaggaatgaagcgtgtcctgacttctgtcagcttggggaaggaagtcagtgagatcctgtcggcctgctgggctttcgacctgcaggagagacccagcttcagcctgctgatggacatgctggagaaacttcccaagctgaaccggcggctctcccaccctggacacttctggaagtcagctgacattaacagcagcaaagttgtaccccggtttgaaaggtttggcttgggcgtcctggagtccagtaatccaaagatgtag

SEQ ID NO: 32392 - DNA, 4935 bp, Homo Sapiens
atgtctgaggggccgccccggagggggaggcgtcagccctgcgagactcgcgggcgtgtcggggctcgggcgccttcagccgggaggcgcaggaggcgcggagccaatccagccgtcctgccgccgtccgcgcgggccgtccgtcccttcggggcccccgggccccgggcccgcggctccggggggcgggcggggacccccggggcccgccggccgcccggggggtcgaggacgccgtctgccgggcgcctagcagcggccccgggcccccgcgcggcgcgcgcgtctccggaagcccggcctggggcgtactggggccggggcagtggccgggcccgggagcccccgccggccgcggagctggtgggcagcgccgtgtggcgcgtggagcgcgcgggggccgggggctggcgctgggagcgcgccgtcggcgtggactgcagcgccccggaaccgcgctgcctctggctgccctgcctcagccacagcgaccgccgcgcgcccgggccgcgccgggccaggctgccactgggcccaagagatgggtgctctcctaggcgccccttcccctggcaggggccgaggacgctgctgctgtacaaaagtccccaggacggctttggcttcactctgcgccacttcatcgtgtacccacccgagtcggccgtgcactgcagcctgaaggaggaagagaatggaggccgtggaggaggaccctccccccggtaccgcctggagcccatggacaccatctttgtcaagaatgtgaaggaagacggccctgcccatagggcggggcttcgcacaggagaccggctggtaaaggtgaatggggaaagcgtcattgggaagacctactctcaggtcatagctctgatccagaatagtgatgacactctggagctgtctatcatgcccaaggacgaggacatcctccagctggcctactcccaggatgcctacctgaaagggaacgagccgtattctggagaggcccgcagcatcccagagccaccgccgatctgctacccccgcaagacctacgcccctcctgcccgggcctccaccagggccactatggtgcctgagcccacctcagcactgcccagtgacccccggagtcctgctgcctggagtgacccggggctccgtgtgccacctgctgcccgtgcccacctggacaactcttccttggggatgagccagccccgccccagccctggtgccttcccccacctctcctcggagccccggacgccccgtgccttcccagagcctggcagccgggtgccccccagcagactggagtgccagcaggccttgtcacactggctgtcaaaccaggtaccccgccgggcgggggagagacggtgcccagccatggccccccgggcccgcagcgcctcccaggaccggttggaggaggtggctgccccccgcccgtggccctgctccacctcccaggatgctttgagccagctgggccaggagggctggcaccgagctcgctcagatgactacttgagccgggccacccgttctgccgaggcactggggccaggggcactggtgtcaccccgctttgagcggtgtggctgggcttcccagcgttcgtctgcccgcacccccgcctgcccaactcgggacctgccagggccccaggccccacccccgtctggcctgcagggcctggatgacctcgggtacatcggctaccggagctacagcccatcattccagcgccggaccggcctcctccatgcgctctccttccgggactcaccctttggggggctgcctaccttcaacctggcccagtcccctgcgtcattcccaccagaggcctccgagccacccagggttgtacggccggaacccagcacccgggccctggagcctcctgcggaggatcgcggcgatgaggtggtcctgaggcagaagcccccgacgggccgcaaggttcagctgacccccgcaagacagatgaaccttggatttggtgacgagtccccagagccagaggccagtgggcgaggggaacgcctgggcaggaaggtggcccctttggccaccaccgaagactctctggcttccatcccctttattgatgagcccaccagccccagcattgacctccaagccaagcacgtccctgcctctgctgtggtctccagtgccatgaactcagcccctgtcctgggcaccagcccatcttccccgaccttcactttcaccctcggacgccattactcgcaggactgcagcagcatcaaggctggccgccgctcctcctacctgctggccatcaccacggagcgctccaagtcctgcgatgatggactcaacaccttccgcgacgagggccgggttctgcggcgcctgccaaaccgcatacccagcctgcggatgctccggagcttcttcaccgacgggtccttggatagctggggcacctctgaagatgctgacgctccttctaagcgacactcaacctctgacctctcagatgcgaccttcagcgatatcaggagagaaggctggttgtattataagcagattctcaccaagaaggggaagaaagcgggcagcggcctgcgccagtggaagcgggtgtacgccgcgctgcgggcgcgctcgctctcgctgagcaaggagcggcgggagcccgggccggcggcggcgggggctgcggcggccggcgcaggtgaggacgaggcggcgcccgtctgcatcggctcctgcctcgtggacatctcctacagcgagaccaagaggaggcacgtgttccggctgaccaccgctgacttctgtgaatatctctttcaggctgaggaccgggatgacatgctgggctggatcagagcgatccgggagaacagcagggccgagggcgaggaccccggctgtgccaaccaagctctgatcagcaagaagcttaacgattatcgcaaagtgagccatagctctgggcccaaagctgattcctcccccaaaggctctcgcggcctggggggcctcaagtctgagttcctcaagcagagtgcggcacgtggcctcaggactcaggacctgcccgcagggagcaaggatgacagtgctgcagcccccaaaaccccctggggcatcaacatcatcaagaaaaataagaaggccgctccgagggcgtttggggtcaggctggaggagtgccagccagccacggagaaccagcgcgtccccttaatcgtggctgcatgctgtcgcattgtggaggcacgagggctggagtccacaggcatttaccgagtgcccggcaacaatgcagtggtgtccagcctacaggagcagctcaaccgcgggcctggtgacatcaacctgcaggatgagcgctggcaagacctcaatgtgatcagcagcctgctcaagtccttcttccgaaagctgcccgagcctcttttcactgatgacaaatacaacgacttcatcgaggccaaccgcattgaggacgcacgggagcgaatgaggacgctgcggaagctgatccgggatctcccaggacactactatgaaacgctcaaattccttgtgggccatctcaagaccatcgctgaccactctgagaaaaacaagatggaaccccggaacctggccctggtctttgggccgacactggtgaggacgtctgaggacaacatgacagacatggtgacccacatgcctgaccgctacaagatcgtggagacactgatccagcagtcagactggttcttcagtgacgaagaggacaagggagagagaacccctgtgggcgacaaggagcctcaggcagtgcccaacattgagtacctcctgcccaacattggcaggacagtgccccctggcgacccggggtcagattctaccacctgtagttcagccaagtccaagggttcgtgggcccccaagaaggagccgtacgcccgggagatgctggcgatctccttcatctcggccgtcaaccgcaagcgcaagaagcggcgggaggcgcgggggctgggcagcagcaccgacgacgactcggagcaggaggcgcacaagcctggggcgggggccacagcgccggggactcaggagcggccgcaggggccgctgcctggcgccgtcgcccccgaggcccccggacgcctcagtcccccggcggcgccggaggagcggccggccgcggacacgcgctccattgtgtcgggctactccaccctgtccaccatggaccgcagcgtgtgctcgggcgctagcggtcggcgggcaggggcgggggatgaggcggacgacgagcgtagcgagctgagccacgtggagacggacactgagggcgcggcgggcgcggggcctggggggcgcctgacacgccggccgtccttcagctcgcaccacctcatgccctgcgacactctggcgcgccgccgcctggcccggggccgcccagacggcgagggcgcgggccggggcggtccccgcgccccggagccgcccggctcggcgtcgtccagcagccaggagtcgctgcggcccccggcggcggcgctggcctcccggccctcgcgcatggaggcgctgcgtctaaggctccgcggcacggcggacgacatgctcgccgtgcgcctgcggcggccgctgtcgcccgagacccggcggcgccggagcagctggcgccgccacaccgtggtggtgcagagcccgctgactgacctcaacttcaacgagtggaaggagctgggcggagggggccccccggagcctgcgggcgcgcgggcgcacagtgacaacaaggactccggactcagcagcctggagtccaccaaggcgcgggccccgtcgtccgctgcctcgcagccgcccgcgcccggggacacggggtccctgcagagccagcccccgcgccgctcggccgcctcccgcctgcatcagtgtctgtga

SEQ ID NO: 32393 - DNA, 4559 bp, Homo Sapiens
atggtctttcagttgaagtgtggttcagggccagtgtatattagtggacagcacttagtatctgtggaggaagatgcagagtcagaagatgaagaagaggaggatgtgaaactcttaagtatatctggaaagcaatctgccctggaggtggaagcaagattccacaaaaaagacgatgctgtggaacccgaaccgcaccggagtcggctgccgcgcgccaagcctcccctcacctctgctcccggaaccgcagcgccaaagctgccgctgagcccctgggggatgcccgccggcctcaccgaacccgccggcgccgctcccccggctgctgtgagcgcctcggggaccgtgaccatggccccggccggggcgctgccggtgcgggtggagagcactccggtggccctgggcgccgtgactaaggctcctgtcagcgtctgcgtggagcccacggcgtcccagcccctgcggtcccccgtggggaccctggtgaccaaagtggctccggtcagcgcccctcctaaagtcagcagcggccctaggctgcctgctcctcagatagtcgccgtgaaagcccccaacaccacgacaatccagtttcctgctaatttgcagcttcctccaggaaccgttttgattaaaagtaacagtggtccgttgatgttggtatctcctcagcaaactgtaacaagagccgagaccacaagtaacataacctcaaggccagcagtaccagcgaatcctcaaacagtcaaaatctgtacagtgccgaactctagctcacaattaatcaagaaagtggcagtgacacctgttaaaaaattggcacaaataggaactactgtggtaaccactgttccgaagccttcctcagtacaatctgtggctgtgccaaccagtgtcgtcacagttactcctggaaagccattgaatactgtaactaccctgaagccttcaagtttgggagcatcatccactccttcaaatgagcccaatcttaaagcagagaactcagcagctgttcagattaatctttctccgacaatgctagaaaatgtgaagaaatgcaagaacttccttgcaatgttaataaaactagcatgtagtggatcacagtccccagaaatggggcaaaatgtgaagaagctggtggaacaacttttggatgcaaaaatcgaagcagaagaatttactaggaaactgtatgttgaactcaagtcttcacctcagcctcacctggttccttttcttaagaaaagcgtggttgccttacgacaacttctgcctaactcccagagcttcatccagcaatgtgttcagcagacttctagtgacatggtcattgctacctgtactacaacagtaacaacttctcctgtggtgacaactacagtgtcctcaagccagtctgaaaagtcaattattgtttctggagcaacagcacccagaactgtgtcagtgcaaactttgaacccacttgctggtccagtgggagcaaaagctggagttgtgacacttcattctgtgggcccaactgctgcaacaggaggaacaacagctggaactggtttgcttcagacttcaaaaccacttgtgacatctgtggcaaacacagtgaccacggtctcactgcaacctgaaaagccagttgtctctggaacagcagtaacactgtcccttccagcagtaacttttggagaaacttcaggtgcagctatttgtcttccatctgtgaaacctgttgtttcttctgctgggaccacatctgacaagcctgttattgggactccagttcaaatcaaacttgcccagccgggccctgtcctttcacaaccagctgggattccacaggcagttcaagtcaagcaactattctcattgtttcaggtagttcagcagccttcaggaggcaatgaaaaacaagtgaccacaatttcacattcctcaacattgaccattcagaaatgtggacagaagacgatgccagtgaacaccataatacctactagtcagtttcctccagcttccattctaaagcaaattactctgcctggaaataaaattctgtcacttcaagcatctcctactcagaaaaatagaataaaagagaatgtaacatcatgcttccgagatgaggatgacatcaatgatgtgacttctatggcaggggtcaaccttaatgaagaaaatgcctgcatcttagcaacaaactctgaattggttggcacactcattcagtcatgtaaagatgaaccatttctttttattggagctctacaaaagagaattttagacattggtaaaaagcatgacattacagaacttaactctgatgctgtgaacttgatctcccaagcaacacaggaacgactacgaggccttctagaaaaactgactgcaattgctcagcatcgaatgactacttacaaggcaagtgaaaattacatcctgtgtagtgataccaggtcacagctcaaatttcttgaaaagctggatcaattggagaagcagagaaaggatttggaagaaagagaaatgttacttaaggcagccaagagtcgttctaataaagaagatccagaacagctgagattaaagcagaaagccaaagagttacagcaattggaacttgcacagatacagcatagagacgctaatctcacagctcttgcagctattggaccaaggaagaagagaccactagaatctggaattgagggcttaaaagacaaccttcttgcttctgggacatccagcctgacagccaccaaacagttgcatcgtccaagaatcacgagaatctgcctcagggacttgatattttgtatggaacaggaacgggagatgaagtattctcgagctctatacctggcccttctgaagtgaccactccactcttccatccagatccttgctatttactgccaaagaagacacaaagcattgttgcactgtcctgaaatttcaatttctggaaaataatcaccaacatgaaagagcattgtttacagttagaaactttattaactcttacctatccatctcatgggactcttacagactcagattcatctttgtcttctgaaaatcagttatgaaatacactttgcacagaattaggcatctgcctatctgtgcattaaattaaagcaagttaaggccctatttgttactacctgcctcatttgccaaattgtagcaggtgaggtgtccttccctaatacagcatgcattgagatgcaggagaaaggaagaggcataagaaaatacaagaatgactatttcattctatattgaacctgtcccaaagtggtaggttttctgggctggaatcagaagttgcttagctaactatgacagtcaccctctgtacgtgacaggccactgtggtgactttggtcggctgagttccagtgttgtcaaaacaagacaaatggggatagattgtgcctggggttgctaattctctgcttcatatcaccatatgccgtttctggtaccaagtgaggggacatgcttgtcagggaaaccttaaaattgaatctactgatatatcttgttgaaaaaatggaaaaggtgcaaagtattagaaggaacgttagggcgttgctttcaaactgatgaggggaatgtgaaaatggtatcataaaacaggaaatgtgcttcatatgcccaagaggggaagaggtggaatcggaactccaaaacaactggtacatgttttgttgatgggcaaaaaaaatcacagcacaaccagaaaggagaatgtaccagatgttttcaaattagagtatttcaaaaggaaaatgttattttttgttttgtattgttttaaatcccaaggatagtttttatagttccttctgtcataatatattttagttatcctaatttttaagcatgttggcacatttaaaaaatcctaattgatgatgagaaatttttaacaataggactttatgttggattctgtacttaaaaggtactgtcaatatctcactcttggggatatgagctctaaatatgagaagcaagttatatgtgttcacctgaggaagaagctgacggacaaagcaaaccctctttaaaaaaaaaaaaaagaaaattccacgtgtgtggaatacagccggtgaaaaataatcactgtagttagaatcacatacagaaaaaaaatgattgaatcctccaagaaggtatttcaaaaatgggaaatgctatacttataagaattgaaggaaaaaaaaaaaaacacctcacgtatgttattcttcatcctgttcttcccattgggactgttatggccatattctacagtatagtaaattttaaattggccacatttttttttgtttcagcaagttatgtaaaatgctataaattatgtgtatgttaaaggagtactttaagaagagatctttatccaaagttgtttttgtatatttaaatgcttacctttattttttgtaaagtgcagcatactcatttgtgtataatcttactgatcagatgtttaaaattattccaaatacttcattaaaataattattttattataagaa

SEQ ID NO: 32394 - DNA, 2589 bp, Homo Sapiens
atgggagtggagagggaggtattcaaccagcaagaaatcggaaaacgcgcagagcggccgcggggtcacgggaaactgccggaggctttcagggcccagggcccggcggggaggcttcagcgggcctgcattttcttaggcatccgctccaggcggatccgcgtctggagggacggcgccgtcaccctggcgcccgcggccgacgacgcgggagagccgcccccagttgcgggtgaggccgccgggcccctttccctcgtagttcttggaacacccgcggctgggccgccttaccctcagcgtccccggcccttccgcccccgccgtccccccccattttgccacgggagacccccgggaggatccggcggggacccgcaggggaggacggcgtcaggccgtggctggccggggcccctcggaggtcagagcctcgtggcgggcgacggcgcaaatccgctgtgcggaggacgtttgggtgggcctgggcctgcgggccgcggggcgctcgtcattgtgctgcccgcgggacagctgcccgcggcgcgtttgggagcggtcattgaatctttgggaattattatttataaagcactggactatggtttgaaggagaatgaagaaagggaattaagccctcccctagagcagcttatcgatcacatggccaacacggtggaagctgacggtagcaatgatgagggctatgaggctgcagaagaaggcctgggagatgaagatgaaaagagaaaaatctcagctattcggtcatatagagatgtcatgaagttgtgtgctgctcatctccctactgaatcagatgcaccaaatcattatcaggcagtatgtcgtgcactgtttgcagaaacaatggagctccatacatttctgaccaaaattaagagtgcgaaagagaatcttaagaagattcaagaaatggaaaagagcgatgaatctagcacagacttggaagagctgaaaaacgctgactgggcacgattctgggtacaggtgatgagggatttgaggaatggggtaaaacttaagaaggtccaagagcggcagtacaaccctttgcccattgaatatcagctcaccccttatgagatgttaatggatgacattcgctgcaaaagatacaccttgcgaaaagtgatggtgaatggtgatattccccctcggttaaaaaagagtgctcatgaaatcatcctcgacttcatcagatccagacctcctttaaatccagtctcagccagaaaactgaaaccaactccaccacggccacggagcctccatgaaagaatattagaagaaattaaagcagaaagaaagctgcggcctgtatcaccagaggagattagacgtagcagattagatgtgactacccctgaatctacaaagaatcttgtggagtcatctatggtgaatggaggtttgacatcacaaacaaaagaaaacgggttaagtacctcacagcaggtgcctgcacagcggaagaagctcctcagagccccaactctggccgaactggacagctctgagtctgaggaagaaacgctgcacaagtcgaccagcagcagcagcgtgtctccctctttccctgaagagccagtcctggaggccgtgtccacaaggaagaagcctccaaaattcctgcccatatcatcaacaccccagccagagagacggcagccaccccagagacgacattccattgaaaaggaaacgcctactaacgtgaggcagttcctgccgccttccaggcagagttcccgctctcttgttcctaggataaccagtgtatggccaaggacgccttttcgaccacttttttctaccatacaaacagcttctctgctcagctctcatccttttgaagcagccatgtttggggtagcaggggctatgtattatctgtgtgagagagcttttaccagcaggtggaaatcctcaaaggaggaattctgctacccagtggaatgcctcgctcttactgtggaagaagtgatgcatattcgccaggtcctggtgaaggcagagctggaaaaataccaacagtataaagacatctacaccgccttgaaaaaaggaaagctctgcttttgttgccgaaccaggaggttttccttcttcacttggtcttatacctgtcagttctgtaagaggccggtgtgctcacagtgttgcaaaaagatgcggctgccctccaaaccatactccactcttcctatcttttcattgggaccttctgctctgcaaagaggggaaagtagtatgaggtcagaaaaaccctccactgcccatcatcggccacttcggagcattgccaggttctcctcaaaatctaagtctatggacaaatcagatgaagaactccagtttcccaaagagttgatggaggactggagcaccatggaggtgtgtgtggactgcaagaagttcatttcggaaatcatcagttcaagccggcgcagtctggtgttggccaacaaaagggcccgattgaaaaggaaaacgcagtctttctacatgtcctcgccaggcccctcggagtactgcccttcagagaggacgatcagtgagatctga

SEQ ID NO: 32395 - DNA, 4495 bp, Homo Sapiens
ggtcggtgcgggaggagggaggggagcttgcgggcccgagagggggcgacggcggcggcggtggcctgaggaggcccgagcggcggcggtggcggcgaaggccgaggcgtctaggtgtttttggaagagctgcagcctttgaagaaacatctcttgatgatgatatcatagactccttcctactgggcagatgaggcagaatggggcacagtagttccagcaaaaatccagagaggactatccttggccaggctttaccccatgtccacttctggagccaagaaagacagttccttctccaaggggaacccagggtgttgatactagaagatggaaatggatacagtaagatgctgccacagtgagatgcctcacccaggtctccctctgtcacttcagccaagcacatgggatagaaagtagcaggcggcctctggccctttaatggaagagggccatccagtcctctccagttaacatctagaccgaacacaaagcatccttctctcatccagaagacataggaaccctaccttcagggatgatttttttttaacagtgaaatcttaaaagtaactgtttcactaaagcctccagtatttactgaagactgtcagaatcatcctccatcactagatcttctccaccagtcatgttccctgagcagtggggtggcttgaaggtataaaccagagaggcccaagggagggatagttagcagacttctggtctttttctagtttgtgctcttctgttccaaggaccacaggattcttctcatcgcagtgctccaggcagccactaccaatcgattggagttagcctgtgaggaaactggagaggcgtggctggaccaagacctccccccatgtgagcaggcttcctcctcccccaacaaccgttgccaccacgcccagaaacgtccttaagccctggccctcaggggaaaggtaacaggaggccagagccgggaccatgtgacggcgctggccctcgccaccgccgtcccccgaccctggccccaggcccggcaccatgatgttccgagaccaggtgggcatcctcgctggctggttcaaaggctggaatgagtgtgagcagacagtggccctcctgtcacttctgaaacgggtcacccgtacccaggcccgcttcctgcagctctgcctggagcactcactggcggactgcaatgacatccacctgctggagtcggaggccaacagtgctgccatcgtcagccagtggcagcaggagtccaaagagaaggtggtgtccctcctgctgtcccaccttcccctgcttcagccaggcaacacagaggccaagtcggagtacatgaggctactgcagaaagtgctggcctactcaatcgagagcaatgctttcatcgaggagagtcgccagctgctttcctatgccctcatccacccagccaccacactggaggaccgcaacgcactggccctctggctgagccacctggaagagcggttggctagtggcttccgctcccggccagagccctcctaccattcacgtcaaggctcagatgagtgggggggccctgcagagctaggccctggggaggcagggccaggctggcaggacaagccaccccgggaaaatggacacgtgcccttccacccatccagctcagtgccgccagccatcaacagtattgggagcaatgcaaacacaggtctcccctgccaaatccaccctagcccactgaagcgctccatgtcactcatccctacaagcccccaggtccctggtgagtggccgagtccagaggagcttggggcccgggctgcttttaccacgcccgatcacgcacctctctcgccccagagcagcgtggcctcctctggcagtgagcagacagaggagcagggctccagccggaacaccttccaggaggatggcagtggcatgaaagatgtgccctcatggctcaagagcctccgtttgcacaagtatgcagccctcttctcacagatgagctacgaggagatgatgacactgactgagcagcacctggagtctcagaacgtcaccaaaggtgcccgccacaagatagccctgagcatccagaagctgcgtgagagacagagcgtcctcaagtccctagagaaggatgtgctggaaggcgggaacctacgaaacgctctgcaggagctgcagcagatcatcatcactcccatcaaggcctacagtgtcctccaggccaccgtggctgccgccaccaccacccctactgccaaggatggggccccgggggaaccaccgctgccaggtgctgagcctcccctagcccaccccggcacagacaaaggcaccgaggccaaggaccctccagctgtggagaactacccacctccaccagctccagctcccactgatggcagtgagcctgccccggctcccgtcgccgacggagacatccccagccagtttacacgggtgatgggcaaagtgtgcacccaactgctggtgtcccgaccagacgaggagaacatcaccagttacctccagctcatcgaaaagtgcctgactcatgaggctttcacggagacgcagaagaaacggctgctatcctggaaacagcaagtgctgaagctcctccggacattcccgcgcaaagccgcactagagatgcagaactaccggcagcagaaaggctgggcattcggctccaactcgctccccatagctggctctgtggggatgggagtggcccggcgtacccagcggcagttcccaatgcctccccgggccctcccacccggccggatgggcctcctgagcccctcgggcattgggggtgtctcccctcgacatgccctcaccagccccagccttggaggccagggccgacagaacctgtggtttgccaaccctggaggcagcaacagcatgcccagtcagagccgcagctctgtgcagcgcacccactcgctcccggtccactcgtcaccccaggccattctcatgttccctccagactgcccggttcctgggcctgacctggagatcaatcccactctggagtctctgtgtctgagcatgacagaacacgccttgggtgatgggacagacaaaacctccaccatctgacgggacccacagcccagcgcacccataggctccctgggcggcgggcgggggccaacccccaacgggcttctccgcgacagcgagagggtgggctggctcagctatatattctaatatttttctactctcttaccctcttaacttttgtttaacattggcacatgccttgctcactcccaggcccgtcgagggatctctgctgaggcccggggagttgggggcagccaggataaagggggcagggactggccagactgcctgcctctctcctttccttcctcatccccacctggtcccatcccacccctgcctcctccagaccgctgaccacctgcctctccccaagggagcagactccccagagacaaactgaccactaccttgtggagcctgctcagaaacatttgacatttggggtgacgcgcagggcagagaacctgccctccagaatgttattgagaggagctggggagaaggaaggggagcaaggagaggaagctctctctcctctccctgcttccccttcaccattccccacattctgcaaggacaggagccaccttcctctctctcacctcccctggccctgttcaccagaggttctctatgattaatttcttaggcctatttaagatacatatttatatagttcttaacggtttttctctgatcatttcctctcatttttagaatccccaggtctctctcagccaagacagtggcagggagagcctgaactttatgaggggagagggcagagccccctcctccagaccctcaagctctaacccattttcctccagccctggctacccggatgaagaggttggaggtgggcagccagggtagccagtgaggtcaggaagtctgttgccttaacgtccccttccccacgaacacacacccttctccgctcccaggtctggttggtgagacttgggagtcaggaataagggaaaggggattgtttggtttttgggtttttccctaagcccctcccttttctttcagcctttttccttcccccattatgtcatgacctcacttaagtggaacactatatcataacccagagattcgtcccagccccagagtccgacagactgtctggtccctattcctaatgaggggttgtgttggggcccaggtggagggaggggatttgggggttcagactgcggggaagccagggtctccctcttcaacgccctcctccccctcaacccaccttcccaactgggacattctcaagcttttcacaccgaaaaggaaaaaaaatgttatttttagatacattttatgaataacttttgttatgaatatggctggtaaccattgtgtatgttattaaagatacaaaatgttgggaaaaaaa

SEQ ID NO: 32396 - DNA, 5173 bp, Homo Sapiens
atctctcgattccgtccggttctgagtcggggcctggcccagcccaggagacctctgggagcgctgcccgcggaaggagtgcgcaggcgcggaatctccgacttgccatggtcgtctttgtctgccggcctgcttccttgtatatccacaggagctgcaaaacctcttagagttctaagggcgctccctgaattttgggatgctgctttgttccccaaccataacatccaagtccagtgtcatttttctgctcacaagtttaaagtcagcacttaaaagaacagcaacagatgattgagaaagaaatgtaaagaaggttctctttgtgtgagtaagcaagaacctgaaaataattcttccgggccgggtgcggtggctcatggctgtattcccagcactttgggaggccaaggcgggtggatcatgaggtcaggagttcaagaccagcctggccaacatgaagaagcctgggaagtttataaacagataaagacgcaacatgaaagacttgtaagttaagtctcatctttctctgtgaaaagacagactgagggaaaatttaggaaacaaagtatttcctctgaacagtcattgattcttcaagactacccttctgtgtatggaactcagtttaaaagaatttgaaacctaatttatatacaatctatacctaaatatgggagaagctatataagaaccattaagaatataaagagaatgttacattttatccctttttgtaatcatctcatctcagggtaatcaatgtgagaaaagtcttccatcataaatttaacttcattagatacctgagaattaatattgaaaatacaccatatgaatttagtgaatgtgggaaagctttcatccttattacatcttatttgatactagggaaatctcctgattaaattcacatgcatgataggcatgttggaaagtcttcagcatgaatcagatctccttcagcatgatcaaattcatactggagagaaaccttatgaatgtaatgaatgtagaaaaacttttagcctgaagcaaaaccttgtagagcataagaaaatgcatactggagagaaatctcatgaatgcactgaatgtggtaaagtgtgctctcgagtctcatctcttactctacaccttagaagtcacacaggaaagaaggcatataaatgtaataaatgtggaaaagccttcagccagaaggaaaacttcctttctcatcagaaacatcacactggagagaaaccttatgaatgtgaaaaagtttctattcagatgccaaccatcatcagacaccagaaaaatcatacaggaaccaaaccctatgcatgtaaggaatgtggcaaagcctttaacggcaaagcatatctcactgagcatgagaaaattcatactggagaaaaaccatttgaatgtaatcagtgtggaagagccttcagccagaagcaatacctcattaaacatcagaacatccatactggaaagaagccctttaaatgtagtgagtgtggaaaagcttttagccagaaggaaaacctcattatacatcagagaatccatactggagagaaaccttatgaatgtaaagggtgtgggaaagctttcattcagaagtcaagcctcattagacaccagagaagtcacacaggagagaaaccttatacgtgtaaggaatgtgggaaagccttcagtggcaagtcaaatctcacagagcatgagaaaattcatattggagagaaaccctacaaatgtaatgaatgtggaacaatcttcaggcagaagcaatacctcattaaacatcacaatattcatacaggagagaaaccctatgaatgtaataaatgtggaaaagccttctctcgaatcacatcacttattgtacatgtgagaattcatacaggtgataagccttatgagtgtaaggtctgtgggaaagccttctgtcaaagctcatctcttactgtgcatatgagaagccatacaggtgagaaaccctatggttgtaatgaatgtgggaaagccttttctcagttctcaacccttgctctgcacatgagaatccatactggtgaaaaaccttatcagtgtagtgaatgtgggaaagctttcagccaaaagtcacatcacattagacaccagagaattcatactcattaaagttctctatgaatgccttggatttagcaaaacgttcagcagattttacacttaatagtgtattggaaaattcattttacattaaagtgacatgaatgtgggaagtccttcagcagcaattcaaaacttaaatactatgatgtttaataagtattatagtgtaaagaaaacccgtacccccaaaactcccacaacaagcattatcaatgctgtacttctaggagtatactcattaaagttaggatctagtcatggacactacttaatgtgttcctggaaggcctacagatgcattaagaaatagatatgagatgtatgaggatttgaaattaagagacaaaattatcatttttgtgatgttttgctacatatatgaattgtaaaactagaatcatcaaaattatttgttgttgaagcagtcataaaactgagactgagacagaatattgaattcagaaatgtgtgcatgaatatatggggaattggtaattgatagaggcggtatcccagattggtggggaaatcatggattacttaaaaattaattgactcttcatatggaaaaataatatctcccatcataatataaaatatttttcttatgaattcttaaagtactaaagactaaaatgcaaaaagcaatacttaataatataacagttttataagaagatgtttttaaaaccttagggcaggaaagaacttctaaaacattccagaatacccggtagttccactcttgagtatggtagtcccctattttctgcaagagatggactctaagacccccagtggatacctaaaacccagataggaccaaactctatgtctatgtttttttcttatatatacatacctatgataaaatttagtttacagattagacacagcaagagatttaaaacaataataaacataatatggaacaattataacaatatactgtaatcataaaagttatgtgaatatgatctttctctcagaataccttattgtactgttctcaactatttatgaactgtggtgactacaggtaactgaaaccatggaaagcaaagctgtggataagggggaactactatatatatgcatctacccaagaaacatgaacacagggagtcatgtactggtctatagctgtatagttcattgcaccatgagttatagtagccagaagttgggaaacaaatgctgtctcttgtgaaatagatgaataaaatgtgatagtaacatagtagagtactctctagcagttaagtgacaaattaagtctatatattaacagaaatatttttaaaaaattagagtgaagaaaaatgatgaacatattgtaatgatgcttctgtgaatttgaataaaatcaacactaaccagccctagtactaagaattggttatggataaattatgtaaaactaaagaatggattgaaaggatatgtatatactcagttcccaaaagtggagtggttacctctaggaagaaaggaggtggaagggaaatgttaccaagcatggtagttaaaggatacttcaattttgtatctatttcttattaaaaagaaacattctaagtaaacataacgaaatattaattctgggtggtggtaatatttgtgttcattctatcattcgtgctatttatttccttaaacttctgaaagttaaaaagtccagataggagtgaggaagctgtacatgaaacataatggacttacattcctagtcagatactaatattctgtagaagatatttctaaaatcttatctttaaaatatgaaataatttttaattggggtggcaacttaaattcaattaaaataactcatgtgtcacaagagtaaattttacataatctgtacgtagttctaatctgtatatagtcttggaggttatgatttgccacagattggttggatcacatacatttaaggatcatattattaaataatatatgcacagacatggagagaattagtttttactaaaacatttatcagaaattttaatactctgcataaccagtattagcattagaaattagccacttttaaaatgagaaaactgtgtcactcttcaatttttttataagccattgaggaaaacattaactcctggatttcagcttcacttttaacctgcagactaaatttctttctcaattatgtcagacacacccaagtcaatcccaacccccttgttaccttgggaagaccgtgctgaaaaaggagatcttccacctaaacagtgttctcttatttgaagcaaatctttttgagaatttgtttacttgatttctttccacaataaactgacagagaacgctactaatgatttttttttttttttgagacggagttttgttcttgttgcccaggctgcagtgcaatggcacaatcttggctcactgcaacctctgcctcacaggttcaagtggttctcctgcctcagcctcttgagtagctgggattacaggcatgcgccaccatgcccggctaattttgtatttttagtagagacggagttgcaccatgttggccaggctggtcttgaattcctgacctcaggtgatccacctgcttcggcctcccaaagtgctaggattacaggtgtgagccaccacgcctggctaattttgtatttttagtagagatggggtttctccaaaggctggtcttgaactcccgacctcaggtgatccgcccaccttggcctcccgaagtgctgggattacaggcgtgagccaccgtgcccggcctgatgtttttgaatgattatgaaaatgggtatacagcattaaaaccttagactgattttaaatatattaatttcttttaaactcaatataatgttaatattactgtagcacttactagcatttctgaaggttggtcttgagataagattgaaaatgacagttgttgattttctgaggtaatatacccaaataaaatatatgtatgtgtacatgaatcaaaaaaaaaaaaaaaaaaaaaaaaaaaaaaaacgaaaac

SEQ ID NO: 32397 - DNA, 2698 bp, Homo Sapiens
agcggcgccactgagagggacgggcgccggccatggagcgcacagcaggcaaagagctggccctggcaccgctgcaggactggggtgaagagaccgaggacggcgcggtgtacagtgtctccctgcggcggcagcgcagtcagcgcaggagcccggcggagggccccgggggcagccaggctcccagccccattgccaataccttcctccactatcgaaccagcaaggtgagggtgctgagggcagcgcgcctggagcggctggtgggagagttggtgtttggagaccgtgagcaggaccccagcttcatgcccgccttcctggccacctaccggacctttgtacccactgcctgcctgctgggctttctgctgccaccaatgccaccgcccccacctcccggagatcaagaagacagcggtacaagatctgagcttcaacaagaacctgagggctgtggtgtcagtgctgggctcctggctgcaggaccaccctcaggatttccgagacccccctgcccattcggacctgggcagtgtccgaacctttctgggctgggcggccccagggagtgctgaggctcaaaaagcagagaagcttctggaagattttttggaggaggctgagcgagagcaggaagaggagccgcctcaggtgtggacagttgtttctggccaggtgttgtggcacatgcctatagtcccagctacttaggatgctgagatgggaggatctcttgactccgggaaatcaaagctgccgtgagctgtgagcatgcccctgcactccaggcgatagagctgggggaaggaggaatagttgtttcttcaaattgaaatccaaagatctactcaaggacctcccagagttgcccaaacttctgacccagactcttcagaggcctgcgcggaggaagaggaagggctcatgcctcaaggtccccagctcctggacttcagcgtggacgaggtggccgagcagctgaccctcatagacttggagctcttctccaaggtgaggctctacgagtgcttgggctccgtgtggtcgcagagggaccggccgggggctgcaggcgcctcccccactgtgcgcgccaccgtggcccagttcaacaccgtgaccggctgtgtgctgggttccgtgctcggagcaccgggcttggccgccccgcagagggcgcagcggctggagaagtggatccgcatcgcccagcgctgccgagaactgcggaacttctcctccttgcgcgccatcctgtccgccctgcaatctaaccccatctaccggctcaagcgcagctggggggcagtgagccgggaaccgctatctactttcaggaaactttcgcagattttctccgatgagaacaaccacctcagcagcagagagattcttttccaggaggaggccactgagggatcccaagaagaggacaacaccccaggcagcctgccctcaaaaccacccccaggccctgtcccctaccttggcaccttccttacggacctggttatgctggacacagccctgccggatatgttggagggggatctcattaactttgagaagaggaggaaggagtgggagatcctggcccgcatccagcagctgcagaggcgctgtcagagctacaccctgagcccccacccgcccatcctggctgccctgcatgcccagaaccagctcaccgaggagcagagctaccggctctcccgggtcattgagccaccagctgcctcctgccccagctccccacgcatccgacggcggatcagcctcaccaagcgtctcagtgcgaagcttgcccgagagaaaagctcatcacctagtgggagtcccggggacccctcatcccccacctccagtgtgtccccagggtcacccccctcaagtcctagaagcagagatgctcctgctggcagtcccccggcctctccagggccccagggccccagcaccaagctgcccctgagcctggacctgcccagcccccggcccttcgctttgcctctgggcagccctcgaatccccctcccggcgcagcagagctcggaggcccgtgtcatccgcgtcagcatcgacaatgaccacgggaacctgtatcgaagcatcttgctgaccagtcaggacaaagcccccagcgtggtccggcgagccttgcagaagcacaatgtgccccagccctgggcctgtgactatcagctctttcaagtccttcctggggaccgggtgctcctgattcctgacaatgccaacgtcttctatgccatgagtccagtcgcccccagagacttcatgctgcggcggaaagaggggacccggaacactctgtctgtctccccaagctgaggcagccctgtcctctccacaagacacaagtcccacaggcaagcttgcgactcttctcctggaaagctgccatcccccagtagaggccactgtgctgtgtatcccaggaccaccacccaactgtagcccattggaccccatctctttttctgactctgttggtactagatccatattccaaagacatcagcccatgggtggctggtggagagctcaatcccataaatgtagaaagaggtggggcatggatacgtcaaatccctccccagagaaatcttataaatgttagagacgcatcagaagtgacagatgcggatgaaaatagtgaccagagttatgaaacagg

SEQ ID NO: 32398 - DNA, 2949 bp, Homo Sapiens
atgaactccatcagaagatcctcaaggtcttccccactccttcagtgcagacttcatacagagaaactgtctaggcgacacctgtgcaagaactggacacgacccaagctgcaaactgcccctgaccatcccggccttccccgttcgatcctggaggagacggcgttcgtggaggtggtgctgttcgagtcgagcccaagcggcgattacaccacctacaccaccggcctcacgggccgcttctcgcgggccggggccacgctcagcgccgagggcgagatcgtgcagatgcacccactgggcctatgtaataacaatgacgaagaggacttgtatgaatatggctgggtaggagtggtgaagctggaacagccagaattggacccgaaaccatgcctcactgtcctaggcaaggccaagcgagcagtacagcggggagctactgcagtcatctttgatgtgtctgaaaacccagaagctattgatcagctgaaccagggctctgaagacccgctcaagaggccggtggtgtatgtgaagggtgcagatgccattaagctgatgaacatcgtcaacaagcagaaagtggctcgagcaaggatccagcaccgccctcctcgacaacccactgaatactttgacatggggattttcctggctttcttcgtcgtggtctccttggtctgcctcatcctccttgtcaaaatcaagctgaagcagcgacgcagtcagaattccatgaacaggctggctgtgcaggctctagagaagatggaaaccagaaagttcaactccaagagcaaggggcgccgggaggggagctgtggggccctggacacactcagcagcagctccacgtccgactgtgccatctgtctggagaagtacattgatggagaggagctgcgggtcatcccctgtactcaccggtttcacaggaagtgcgtggacccctggctgctgcagcaccacacctgcccccactgtcggcacaacatcatagaacaaaagggaaacccaagcgcggtgtgtgtggagaccagcaacctctcacgtggtcggcagcagagggtgaccctgccggtgcattaccccggccgcgtgcacaggaccaacgccatcccagcctaccctacgaggacaagcatggactcccacggcaaccccgtcaccttgctgaccatggaccggcacggggagcagagcctctattccccgcagacccccgcctacatccgcagctacccacccctccacctggaccacagcctggccgctcaccgctgcggcctggagcaccgggcctactccccagcccaccccttccgcaggcccaagttgagtggccgcagcttctccaaggcagcttgcttctcccagtatgagaccatgtaccagcactactacttccagggcctcagctacccggagcaggaggggcagtccccacctagcctcgcaccccggggcccggcccgtgcctttcctccgagcggcagtggcagcctgctcttccccaccgtggtgcacgtggccccgccctcccacctggagagcggcagcacgtccagcttcagctgctatcacggccaccgctcggtgtgcagtggctacctggccgactgcccaggcagcgacagcagcagcagcagcagctccggccagtgccactgttcctccagtgactctgtggtagactgcactgaggtcagcaaccagggcgtgtacgggagctgctccaccttccgcagctccctcagcagcgactatgaccccttcatctaccgcagccggagcccctgtcgtgccagtgaggcggggggctcgggcagctcgggccggggacctgccctgtgcttcgagggctccccgcctcccgaggagctcccggcggtgcacagtcatggtgctgggcggggcgagccttggccgggccctgcctctccctcgggggatcaggtgtccacctgcagcctggagatgaactacagcagcaactcctccctggagcacagggggcccaatagctctacctcagaagtggggctcgaggcttctcctggggccgcccctgacctcaggaggacctggaaggggggccacgagttgccgtcgtgtgcctgctgctgcgagccccagccctccccagccgggcctagcgccggagcagctggcagcagcaccttgttcctggggccccacctctacgagggctctggcccggcgggtggggagccccagtcaggaagctcccagggcttgtacggccttcaccccgaccatttgcccaggacagatggggtgaaatacgagggtctgccctgctgcttctatgaagagaagcaggtggcccgcgggggcggagggggcagcggctgctacactgaggactactcggtgagtgtgcagtacacgctcaccgaggaaccaccgcccggctgctaccccggggcccgggacctgagccagcgcatccccatcattccagaggatgtggactgtgatctgggcctgccctcggactgccaagggacccacagcctcggctcctggggtgggacgcgaggcccggataccccacggccccacaggggcctgggagcaacccgggaagaggagcgggctctgtgctgccaggctagggccctactgcggcctggctgccctccggaggaggcgggtgctgtcagggccaacttccctagtgccctccaggacactcaggagtccagcaccactgccactgaggctgcagatcttaggttaggtaacactccagccccctctgagatcacctacacaccttctgttcacttctgtcatcctattgctaaattactttgtctcaaggaccgagatctcactcagcagacagcagcagcccgggagcctgagctcaggaggaactcttacctggaaattgggaactgtatggagactccaaactga

SEQ ID NO: 32399 - DNA, 7263 bp, Homo Sapiens
ggaagaatatggccgccgggtgtggtgagggcgacgcgcttgcagtcgccgtctcttgcttccccgtcctctgacatcgcctgcagccgagcgggcccgttccgccggagctgaggaccaggtattcaaataaagttaattgcagctttctgtgaaaatgtcagttttgatatcacagagcgtcataaattatgtagaggaagaaaacattcctgctctgaaagctcttcttgaaaaatgcaaagatgtagatgagagaaatgagtgtggccagactccactgatgatagctgccgaacaaggcaatctggaaatagtgaaggaattaattaagaatggagctaactgcaatctggaagatttggataattggacagcacttatatctgcatcgaaagaagggcatgtgcacatcgtagaggaactactgaaatgtggggttaacttggagcaccgtgatatgggaggatggacagctcttatgtgggcatgttacaaaggccgtactgacgtagtagagttgcttctttctcatggtgccaatccaagtgtcactggtctgtacagtgtttacccaatcatttgggcagcagggagaggccatgcagatatagttcatcttttactgcaaaatggtgctaaagtcaactgctctgataagtatggaaccacccctttagtttgggctgcacgaaagggtcatttggaatgtgtgaaacatttattggccatgggagctgatgtggatcaagaaggagctaattcaatgactgcacttattgtggcagtgaaaggaggttacacacagtcagtaaaagaaattttgaagaggaatccaaatgtaaacttaacagataaagatggaaatacagctttgatgattgcatcaaaggagggacatacggagattgtgcaggatctgctcgacgctggaacatatgtgaacatacctgacaggagtggggatactgtgttgattggcgctgtcagaggtggtcatgttgaaattgttcgagcgcttctccaaaaatatgctgatatagacattagaggacaggataataaaactgctttgtattgggctgttgagaaaggaaatgcaacaatggtgagagatatcttacagtgcaatcctgacactgaaatatgcacaaaggatggtgaaacgccacttataaaggctaccaagatgagaaacattgaagtggtggagctgctgctagataaaggtgctaaagtgtctgctgtagataagaaaggagatactcccttgcatattgctattcgtggaaggagccggaaactggcagaactgcttttaagaaatcccaaagatgggcgattactttataggcccaacaaagcaggcgagactccttataatattgactgtagccatcagaagagtattttaactcaaatatttggagccagacacttgtctcctactgaaacagacggtgacatgcttggatatgatttatatagcagtgccctggcagatattctcagtgagcctaccatgcagccacccatttgtgtggggttatatgcacagtggggaagtgggaaatctttcttactcaagaaactagaagacgaaatgaaaaccttcgccggacaacagattgagcctctctttcagttctcatggctcatagtgtttcttaccctgctactttgtggagggcttggtttattgtttgccttcacggtccacccaaatcttggaatagcagtgtcactgagcttcttggctctcttatatatattctttattgtcatttactttggtggacgaagagaaggagagagttggaattgggcctgggtcctcagcactagattggcaagacatattggatatttggaactcctccttaaattgatgtttgtgaatccacctgagttgccagagcagactactaaagctttacctgtgaggtttttgtttacagattacaatagactgtccagtgtaggtggagaaacttctctggctgaaatgattgcaaccctctcggatgcttgtgaaagagagtttggctttttggcaaccaggctttttcgagtattcaagactgaagatactcagggtaaaaagaaatggaaaaaaacatgttgtctcccatcttttgtcatcttcctttttatcattggctgcattatatctggaattactcttctggctatatttagagttgacccaaagcatctgactgtaaatgctgtcctcatatcaatcgcatctgtagtgggattggcctttgtgttgaactgtcgtacatggtggcaagtgctggactcgctcctgaattcccaaagaaaacgcctccataatgcagcctccaaactgcacaaattgaaaagtgaaggattcatgaaagttcttaaatgtgaagtggaattgatggccaggatggcaaaaaccattgacagcttcactcagaatcagacaaggctggtggtcatcatcgatggattagatgcctgtgagcaggacaaagtccttcagatgctggacactgtccgagttctgttttcaaaaggcccgttcattgccatttttgcaagtgatccacatattatcataaaggcaattaaccagaacctcaatagtgtgcttcgggattcaaatataaatggccatgactacatgcgcaacatagtccacttgcctgtgttccttaatagtcgtggactaagcaatgcaagaaaatttctcgtaacttcagcaacaaatggagacgttccatgctcagatactacagggatacaggaagatgctgacagaagagtttcacagaacagccttggggagatgacaaaacttggtagcaagacagccctcaatagacgggacacttaccgaagaaggcagatgcagaggaccatcactcgccagatgtcctttgatcttacaaaactgctggttaccgaggactggttcagtgacatcagtccccagaccatgagaagattacttaatattgtttctgtgacaggacgattactgagagccaatcagattagtttcaactgggacaggcttgctagctggatcaaccttactgagcagtggccataccggacttcatggctcatattatatttggaagagactgaaggtattccagatcaaatgacattaaaaaccatctacgaaagaatatcaaagaatattccaacaactaaggatgttgagccacttcttgaaattgatggagatataagaaattttgaagtgtttttgtcttcaaggaccccagttcttgtggctcgagatgtaaaagtctttttgccatgcactgtaaacctagatcccaaactacgggaaattattgcagatgttcgtgctgccagagagcagatcagtattggaggactggcgtaccccccgctccctctacatgagggtcctcctagggcgccatcagggtacagccagcccccatccgtgtgctcttccacgtccttcaatgggcccttcgcaggtggagtggtgtcaccacagcctcacagcagctattacagcggcatgacgggccctcagcatcccttctacaacaggccattctttgccccatacctttacacgccaaggtattaccctggcggctcccaacatctcatctcacgtccatcagtaaaaacgagtttgcccagagatcagaacaatggcctagaagttatcaaggaggatgctgctgaggggctttcttcacccacagactcctcgagggggtcaggcccagccccaggcccagtggtattactgaattcactgaatgtggatgcagtatgtgagaagctgaaacaaatagaagggctggaccagagtatgctgcctcagtattgtaccacgatcaaaaaggcaaacataaatggccgtgtgttagctcagtgtaacattgatgagctgaagaaagagatgaatatgaattttggagactggcaccttttcagaagcacagtactagaaatgagaaacgcagaaagccacgtggtccctgaagacccacgtttcctcagtgagagcagcagtggcccagccccgcacggtgagcctgctcgccgcgcttcccacaacgagctgcctcacaccgagctctccagccagacgccctacacactcaacttcagcttcgaagagctgaacacgcttggcctggatgaaggtgcccctcgtcacagtaatctaagttggcagtcacaaactcgcagaaccccaagtctttcgagtctcaattcccaggattccagtattgaaatttcaaagcttactgataaggtgcaggccgagtatagagatgcctatagagaatacattgctcagatgtcccagttagaagggggccccgggtctacaaccattagtggcagatcttctccacatagcacatattacatgggtcagagttcatcagggggctctattcattcaaacctagagcaagaaaaggggaaggatagtgaaccaaagcccgatgatgggaggaagtcctttctaatgaagaggggagatgttatcgattattcatcatcaggggtttccaccaacgatgcttcccccctggatcctatcactgaagaagatgaaaaatcagatcagtcaggcagtaagcttctcccaggcaagaaatcttccgaaaggtcaagcctcttccagacagatttgaagcttaagggaagtgggctgcgctatcaaaaactcccaagtgacgaggatgaatctggcacagaagaatcagataacactccactgctcaaagatgacaaagacagaaaagccgaagggaaagtagagagagtgccgaagtctccagaacacagtgctgagccgatcagaaccttcattaaagccaaagagtatttatcggatgcgctccttgacaaaaaggattcatcggattcaggagtgagatccagtgaaagttctcccaatcactctctgcacaatgaagtggcggatgactcccagcttgaaaaggcaaatctcatagagctggaagatgacagtcacagcggaaagcggggaatcccacatagcctgagtggcctgcaagatccaattatagctcggatgtccatttgttcagaagacaagaaaagcccttccgaatgcagcttgatagccagcagccctgaagaaaactggcctgcatgccagaaagcctacaacctgaaccgaactcccagcaccgtgactctgaacaacaatagtgctccagccaacagagccaatcaaaatttcgatgagatggagggaattagggagacttctcaagtcattttgaggcctagttccagtcccaacccaaccactattcagaatgagaatctaaaaagcatgacacataagcgaagccaacgttcaagttacacaaggctctccaaagatcctccggagctccatgcagcagcctcttctgagagcacaggctttggagaagaaagagaaagcattctttgagaaaaacaagcaaaggagaagagtgttactgtacctttatgacagaattgtcctggattttgactccatccacgcccatcacctttctacattttgctgacagataactaaccgatgatgaggccgaggtaaaagagacatctgcagtgtgacagaagggagcatgagaagcatggctcaccagccagcctctgtggtctttgtaattagaagcttcagaactcactaatactactgtacctttcattggcgcattaccccataaaactttttgagacgaggtgagatctgagtataaagataggtcagaagtattttaaagggcttaatgtgccaaaaagaaaaaaagctagagaccctttttgcaaacatttggtgaccacacatttgagggaagacgtggcgttaggtgaagcagaagcaaaccctgctcttaggggctcacctaggtgagtgcacagcctgtgacgctacagggagaggctgagtaaaccgagatccagcgttctgtatggcaggggtattgcttatcacagaggttctgaagagtaggaagtacataatgaagagggctttaaaaattgccaacaaagtgagtcaccagggctggcagtagtgtgacggggctgtcctgagctgttaggagagtagatgcggggagggctggtgacctccgtgggtttatatgtcggaaactcttctctccaaatcccaggcctggcttccagcaccatccagctgtgcccaagaagccaccctggtctgttctccaactcttttaaatggtgcccaacttttctaagtgagcttagcaatgagaagaaaaaaaaacatgaattctttttctggaaaatcagggagacatgggtaataataggtactaataaatatttatagatgagtgaatgaggaaataattacatcaaaaaggtcagtgacaattgataaatgacaaggaaatatttaattaggtaaaactaaatcattgctctctatactaggatagactttatctacttcatctgttcctaagtcagcatgttagttctggggaaggatcataagaaaggaaatactttttaaaaaaaaatttggaaacatgtaacaaagcaagggtaaaatatatatatatatctatataagtgctgtgactgtaaaagtgtactttccattaattattagccgagttaagagaatggtcacattgaagtactgtgtggactagaaatgtaccctgtcatcatgcaatgaaatattgttatcgttttaacatagctcatttatgtagaatgaattctggtggtttaccccaagtcacagttaggacggtagatggtgagatcgcagatgcgctattatctagattcagtgttacattttcgatgtttatcactcagtgggtttttattaatatgctgattaagttatttactgggccagtcattgtgctaaatagttgctcttttgtgtttcattgccttgatgtttgagtgtaatctagcattttaatacagtgtttattttgcatgatctttaacaaatgttttaagcaattttaaaaaggcaggatgttattgacattatacactgaagtcttaacattttaacatttatagtgcttatttgcaaaattgtataattaggaattatttcagagacaatgttttctttttcaggtgagtagttgccgcgtaatatcattggagtacattctttatactgtttgtgaaattaatactagcatattaagtgtacaaatagatttagaaaacaataaaaaattgcatgct

SEQ ID NO: 32400 - DNA, 6881 bp, Homo Sapiens
ttttgttttgtttttatttgccatatatcatcctgggcttacattattttacttctttccttttaagtgttagacaccatcatggccacaaaactcgacttcaataaaatgccactttctgtgttcccatactatgcctcattgggcacagccttgtatggaaaggagaagcctctgatcaagcttccagcaccatttgaagagtcactagatcttcccttatggaagttcttacagaaaaagaatcacctcattgaggagataaacgatgaaatgaggcgttgtcactgtgagctcacgtggtcccaactcagtggtaaagttaccatcagaccagcagccaccttagtcaatgaaggaagaccgagaatcaagacctggcaggcagatacttccacaacactctctagcatcaggtctaaatataaagtcaacccaattaaagtggatccaacaatgtgggacaccataaaaaatgatgtgaaagatgacaggattttgattgagtttgatacacttaaggagatggtaatcttagcagggaaatcagaggatgtccaaagcattgaggtacaagtcagggagttaatagaaagcactactcaaaaaattaaaagggaagagcaaagtttgaaggaaaaaatgatcatttctccaggcaggtattttcttttgtgtcacagcagtctactggaccatttactcacggagtgcccagagatagagatttgttacgatagagtcactcaacacttgtgcttgaaaggacctagtgcagatgtgtataaagcaaagtgtgaaatccaggaaaaggtgtacaccatggctcagaaaaacattcaggtttctcctgagatttttcagtttttgcaacaggtaaactggaaagaattctctaagtgtcttttcatagcacagaagattcttgcactttatgagctagagggtacaactgttctcttaaccagctgttcttctgaagccctgttagaagcagaaaagcaaatgctcagtgccttaaattataagcgcattgaagttgagaacaaagaagttcttcatggcaagaaatggaaagggctcactcacaatttgcttaagaaacaaaattcctccccaaacactgtaatcatcaatgagttaacttcagaaaccacagctgaagtcatcattacaggctgtgtaaaagaagtaaatgaaacctataaattgctttttaacttcgttgaacaaaacatgaaaatagagagactggttgaagtaaagccttccttagttattgactatttaaagacagaaaagaagctattctggccaaagataaagaaggtaaatgtgcaggtaagtttcaatcctgagaacaaacaaaaaggcattttactaactggctcaaagaccgaagtactgaaggcagtggacattgtcaagcaagtctgggattcagtctgtgttaaaagtgtccatactgataagccaggagccaagcagttcttccaggataaagcacggttttatcaaagtgagatcaaacggttgtttggttgttacattgaactacaggagaatgaagtaatgaaggagggaggcagccccgctgggcagaagtgcttctctcggacagtcttggcccctggcgttgtgctgattgtgcagcagggtgacttggcacggcttcctgtcgatgtggtggtgaatgcatctaatgaggaccttaagcattatggtggcctggccgctgcgctctcaaaagcagctggccctgagctccaggccgactgtgaccagatagtgaagagagagggcagactcctaccgggcaatgccaccatctccaaggcaggaaagctgccctaccaccacgtgatccatgcagtggggccccgctggagcggatatgaggccccgaggtgtgtgtacctattaaggagagctgtgcaactcagtctctgtctagccgaaaaatacaagtaccgatccatagccatcccagctattagttctggagtctttggctttcccttaggccgatgcgtggagaccattgtttctgccatcaaggaaaacttccaattcaagaaggatggacactgcttgaaagaaatctaccttgtggatgtatctgagaagactgttgaggcctttgcagaagctgtgaaaactgtatttaaagccaccctgccagatacagctgccccgccaggtttaccaccagcagcagcggggcctgggaaaacatcatgggaaaaaggaagcctggtgtccccgggaggcctgcagatgctgttggtgaaagagggtgtgcagaatgctaagaccgatgttgttgtcaactccgttcccttggatctcgtgcttagtagagggcctctttctaagtccctcttggaaaaagctggaccagagctccaggaggaattggacacagttggacaaggggtggctgtcagcatgggcacagtgctcaaaaccagcagctggaatctggactgtcgctatgtgcttcacgtggtagctccggagtggagaaatggtagcacatcttcactcaagataatggaagacataatcagagaatgtatggagatcactgagagcttgtccttaaaatcaattgcatttccagcaataggaacaggaaacttgggatttcctaaaaacatattcgctgaattaatcatttcagaggtgttcaaatttagtagcaagaatcagctgaaaactttacaagaggttcactttctgctgcacccgagtgatcatgaaaatattcaggcattttcagatgaatttgccagaagggctaatggaaatctcgtcagtgacaaaattccgaaggctaaagatacacaaggtttttatgggactgtttctagccctgattcaggtgtgtatgaaatgaagattggctccatcatcttccaggtggcttctggagatatcacgaaagaagaggcagatgtgattgtaaattcaacatcaaactcattcaatctcaaagcaggggtctccaaagcaattttagaatgtgctggacaaaatgtagaaagggaatgttctcagcaagctcagcagcgcaaaaatgattatataatcaccggaggtggatttttgaggtgcaagaatatcattcatgtaattggtggaaatgatgtcaagagttcagtttcctctgttttgcaggagtgtgaaaaaaaaaattactcatccatttgcctcccagccattgggacaggaaatgccaaacaacacccagataaggttgctgaagccataattgatgccattgaagactttgtccagaaaggatcagcccagtctgtgaaaaaagttaaagttgttatctttctgcctcaagtactggatgtgttttatgccaacatgaagaaaagagaagggactcagctttcttcccaacagtctgtgatgtctaaacttgcatcatttttgggcttttcaaagcaatctccccaaaaaaagaatcatttggttttggaaaagaaaacagaatcagcaacttttcgggtgtgtggtgaaaatgtcacgtgtgtggaatatgctatctcctggctacaagacctgattgaaaaagaacagtgtccttacaccagtgaagatgagtgcatcaaagactttgatgaaaaggagtatcaggagttgaatgagctgcagaagaagttaaatattaacatttccctggaccataagagacctttgattaaggttttgggaattagcagagatgtgatgcaggctagagatgaaattgaggcgatgatcaagagagttcgattggccaaagaacaggaatcccgggcagattgtatcagtgagtttatagaatggcagtataatgacaataacacttctcattgttttaacaaaatgaccaatctgaaattagaggatgcaaggagagaaaagaaaaaaacagttgatgtcaaaattaatcatcggcactacacagtgaacttgaacacatacactgccacagacacaaagggccacagtttatctgttcagcgcctcacgaaatccaaagttgacatccctgcacactggagtgatatgaagcagcagaatttctgtgtggtggagctgctgcctagtgatcctgagtacaacacggtggcaagcaagtttaatcagacctgctcacacttcagaatagagaagattgagaggatccagaatccagatctctggaatagctaccaggcaaagaaaaaaactatggatgccaagaatggccagacaatgaatgagaagcaactcttccatgggacagatgccggctccgtgccacacgtcaatcgaaatggctttaaccgcagctatgccggaaagaatgctgtggcatatggaaagggaacctattttgctgtcaatgccaattattctgccaatgatacgtactccagaccagatgcaaatgggagaaagcatgtgtattatgtgcgagtacttactggaatctatacacatggaaatcattcattaattgtgcctccttcaaagaaccctcaaaatcctactgacctgtatgacactgtcacagataatgtgcaccatccaagtttatttgtggcattttatgactaccaagcatacccagagtaccttattacgtttagaaaataacactttggtatccttcccacaaaattattctccatttgtacatatctagttgtaaaacaagttttagcttttttttttaattcctcttaacagatttttctaatatccaaggatcattctttgtcgctgaagtcagtctttcttcagcttccctttcataatggaaatgaacttattatcttgagagcaaataacttggaaaatttaaatgagataatgcagttgcaactgtgtgtccacaagtatggacatcaaatctgtgggaaaagaacaggtttgtattttcaggaaggagagaataacagtcttatagacagagggcacagctaagcacagctgccactgcaggagacaggccccatgtcaggatgccatagtgctgtggggagcacagtattacccagtgggtagggcttctgtcttccctgggagcagggatggtatcttagtcaatttttttcccttgagatgaggtctgtgcctgatgtacaacggatactccataaatgtttgacaaaccaacgaagaatgaaaaaaagcctagtcagactcccatccaaagtaggaactatctctttaacattcttgactcactatcactttacctcaaattgaacagattccatgacggaacttcattcttcacaaactagccagtgacatgtgggacagctctggccagggctctgggactgcagtgtacttgcgctctgcacggtccaggagctgtgatgtggctgtggtctaggggaatcctgcctgccccatggagttgcgcagcacaaccctggctccaattgccagaaggctctttttaatgctgaaccaaaatgtgcctttttttttttttttttgagatggagtttcactcttgttgcccaggctggagtgcaatggcgcgatctcagctcactgcagccactgcctcccaggttcaagtgattctcctgcctcagcctcccgagtagctgggattacaggcatgcgctaacacacccagctaattttgtatttttagtagagacgaggtttctccatgttcgacaggctggtctcgaactcccacctcagcctcccaaactgctgggattacaggtgtgagccaccgtgaccagccaatgtgccttcttatagtgtctactcattggtctttgttctgcccagtgataacaatgggataacgcctgctacacatcttcattgtgaaacccttcccctgtgctgagattaaatgaactctaagattattaaatagtatattttccttgacagcctagcgtttgatgattttaaagccttatgtataaataaaccaaaggaagtaagcagtcatattgctaatttgctaactcctatctattgaatggtgaagttttaaaaatttccccaggtaagtttaagattcaaacaccatctattgagcacctacattgtgtgccaggtagtaaaataggtgctttcatacacattgtctcaattcctgtgaggtcagaattatctctgcatttgaaacttgaggaaacatgctcagagtgcaagaagcttccttgcctgagatcacctagaaaggaaccctcagagccggcaactgaatcttggtccctgtgatgtcaagcccattgctctcccactgcagaacatggcctctagattaatgccaccgattcaggaacacctccgacagtcttgaaatacccccatgttgccttgtttgttttttccttctggcttcttctattacagtctcttcattggaagctctgtaggccaaggccagagctgatactgacacggagccaatgcagatagcacatcagatgctaggggtcgctgggaggattaagggacttaatctgctaggaacacctgtacttgaagtggaggaggctagggggccacagttgctgcttcattaacatagaggttttggatttttttctcttgtggtttgttttttaagtggattggcagactccttgttgcttaagagtggctttctaggcaggccactggcatctgaattcatcattgacaataaatgtaagaaattggaataaaaaagagagacctgctgttattcgcttttgttctccagtgatttgattaactcagggcaaggctgaatatcagagtgtatcgcactgaagaataataatccattcagtaatgttatagttatcctcaatctaaatatgtcaactgtcattttgctacttttcaaataaaatacttgaaaactgtca

SEQ ID NO: 32401 - DNA, 6093 bp, Homo Sapiens
atggagccccgcagcatggagtacttctgcgcccaggtgcagcagaaggacgtcggcggccggctgcaggtcggccaggagctcctgctctaccttggcgcccccggcgccatctcggacctggaggaggacctgggccgcctaggcaagacagtcgacgcgctcaccggctgggtgggttcgagcaactaccgggtatcattaatgggattggaaattttaagtgcctttgtggacagattatcaacacgctttaaatcctatgtagcaatggttattgtagctttaatagacagaatgggagatgccaaagacaaggttcgagatgaagctcagactctgatattgaagttaatggatcaagtagcaccacctatggtgagagatgctgcaatattggctatagtggagatttatagacatgtgggagaaaaagtgaggatggatctttataagagaggaattccccctgctaggctgcaggccgagcccagtggcgcaggcactgagctgtacttatttgctgtgctatttgacctcttggtttcagagagctccctggaccatctaatggctatgggagatgataaaagcttcgatgatgaagaatcagtggatggaaataggccatcatcagctgcatcagccttcaaggttcctgcacctaaaacatccggaaatcctgccaacagtgcaaggaagcctggttcagcaggtggccctaaggttggaggtgcttctaaggaaggaggtgctggagcagttgatgaagatgattttataaaagcttttacagatgtcccttctattcagatttattctagtcgagaactcgaagaaacattaaataaaatcagggaaattttgtcagatgataaacatgactgggatcagcgtgccaatgcactgaagaaaattcgatcactgcttgttgctggagctgcacagtatgattgcttttttcaacatttacgattgttggatggagcacttaaactttcagctaaggatcttagatcccaggtggttagagaagcttgtattactgtagcccacctttcaacagttttgggaaacaagtttgatcatggcgctgaagccattgtacctacactttttaatctcgtccccaatagtgcaaaagtcatggcaacttctggatgtgcagcaatcagatttatcattcggcatactcatgtacccagacttatacctttaataacaagcaattgcacatcaaaatcagttcccgtgaggagacgttcatttgaatttttagatttattgttgcaagagtggcagactcattcattggaaagacatgcagccgtcttggttgaaactattaaaaagggaattcatgatgctgacgctgaggccagagtggaggcaagaaagacatacatgggtcttagaaaccactttcctggtgaagctgaaacattatataattcccttgagccatcttatcagaagagtcttcaaacttacttaaagagttctggcagtgtagcatctcttccacaatcagacaggtcctcatccagctcacaggaaagtctcaatcgccctttttcttccaaatggtctacagcaaatccatcaactgtggctggaagagtatcagcaggcagcagcaaagccagttcccttccaggaagcctgcagcgttcacgaagtgacattgatgtgaatgctgctgcaggtgccaaggcacatcatgctgctggacagtctgtgcgaagcgggcgcttaggtgcaggtgccctgaatgcaggttcctatgcgtcactagaggatacttctgacaagctggatggaacagcatctgaagatggccgggtgagagcaaaactttcagcaccacttgctggcatgggaaatgccaaggcagattctagaggaagaagtcgaacaaaaatggtgtctcaatcacagcctggtagccggtctgggtctccaggaagagttctgaccacaacagccctgtccactgtgagctctggtgttcaaagagtcctggtcaattcagcctcagcacaaaaaagaagcaagataccacggagccagggctgtagcagagaggctagtccatctaggctttcagtggcccgaagcagtcgtattcctcgaccaagtgtgagtcaaggatgcagccgggaagctagtcgggagagcagcagagacacaagtcctgttcgctcttttcagcccctcgcctccagacaccattccagatcaactggtgccctctacgcccccgaagtgtatggggcctcaggtccaggttatgggatcagccaatcaagtcgactgtcgtcttctgttagtgccatgcgagtcctgaacacaggttctgatgtggaggaggcggtggcagatgccttgaaaaaaccagctcgaagaagatatgaatcatatggaatgcattcagatgatgacgccaacagcgatgcatctagtgcttgttcagaacgctcctatagttctcgaaatggtagtattcctacatatatgaggcagacggaagatgtggcagaagtcctcaatagatgtgctagttccaattggtcagaaaggaaagaaggcctcctaggtctgcagaacttattaaaaaatcagagaacactaagtcgagttgaactgaaaagattatgtgaaattttcacaagaatgtttgctgaccctcatggcaagagagtattcagcatgtttttggagactctagtggatttcatacaagtccacaaagatgatcttcaagattggttgtttgtactgctgacacaactactaaaaaaaatgggtgctgatttgcttggatctgttcaggcaaaagttcagaaagcccttgatgttacaagagagtcttttccaaatgatcttcagttcaatattctaatgagatttacagttgatcagacccagacaccaagcttaaaggtgaaggttgctatccttaaatacatagaaactctggccaaacagatggatccaggagattttataaattccagtgaaactcgcctagcagtgtctcgggtcatcacttggacaacagaacccaaaagttctgatgttcggaaggcagcacagtcagtgctgatttcattatttgaactcaataccccagagtttacaatgttattaggagctttaccaaaaacttttcaggatggtgctaccaagcttcttcataatcaccttcgaaacactggcaatggaacccagagttccatggggagtcctttgacaagaccaacaccacgatcaccagctaactggtccagtcctcttacttctcctaccaatacatcacagaatactttatctccaagtgcatttgattatgacacagaaaatatgaactctgaagatatttatagctctcttagaggtgtcactgaagcaatccagaatttcagcttccgtagccaagaagatatgaatgagccattgaaaagggattctaaaaaagatgatggcgattcaatgtgtggtggtcctgggatgtctgacccaagagcaggaggtgatgctactgactcaagtcaaacagctcttgataataaagcttcattgctccattcaatgcctactcactcctctccacgctctcgagactataatccatataactattcagatagcatcagtcccttcaacaagtctgccctcaaggaagccatgtttgatgatgatgctgaccagtttcctgacgatctttccctagatcattctgacctagttgcagagttgttgaaggagctgtctaaccataatgagcgtgtagaagaaagaaaaattgccctctatgaacttatgaaactgacacaggaagaatcttttagtgtttgggatgaacacttcaaaacaatattgcttttattgcttgaaacgcttggagataaagagcctacaatcagggctttggcattaaaggttttaagagaaatcctaaggcatcaaccagcaagatttaaaaactatgcagaattgactgtcatgaaaacattggaagcacataaagatcctcataaggaggtggtgagatctgctgaggaagcggcatcagtgttggccacttcaattagtccagagcagtgcatcaaagtgctttgtcctatcattcaaactgcagactacccaattaatctggctgcaatcaaaatgcaaacaaaagtgatagagagagtgtccaaggaaaccctaaacctgcttttgccagagattatgccaggtctaatacagggttatgataattcagagagcagtgttcggaaagcttgtgtcttctgcctggtggctgttcatgcggtaattggtgatgaactaaaaccacatctcagtcaacttactggcagtaaaatgaagctactgaatctttacatcaaacgtgcacaaacaggttctggaggagctgatcccactactgatgtttctggacaaagttagtgaagctcatcacagcgaaccaggtctctcaaaagaaaggacagatagaccaccctcatcaatgaaaggaagttctcaaacacatcctttggaacttactattgtttcccagttttagttttttgtttcgtttcgttttgtattttctgtaacagaggactatcctcagtctgcatgtaacttttatgatagttattccaaattcaagaagaagcagtattaacatcaattgatcgacacaaagtaatttttaatttaattcatcatttcacatgtttgtactttgtcttcccattaacctttgccagtgttatgattgtataaatttttttaaatgctggttaaacaggaatgcttaaagctttaaaagtttaacagtctaaaacatttttgcttttattcaactgcagaataatatttttattgctactttgagttttgtttcgtatcatgtcctatgctagaaatatttaaatgatgtgaaacaaagcaggactaatttgaactacagctggactccgtttgtgtgatggtgatacatgtcattagttgcaacttctttggggtgatctatagtttgaaaactaaaacctcaaagacagatgttacagaatcagccagttctgtaaaactgatattgtctattggttattgatcttgccatctttatttaaaaccatgtcccttctatgatcccttaagaaagctgcaccaaatcatctgcctgttttttcttgatacttactgaaatagaaggttttattgcagggtttattttggtttgtttatatctttgttgtgaatgatgcttttttgtatttattaatatcaaattcacttatgaataaacttgataatggaaacggacaaaaaaaatcaagtgcgtgtgtgtccttgaccgtcttctgtttctcacgtaataaacaaattatcgagacatgggagtgaccagcaccttttctttaaatggtggaacctggtttccttttaccatgaaattgtcttacttgaaaatattgatcctgatgagagagaagatggtgccaaggctgtctttgtataatgggctcaaattctctacctcttcagggctaatacttttaactgagctgctgcctatagtgtcttttggaaaactacttaaagggtgattttctgttactttttagcaaatttttttaatcacctcttgctacacccattcttttcatgtgcagccgactcaaaaattaccagttttggtgaaaggctaaattagataatttggaaccaggatactaatgatttctcatctttacttttttttaatcctaatataaagtgaatttgattgaaaaggcaaatagctattagggaagcagtttgccattgttgcagagttatctgtactttgtttaactgaaaaaaatgtagaaatatatgtaaagaatttaagacaagagtactgaatggatgatttgtcataggctttcccctttctttctgttctagcagcaggaaaagtttctctatatcctctccctctacctgtaacaattttgttttctactgttaattacattgtgtatttatagttctatgcttactgttgtgcatatactggcaataaaactgtacataacattacttgaaaaagtt

SEQ ID NO: 32402 - DNA, 7769 bp, Homo Sapiens
atgatcctggaccaagcctttaaatatataacagaattgaaaaggcaaaatgatgaactcctgcttaatggaggaaacaatgaacaagctgaagaaataaaaaagctacggaaacaactggaagaaatccaaaaagaaaatggccgatatattgaattactgaaagctaatgacatatgcttatatgatgacccgacaattcactggaaaggaaatcttaaaaactcaaaggtctctgttgttattcctagtgaccaggttcaaaaaaaaattattgtttattccaacgggaatcagcctggtggaaacagccagggaacagctgttcaggggataacttttaatgttagtcataatttacaaaagcagaccgccaatgtggtgccagtacagaggacttgcaatcttgtgactcctgtatctatttctggagtttacccttctgaaaacaagccatggcatcagaccacagttcctgcattggctaccaaccagcctgttcctctttgtcttcctgctgccatttctgctcagagtattctcgagcttcccacctctgaaagcgaatcaaatgtgcttggtgccactagtggctcactgattgctgtttcaattgaatctgagcctcaccaacatcattctttgcacacatgcctaaatgatcaaaattcttctgaaaataagaatggacaagagaaccccaaagtattgaagaaaatgaccccttgtgttacaaacatcccccacagctcctcagcaactgccactaaagtgcaccatggaaacaagtcctgcctgagcatacaggacttcagaggtgattttcaaaacacttttgttgtttcagttaccaccacagtctgctcgcagcctcccagaactgcaggtgattcttctccaatgagcattagtaagagtgcagacttgacaagtacagctacagtggtggcatcatctgcccctggagtagggaaggccaccattcctataagcactctttcgggaaaccctttggacaatggttggactctttcttgttctttgccttcttcaagtgttagtacttcagatttgaaaaacattaatagccttacacgaatctcttcagctggaaacacacagacaacgtggactactttgcaactggcaggaaacactattcagcccttaagccagacaccatcttctgctgtgactccagtattaaatgagtctggtactagccccaccacaagcaaccacagtagatatgtggctacagacatcaacttgaataattcctttccagcagatgggcagccagttgagcaagtagttgtaacattgccttcttgtccatctttacctatgcagccactaattgcccagccacaagttaaatctcagcctcccaaaaatatccttccactgaattcagcaatgcaagtgattcagatggctcagccagttgggtcagctgttaattcagctccaactaatcaaaatgttataattcttcagccacctagcaccaccccatgcccaacagtgatgagggcagaagtttccaaccaaacagtaggtcaacagatagtaatcatacaggctgctaatcagaatcctttgccactcctccctgctccacctcctggttctgttcgactccccatcaatggagccaatactgtaatagggtctaataattcagtgcaaaatgttccaacaccacagacttttggaggaaagcatcttgtccacatattaccaagaccttcatctttatcagcgtctaactcaacacaaactttttctgttaccatgtcaaaccaacagcctcaaaccatttctttaaatggacagctctttgctttgcagcctgtgatgtcttcatcaggaactacaaatcaaacccctatgcaaattattcaacccaccaccagcgaagatccaaataccaatgttgccctgaatacatttggtgctttggccagcctcaatcaaagcatatcacagatggctgggcaaagctgtgtacaattgtctattagccagcctgccaattctcaaactgctgcaaatagtcaaaccactacagctaactgtgtttcattaacaacaactgcagcacctcctgtgacaacagatagttcagccacactagctagtacttataatctagtgagtacttcctcaatgaacactgttgcttgtttgcctaacatgaaatctaaaaggttgaataagaagccaggtggcaggaaacacttagcagcaaacaagtcagcgtgtcccctgaattcagtcagagatgtgagcaagttagactgccccaacactgaaggctcagcagagccaccctgtaatgatggactgctagaaagcttccctgctgtgttaccatctgtctctgtgtctcaggcaaatagtgtgagtgtttctgcttcacattctttgggtgttctaagctctgaatcattaatacctgagtctgtatcgaaatctaagtcagcagaaaagtccagcccaccctcccaagaatctgtaacaagtgaacattttgcaatggccgcagcaaaatccaaagattctacccctaatctacaacaagagacatctcaggataaaccaccaagtagtttagcattatcagatgctgccaaaccctgcgcttcagccaatgtattgattccatctccaagtgatcctcacattttggtttctcaggttcctggtttgtcatctacaacaagcactacaagtactgactgtgtttctgaggtagaaatcattgctgaaccttgcagagttgagcaagattcatcagatacaatgcaaaccacaggtctcttaaaggggcaaggtttaactacattgctatctgatcttgctaaaaaaaaaaaccctcagaaatcatctctttctgatcagatggatcatcctgacttttcttcagaaaatcctaaaatagttgattcaagtgtgaatttacatcccaaacaggaactattactgatgaacaatgatgatagagatcctccacagcatcattcctgcctccctgatcaagaggttattaatggttctttgatcaacggtagacaggccgactctcccatgtcaaccagctctggcagtagtcgtagtttctcagttgcatccatgcttcctgaaacaacaagagaagatgtgaccagcaatgcaacaactaatacatgtgacagctgtacctttgtagagcaaactgatatagtagctcttgcagcaagagctatttttgaccaggagaaccttgagaaggggagagttggcctccaggctgatataagggaagttgcttcaaagccttctgaagcatcattgttagagggagacccacccttcaaatcacagatacctaaagagagtggcacaggacaggcagaagcaacaccaaatgaatttaattctcagggttcaattgaagcaactatggagaggccccttgagaaaccaagttgttctctaggaattaaaacatcaaatgcatctttacaggattcaacttctcagccaccaagcatcaccagtttaagtgtgaataatcttatccatcagagcagcatcagccatcctctggccagctgtgcgggtttatccccaacttcagagcaaacaactgtgcctgcaacggttaatctgaccgtttcatctagctcctatggcagtcaacctcctggaccatctctgatgactgaatattcccaagaacagctaaatactatgactagtaccataccaaattcacagattcaagagccactcttaaagccaagccatgaaagccgtaaggattctgctaagcgtgctgtccaagatgaccttttactgtcttcagctaaacgtcaaaagcactgtcagccagcccccctcaggcttgaaagtatgtccctgatgagcagaactccagacaccatttctgaccaaactcaaatgatggtcagtcagatccctcctaattcttcaaactcagttgtgcctgttagcaacccagctcatggagatggccttacacgattatttccacctagtaacaactttgtgactcctgcattgaggcaaactgaagttcagtgtggttctcagccttcagttgctgaacagcagcaaacccaggcaagtcagcatctacaggccctgcagcagcatgttccagctcaaggtgtatctcaccttcatagtaaccatctctacataaagcagcagcagcagcagcagcagcagcagcagcagcaacagcaacaacaacaagcagggcagttaagagagaggcatcacttatatcaaatgcagcatcatgtacctcatgcagagagctctgtccactctcagccccataatgtccaccaacagaggactctgcaacaggaagttcagatgcagaaaaagaggaatcttgttcagggcacccagacctctcagctttccttacaaccaaagcaccatggaactgaccaatcccgatccaagactggccagccacatccccaccatcagcagatgcagcaacaaatgcagcaacactttggaagctcccagacagagaagagctgtgaaaacccttcaactagtcggaaccatcataaccatccccagaaccatctcaatcaagatattatgcaccaacagcaggatgttggaagcagacagcaaggttcaggggtttcatctgaacatgtatctggccataatccaatgcagaggcttttgacatcaagaggcttagagcagcaaatggtgtcccaaccaagtattgtgactagatcttcagacatgacctgtactccacacaggccagagagaaatagagtttcaagttattctgctgaggcactcattggaaagacatcttctaattcagagcagagaatggggatatcaattcagggttccagagtttcagatcagcttgaaatgagaagctatcttgatgttcccagaaataagagtttggctattcataatatgcagggtcgtgtggaccatactgtggcctcagatatccgcctttctgattgtcagacgtttaaaccaagtggagctagtcaacagccccagagtaattttgaagtacaatcttcaagaaacaatgaaataggtaaccctgtatcatcattgcggagtatgcagtcccaggcttttcgaattagtcaaaacactggccccccaccaattgaccgtcaaaagagattatcttacccaccagttcagagcatcccaacaggaaatggtattccatcaagggacagtgaaaatacttgtcaccaaagtttcatgcagagcttacttgcccctcacctcagtgatcaggtcattgggagccagaggtcactctcagaacatcagaggaatacacagtgtggtccatcctctgcaattgaatataattgtcccccaactcatgaaaatgtccatattagaagagagagtgagagtcagaatagggaaagttgtgacatgtcgttaggtgcaattaacaccaggaacagcaccttgaatattcctttttcaagttcctcttcctcaggagatattcaaggtcgaaacacaagccccaatgtttctgtacagaaatccaatcccatgaggattactgagagtcatgccaccaagggccacatgaaccctccagtcacaaccaacatgcatggggttgcaaggccagcgttgccacatccatctgtgtctcatggaaatggcgatcaaggccctgctgtacgtcaagctaattcttcagttccccagagatcaaggcatcccctgcaagacagcagtggttccaaaattcgtcagcctgaaaggaatcgttctggaaaccaaaggcaaagtactgtctttgatccaagtcttccccatcttcctctctctactggtggcagtatgattcttggacgtcaacaacctgccacagagaagagaggaagtattgttcgtttcatgcctgatagcccacaagtacctaatgataattcaggtcctgaccagcatacactatcacaaaattttggtttttcttttattcctgagggtggcatgaatccaccaataaatgctaatgcttctttcattccacaggttactcagcctagtgccactcgaactccagccctcatcccggtagatccgcaaaatactctgccctccttctatcctccatactctcctgctcatcctacactgtccaatgatatttcaatcccctattttcctaatcagatgttctcaaatcctagcacagagaaggtaaacagtggaagtttaaataaccgatttggatcaattttatctcctcccagacctgttgggtttgctcaaccaagttttcctcttctcccagatatgccaccaatgcacatgaccaactctcacttatccaattttaatatgacatctttgtttccagaaatagccacagtgcttcctgatggctcagcaatgtcacctttgcttacaatagcaaattcctctgcctctgactcttccaagcagtcctcaaacagacctgcccataacataagccatattctaggtcatgattgcagttcagctgtttaaatactgataaacaaaatgtaaaggtaatgagtgagattacaaatgtatttgtgcgtgcatgtgcacagacatgtacatgaagagaaggattgtgtgtgtgtgtctgtataatcagttttcagttatcttctgaatgtagggaagccatgtcagatgcagatactgggttgtcagaaaacaagttatctttcgttttcaactgcatggtgtacttttttattttccaagtagatttacatttccaagttgatatttcctaaatactaattagctggaaattgggggagatcatcttgtcatgtactgggtagtaggagggagcctagactttaaacttgattgttgataacttatggaatatgtaggtaagttgctactgaaaaatataggcagcttgataaaacacagtggctcataatcaagtgctggctaatgtcagcatctagaacagcttcttacctatgacagatgttgaactgatgttgagtttaatgtccgtagttaaagtcaagcagttagcaaataaataaaagcaatcagcctttattctcaaagtttggtttagatacaggcttctttctaaattataacaatgcataaattatctgaattttatgtcttgttcttcaaattagggagctgtgttaccctttaatgtgccaagattatttaaagcaaaggtcttccttagacaattatttagccgtaaatatagaaagctaaaaagttaagtacatacatattctccgttttgtgcttgcattttgcatcgggtcataagggtaaaagcagttagttgtattgtggagttttgcatgggtgcagttaacaatggatgtttcatcagctgagtttaatttagtattctctcttcattctatttatttggtcttgaaataaattcttttgcattcatttaaatattaggattgatcaggaaatagtgtttgtaatctacacgtttatttgagccttactttaaaaatatttctgaacagagatttaagctctgtcagtattttcatttactgatagcatttatattttaaatatggcattgtatatttcattattatccttcataacagaattataatgagaatatgaatttgttatttttcttgttggtagatgtgaaatggtgcttcaaaaaatatatagtctttctgtatgtctctgtgtgtgtaagtatgtgtgtg

SEQ ID NO: 32403 - DNA, 8512 bp, Homo Sapiens
gccggagccgggccgggccatggccgcctcggagcggctgtacgagttgtggctgctctactacgcgcagaaggacctgggttacctgcagcagtggctgaaggcctttgtaggtgccttcaagaagagcatctcactgtcctctctggagccacgaaggccagaggaggcaggtgcagaggtcccgctgctaccactggatgagctgcatgtgctggccgaacagctgcaccaggctgacctggagcaagccctcctgctgctcaagctcttcatcattctctgcaggaacctggagaacatagaggcaggccggggccaagtgctagtgccccgagtgctggcactgttgaccaagttggtggcggagctgaaaggatgcccaccaccccagggccgaggcacgcagttggagaatgtggccctacatgctctgcttctctgcgagggcctctttgacccttaccaaacctggcggcgccagcgcagtggggaagtcatcagctccaaggagaagagcaaatacaagttccctcctgctgctttgccccaggaattcagcgccttcttccaagagagcctacagaatgcagaccacttgcctcccatactgctgttacgtctcatccacctcttctgcgccgtcctcgctggaggaaaggagaacgggcagatggctgtaagtgatggctctgtgaagggcctgctgagtgtggtgcggggctggagccgtgggccagccccggacccgtgcctagtgccactggctctagaggcactggtaggtgcagtccatgtcttgcatgccagccgcgcacctcctcgtggcccagagcttcgtgccctgcttgagagctacttccatgtccttaatgctgactggccagctggtctgagctcaggccccgaagaggcccttgtcaccctccgggtcagcatgctcgacgccatccccatgatgctggcatgtgaagaccggccagtgctgcaagccaccttcctcagcaacaattgctttgaacacctcactcggctcattcagaacagcaagctgtacctgcagtcccgggcgccccccgagggggacagtgacctggctacccggttactgactgagcccgatgtccaaaaggtcctggaccaagacacagacgccattgcagtccatgtagtcagagtgctgacctgcatcatgagtgactccccctcggccaaggaggtgtttaaggagcgcatcggctaccctcacctgcaggaggttctgcagagccatggtccccccacccatcggctgttgcaagagctgctcaacatggctgtggagggtgaccacagcatgtgcccacctccaccaatccgcaacgagcagccggtactggtgctggcgcagtggctgccgtcattgcccaccgctgagctgcggctcttcctagcgcaacgcctcaggtggctctgtgacagctgccctgccagccgtgccacctgtgtgcaggcaggcctggtgggctgcctgttggagacactcagcacagggctagccctggaggcccgctgccaagagcagctgctggcactgctacaagcactgggccgtgtatcaataaggcccatggagctgcgtcacctgctgcgcccccggccaggattggactcggaaccaggcggagctgaggctggaaaggcccgacacgcaggtgctgtcatccgcacattatcaggcatggccaggcaccagggtcctgcacgtgctctgcgctactttgacctcacgcccagcatggcgggcatcatggtaccccctgtacagcgatggccagggcctggcttcacctttcatgcctggctctgtctgcaccctatggatacagcacctacccctgcccccacccgaccactccagcgaaagcagctgtacagcttctttaccagcagcggctcagggtttgaggccttcttcacggcggccgggaccctggtggtggctgtgtgcacacggaaggagtatttgaccatgagtttgcccgaagtgtcctttgccgactctgcctggcactgcgtggctatcgtccatgtgcctgggcgccggcccttcagccagaacctggtccatgtctacaaagacggccatctggtcaagacagcaccccttcgctgcccctccctcagtgagcctttctcctcctgctgtatcggctccgctggataccgcacaacgaccaccaccacagggctgcccacaccaccagtccccgccaccctggcctacactcaccccgccctcacccgctcccagtcagtcccagcctccacagggcttggctgggggtccgggctggtggcccccctgcaggagggcagcatcgactctaccctcgcaggcacccaggacactcggtggggcagccccacatccctggagggtgagctgggggctgtggccatctttcacgaagccctgcaggcgacggctctgaggaccctgtgcaccctggggcccaatgagacggcacccttcaagcctgagggggagctgcatgagctcagcaccaggctgctcctccattactcacctcaggcttgtaagaacaacatctgcctggacctgtcccccagtcatgggcttgatgggcgcctgacgggccacagagtggagacctgggatgtgaaggatgtggtgaactgcgttgggggtatgggtgccctgctgcccctgctggagcgagtagctgcacagcccaaagaggctgaagcaggtccagctgaaacgcatgacctcgtgggtcctgaactgacctctggtcacaacacccagggcctggttctcccattgggtaaatcttcagaggaacggatggagaggaacgcagtggctgcttttctgctgatgctgcggaacttccttcagggtcacatggtgaaccaagagagcctggtgcagtgccaggggcctgccatcatcggggccctcctgcgaaaggtcccaagctgggccatggacatgaacgtgctcatgtccgcccagctgctgatggagcaggtggcagctgagggcagcgggcccctcctgtacctactctaccagcatttgctcttcaactttcacctctggaccctcagtgacttcgccgtgcgcctcggtcacatccagtacatgtccagcatagttcgggagcacagacagaagctgcggaagaagtacggcgtccagtttatcttggatgctctgcgcacccactacagcccgcagcgggagcgccccctggctgctgacgacctacgcaccgtgcagacctccctcctgggcctggcgagggagttcctggtgcggagtctctcagcagatgacgtgcaggtcacgcagaccatgctgagctttttggcggccacaggcgatgacggtcaggcggtgggtgcgctggacctgctgctggccctgctgcacggttccctggtgcaggagtccttggctgtctttctgttggagccagggaacctcgaagtgctactggccctgctagtgcggccagggtcactgcccctgctgcccgatcgagtctgcaagatcctgcgcagactgcagcagaatgagcggctacctgagcggagccgccagcgcctccggctgcgggagtgtggtctccagggtctggttgcctgcttgcctgaggggactgtttccccccagctctgccagggcctctacaagctgttcctgggggcagattgcctgaacctctcagatctgctggctgtggtacagctgtccctccaggctgacctcagcgttcgcctagacatctgtcgccagcttttccacctcatctacggacagccagatgtagtgcggcttctggcccgacaggctggctggcaagatgtgctgacccggctatatgtcctggaggctgccacagccggcagcccccctccgtcttccccagagtcacctacctcccccaagccagccccacccaagccacccactgagtcacctgctgagccttcagatgtcttcctgccctcagaggccccctgccctgaccctgatggcttttaccatgctctctccccattctgcacgccctttgacctgggcctggaacggtctagtgtaggatcaggcaacactgctggtggtggcggcagcagtgggactcttactccagccagccagcccggcactccttcgccactggatgggccgcggccctttcctgctgctcctggccgccacagctccagtctctccaatgtgctggaggacggcagcctcccggagcccaccattagcggggatgatacctcgaacaccagcaacccacagcaaacctctgaggaagagttgtgcaatctgctcaccaacgtgctgttctcggtgacgtggcgtggcgtggaaggcagcgatgaggctgcctggcgggagcgtggccaggttttctcagtgctcacccagctgggggcctcagccacacttgtgcgcccaccagactgcatcaagcgcagcctcctggagatgatgctggagtcagccctgaccgacatcaaagaggcccccgtgggggtcctggccagcctcacccagcaagcgctttggctgctgcgtctgctgcaggacttcctgtgtgctgaaggccatggtaaccaggaactgtggagtgagaagctctttgaaggtgtatgcagcctacttgatcgcctgggagcctggccccacctggccaacggcacagctgatctccgtgagatggcgcagattggcctacggcttgtacttggctacatcctgctggaagacccacagctgcatgcccaggcctacgtgagattgcacatgctgctacagactgcagtgccagcccgccgcgaggaggcctgctatgtgctctccaagctggaggctgcactggggcgggtgctgaacacctcttccttggagtcagccactgatgaggcagggtccccacttgcagctgcagcagctgcagcagctgcagagcgctgctcctggctggtgccactggtgcgcacgctgctagaccgtgcctatgagccgctggggctgcagtggggactgccctccctgccacccaccaatggcagccccaccttctttgaagacttccaggctttttgtgccacacccgaatggcgccacttcatcgacaaacaggtacagccaaccatgtcccagttcgaaatggacacgtatgctaagagccacgaccttatgtcaggtttctggaatgcctgctatgacatgcttatgagcagtgggcagcggcgccagtgggagcgcgcccagagtcgtcgggccttccaggagctggtgctggaacctgcgcagaggcgggcgcgcctggaggggctacgctacacggcagtgctgaagcagcaggcaacgcagcactccatggccctgctgcactggggggcgctgtggcgccagctcgccagcccatgtggggcctgggcgctgagggacactcccatcccccgctggaaactgtccagcgccgagacatattcacgcatgcgtctgaagctggtgcccaaccatcacttcgaccctcacctggaagccagcgctctccgagacaatctgggtgaggttcccctgacacccaccgaggaggcctcactgcctctggcagtgaccaaagaggccaaagtgagcaccccacccgagttgctgcaggaggaccagctcggcgaggacgagctggctgagctggagaccccgatggaggcagcagaactggatgagcagcgtgagaagctggtgctgtcggccgagtgccagctggtgacggtagtggccgtggtcccagggctgctggaggtcaccacacagaatgtatacttctacgatggcagcactgagcgcgtggaaaccgaggagggcatcggctatgatttccggcgcccactggcccagctgcgtgaggtccacctgcggcgtttcaacctgcgccgttcagcacttgagctcttctttatcgatcaggccaactacttcctcaacttcccatgcaaggtgggcacgaccccagtctcatctcctagccagactcccagaccccagcctggccccatcccaccccatacccaggtacggaaccaggtgtactcgtggctcctgcgcctacggcccccctctcaaggctacctaagcagccgctccccccaggagatgctgcgtgcctcaggccttacccagaaatgggtacagcgtgagatatccaacttcgagtacttgatgcaactcaacaccattgcggggcggacctacaatgacctgtctcagtaccctgtgttcccctgggtcctgcaggactacgtgtccccaaccctggacctcagcaacccagccgtcttccgggacctgtctaagcccatcggtgtggtgaaccccaagcatgcccagctcgtgagggagaagtatgaaagctttgaggacccagcagggaccattgacaagttccactatggcacccactactccaatgcagcaggcgtgatgcactacctcatccgcgtggagcccttcacctccctgcacgtccagctgcaaagtggccgctttgactgctccgaccggcagttccactcggtggcggcagcctggcaggcacgcctggagagccctgccgatgtgaaggagctcatcccggaattcttctactttcctgacttcctggagaaccagaacggttttgacctgggctgtctccagctgaccaacgagaaggtaggcgatgtggtgctacccccgtgggccagctctcctgaggacttcatccagcagcaccgccaggctctggagtcggagtatgtgtctgcacacctacacgagtggatcgacctcatctttggctacaagcagcgggggccagccgccgaggaggccctcaatgtcttctattactgcacctatgagggggctgtagacctggaccatgtgacagatgagcgggaacggaaggctctggagggcattatcagcaactttgggcagactccctgtcagctgctgaaggagccacatccaactcggctctcagctgaggaagcagcccatcgccttgcacgcctggacactaactcacctagcatcttccagcacctggacgaactcaaggcattcttcgcagaggttgtcagtgatggtgtacccctggtgctagccctggtcccccaccggcagccccactccttcatcacccagggttccccagacctgttggtgactgtgagtgccagtgggctgctgggcacccacagctggttgccctatgaccgcaacataagcaactacttcagcttcagcaaagaccccaccatgggcagccacaagacgcagcgactgctgagtggcccgtgggtgccaggcagtggtgtgagtggacaagcactggcagtggccccggatggaaagctgctattcagcggtggccactgggatggcagcctgcgggtgactgcactaccccgtggcaagctgttgagccagctcagctgccaccttgatgtagtaacctgccttgcactggacacctgtggcatctacctcatctcaggctcccgggacaccacgtgcatggtgtggcggctcctgcatcagggtggtctgtcagtaggcctggcaccaaagcctgtgcaggtcctgtatgggcatggggctgcagtgagctgtgtggccatcagcactgaacttgacatggctgtgtctggatctgaggatggaactgtgatcatacacactgtacgccgcggacagtttgtagcggcactacggcctctgggtgccacattccctggacctattttccacctggcattggggtccgaaggccagattgtggtacagagctcagcgtgggaacgtcctggggcccaggtcacctactccttgcacctgtattcagtcaatgggaagttgcgggcttcactgcccctggcagagcagcctacagccctgacggtgacagaggactttgtgttgctgggcaccgcccagtgcgccctgcacatcctccaactaaacacactgctcccggccgcgcctcccttgcccatgaaggtggccatccgcagcgtggccgtgaccaaggagcgcagccacgtgctggtgggcctggaggatggcaagctcatcgtggtggtcgcggggcagccctctgaggtgcgcagcagccagttcgcgcggaagctgtggcggtcctcgcggcgcatctcccaggtgtcctcgggagagacggaatacaaccctactgaggcgcgctgaacctggccagtccggctgctcgggccccgcccccggcaggcctggcccgggaggccccgcccagaagtcggcgggaacaccccggggtgggcagcccaggggggtgagcggggcccaccctgcccagctcagggattggcgggcgatgttaccccctcagggattggcgggcggaagtcccgcccctcgccggctgaggggccgccctgagggccagcactggcgtct

SEQ ID NO: 32404 - DNA, 4862 bp, Homo Sapiens
atggaaaatgaaccagaccatgaaaatgtggaacagagcctctgtgccaagacgagcgaagaagagctgaataagtctttcaatctagaagcttcactttcaaaattctcttacatagatatggacaaggaactggagttcaaaaatgatctgattgatgacaaggagtttgatattcctcaagttgatactcctccaacactggaaagcatactaaatgagactgatgatgaagatgagtcttttattcttgaggatcctacattgttaaacattgatactattgattctcactcctatgatacttcatctgtggcaagctcagatagtggtgacaggaccaacttaaaaaggaagaagaaattacctgattctttttcacttcatggatcagttatgcgccattcacttttgaagggaatttctgcccagatagtgtctgcagctgacaaagtagatgctggcttgcctacagcaattgcagtatccagtctgatagcagtgggtacatctcatggattggctttaatatttggaaaagatcagaatcaagctttgcgactctgtctgggtagcactagtgttggaggtcagtatggcgctatctctgccctcagtatcaacaatgattgctcaagacttctttgtggctttgctaaaggacagatcaccatgtgggatttggccagtggaaaacttctaagatcaataacagatgctcatcctccaggaacagcaatattgcatatcaagtttacagatgatccaactcttgcaatttgcaacgacagcggaggctctgtttttgaattgacatttaagagagtgatgggagtgagaacctgtgaatctagatgtctgttcagtggttccaagggtgaagtctgctgtattgagcctctgcattctaagcctgagttgaaagatcatcccatcacacagttttcattattggccatggcatccttgacaaaaatactggtcattggattgaaaccatccttgaaagtatggatgacttttccctatggccggatggatccttccagtgtgccactgctggcctggcactttgtagcagtacaaaattacgtgaatcccatgcttgccttctgcagaggagatgttgttcattttctattggtaaagagagatgaatctggagcaatacatgttactaagcaaaagcatcttcacctatactatgacctcatcaactttacctggataaattcacgcacagttgtgctcttagacagcgtagagaagttgcatgtgattgatcggcaaacacaagaggaattggagacagtggagatctcagaagttcagctggtctacaatagcagccatttcaaatcactagccactggaggaaatgttagccaggcactggctttggttggagagaaggcttgttatcaatccatcagtagctatggtggtcagatcttttatttggggacaaaatctgtttatgtgatgatgctgaggagctggagagagagagtggatcatctcctgaaacaagattgtcttacagaagcgttggctcttgcgtggtctttccatgaaggaaaagcaaaagcagtagtgggattatcaggggatgccagtaagcgaaaggctattgttgcagaccggatggtagaaatcctattccattatgcagatcgagctctgaaaaagtgcccagaccaaggaaaaatccaagtgatggagcagcattttcaggatatggtgcctgtcatagttgattactgccttctgctgcagcgaaaggatcttttatttagtcagatgtatgataaattaagtgagaattcagtggccaaaggagtatttttggagtgccttgagccatatattttaagtgataaattggtgggaatcacaccccaagtaatgaaagacttgattgttcatttccaagataaaaaattaatggaaaatgtggaagcgctcattgtacatatggatatcaccagcctagatattcagcaggtagttctcatgtgttgggaaaatcgtttatatgatgctatgatctatgtctacaacagaggcatgaatgaatttattagtccaatggagaaacttttcagagtcattgctcctcctctgaatgcaggaaaaacactaacagatgaacaagttgttatgggcaataagctccttgtatatattagctgttgtctagcaggtcgtgcctatccccttggtgacatccctgaagatctggttcccttggttaaaaaccaggtttttgaatttctaattcgcctgcattcagcagaggcttctcctgaggaagaaatctatccttacattcggactttgctacattttgacacaagagaatttctaaatgtattggcactgacttttgaagattttaaaaatgacaagcaagctgtggaatatcaacagcgaattgtggatattttgttgaaagttatggtggagaattcagactttaccccctcacaagtaggatgtctctttaccttccttgctcggcagcttgcaaagcctgacaacaccttgtttgtaaacagaacactttttgatcaggtccttgaattcctttgtagtcctgacgatgactcccgacactctgaaagacagcaggtccttttagaattgctgcaggctggaggcatagttcaatttgaagagagtcgactcatccggatggcagaaaaagctgagttctatcaaatttgtgaatttatgtatgaaagagaacaccaatatgataaaattattgattgctacttacgtgaccctctgcgagaggaagaagtctttaattacattcacaatatcttatccattcccggacacagtgcagaggagaagcagtctgtatggcagaaagcaatggatcatattgaggaactcgtgtccctgaagccttgtaaagctgcggagctggttgccacccacttttctggacatattgaaacggtcattaaaaaacttcagaaccaggttttgcttttcaaatttttgaggagtcttcttgacccaagggaaggtattcatgtaaatcaagaattactgcaaatatctccttgtatcacagagcagttcattgagctgttgtgtcagttcaacccaacccaagttatagagactctgcaagtccttgagtgctaccgtctggaagaaactattcagattactcagaagtatcaacttcatgaagtcaccgcttatctattggaaaagaaaggagatattcatggtgccttcctaataatgttagagagactacaaagcaaacttcaagaggtaacacatcaaggtgaaaataccaaagaggatccctcattgaaggatgttgaagatactatggtggagaccattgctctttgccagagaaattcacataatttgaaccagcagcaacgtgaggcactttggtttccgttattggaggcaatgatggcccctcagaagctgtccagttcagccattcctcatctacactctgaagctctgaagtctttgaccatgcaagttttaaatagcatggcagcatttattgcccttccatcaatcttgcaaagaatcttacaggatccagtttatggaaaaggaaaacttggagaaatccagggacttatcttgggaatgttagatacctttaactatgaacaaaccctgctggaaacaacaaccagccttctaaaccaagatctccattggtcattgtgtaacctgagagcttcggtcaccagaggactgaatcccaaacaagattactgctctatatgtttgcagcagtacaagagacgccaagaaatggctgatgaaataattgtctttagctgtggccatttgtatcactcattctgcctacaaaacaaagaatgcactgtggaatttgagggccaaacaagatggacatgctacaaatgcagttcaagtaacaaagtaggaaaactcagtgaaaattcatctgaaattaaaaagggaaggataaccccatcacaggtaaaaatgtctccatcgtatcatcagtccaaaggggatcccactgctaaaaagggaacctcagaacctgttctggatccacagcaaatccaagcatttgatcagctttgccgtctctaccgaggaagctccaggctggctctcctcacggaactctcccagaatcgcagcagcgagagctataggccattcagtggctcgcagagtgctcctgctttcaacagcatcttccagaatgagaacttccagctgcagctcattcctccacctgtgactgaggattgatgactccatggagcctggcccaggagaaccagagatgatcccgaggcagctggggagaggccccgcctctggtgggcttggcctccaccacctcccacgcttctgagaagaggttccaaattgggcttctgtgcccagagcgtccacagcaccattcccagtgtagactcccagtcttctccacattgctgtcatggcgtcagttcaccagactcattgattttgttttgcttgttaagcaaaggaatgtcacatacctctgtccagctttttaggaaatacatttcgcctattgcgactttttccatttaccctgaagcctagaaagtaggtggaactcacacaaatggcattccagagtctgccatactccgtctcctccagctgctggataatacagaggaacttcaacttctacagggaacagtggttggccaggctgcagtataactgaagcatgccttggagagagcagacactgtgggggccagggccatctccctttaatgtgttcatgttaaaacctatttgagtgtaagacttgccctttctaacaataaatgctccgtgtttaa

SEQ ID NO: 32405 - DNA, 7840 bp, Homo Sapiens
cgcaggccagggccgcccggcgctcggcagccgcccgcagcccctcggagccagaggagaggcgcccccgccggccgccgcgccgcccggcagcctcggcaggtagtgtacactgataaaggtagggcgcggtggactctgcccctgtaaccgttccggagaatgcgttgagaatgaagacaaccagttctgccggagacttccatttggcctcaatgtgaaattaaagtagaaaatcacatctacatgcatgttgctatcaggatgttgattcattagtcatgcctgaagagggaaagtctgttttaggtggctgactaccagcaaaaataaatgcttatcctacatgtcaagcatctctactttttactggagtgaaaatcccctccagataccaacagaatatcaactgcagaaaatgcttcacattttaaggatgtcggcaacctaaattcatgtaccctatctgtacagttgttgtggatggtttgccatctgaaagctcctcaagttcttatccaggccctgtgtctgtttctgaaatgtctctgcttcatgctttgggtccagtgcagacctggctgggacaagagctcgagaaatgtggcattgatgccatgatttacactcggtatgtcctcagtcttctgctgcatgacagctatgactacgacctgcaggaacaggagaatgacatcttcctgggctgggaaaaaggagcttataagaaatggggaaagagtaagaaaaaatgttcagatctaactctagaagaaatgaaaaaacaggctgctgtccagtgtcttcgatctgcttctgatgaaagctctggtatcgagactttagtggaggagctctgctccagactgaaagaccttcagagtaagcaagaagagaagattcacaaaaagttagaggggtctccctctccagaggcagaattatcccctccagcaaaggatcaagtggaaatgtactatgaagcatttccaccactttctgagaaaccagtttgcctgcaagaaatcatgactgtgtggaacaagtctaaagtctgttcttactctagctcttcttcatcatccacagccccaccagctagcacagatacttcctctcctaaggactgcaacagtgaaagtgaagtcaccaaggaaagaagcagtgaagtacccaccactgtgcatgagaaaacccagagcaaaagcaaaaacgagaaggaaaacaaatttagtaatggcacaattgaagaaaagcctgctttgtacaaaaagcaaatccgacataaacctgaaggaaagattcgccctcgctcgtggtcttctggctccagtgaagcaggctcaagttccagtgggaatcagggagaattaaaagcatccatgaagtatgttaaagtaagacacaaggcacgagagattcgaaacaaaaaagggcggaatgggcaaagcaggctttctttgaagcacggtgaaaaggctgaaaggaacattcatactggaagtagtagcagtagcagcagtggttctgtcaaacagctgtgcaagcggggtaagagacctttaaaagaaatagggagaaaagatcctgggagcactgaaggaaaagacctgtacatggagaatagaaaggacacagagtataaagaggagcccttgtggtacaccgagccaattgctgaatattttgttcctctgagcagaaaaagtaaactagagaccacataccgaaacagacaggatacaagtgatctgacatcagaggcagtggaagaattgtctgaatcagtgcatggtctttgtatcagcaacaataatcttcataaaacatacctcgcagcaggtactttcattgatggtcattttgtagaaatgcctgcagttataaatgaggatattgacctcactgggacctcattatgttctctaccagaggacaataaatacctggatgatattcatctatcagaattaacgcacttctatgaagtggatattgatcaatccatgttggatcctggtgcctcagaaacaatgcaaggagaaagtcggattttgaatatgattcgacagaaaagcaaagagaacacagattttgaggcagaatgttgcatagtgttagatggtatggagttgcaaggggaacgtgcaatatggacagattctaccagctccgtaggtgctgagggcttattcctgcaggaccttggcaatctggctcagttttgggagtgctgttcatccagctccggtgatgctgatggggagagttttggaggagactctccagttagactctctcccatcttagacagcacagtgctcaattcacacctgcttgctggcaatcaagagctcttttcagatattaatgaaggatctggtataaactcttgtttttcagtgtttgaagtgcaatgcagtaattctgttttaccattttcttttgaaacactcaacttgggaaatgaaaatacagattctagtgctaatatgcttgggaaaacacagtctagattgctaatatggaccaaaaatagtgcctttgaagaaaatgaacactgttctaatctttcaacaagaacttgtagtccatggtcccattcagaagaaacacgttcagacaatgaaacattaaatattcagtttgaagaatccacacagtttaatgccgaagatattaattatgtagttcctagagtctcgtcaaattatgtagatgaagaacttctagattttttgcaagatgaaacttgccagcaaaacagtagaactttaggtgagattcctacattagttttcaaaaaaacatctaaactagaatccgtctgtggtattcagctagaacaaaaaacagaaaacaaaaattttgaaactacacaagtatgtaatgaaagtccacatggagatggctacagctcaggggttattaaagacatttggacaaagatggcagacacaaattctgtggctacagtagaaatagaaagaactgatgctgagttgttttcggcagatgtaaataactactgctgctgtctagatgctgaagctgaactggagacccttcaggagcctgataaggctgtgcggaggtcagagtaccatctgtgggagggacagaaagagagcctggagaaaagagcatttgcttctagtgagctatcaaacgtggatggtggtgattatacaacaccctctaaaccctgggatgtagcccaagataaagaaaacacattcattcttggaggagtttatggagaactcaaaaccttcaatagtgatggggagtgggcagtcgtaccacctagtcacacaaaaggaagtctgttacagtgtgcagcttctgatgttgtgacgatagctggtacagatgtctttatgaccccaggaaacagttttgctcctgggcacaggcagttatggaaacccttcgtgtcatttgaacagaatgatcagccgaagagtggggaaaatgggttaaataagggattttcttttatcttccatgaagacttactaggagcttgtggcaactttcaagtcgaagatcctggacttgaatactcattttcttcctttgacttaagcaatccattttcacaagttcttcatgtagaatgctcatttgaacctgaagggattgcatctttcagccccagttttaaaccgaaatcaatcctctgttctgattcagacagtgaagtgtttcaccccaggatatgtggtgttgacagaacacaatacagggctattcggatctctcctcggactcactttcgcccaatttctgcatccgaactgtccccaggaggaggaagcgagtcagaatttgaatctgagaaagatgaagcaaatattcccattccttctcaagttgatatatttgaagatccgcaggcagatctcaaacctttggaagaagatgcagagaaagaaggccattactatggaaaatcagagcttgagtctggaaaattccttcccaggttaaaaaaatctgggatggaaaagagtgctcagacatcactggattcccaggaggaatcaactgggattctttcagtaggaaagcaaaatcagtgtttggaatgtagcatgaatgaatccctggaaatagatttagaaagctcagaagcaaattgtaaaataatggcacaatgcgaggaagaaattaataatttttgtggttgcaaagcaggttgtcagtttcctgcttatgaagataatccagtttcttcgggacagctggaagagttccctgtattgaacactgatatacaaggaatgaatagaagtcaagaaaaacagacctggtgggaaaaagccttgtactctcctctttttcctgcatcagagtgtgaagaatgttacacaaatgccaagggagagagtggtttagaagaatatccagatgctaaagagacacccagtaatgaagagcgcctgttagattttaatagggtgtcttctgtttatgaagcaagatgtacaggagagagagattctggagcaaagtcagatggcttccgcggaaagatgtgctccagcgccagctccacctcggaagagacaggctcagaaggcggaggcgagtgggtgggccctagtgaagaggagctcttttctcgaactcatctctaaacctgcaaaatagtacaaattattgtttaaaaatgatatgtgatggaaaattactcttcagtgagacctgttaatctaaaacaacaacttaggtttcctcttcaattaactgattcagattggtaataattatctttctcttcttgcttattttagagttgaggacagctatcctgttaaagattttttttcccagctgttaaattcttggctatttgaaatagactagattgtgttgtcaaatcaagaatgggtgtgcatgtgcttgtcttagaagtatcactgctttttgcatcttaactgcagttaattttccttccgactgcggttatatcactatgaccttactagcattgcagtgtcaacaaccacttctgctcttcagagacttcagctttggagcatttaggctttgttctccaagaactgggatatccattcttaccctacagtggcttgatgcctttctgaaggcgagagggaagcctgggtgactcagcggtggtctccattcagcaaaatctcatgtacatttccagtaggaaccgcagaggtgtgcttttcaagactcaccaaatactgtgttttctctcttaggatttcttttcccctaaagtatcacggaagatactatggttcgtgactttcttgctaactgaagaagccaaggatttggggtgtggggtcgtatgcgagacacagtggggtaagggtgcataccccaccccttacctgctctcatactgcagttacatttacaccaaaaccccatgcagggttctttgtggtgagtgttccatacgtgctaaggaccttagttacagattgttactttctggtgacctatgttgaattgaaacccccaaaacttgaaattgtgaacatttgacatgcagtaaaggccacctcatcacccagagaaatctttggctgctgcagctagccgcttcttggctgtgatgtagtatagcttcgatctcattttgtgtttgagagaatgttctgggcaagttctgtgtgtggtgggttggggcgggtagagtcatgagttttccacatccctgtgtggtggttttgctgactgtcgctccgtgggactggctcccgtttctccttggtgagcccggggagccggcgcatcttgtgagtcgcgtctgtgcatggcgatccgctcctccggctctcatggcattgtgccacaggcagaggccaggaggagcagtatgtgcacagccgaaacattttacattttttacattgtttttcttttttaaccaactcattgtttaaaaaacaaaaacaaaaaaaacctaatctgtgaaatcagcgtagcatgcctggagcatcaggaatggcagaaaagtctgatgcgctctagacagcttcaccactcatttgggcaggcagtaaacacacatataatttattagctgggagctgaactggctgtgaaatctatgatttgctttgaacatttgggttttgttgcctttttcttaattgataacacagaaaagaaagtaccatcaaagactgtggagtcattgagggtctgtgtgtcctcaccgagagggacctggtgtgcccgccgggtcgatcttcccacgtgttagggtttatttttatacaacacattttttgacactttaaggtgggtgggtgtgtgtgtgtgtgtgtgtgtgcgcgcgtgcgcgcgcgcatgtgtaaggttttatgttgctgttatttatttacgaacttcagatacgtttttatgtatttttcattcttctggagcttcctaaaaattgataagcatctgcactgaaatataatttaacagcaaaagtaaaaaaggattgaaagttgtaaattcctcatatcactacagtgacgattattctagaaatcgttgcttgtgtagcaaagaccaaataaatagatttcagacacaaccttgagcacagttgattttggacagctgctgtttattaggaaagggctccaggtggcaaaggtgcacacttcctcagacacaggtgagaagatgcagcaccttccacaggtgaatgggacggattcgaagtgagcaaagggattcacaaattatgtatttatttgttttcatagttaagtagctgaagctcagaggctttcagcaacagagatgaaagtgtggctttttagttttgtgaatggatgatcacaaagaaaaagcatttttaaaaagttggcaaacgctgaaacgcactgtggtatgaagcgcattgcatttccatagcactgaagtaccagtttccattcctgggctgagattgtttttcccgtggttgtattgttctgatttcacgtacaccagagtaactgatttttttttgtttgttttcttgtggagttaacaccaaataaaaattgtaaaaaacagtttgttgtttttatttctcatagcaaagcttcttttgtaaagaactccagcttccttttactcatgagcatccgtggaagagcaagtgcccaggttacatttgttctagatggaggtcatttagctctcattgcagacactgctgaaaacattgtgcagctttgctagggaagaaagtggtgtggcctgctgagaaatcagcggctcctccccatctcacccccagcacacgcagggactactacctgagtctgcaaaacacatagcatttttgtccgtggatggtacacaaagctcaatctttttgttttcttctggggaaaaaattaaatctttatatgttaatatgattgatattcattgtgcaaaaaaaatcagtgtgtttttaaagaagtataagggaaaaggaaaactcatatgtccttctgtcactctgagacatacactggtaacatctgtgcaagcccctttccaggattctgaatgtacagtatatatgaatgcatacacagagaaatttacattcaagagtgtactatacttgttcttctataacatcagaaataggtttttactcagatgtcttcatgtcggtaattatagaactacataattatttttatagctgtattatgtagatttaacaggttcctcattgataaaacaatgtttttttggttgtttattcagtatctgaataacgtttctatggacatctgtaaacatgtatgaggggacttttaaaagttcatggaaaatggaattaaaagaaaaataaaaaaatataaacttt

SEQ ID NO: 32406 - DNA, 6592 bp, Homo Sapiens
actgtctcccgcccacctcagccttcgggctaggttgagtgagggctcttgggttagttcctgttaggccccggccgggggagtaggttgaagtctcctaagatgcccggtgggctggggcaccgggagctgtgaagggaacgtgagggggcggcgtagtggagacccacggcaggcctgaagaagagcggcggccgagcccgccttccctgcaccatgctcatagaggatgtggatgccctcaagtcctggctggccaagttactggagccgatatgtgatgctgatccttcagccttagccaactatgttgtagcactggtcaagaaggacaaacctgagaaagaattaaaagccttttgtgctgatcaacttgatgtctttttacaaaaagaaacttcaggttttgtggacaaactatttgaaagtctctatactaagaactaccttccacttttggaaccagtaaagcctgagccaaaaccactagtccaagaaaaagaagaaattaaagaagaggtatttcaggagccagcagaggaagaacgagatggcagaaaaaagaaatatcctagtccccagaagactcgttcagaatctagtgaacgaaggacacgtgagaaaaaaagagaagacgggaaatggagagactatgaccggtactatgagcggaatgaattgtaccgtgagaagtatgactggagaagaggcaggagtaagagtcggagtaagagtcgaggcctgagtcgcagtagaagccgaagtagggggcgcagcaaagaccgggatccaaataggaatgttgagcacagggaaagatcgaagtttaagagtgaaaggaatgacctggagagttcctatgtgcctgtgtctgcaccacctccaaactcttctgagcagtattcctctggggcacagtctattcccagcactgttactgtgatcgcacctgctcaccactctgaaaacacaactgagagttggtctaattactataacaatcatagctcttccaattcttttggtcgaaacctaccaccaaagaggcgatgcagagattatgatgaaagaggattttgtgtacttggtgacctttgtcagtttgatcatggaaatgatcccctagttgttgatgaagttgctctgccaagtatgattcctttcccaccccctcctcctgggcttcctcctccaccacctcctggaatgttaatgcctccaatgccaggtccaggcccaggcccgggcccaggtccaggcccaggcccgggcccaggtccaggtcctggccatagtatgagacttcctgttccccaaggacatggtcagcctccaccatccgttgtgcttcccataccaagaccacctataacacaatcaagcttgataaacagccgtgaccagcctgggacaagtgcagtgcccaatcttgcatcagtgggaacaagactacctcctcctttaccccagaacctcctttacacagtatcagaacgacagcccatgtactctcgtgaacatggtgctgctgcatctgagcgacttcagttggggacaccgcctcctctgttggcagctcgtttggtgccacctcgaaacctcatgggatcctccattggataccatacctcagtctccagccctacccctctggttccagatacatatgaaccagatggttacaacccagaagctcctagtattactagttctggtagatctcagtacagacagttcttttcaagaactcagacacagcgtcccaatctgattggcctaacatctggagatatggatgtaaatccaagagctgctaacattgtgatccagactgaaccaccagttcctgtttcgattaatagcaacataaccagagtagttcttgaaccagatagtcgaaaaagagctatgagtggtttggaagggccactcacaaagaaaccttggctgggaaagcaaggaaataacaatcaaaataaaccagggttcttacgaaagaatcagtatacaaacaccaaattagaagtcaagaaaatccctcaggaattgaacaacattaccaagctcaatgaacacttcagcaaatttggaactattgttaatatccaggttgcttttaagggtgacccagaagcagccctaatccaatatcttaccaatgaggaggccaggaaagccatttctagcacagaagcagttctaaacaaccgattcattcgagtcttgtggcatagggaaaataatgagcaaccgacactacagtcctcagcacagctgctcctgcaacaacagcaaacacttagtcacctctcacagcagcaccatcacctgccacagcatctacatcagcagcaggtgctagtggcccagtctgctccttcaacagtgcacggaggtatccagaagatgatgagcaaaccacagacatcaggtgcatatgttcttaacaaagttcctgttaaacatcgtcttggacatgcaggtggtaaccagagtgatgcatcacatttgttgaatcagtctggtggtgctggagaagattgccagatattttcaactccaggccatccaaaaatgatttacagctcctcaaacttaaagacaccttcaaagctctgttcagggtctaaatctcatgatgttcaagaagtgcttaaaaaaaaacaggaagcaatgaagttacaacaagatatgaggaaaaaaagacaggaagtgttagaaaagcaaatagaatgccaaaagatgttaatatccaagttagaaaaaaacaaaaacatgaaaccagaagaaagagcaaatataatgaagactttgaaagagcttggagagaagatctcacaattaaaagatgaattaaaaacatcttctgcagtctccacaccatctaaagtgaagacaaaaacggaggcccagaaggagttattagatactgaactggacctccacaagaggctgtcctcaggagaagacaccacagaattacggaaaaaactcagtcagttacaggttgaggctgcacggttaggtattttacctgtgggtcgaggaaagaccatgtcctctcaaggtcgaggaagaggccgagggcgtggaggaagaggaaggggctcactaaatcacatggtggtggaccatcgtcccaaagcactaacagttggaggattcattgaggaagaaaaagaagacttgcttcagcatttctcaaccgcaaaccaagggccaaaatttaaagaccgtcggctacagatatcatggcacaagcccaaggtaccatctatatccactgagactgaagaagaagaagtcaaggaggaggaaacagaaacctcagatttgtttttgcctgatgatgacgatgaagatgaagatgaatatgagtctcgctcatggcgaagatgaaatctgatgctagctgtataatttttaggaatattgtttagaagaacaacttttaaaaattatttaaaagaagtcaatgagccaaaaaaaatttttttatttttcttttcaacacagtaggttcaagaacagcaagtttgctatttaaacacatctcataactgtacatgatattaaagcaccaaaggcctagtgacttttacacagttgtgaagatccacagcaatgacatggataatctctagagccttattttccacaccaccttttttttgttgctgttggtgttggattatgatgtaaatgacagggtgttcagaaattttattttggattataatctactgataaaatttaattaaatgtcaaaatcacctgtaatcttttaactctcagttgttatggatgggtcatcagacagtaggaaatatttgtaattaaaatacccttttgctttcaagagtggtcttggaagaaaaatatgtttattttaattttaatttttttttttttttactttggaggagcccaatttgtattcagtctaaatttgtttttcatggtttttatgtgtggtagtactagttcagtgaaaatcacaacaaactgtgtgttcttaaatgctacagcaatggtagctagctctatagtatttccattctcttgtcatatgaactcctggacttttcctgctactgattcttagtttgctttgatatttagtgagcgctggttcggctggtctttttaaaaatttttataactcagaatgtaaaaggctttcacctattgcccctttctcgtcccccttttcttcctcttgcctttctattaataggcctgacttagtcatcattgatataagtggttcatttgggcaaccgcaggcagtctccaataaaaggttcaaaccagcacctggataaataagtgatgttttgatgagaatgatggaaggattttggggagaagagaatcaccagctttattttttccctcttttgaagcttcagttcagtatagttacacagaagggtttaaaaatgtctgaaattcttttcctaaatttaaaccatgatggtgaggtgactggggggtggggggtggaggtgggagggggttgagggctgagtatgctagtaataaatgggagtcatatatgactttgttcagatgaccttattttttcataattttgtagcttgttgctatccatgaacatacgcatccctcagtagacagtttcctttactgtgtgcatttttactgtacactgtatagagtagagtatctgttaagtaaaatatatatgtaaatttatgtcttcgtgttctgaatgttagatggaaaagcagaggagcaacactacactgtactgacccctgggaaaataaaatgattaatgtacctaggctgtcactttttcaaggatatacacatctgtgtttttatatatgtgtggtatgaaaatttgaaacctcctgttgtctccaaaagggtcttggtgaccactatatcaaggattttgtttgctgaggtaaagacaatttctcaatatagaaactattcactaagaacttaaaaccatcaggattctagatttacttagctataagaagttaaatcccacgttctgataatctttattcttctacatgttttcctggaatgatgtgtcaaaccagggtcatttttaagttcatataattttctttcataataatgaggacttcctttttctaggttattgttatatttctagtaacactgaaggtaaaataagcttataaaagaaggaaaacatcagaatggtgtatctagaatacacaatcttgctccttactcctccatcatctctaatgaaatttttcttgatgtctgtggctcagtcagtatatattttgaaagattcattgtggtgaatattttgagtcctgacagtttaaacgtgatagagggaacaaaggatttatatattttttgtacaaagttttttcttaaactgtataattttgtaaataatttgtttgggttttttttttgtgtactaaaactaccagcgtatagatttcaataagaattgttgtatttttgtatttggaaactgaaaattacagtaaataaatggaactctaagaaaaatttcagtagacagttcaacagaatgagattccttttcatatgatttttttgacctcaaaatggacatcttatttcactctcagtaaaaagttgaaaatttgactttttagtattgggggcagaagatagaagtgtgttaaagtgaaaaacagttttttcagtaaggtttgaggccctttctataagttttcagtacaccttaaacaggactaaaaatactttaaaagtgtgctttcaaagaattttaaaacatgtttgactcaaagatgaatttgaagtgagttaattataatactggaaaacttcaggttagcataaaatagtttatatatatcccctgccccctttgggatttacttccaccatcaaatcttcaactgttagaatttcacttaaaagtgaataactgccatacatgttttcttggcatcttcatttacagaaataacatacagcatctaaagcaagttctgtccctcttaatgtgtatgacatctttttaagtagctgatcagcaataatagccaccagttgactaggtcagcctgatatactagtggatcactgtccaagataaaaaggtaaccccaagtattgcaaaatttccctcaatttctttatgtaacattgaagaaatgttgttaccagctaagatgataaattggaaaacagtcttgttaaggtgaaaggggtccttggtgatggatcattatttcaaaaaagaaaaaaatcatgtgaaaaggaatagtggttcctcttgatgtatagtatgcctgtattatagtttttacaaaattgtgaacttgtgtaatagtataataggagatattgttgaatttctaactgtttatacatttaaattcatatatgtaatgtttgttttatcaattacaatctgaatttctaagaagcatgttgacttttgcaataaagatgcaatatggaatggttcacaattggaaaaaaaaaagaaaaaagatgaaagtattacaaatttaaaagaatttggaaaatttatgaaccattccaaaaattataacaatcaccaaaa

SEQ ID NO: 32407 - DNA, 1911 bp, Homo Sapiens
atggatgtagaaattcaggacacacctggaaagataagtatctctaaaaggtccatcctttcaggaactgttgagaatatagattacccacactattgtgatctcttaagaaaaatgaacatgccttttgtgaaaggtcttgagaacagacataactatggcaggtttgaaaagaaatgcaaccctgcttttcttaaatttcacccttatcccccttcagttttgccagactatcatttacatgatccttatcccccaccatatgggccacattatccattatttccacttcgggatgatgtgaccttaggtgattcctgttcagggtttatgagtcctggtggtgatgctgatttaaatcctggcattggcagaaccataccaaccctagtggattttagtgatgtgaaacctcaacatcgagttcccagaccagacacaggatttcaaacaacaataaaaaggcaaaaaattctatcagaagaactgcaacagaacaggagatggaattccagggaagtaccagacatttctatcagagcaagacttggaggttggacaagccctctgaaagttactcccttacaacctcatcatgaaggacgctcattaagtcacatatttacatttgatgaggaggcaacatgtacagatgaaggtgaaccacttgttcaaacaaacaagaaatgtaatgcaaaggactcattttacaagtcctctacacaaaaagcttatgaagatgttccttgggataagatgctaccaccaaaacttgttccagaagaaacaacattggaaaaaaccgctgaccccatctcacagtgttttactctgaaaagatataaaggggtgccagcaataactcagatggttggtgagctctgggacagatttcaaacaagatctttcttggcaccagtcaaaccaattaattttgtgagttcaagttctagaagtaaatatattcctctctatactggtcatgtgcagtctacaaatgctgatgatgttgacaaccccttgggagacatcgcatcgctagccaagcagcggtactctaagcctctttatacaaacacaagtcgtgctgcaaatattccaggatataccggcaaggttcatttcacagccacccacccagcaaattctaatattccatcaacaaccccatcaccagattcagaactgcaccgcgtcttccagaaagaaatggcagttgacctcttccgtcaccaggctcccctgtctcgactggtcacaactgtgagaccctacaaccctttcaacaagaaggacaaagaaaccatagactactagaggaggcggccctgcgcgggctgtccaggcctccgcctggggaaggcttgtgcggcggtgggaaataaaggctgcttctccgcgctgcgcagtgtggtgggttcggtgctgttctccgctggcctgcgcgtccctgcccagcccgcctctctcccccggcaggcggcgctcagctggacactgggcgcccgccagccgcggcgcagactcccaagccgccggcagcagggtagcagggcctgtgttgcagaagattcctctttagggttggaatattgggtctacctagaggtttcacatggcaccacttcagtgcagggattctagagcagagagcagaccatagattttagaatctcaaaggcagtctagtcaaaaatccgtatgctgtcagtgggaaccctgagctactgagaaagtgcgttcttcttttctagcaggggacatcacacaaggggacaacatctaccctctcttggcctgctccagtgtttccttcagagagaagtgttccccagtccccatgagggtcctgaagtctaagtcaggaccactttgggttagagtgtggcctgacccggccttgaccaaaga

SEQ ID NO: 32408 - DNA, 7185 bp, Homo Sapiens
atgtggttaagtggcaaaagccaggtgcagaaaagaggagccgtgcgctacctgcaggcaccacctgtgaatggagaggccagcgcctgccccgcgccgccgacccacctggaccggaccacatgcgcgcggcgccggccagcccgcctcccgccgccatggggcgctgcaggcatcaggccggcgccgcgggcctctcgcgcctccttctgggcccgcttcccgccgcactgttttccttccggttgttccggaagtcgggtcctcgagggcggtgagatcggtttccgattccggggtggccgggtggcggcggcggcgctccggtcgcgatgggccagaggtgacgccgcagccgccgggagccgcgagggacggggcaggatgaaccgggccaagcccaccacggtgcgccggcccagcgccgcggccaaaccctcagggcaccctcccccaggagacttcattgctctgggctcaaagggtcaggccaatgaatcgaaaacggcgtccaccctgctgaagccagccccttccggcctgccttctgagcgcaagcgggatgcggcggccgcgttgtccagtgcctcggccctcaccggtctcaccaaacgccccaaactctcctccacaccccctctgagtgccctggggcgcctggctgaggctgcagtggcagaaaaacgagccatttctccgtcgattaaagagccatctgtggtgccaattgaagtgctgcccacggtgctgctggatgagatcgaggcggccgagctggagggcaacgatgacaggatcgagggcgtgctgtgcggggccgtgaagcagctgaaggtcacccgcgccaagcctgacagcaccctctacctgagcctcatgtacctggccaagatcaagcccaacatcttcgccactgagggcgtcattgaggctctgtgtagcctcctgcggcgggacgcctccatcaacttcaaggccaaggggaacagcctggtgtctgtgctggcctgtaacctcctcatggccgcctacgaggaggacgagaactggcccgagatctttgtcaaggtgtacatcgaggactccctgggggagcggatctgggtggacagccctcactgtaagacgtttgtggacaacatccagacggccttcaacaccagaatgccccccaggagcgtgctgctgcagggggaggcgggccgcgttgcgggcgacctgggtgcagggagcagcccacacccctccctcacggaggaggaggacagccagacggagttgctgatcgcggaggagaagctgagccccgagcaggagggccagctcatgcccaggtacgaagagctcgcggagagcgtggaggagtatgtcctggacatgctgcgggaccagctgaaccggcgccagcccatcgacaacgtctccaggaacctcctgcggctcctcacctccacctgcggctataaggaggtgcggctgctggcggtgcagaagctggagatgtggctgcagaaccccaagctgacccggccggcccaggacctgctgatgtccgtctgcatgaactgcaacacgcacggttccgaagacatggacgtcatctcacacctgatcaagatccgcctcaagcccaaggtcctcctcaaccacttcatgctgtgcatcagggagctgctgagcgcgcacaaggacaacctgggcaccaccatcaagttggtgatcttcaatgagctctccagcgcccggaacccgaacaacatgcaggtcctctataccgcactgcagcacagctcagagctggcgcccaagttcctggccatggtgttccaggacctgctgaccaacaaggacgactacctgcgggcctcgcgggccctgctgcgggagatcatcaagcagaccaagcacgagatcaacttccaggccttctgcctggggctcatgcaggagcgcaaggagccgcagtacctggagatggagttcaaggagcgcttcgtggtgcacatcaccgacgtcctggccgtgtccatgatgctgggcatcacagcgcaggtgaaggaggccggcatcgcctgggacaaaggagaaaagaggaacctggaagtgctccgctcattccagaaccagattgccgccatccagcgggatgccgtctggtggctccacactgtggtcccctccatcagcaagctcgcccctaaggactacgtgcactgcctgcacaaggtgctgttcacagagcagccggagacctactacaagtgggacaactggccacccgagagtgaccgcaacttcttcctgcgtctgtgctccgaggtgcccattttggaggacacgctgatgcgcatcctggtcatcgggctgtcccgggagctcccgctcgggcctgcggacgccatggagcttgctgaccacctggtgaagcgggcggctgccgtgcaggcggatgatgtggaggtgctgaaggtggggaggacccagctgatcgacgccgttctgaatctgtgcacctaccatcaccctgaaaacatccagctcccaccggggtaccagcctccgaacctcgccatctctaccctctactggaaggcctggcccctcctgctggtcgtcgccgcattcaacccagagaacatcggcctggctgcgtgggaggagtacccgaccctgaagatgctcatggagatggtgatgaccaacaactactcctacccaccgtgcaccctgacggatgaggagacccggacggagatgctgaaccgtgagctgcagaccgcccagcgggagaagcaggagatcctggccttcgaggggcacctggcggccgcgtccaccaagcagaccatcactgagagcagcagcctcctcctgtcgcagctcaccagcctggacccccagtacgcagcccacacagccccgccctgcgcctgccgtcgggacctggggcccccccggaggcctccccctcacatcctggatcaagtgaaaagcctcaaccagtccctccgcctcgggcacctcttgtgccgcagccgaaaccctgactttctcctccacatcatccagcggcaggcctcctcgcagtccatgccctggctggcggacctggtacagtccagcgagggctccctggacgtgctgcccgtgcagtgtctgtgcgagttcctgctgcacgatgctgtggacgatgctgcttccggggaggaggacgacgagggcgagagcaaggagcagaaggccaagaagcggcagaggcaacagaagcagcggcagctgctgggccgcctgcaggacctgctactgggcccgaaggctgatgagcagaccacgtgtgaggtgctggactacttcttgcggcgcctcggctcctcccaggtggcctcccgcgtgctggccatgaagggtgagaccctgcctgcactgccgaaagccggcccagctcatgagtgtctgccacagggtttgtcgctggtgctttcggagggcagcctgcgggacggggaggagaaggagccccccatggaggaggatgtgggggacacagatgtgctgcagggctatcagtggctgctgcgggacctgcctcgcctgcctctgttcgacagcgtcaggagcaccacagccctggccctgcagcaggcaatccacatggagactgatccccagaccatcagcgcctacctgatctacttgtcccagcacacgcctgtggaggagcaggcccagcacagcgacctggccctggacgtggcccggctggtcgtggagcgctccaccatcatgtcccacctcttctcgaagctctccccgagtgccgcgtcggacgccgtgctgagcgctctgttgtccatcttctcacgctacgtgaggcgcatgcggcagagcaaggagggcgaggaggtctacagctggtcggagtctcaggaccaggtcttcctacgctggagcagcggggagacagccaccatgcacatcctcgtggtccatgccatggtgatcctgctgacgctgggcccgcctcgagccgacgacagcgagttccaggcgctgctggacatctggtttccggaggagaagccactgcccaccgccttcctggtggacacatcggaggaggcgctgctgcttcctgactggctgaagctgcgcatgatccgttctgaggtgctccgcctggtggacgccgccctgcaggacctggagccgcagcagctgctgctgttcgtgcagtcgtttggcatccccgtgtccagcatgagcaaactcctccagttcctggaccaggcagtggcccacgacccccagactctggagcagaacatcatggacaagagtaagatgccagggacctgcggagtgggttcacacacgctgaccgagccccagcccggccaggcttttggggcctgggtgcgagcgggtgtgaccctgctacggtttgcagattacatggcccacctggtggaggtccagcatgagcgcggcgcctccggaggccagactttccactccttgctcacagcctccctgccgccccgccgagacagcacagaggcacccaaaccaaagagcagcccagagcagcccataggccagggccggattcgggtggggacccagctccgggtgctgggccctgaggacgacctggctggcatgttcctccagattttcccgctcagcccggaccctcggtggcagagctccagtccccgccccgtggccctcgccctgcagcaggccctgggccaggagctggcccgcgtcgtccagggcagccccgaggtgccgggcatcacggtgcgtgtcctgcaggccctcgccaccctgctcagctccccacacggcggtgccctggtgatgtccatgcaccgtagccacttcctggcctgcccgctgctgcgccagctctgccagtaccagcgctgtgtgccacaggacaccggcttctcctcgctcttcctgaaggtgctcctgcagatgctgcagtggctggacagccctggcgtggagggcgggcccctgcgggcacagctcaggatgcttgccagccaggcctcagccgggcgcaggctcagtgatgtgcgaggggggctcctgcgcctggccgaggccctggccttccgtcaggacctggaggtggtcagctccaccgtccgtgccgtcatcgccaccctgaggtctggggagcagtgcagcgtggagccggacctgatcagcaaagtcctccaggggctgatcgaggtgaggtccccccacctggaggagctgctgactgcattcttctctgccactgcggatgctgcctccccgtttccagcctgtaagcccgttgtggtggtgagctccctgctgctgcaggaggaggagcccctggctggggggaagccgggtgcggacggtggcagcctggaggccgtgcggctggggccctcgtcaggcctcctagtggactggctggaaatgctggaccccgaggtggtcagcagctgccccgacctgcagctcaggctgctcttctcccggaggaagggcaaaggtcaggcccaggtgccctcgttccgtccctacctcctgaccctcttcacgcatcagtccagctggcccacactgcaccagtgcatccgagtcctgctgggcaagagccgggaacagaggttcgacccctctgcctctctggacttcctctgggcctgcatccatgttcctcgcatctggcaggggcgggaccagcgcaccccgcaggcaggtcttgggaggaagcggcgggaggagctggtgctgcgggtccagggcccggagctcatcagcctggtggagctgatcctggccgaggcggagacgcggagccaggacggggacacagccgcctgcagcctcatccaggcccggctgcccctgctgctcagctgctgctgtggggacgatgagagtgtcaggaaggtgacggagcacctgtcaggctgcatccagcagtggggagacagcgtgctgggcaggcgctgccgagaccttctcctgcagctctacctacagcggccggagctgcgggtgcccgtgcctgaggtcctactgcacagcgaaggggctgccagcagcagcgtctgcaagctggacggactcatccaccgcttcatcacgctccttgcggacaccagcgactcccgggcgttggagaaccgaggggcggatgccagcatggcctgccggaagctggcggtggcgcacccgctgctgctgctcaggcacctgcccatgatcgcggcgctcctgcacggccgcacccacctcaacttccaggagttccggcagcagaaccacctgagctgcttcctgcacgtgctgggcctgctggagctgctgcagccgcacgtgttccgcagcgagcaccagggggcgctgtgggactgccttctgtccttcatccgcctgctgctgaattacaggaagtcctcccgccatctggctgccttcatcaacaagtttgtgcagttcatccataagtacattacctacaatgccccagcagccatctccttcctgcagaagcacgccgacccgctccacgacctgtccttcgacaacagtgacctggtgatgctgaaatccctccttgcagggctcagcctgcccagcagggacgacaggaccgaccgaggcctggacgaagagggcgaggaggagagctcagccggctccttgcccctggtcagcgtctccctgttcacccctctgaccgcggccgagatggccccctacatgaaacggctttcccggggccaaacggtggaggatctgctggaggttctgagtgacatagacgagatgtcccggcggagacccgagatcctgagcttcttctcgaccaacctgcagcggctgatgagctcggccgaggagtgttgccgcaacctcgccttcagcctggccctgcgctccatgcagaacagccccagcattgcagccgctttcctgcccacgttcatgtactgcctgggcagccaggactttgaggtggtgcagacggccctccggaacctgcctgagtacgctctcctgtgccaagagcacgcggctgtgctgctccaccgggccttcctggtgggcatgtacggccagatggaccccagcgcgcagatctccgaggccctgaggatcctgcatatggaggccgtgatgtga

SEQ ID NO: 32409 - DNA, 3305 bp, Homo Sapiens
ggggcagggcgggggcggtggggcctcccctagccttccctccccctctccttcactgtccttccagcaggcacaggaaggtgaggcaaggtgtttccagccggcaggatggaggacgaggaaggccctgagtatggcaaacctgactttgtgcttttggaccaagtgaccatggaggacttcatgaggaacctgcagctcaggttcgagaagggccgcatctacacctacatcggtgaggtgctggtgtccgtgaacccctaccaggagctgcccctgtatgggcctgaggccatcgccaggtaccagggccgtgagctctatgagcggccaccccatctctatgctgtggccaacgccgcctacaaggcaatgaagcaccggtccagggacacctgcatcgtcatctcaggggagagtggggcagggaagacagaagccagtaagcacatcatgcagtacatcgctgctgtcaccaatccaagccagagggctgaggtggagagggtcaaggacgtgctgctcaagtccacctgtgtgctggaggcctttggcaatgcccgcaccaaccgcaatcacaactccagccgctttggcaagtacatggacatcaactttgacttcaagggggacccgatcggaggacacatccacagctacctactggagaagtctcgggtcctcaagcagcacgtgggtgaaagaaacttccacgccttctaccaattgctgagaggcagtgaggacaagcagctgcatgaactgcacttggagagaaaccctgctgtatacaatttcacacaccagggagcaggactcaacatgactgtgcacagtgccttggacagtgatgagcagagccaccaggcagtgaccgaggccatgagggtcatcggcttcagtcctgaagaggtggagtctgtgcatcgcatcctggctgccatattgcacctgggaaacatcgagtttgtggagacggaggagggtgggctgcagaaggagggcctggcagtggccgaggaggcactggtggaccatgtggctgagctgacggccacaccccgggacctcgtgctccgctccctgctggctcgcacagttgcctcgggaggcagggaactcatagagaagggccacactgcagctgaggccagctatgcccgggatgcctgtgccaaggcagtgtaccagcggctgtttgagtgggtggtgaacaggatcaacagtgtcatggaaccccggggccgggatcctcggcgtgatggcaaggacacagtcattggcgtgctggacatctatggcttcgaggtgtttcccgtcaacagtttcgagcagttctgcatcaactactgcaacgagaagctgcagcagctattcatccagctcatcctgaagcaggaacaggaagagtacgagcgcgagggcatcacctggcagagcgttgagtatttcaacaacgccaccattgtggatctggtggagcggccccaccgtggcatcctggccgtgctggacgaggcctgcagctctgctggcaccatcactgaccgaatcttcctgcagaccctggacatgcaccaccgccatcacctacactacaccagccgccagctctgccccacagacaagaccatggagtttggccgagacttccggatcaagcactatgcaggggacgtcacgtactccgtggaaggcttcatcgacaagaacagagatttcctcttccaggacttcaagcggctgctgtacaacagcacggaccccactctacgggccatgtggccggacgggcagcaggacatcacagaggtgaccaagcgccccctgacggctggcacactcttcaagaactccatggtggccctggtggagaaccttgcctccaaggagcccttctacgtccgctgcatcaagcccaatgaggacaaggtagctgggaagctggatgagaaccactgtcgccaccaggtcgcatacctggggctgctggagaatgtgagggtccgcagggctggcttcgcttcccgccagccctactctcgattcctgctcaggtacaagatgacctgtgaatacacatggcccaaccacctgctgggctccgacaaggcagccgtgagcgctctcctggagcagcacgggctgcagggggacgtggcctttggccacagcaagctgttcatccgctcaccccggacactggtcacactggagcagagccgagcccgcctcatccccatcattgtgctgctattgcagaaggcatggcggggcaccttggcgaggtggcgctgccggaggctgagggctatctacaccatcatgcgctggttccggagacacaaggtgcgggctcacctggctgagctgcagcggcgattccaggctgcaaggcagccgccactctacgggcgtgaccttgtgtggccgctgccccctgctgtgctgcagcccttccaggacacctgccacgcactcttctgcaggtggcgggcccggcagctggtgaagaacatccccccttcagacatgccccagatcaaggccaaggtggccgccatgggggccctgcaagggcttcgtcaggactggggctgccgacgggcctgggcccgagactacctgtcctctgccactgacaatcccacagcatcaagcctgtttgctcagcgactaaagacacttcaggacaaagatggcttcggggctgtgctcttttcaagccatgtccgcaaggtgaaccgcttccacaagatccggaaccgggccctcctgctcacagaccagcacctctacaagctggaccctgaccggcagtaccgggtgatgcgggccgtgccccttgaggcggtgacggggctgagcgtgaccagcggaggagaccagctggtggtgctgcacgcccgcggccaggacgacctcgtggtgtgcctgcaccgctcccggccgccattggacaaccgcgttggggagctggtgggcgtgctggccgcacactgccagggggagggccgcaccctggaggttcgcgtctccgactgcatcccactaagccatcgcggggtccggcgcctcatctccgtggagcccaggccggagcagccagagcccgatttccgctgcgctcgcggctccttcaccctgctctggcccagccgctgagcgcccgcacccgccgcaccccgaggccgccaattgtccgccccgccagcgctgcaaataaaccttctgagtcagccctcctgctcgccgctcccgcctcacccgcaggggctccggccgcctcctcggtcaggtccacc

SEQ ID NO: 32410 - DNA, 4589 bp, Homo Sapiens
gggaggaacggagattgacaaggaggcagaggcctgagcgaggcggaaaatcctcaccccggcccgcgggtagacccaaacttctagcgcgtcacttccgctgggggcggagcggggcggggctgagtgggtggcgacctagctgctgcgccagtgtttgtgttggaagctcagctgatgcaggccggttggagtggacgtcattgccgggaacgagcgagtcgccgctgcagccctagtgactgcggcctgcatcccgattgtcttctcctccaaggtctacatgattacctgaagtttaataataatgcaagaagtgtttgtgggaagcagagaagcaagcaactgtatttcttgttctcacctaagcattactggaggataagccacatcagtctacaaagaggttttcatacaaacataataagatgtaaatggaccaaaagtgaagcacattcttgcagtaagcactgttactctccaagcaaccatggtttacatattgggattttgaaacttagcacttctgctcccaagggacttacaaaagtgaacatttgtatgtcccgtattaaaagtactttgaactctgtttcaaaggctgtttttggcaatcaaaatgaaatgatttcacgtttagctcaatttaagccaagttcccaaattttaagaaaagtatcggatagtggctggttaaaacagaaaaacatcaaacaagccatcaaatctctgaaaaaatatagtgacaaatcagcagaaaagagtccttttccagaagagaaaagtcacattatagacaaagaagaagatataggtaaacgcagtctttttcattacacaagttctataaccacaaaatttggagactcattctactttttatcaaatcatattaattcatatttcaaacgtaaggaaaaaatgtctcaacaaaaggaaaatgaacatttccgggacaaatcagaacttgaagataaaaaggtagaagaggggaaattaagatctccagatcctggcatcctggcttataagccaggctcagaatctgtacatacggtggacaagcctacaagtccttctgcgatacctgatgttcttcaagtttcaactaaacaaagtattgctaactttctttctcgtcccacggaaggtgtacaagctttagtaggtggttatattggtggacttgtccccaaattaaagtatgattcaaagagtcagtcagaagaacaggaagagcctgctaaaactgatcaggctgtcagcaaagacagaaatgcagaggagaaaaagcgtttatctcttcagcgagaaaagattatcgcaagggtgagtattgataacaggacccgggcattagttcaggcattaagaagaacaactgacccaaagctctgcattactagggttgaagaactgacttttcatcttctagaatttcctgaaggaaaaggagtggctgtcaaggaaagaattattccatatttattacgactgagacaaattaaggatgaaactcttcaggctgcagttagagaaattttggccctaattggctatgtggatccagtgaaagggagaggaatccgaattctctcaattgatggtggaggaacaaggggcgtggttgctctccagaccctacgaaaattagttgaacttactcagaagccagttcatcagctctttgattacatttgtggtgtaagcacaggtgccatattagctttcatgttggggttgtttcatatgcccttggatgaatgtgaggaactttatcgaaaattaggatcagatgtattttcacaaaatgtcattgttggaacagtaaaaatgagttggagccatgcattttatgacagtcaaacatgggaaaacattcttaaggataggatgggatctgcactgatgattgaaacagcaagaaaccccacatgtcctaaggtagctgctgtaagtaccatagtaaatagagggataacacccaaagcttttgtgttcagaaactatggtcattttcctggaatcaactctcattatttgggaggctgtcagtataaaatgtggcaggccattagagcctcatctgctgctccaggctactttgcagaatatgcattgggaaatgatcttcatcaagatggaggtttgcttctgaataacccttcggcattagctatgcatgagtgtaaatgtctttggccagatgtgccgttagagtgcatagtatccctgggcactggacgttatgagagtgatgtgagaaacacggtaacatacacaagcttgaaaactaaactttctaatgttatcaacagtgctacagatacagaagaagtccatataatgcttgatggcctgttacctcctgacacctattttagattcaatcctgtaatgtgtgaaaacatacctctagatgaaagtcgaaatgaaaagctggatcagctgcagttggaagggttgaaatacatagaaagaaatgaacaaaaaatgaaaaaagttgcaaaaatattaagtcaagaaaaaacaactctgcagaaaattaatgattggataaaattaaaaactgatatgtatgaaggacttccattcttttcaaaattgtgatgagtatatgcttatgttctcataaatgaaggtctgtttagaagatcaaccacattcaataaggaattgtggggttcgacatgagttaactttgaaatacgtatgaattctggagaatcctgaaaaagacggtgcttcaaccagcttgcatagcacagagaatattcttggttacagaattcatatgggaactaggcttttaagatgttaataattagctaagctttagtaacccttactgtgctagtagattttagtagatattggtgttatattgtttgatgtttgaaaatatattaatatatgtgccgaacaagaaaccgaaagctatattgtactgtgtatttttactttagtcctcataatcatgttgaatttatgtgatcattgattttatttcatatggaaaagctaatttcttcttaaatttacattacctaatattctcactagctatgttctccaatccacactgccttttattgtaatatcatctaaatagatgcagaaaaatggaattttctctattaaagtattttacatttgacataaaaaagaaccagatacagttttctattcagatatgtttattttaacattgtttggttaaaaaaggtgaagttccagtcaaccactttttacccctgaaatttcaagataatgctatattaacttttccagatctaacactagcttattcttccctgttataaaatggtttgaacttactgaggagatattcctatcattaacaaaaataaactatttaaataatctgttgttaaaaggctaatgtcattttaaaattaatttttgttcataatgtagctcccctttagcctttgaatacacctggcagcagtatgcttaaaaataagaagttagttgcctggcgcagtagctcacacctgtaatcccagcactttgggaggccgaggcaggcagatcacctgacgtcaggagtccaagaccagcctggccaacacggtgaaacctcgtctctaataaaaatacaaacattagcccggcatggtggtgcacacctatagtcccagctactcgggaggctaaggcaggagaatggcttgaacctgagagacggaggttgcagtgagccaaatagcgccagtgcactccagcctaggcgacacagcgagactccatctcaaaaaaaaaaaaaaaaaaaagaagaagttaggcttgttttaccttattaactcctttgaactgtctggatttcatggaagttggtaagatgcacttacatggaacattgttcatgccaaacaaactcatctttattgtatctatttgtcacataaatccttacatggaatgttttgatttcttaagaaaaatgaaacaaaggttagcgccccttgttttagacatacaaactaaagctagaccctgttgcccagatagtcatattgcttctttgcaatatcaattcacagaggctgtgagatgtggttcaaagagtggagtcgagagtctggatgctaatcctgcctttgctgcaagaacccttctgtttgttaccttgaggaaggcaaatgtctgtaggctttgcatatctcatttgtaaaatgaggaaaggtagctgtaaaattttctaacatccgaattatataaactttagacatagtataaaataggaaactaccaatgatttctaaagataatatagttctttcagaccacaaataatacataataacatgcaactaagaacaacttgtaaatgcaagaaaaaaacaaataattggaaatcagaatatttctgggaattcttcgtaataaagcaaatttcaagcacaataaagtaatatttatgcatatttacatatttgcacctcatcataaggtcactctagtcctaaactgatgtagttcatctgttttacagctgaagttaagtatgtcccttatttgtgcttggcttatttctttcttaaataatacattacacaagtgaa

SEQ ID NO: 32411 - DNA, 2285 bp, Homo Sapiens
gggctcggtgcgactgcgcagctcctcggcgcttcctcggtggcttccccgggtcgagcaaacaggtaagttcggggagacttcaggccagggcagtctcctgtcttctcttggaaaccacagcagcccatgcacacagaatggcagccacattccagcttccagggcaccaggagatgccgctgaccttccaggatgtggccgtgtacttctctcaggcggaggggcggcagctgggcccccagcagcgggcgctctaccgggatgtgatgctggagaactatgggaacgtggcctctctgggattccctgtccctaagccggagttgatctcccagctggagcaggggaaggaactttgggtcctgaatcttctgggagctgaggaaccagatatcttgaaaagctgccagaaagattctgaggttgggaccaagaaggaactatctattttaaaccaaaaattttccgaagaagtaaaaaccccagaatttgtatcaagaagactcttaagggataatgcacaggccgctgagtttcgggaagcatggggccgtgagggcaaactcaaagagcgcgtgggaaattctgccgggcagagtttgaacaaacccaatattcacaagagagttttaacagaagctaccgtgggcagggaaagatctttgggagaaagaacccaagagtgtagtgcatttgatagaaacttgaatctggaccaaaatgttgttagacttcaaagaaataaaacaggagagagggtctttaaatgtgatatatgcagcaaaaccttcaaatataattcagacctaagtagacaccagagaagtcacactggggagaagccgtacgaatgtggccggtgtgggcgagcctttactcacagctcaaatcttgttctgcaccatcacattcacactggaaataaaccatttaaatgtgatgaatgtgggaaaacttttggactcaattctcacctccgtcttcatcggagaattcacactggagaaaaaccctttggctgtggtgagtgtgggaaggctttcagtcgaagctcaactcttattcaacatcggatcattcacacaggagagaaaccctacaagtgtaatgaatgtggaagaggctttagccagagcccccagttaactcagcatcagagaattcacactggagagaagccgcatgaatgcagtcactgtgggaaggccttcagtcgaagctccagccttattcagcatgagagaattcacactggagagaagccccataaatgcaatcagtgtgggaaggccttcagtcagagctcaagccttttcctccatcatcgggttcatactggagagaaaccctatgtatgtaatgaatgcggcagagcctttggttttaactctcatcttactgaacacgtaaggattcacacaggagaaaaaccctatgtttgtaatgagtgcggcaaagcctttcgtcggagttccactcttgttcagcatcgaagagttcacactggggagaagccctaccagtgcgttgaatgtgggaaagctttcagccagagctcccagctcaccctacatcagcgagttcacactggagagaagccctatgactgtggtgactgtgggaaggccttcagccggaggtcaaccctcattcagcatcagaaagttcacagcggagagactcgtaagtgcagaaaacatggtccagcctttgttcatggctccagcctcacagcagatggacagattcccactggagagaagcacggcagagcctttaaccatggtgcaaatctcattctgcgctggacagttcacactggtgagaaatcctttggatgtaatgaatatggaaaagctttcagtcccacctcacgacccactgaagatcagataatgcatgctggggaaaagccctataaatgtcaagaatgtggaaacgccttcagtggaaagtcaacccttattcaacatcaggtaactcacactggtcagaaaccatgtcattgcagtgtgtatgggaaagccttcagccagagttcacagctcacaccacctcagcagactcgtgttggagagaaacctgctttaaatgatggctctaaaagatactttattcatatcaagaagattttccaagaaagacatttttaatgtgataaatgcagaagacagtttagcaactgttcacttgacattagaagataagatggcataatgaaagatatataaggtctaaatattactggcaaagtaaaataaatagttcagatgactactaaa

SEQ ID NO: 32412 - DNA, 4095 bp, Homo Sapiens
atgtccctcctcagcagctatgagggcctgcggcaggagatccagcggctggcacaggagaacgaagagctgcggcggctggtgcagctcatccaggagaaccaggagctgaagctggtgctcaggaaccgcggcagcagcctgggcttctgcagctccgggttcctggctgaggtggctgccagtccctggctacccaggcggagaacgatcaaattcaagaatgctgagagagggctaccagctgaagagctcctgtgggactccagccccaccaccatgggcagccccgagggccgcttccactttgccatcgaccgtgggggtaccttcacagacgtctttgcccagtgcccaggggggcacgtgcgggtcttaaaactgctctcagaggaccctgccaactatgcggacgcgccaaccgaaggcatccgccgcatcctggagcaggaggccggcatgctcctgccccgggaccagccgctggactccagtcatatcgccagcatccgcatgggcaccacagtggccaccaacgcactgctggagcggaagggggagcgggtggcgctgctggtgacacgtggcttccgagacctgctgcacattggcacccaagcccgtggggacctctttgacctggccgtgcccatgcctgaggtgctgtatgaagaggtgctggaggtggacgaacgcgtggtgctgcaccgtggagaggcgggcaccgggacgcctgtgaaaggccgcacgggggacctgctggaagtgcagcagcctgtggacctgggggccctgcgtgggaagctggaggggctgctatctcgaggcatccgcagcctggctgtggtgctcatgcactcgtacacgtgggcccagcatgagcagcaggtgggtgtgctggcccgggagctgggcttcacgcacgtgtcactgtcctcggaggccatgcccatggtgcgcatcgtccctcgggggcacacggcctgtgccgacgcctacctcacgcccgccatccagcgctacgtgcagggcttctgccgtggcttccagggccaactcaaggatgtgcaggtgttgttcatgcgctccgatggcggcctggcgcccatggacaccttcagcggctccagtgctgtgctctcgggcccggccggcggcgtggtgggctactcagccaccacctaccagcaggagggtggccagcctgtcatcggctttgacatgggaggcacgtccacggatgtgagccgctatgctggggaattcgagcacgtcttcgaggccagcacagctggcgtcaccctccaggccccgcagctggacatcaacaccgtggcagcgggagggggttcccgcctcttcttcaggtctggcctctttgtggttgggcccgagtcagcaggagcccacccaggacccgcctgctaccgcaaagggggccctgtgacagtgacggatgctaatctggtcctgggtcgcctgctgcctgcctccttcccctgcatttttgggccgggagagaaccaaccactttcccctgaggcctcccgcaaagccctggaggctgtggccactgaggtcaacagcttcctgaccaacgggccctgcccggcctccccgctgagcctggaggaggtggccatggggttcgtgcgcgtggccaacgaggccatgtgccggcccatccgtgcactcacgcaggcaagaggccatgacccctcagcccatgtgctggcctgctttgggggagctggtgggcagcatgcatgtgccatcgcccgggccctgggcatggacacggtgcacatccacaggcacagtgggctgctgtcggccctggggctggccctggctgacgtggtgcatgaggcacaggaaccctgctccctgctctacgcgcctgagaccttcgtgcagctggaccagaggctgagccgcctggaggagcagtgtgtggatgctctgcaggcccagggcttccccaggtcccagatcagcactgagagcttcctgcacctgcgctaccagggcacggactgtgctctgatggtgtctgcccaccagcacccagccacagcccgctcgccccgtgcgggggacttcggggcagcctttgtggagcggtacatgagggagtttggctttgtcatacctgagcggccggtggtcgtggacgatgtgcgagtgcggggcaccggccgcagtggtcttcgcctcgaggatgcccccaaagcccagaccgggcctccccgggtggacaagatgacccagtgctactttgaggggggctaccaggagacccctgtgtacctgctggcagagctgggctatgggcacaagctccatgggccctgcctcatcatcgacagtaacagcaccatcctggtggagccaggttgccaggcagaggtgaccaagacaggggacatctgcatctccgtgggggccgaagtccccggcacagtgggcccccagctggaccctatccagctgtccatcttctcacaccgcttcatgagcattgctgagcagatgggccgcatcctgcagcgcacagccatctccaccaacatcaaggagcgtctggacttctcctgtgccctctttgggcccgatggggggctggtgtccaatgccccccacatccctgtgcacctgggtgccatgcaggagacggtgcagttccagattcagcacctgggggccgatctccaccctggcgacgtgctactgagcaaccatcccagtgccgggggcagccacctgccagacctgactgttatcacaccggtgttttggccgggtcagacgcggcctgtgttctatgtggccagccgagggcaccacgcagacatcgggggcatcacaccaggctccatgcccccccactccaccatgctgcaacaggagggtgccgtctttctgtccttcaaacttgtccaggggggcgtcttccaggaggaggcggtgacggaggccctgcgggcgccaggcaaggtccccaactgcagcggaaccagaaacctgcacgacaacctgtcggacctccgtgcccaggtggcagccaaccagaagggcatccagctggtgggggagctcattgggcagtacggcctggacgtggtgcaggcctacatgggccatattcaggcaaacgctgagctggccgtgcgagacatgttgcgtgcctttggaacctcccggcaggcccggggcctgcccctggaggtgtcctcggaagaccacatggacgacggttcccccatccgcctccgtgtgcagatcagcctgagtcagggcagcgccgtgtttgacttcagcggcactgggccggaggtgtttggtaatctcaacgcaccgcgggccgtaaccctgtccgccctcatctactgcctgcgctgtctggtgggccgcgacatcccactcaaccagggctgcctggcgccagtgcgcgtggtcattccccgaggctccatcctggacccgtcgcccgaggcggcggtggtgggcggcaacgtgctcacgtcgcagcgcgtggtggatgtcatcctgggggcctttggggcctgcgccgcctcccagggctgcatgaacaacgtgaccctgggcaacgcccacatgggctactacgagacggtggcgggcggcgcgggcgcgggtcccagctggcacgggcgcagcggtgtgcacagccacatgaccaacacacgcatcaccgaccctgagatcctggagagccgaggccgcttccgaggcggcgacggcgtcacccgcgagctgctctttcgtgaggaggcgctgctgtcagtgctgaccgagcgccgcgccttccggccatacgggctccacgggggcgagcctggcgcccgcggcctaaacctgctgatccgcaaaaacggccggacggtgaatctgggcggcaagacgtcggtgaccgtgtaccccggggatgtgttctgtctccacacgcccggcggcggtggctatggggacccggaggaccccgccccaccgccggggtcgcccccgcaagcactggcctttcccgagcacggcagcgtctatgagtatcgccgggcccaggaggccgtgtga

SEQ ID NO: 32413 - DNA, 977 bp, Homo Sapiens
cgctgccctgtcagtcgcctgtgagctcctgctccttcctgggcctgcagccctggagaatttgctcaccgaggtaggagtgccgctgtgggcagtgggcggcggcagcggacgagcggccaggctgaccacctctgcctgactcagatgcctaagggccgggccggcagcctgcccacgacctccatcggctggcgcttccagctctggttcctaggactcacctgcccggagcgccacctggccagacgcctcaagaacaatagcttctacccatttgtgcagcaggagccaaacgtcttcgtgctcgaatactacctggacacactgtggaaggggatgctgctcttcatcatcagcgtggtcctggtcagcttcagctccctgagagaggtgcagaagcaagagacctgggtcttcctcgtgtacggcgtgggcgtgggcctgtggctcgtgatctcgtcgctgccgcggcgccgcctggtgctgaaccacacgcgcggcgtgtaccacttctccatccagggccgcaccgtgtgccagggccccttgcatctggtctacgtgcgcctggcgctcagctccgatgcccacggaaggtgcttcttccacctggtcctcggcggccacaggttggagcccctggtgctggtgcagctgtcggagcactacgagcaaatggaatacttgggccgttacatcgcccggaaactcaacatcaactacttcgactacctggccacctcctaccggcacgtggttcgccactggccaccccctggcgctggcactgtgatgggcaagagccccatgggtcacaagcccagctcctctcagtccagcctggaggtgtgactctgagggcctcccccacctcgggactgtgttctcggtaacctcccagccccactctggggcagatcaaatgtgagtcccactcactggccttcctttcaataaagctgcctcagcttcca

SEQ ID NO: 32414 - DNA, 763 bp, Homo Sapiens
agttgtcgctggccgtgtgacggctcgctgttgccctgaaggcaggcgagccagctgcccaggaaaggtggaaagtggtagaagctgacccctgagccctggcaggtctttaagtgcgtttgtgcagccgatttcaaggctaagagagaaagactgcctctgatccctgaaggaagaaaaaaaaaaaaaaaacaggaaaaaaactcaacatggaaaatgtccccaaggaaaacaaagttgtggagaaggccccagtgcagaatgaagcccccgctttaggaggtggtgaataccaggagcctggaggaaatgttaaaggggtttgggctccacctgccccgggttttggagaggatgtgcccaataggcttgtcgataacattgatatgatagatggagatggagatgatatggaacggttcatggaggagatgagagagctaaggaggaaaattagggaacttcagttgaggtacagtctgcgcattcttataggggaccctcctcaccatgatcatcatgatgagttttgccttatgccttgaatcttgaggttaataatcataaaatccctgctttctaaattcgcatttttcctggtgtacctttaatgtgaaccttttggcattcttctgcaattttctgattggagattgcattttgacctagtctgtaagtttttctgtcagaagaggactttcatcaactttcatggaaagatgtttattgcatactgtaaagttaataaagcaatttaaaagca

SEQ ID NO: 32415 - DNA, 6753 bp, Homo Sapiens
atggctaaggcccaaacacagaatagcagcattgacccagtagtctcgaaattagtcacagaggccaagctagtgaagacccagcagccctattgttatcaagaaagagcactatccaaaagtgccgccaagctcctggacaagaacccattctcggtcagtaacccgaaccctctgcttccttcacctgccagtctccagctggctcaactgcaggcccagctcaccctccaccggctgaagctggcacagacagctgtcaccaacaacactgcagccgccacagtcctgaaccaagtcctctccaaagtggccatgtcccagcctctcttcaatcaactgaggcatccgtctgtgatcactggcccccacggccatgctggggttccccaacatgctgcagccatacccagtacccggtttccctctaatgcaattgccttttcaccccccagccagacacgaggccccggaccctccatgaaccttcccaaccagccacccagtgccatggtgatgcatcctttcactggggtaatgcctcagacccctggccagccagcagtcatcttgggcattggcaagactgggcctgctccagctacagcaggattctatgagtatggcaaagccagctctggccagacatatggccctgaaacagatggtcagcctggcttcctgccatcctcggcctcaacctcgggcagtgtgacctatgaagggcactacagccacacagggcaggatggtcaagctgccttttccaaagatttttacggacccaactcccaaggttcacatgtggccagcggatttccagctgagcaggctgggggcctgaaaagtgaggtcgggccactgctgcagggcacaaacagccaatgggagagcccccatggattctcgggccaaagcaagcctgatctcacagcaggtcccatgtggcctccaccccacaaccagccctatgagctgtacgaccccgaggaaccaacctcagacaggacacctccttccttcgggggtcggcttaacaacagcaaacagggttttatcggtgctgggcggagggccaaggaggaccaggcgttgctatctgtgcggcccctgcaggctcatgagctgaacgactttcacggtgtggcccccctccacttgccgcatatctgtagcatctgtgacaagaaggtgtttgatttgaagtttgcacagcggaaaggggctggccgtgtggtgcacatctgcaatctccctgaaggaagctgcactgagaatgacgtcattaacctggggctgccctttggaaaggtcactaattacatcctcatgaagtcgactaatcaggcctttttagagatggcttacacagaagctgcacaggccatggtccagtattatcaagaaaaatctgctgtgatcaatggtgagaagttgctcattcggatgtccaagagatacaaggaattgcagctcaagaaacccgggaaggccgtggctgccatcatccaggacatccattcccagagggagagggacatgttccgggaagcagacagccctccgggcccctcccgggctgactggggcaatggccgggactcctgggagcactctccctatgccaggagggaggaagagcgagacccggctccctggagggacaacggagatgacaagagggacaggatggacccctgggcacatgatcgcaaacaccacccccggcaactggacaaggctgagttggacgagcgaccagaaggagggaggccccaccgggagaagtacccgagatctgggtctcccaacctgccccactctgtgtccagctacaaaagccgtgaagacggctactaccggaaagagcccaaagccaagtgggacaagtatctgaagcagcagcaggatgcccccgggaggtccaggaggaaagacgaggccaggctgcgggaaagcagacacccccatccggatgactcaggcaaggaagatgggctggggccaaaggtcactagggcccctgagggcgccaaggccaagcagaatgagaaaaataaaaccaagagaactgatagagaccaagaaggagctgatgatagaaaagaaaacacaatggcagagaatgaggctggaaaagaggaacaggagggcatggaagaaagccctcaatcagtgggcagacaggagaaagaagcagagttctctgatccggaaaacacaaggacaaagaaggaacaagattgggagagtgaaagtgaggcagagggggagagctggtatcccactaacatggaggagctggtgacagtggacgaggttggggaagaagaagattttatcgtggaaccagacatcccagagctggaagaaattgtgcccattgaccagaaagacaaaatttgcccagaaacatgtctgtgtgtgacaaccaccttagacttagacctggcccaggatttccccaaggaaggagtcaaggccgtagggaatggggctgcagaaatcagcctcaagtcacccagagaactgccctctgcttccacaagctgtcccagtgacatggacgtggaaatgcctggcctaaatctggatgctgagcggaagccagctgaaagtgagacaggcctctccctggaggattcagattgctacgagaaggaggcaaagggagtggagagctcagatgttcatccagcccctacagtccagcaaatgtcttcccctaagccagcagaggagagggcccggcagccaagcccatttgtggatgattgcaagaccagggggacccccgaagatggggcttgtgaaggcagccccctggaggagaaagccagcccccccatcgaaactgacctccaaaaccaagcttgccaagaagtgttgaccccggaaaactccaggtacgtggaaatgaaatctctggaggtgaggtcaccagagtacactgaagtggaactgaaacagcccctttctttgccctcttgggaaccagaggatgtgttcagtgaacttagcattcctctaggggtggagttcgtggttcccaggactggcttttattgcaagctgtgtgggctgttctacacgagcgaggagacagcaaagatgagccactgccgcagcgctgtccactacaggaacttacagaaatatttgtcccagctggccgaggagggcctcaaggagaccgagggggcagatagcccgaggccagaggacagcggaatcgtgccacgcttcgaaaggaaaaagctctgatgcttctgcttctgctgctactgctgctgctgcaaggttggaaaggagagcttgctgaagtggggccttcctgattctggggacaggactaaagcctgagaggaaggaaaaccaagcagggcacattgcttgggcttgttcccagagactcagtgaaatgcccctgatatgtctccaggagcaagtcacccaggtgtgtccagcccactgagggtcaccaactctctccctgctgactcttgtttctctcaatctttcaattcgtttttctctcttttcctcttgttctttctctccctccctccttatgtgccaaggatcgtttccttttcacaaaacccaacttctcagggattttcacagtgtttaaattcttggtaggatataacaggtcaggcctagctgagtcaggcaaggaaaaggtttaatggaaactcctgggtcaggcgaacccctgcagtgagtctacagcagtatctctgcctggtgtcccatgtatcccctgcatgaggagctgagtcaggtctgcagtcctggtgaggggacatcacggacaatctgttggcagagctgggagggtcttcattaacctcttcctccaactgggccacccttttgaaaagcccctgtttttaataactgtttcatcctctcagttattctagaaatctgccagacttatgccttaaagtaaaattaaatgaattttagagaagatgaaaagagcccttcattttggaagctctgataagtttcctccaaacttattcccctcctcttgatttcaggagatgtcagggtttttctattctggacaatgaatttggtacagagtcactgtaattaaatataaaaacagaagcatcttcctccagctaaagcagcagttggcgcgggcttaggttgaatgctggcctctctgcaaagcacagctttggctcgagaggcacagctccaggctgtggaaaacagagttgtcttgggggttaaatgagcttatttaagtcaaggaaacatcatctgtccttgattcagccttggtgcctgcactctggggtacaaccacctcacagtaggatggtttttaaatggccccccagttgggggagaagctaaggaaagagaaggctgcagatccaaagagtggcattgaagtttgctgggtgtctgtaggtggaccctttccagctgggcagatagttgagggctccctgggtttgactgtatgtgcagactttgataccaaaatgttatgaaaagtcgtgattcccgctgctctttctggtactggagggtgggtaccttcaggctgtggggtctctagcctgatattccattgaaagggtgtgggataaaggtgctgggggaaatgaggctctgccacagccatagagaggccctcgggcagttaagaagggagcctggagctgttttcatgagcagagatactctcctgaaagcacccttcatagcttagcccaggaaaaataaaacaaggaagacaggtcactctcccctaggcagttcctgttgtttctgttcctgaccttgggcaggcagactgagaagggactgtgtagggttttgttttgttttttttcattttcctttttatggcatgtgagagcatactgtacattctgtcctctgtactaatggaggaagggcagagagattagttcaaggctaacattttatatcaggtaactgaggcacacaaagggaacaaatgaagaacataaaatgatcagtgtaaacctgaaagcacgcagtcattggcaagggacaggctcatgggagctggtgagagagagcagttaaggcaagcaccaggggaaagcagaccaacttgaacagatgtgatgcggagaggttggaagaagcaagaaacctgaactcatcatcaggctattaaataaaatttataggaggctgttggtttggactgagctcctgcaataggcccaacagaccaaaacaaaagggagtcactcatgttgaagttctgtcttccaggaaatcaggagagagagagagagaaagaatagccaaatccccaaacaggccagttttaaccagcatgatgaagtgtccttggttttaacctttataaggaaagcagctttgagatgaccagtctggtttttgttctttgtgtctgctttcctcagcccttttctgtctataaagccaacctcctccgctcagctcatgggaacactcattctattttatagaatgacatgttgcccaattctagaatcaaaaataaaggccaactaagatcttcaaagtaaatttgttgtaattttatcttttgagaagaccatatgggggctgctgaaaagttggtatctcaaataaagtctgaagatcacggctcagcccagattgttcccctggccaactccacaggtttgaacctggcattctggacaccagctatgcctcctccatttctcagaaaacctttgatcttgtgtgtctttcttcctactgaagggaattgtgggggcagttctttggccttcttgctgaactttgctggaaatagcccacaatttttatcagaggttagaactgtacattatcagagagactggacactttatcccctagcaaagtgggagaagattttaccagctcattccactccaccctggccttcccccaccccccatccccagcagcatttccatggaaatccagatggtcgtgtagtgttatggctctcttgtgatagactggccttcatattggagagctagggagagcccctgggagggagagagataaggcgctatctgccttcaatcagaaccttcggtttaaaatcatctaagagtctatacttgtgtgtacatacgtatttatttttatttatttttatacaattccattggcatggtccttcaccgaccctatgatttgcactttttatttctatgtgtgccacacacaatgcagtattaatggcaaccaggtaaatattgatttattttttaaagcttttcttcagtgttttgtcaaccatttcaaagtgtctcccaaaaaaggatgctgaagagcaattgctcccttaagcaacagattcatatttaccctgggttaatacaacaaaaggcctgtataattgtcttttcattgttaacacccaaaatagcatctatctagacagtatccccaaagaatttggaaaatctgatggtgtgagcagcagccgttagtatcagggtttcccattcttggacagtccgaggctgtgacctgttagataattagattatacttgaactggaccagagtttgttttttgaatttatgagaaaaaccaaaacactaagttaagtttgaacttgtaaagtattgaaatttgttgagtgtcctataaattgtcactacttttcctgatctgtataactgactgcaaagtgtttgtttttacaaaagagaaaagaaaagatttttaataaagagaatttgaaagct

SEQ ID NO: 32416 - DNA, 3994 bp, Homo Sapiens
atgtgcgagagttactccaggtcgttgttgagggtctcggtggcgcagatctgccaggcgctgggctgggactcggtgcagctcagcgcctgccacctcctcacggacgtgctgcagcgctatctgcagcagctgggccggggctgccatcggtactctgagctctatggccgaacagacccaattttggatgatgttggtgaagctttccagctgatgggggttagtctacatgaactagaagactatattcacaacattgagcctgtcaccttcccacaccaaattccgtcatttcctgttagcaagaacaatgtacttcagtttcctcaacctggaagtaaagatgcagaggaaagaaaagaatacattcctgattacctgccacccattgtgtcttctcaagaagaagaagaagaagagcaggtgcccactgatggaggcacatcagcagaagccatgcaggttcccttggaagaagatgatgaattggaggaggaagaaattattaatgatgagaatttcctgggcaagagaccactggatagtcctgaagctgaagaactgccagccatgaagcggcctcggctattaagcactaaaggggacacgctagatgttgtgttattggaagctcgagagccactcagctcaataaatactcaaaagatcccaccaatgctttctccagtccatgtacaggacagtacagacttggcacctccctcacccgagccgccaatgttggctccagttgcaaaatcacaaatgccaactgcaaaaccattagaaacaaagtcatttacacctaaaacaaagactaaaactagctctccaggacagaagactaaatcacctaaaaccgcccagtcaccagcaatggtcggaagtcctattcgatcaccaaaaactgtatccaaagaaaagaaatcacctggacgttccaagagccccaagagtcccaagagccccaaggtcacgactcacattccccaaacacctgtgagacctgaaacgcccaacaggactccttcagctacactcagtgaaaaaatcagtaaagagactatccaggtaaaacaaatacagacaccccctgatgctgggaaactgaacagtgagaatcagccgaaaaaggctgtggtagcagataaaacgattgaggcctctatcgatgctgtgattgcacgagcctgtgctgagcgagagccagatcctttcgaattttcttctggatcggaatctgaaggagacatttttactagccctaagagaatttcaggcccggagtgtactactcccaaagcttccacttccgcgaacaatttcacaaagtcaggatccactcctctgcctctttccggtggaacctcaagttccgataactcatggacaatggatgcctccattgatgaggttgtacgtaaagcaaaactgggaacaccttcaaatatgccccccaactttccttatatctcttctccgtcagtgtctcctcccactcccgaacctctccacaaggtgtatgaggagaaaaccaagctgccttcctccgtggagataaaagtggaaccagtcgctctggccccgagtccagttatccccagattaactctccgagtcggtgctggccaagacaagattgtcatcagcaaggtggtccctgcccccgaggccaagccggcgccctcgcagaacaggccgaagaccccaccgccggcccccgcgcccgcccccggccccatgctcgtcagccctgcgcccgtgccgctgccgctgctcgcccaggccgccgcgggccctgccctgctgccctccccgggtcccgccgcctccggggccagtgccaaagcccccgtgcgcagcgtggtgactgagacggtcagcacctacgtgatccgagatgagtggggcaatcagatctggatctgccctgggtgtaacaagcctgacgatgggagtcccatgattgggtgtgacgactgcgatgactggtaccactggccctgtgttggaatcatgactgcacccccagaagagatgcagtggttctgccccaagtgtgcgaacaagaagaaggacaaaaagcacaagaagaggaagcatcgagcccactgacgactcccgaggggctggaccaagcggggtcagcccgggcttcttccctggcgcctctggaagggagctggtgcaagtctgccgtcacatccacccccagatgcctgtggataaagaacccaggaggactgaggctggaacacaccgcgcacctggattgttcactcccgagccgccttggcctgtggctccgtggcagtgcgacagaaggaaactcaagcagaggcgtggcctgggggctgcccctcctccacttctctaataccagtgacaagtattattaataaagagcgtacatcttcccttttgatttcctttattctctccagggccttttcattgaggtattagatgagaagataatgtacaaactgcctcaactgtaatttaaggatgatagagtctgtatacagttttcagcccctttccctctatagtaagataatcagaataacataaaagaaaactccagttggagtaccggtaaatatttttgtgataagaatatatgaagcttccctccttcccccgtttttagtactaacatgtaaaatgttcaggcttttgtgaaataccttatattttttaagaaaaaggtttctatcatgtcctgtttgcttttgtgcaaattatttttgtttaatgtattttatatcttcgttgcattctaattttgcccttctttaaactgctggagtctcttctcactgcttgtacatttcatcaacttgtataaaaactcttcagactaaaagattgcccctaatgtaaataataaatatttatgaagtagttattttttaaatttttatcgtgtttaattctggctttctctgaaatccactgtgatttcagccaggtctgtaatgacgctggacagaaacaaggctagagaaaaagccatcgttcaaagaaatttcccttgagctcagcctgcgcagtgcccggaaacatggtggggaaagggcccgagcagttggaaggaaaacaaggcaatttaaatttagagtttatgacttgaagttgttttgtttgttgtctattttgtttttgtaaatttctttgacagacttttactaaaaggacatgtagtttccatgaaagtaaaaaaaaaaaacaacaaaaaacccacatatactgtagcattttgtctttatattgttttatttctacaaatctgttcattaatattgtgctttaaggctgaaatgaagtatattatgaatttttttaagaaaactcatcaaatttcagggtatcacaaaactttattatattattatactgcccactatttattatatgttatagatgtctgagaggtaaaccaaatattttatttttaatgttaaaaaaacatcaaatttaactttattagcatattttagcaactttgggataaatacggacttttacttgattttgaaataatcccagtgtaggcccatgtgctggatctgttggatgctagaatatgggctttgaacctaatacaaatatattactagaaaatgtgatttttttaaatgccaagtaaattgatattagtgtatgaattagtcatattttaaaacattatgtggttagagaaatgcggttttctgccatgaatgttaagttgcaaatcagtggaaatggagtcgacctcttcggagcacagggtgtcattgccctcgttgttcaagaggccagaatttttctatccccgctaagaaacaaagcatctatgttgagatatgtgtttttttgtttgattaatttgagatcattctaaatactttatacaatattttcacatgcacaaaaatgcgcgttagtggtttttggagaggggtgaggggtgggggaagtgcaaaataaagattattggctattt

SEQ ID NO: 32417 - DNA, 1572 bp, Homo Sapiens
cggtcgggttctgggaggcacagcctcggggttgcgggccgggtgcggctcggcggtggaggactcacttcctgctccatccccggctgggccctggggcggaactgatgacgcttgataatgtggctggggacttcagggaagagtgggttacctggacactgcttagagaatcctctccaggaatgccacccagcacagttagaagaatgggctctcaaaggaatttccaggcctagtgtaatctcccagccggagcagaaagaagagccatgggtcctaccactccaaaactttgaggcgaggaagatcccgagggaaagccacacagactgtgagcatcaggtggcaaagctcaatcaggacaattctgaaacagcagaacaatgtggaacatcctcagaaaggaccaataaagatctttctcatactcttagttggggaggaaactgggagcaaggcctagaattagaagggcaacatggaacccttccaggagagggccagctggagtccttttcacaggagagggatttaaacaagctcctggatggatatgtaggagagaagcctatgtgtgcagaatgcgggaaaagctttaaccagagttcctatctcataagacacctaagaacccacactggcgagaggccctatacgtgcattgagtgtgggaaaggcttcaaacagagctcagaccttgtcacccatcgcagaacacacacaggagagaagccctaccaatgcaaggggtgtgagaagaaattcagcgacagctcaacactcatcaaacatcagagaacccacacaggggagagaccctatgagtgcccagagtgtggaaagacttttgggcggaagccacacctcataatgcaccaaagaacccacacaggcgagaagccctacgcgtgcctggaatgtcacaaaagcttcagtcgaagctcaaatttcatcactcaccagaggacccacacaggggtgaagccttacaggtgtaatgactgtggggagagttttagccagagctcggatttgattaagcaccaacgaacccacacgggagaacggcccttcaaatgcccggagtgcgggaagggcttcagagatagttctcattttgtagctcacatgagcactcattcaggagagaggcctttcagttgtcctgactgccacaaaagcttcagtcagagctcacatttggtcacgcaccaaagaacacacacaggtgagagaccttttaagtgcgaaaactgtgggaaaggattcgccgacagctccgccctcattaagcaccaacgaatccacaccggagaaagaccctacaaatgtggagagtgtgggaagagcttcaatcagagctcccactttattacccatcagcgaatccacttaggagacaggccctatcgatgtcctgagtgtggcaagaccttcaatcagcgttcccatttcctcacacaccagagaacgcatacaggagaaaaacctttccactgtagtaaatgtaacaagagcttccgtcagaaagcgcatcttttatgccatcaaaacacccatttgatttag

SEQ ID NO: 32418 - DNA, 7113 bp, Homo Sapiens
gcgcccgacccgggagtagcggacacaccccctcccggcccggctgtccgcctccgcccagcctttcctcagcctgcttcatttttctcccagtcgtccagcctcccggtttccgactttgcactaagagggatgcactctggaaaaccacattgcgcggtcacatcttgtttggagaagaggccaggcttttgcatcttagagtatacgttcaccttttcaagggcctggcatagatttgattaatcagcctggaataccctgttcctgccgacctggccgtttttacctccgtaccttatcacactcccaggaacattaagcagggagcgcttggagtcttctttgggtccccaccttgagctagacgtgaagttgacccctgggctgcagcatggctgtcgccctcgactctcagatcgacgcgcccctggaggttgagggatgcctaataatgaaggtggaaaaggaccctgagtgggcatcagagcccattctggaaggatcggatagctctgagaccttccgcaaatgcttcaggcaattctgttatgaggatgtgactggaccccatgaagctttcagtaaactctgggaactttgctgccggtggctgaagccagaaatgcgttccaaggagcaaatacttgagctgctggtgattgagcagtttctcaccattttacccgagaagattcaggcttgggcacagaagcagtgtccgcaaagtggagaggaagcggtggccctggtagtgcatttggagaaagagactggaagactaagacagcaggtcagcagtcccgtgcaccgggagaagcactccccacttggagcagcgtgggaggtggcagacttccagccagagcaggtggagacccaacccagggcggtgtctcgggaggaacctggaagcctccactcaggacaccaggaacagctgaaccgaaagcgagaacgtcggcccttacccaagaatgctcggccttctccctgggttcctgcccttgctgatgaatggaataccctagatcaggaagtgacaaccacacggcttcctgctgggtcccaggaaccagtgaaagatgtccacgtggccagaggcttttcctacagaaagagtgtgcatcagattcctgcccaaagggacctctaccgggatttcaggaaggagaatgttgggaacgtggtctccctgggaagtgcagtgtctacatctaacaagataacccggttggaacagagaaaggagccatggactctaggtctgcattcctctaacaagagaagtatcctacgaagcaactacgtcaaggaaaagtcagttcatgctattcaggtccctgcaaggagtgcaggaaaaacatggagagagcagcagcagtggggtttagaagatgaaaagatagcaggtgtgcattggagctatgaggaaacaaagactttcctggcaattctcaaagagtctcgcttttatgaaacacttcaggcctgtccccgaaatagccaagtgtatggtgctgtggctgaatggttgcgagaatgtggcttccttagaaccccagaacagtgtcgaaccaagttcaaaagtctccagaaaagctatcgaaaggtgagaaatggccacatgctagaaccctgcgccttctttgaggacatggatgctttgttgaaccctgcagcccgtgctccgtccactgataaaccaaaggagatgatacctgtccccagactgaagagaattgccatcagtgctaaggaacacatcagcttggtggaggaggaggaagctgcagaagattctgatgatgatgaaataggcatcgaatttatccgcaagtctgaaatccatggtgcccctgtcttgtttcagaatctcagtggcgtgcactggggctatgaagaaaccaagacttttcttgatatcctccgtgagactcggttttatgaagcgcttcaagcctgtcatcggaagagcaaattgtatggggctgtagctgaacagcttcgagagtgcggcttcctccggacaccagaacagtgccgaaccaagttcaaaagccttcagaagagttaccgcaaggtgaaaaatggccacgtgctagagtcctgcgcgttctacaaggagatggatgccctgattaactctcgggcatctgctccttcccccagcaccccagaggaagtcccatcaccttcaaggcaagaaagagggggtattgaggttgaaccccaggaacctacaggctgggaacctgaagagacctcacaggaggcagtaatagaagactcttgcagtgagagaatgagcgaggaggaaattgtgcaagagccagagttccagggacctccaggtctactgcagagcccaaatgattttgaaatcggaagtagcatcaaggaggatccaacacagatagtatataaggacatggaacagcatagggcattaatagaaaagtctaaaagagttgtttcccagagtaccgaccccagcaaatatcgcaaaagggaatgcatctcaggaagacaatgggaaaatcttcaaggaattagacagggaaagccgatgtctcagcctagagatttagggaaagccgttgtgcatcagaggccttttgtggggaagagaccctacagacttctcaaatatggagaaagctttggaaggagcactcgtctgatgtgccggatgacccaccacaaggagaatccttacaagtgtggtgtctgtgggaagtgctttggtagaagcaggagcctgatcagacaccaaagaatccacacaggcgaaaaaccttttaaatgtcttgactgtggaaaaagctttaatgactcctcaaattttggtgcccaccagagaatccacacaggagagaaaccctacagatgcggagagtgtggaaaatgctttagtcagagctctagtcttattatacatcagagaacgcacaccggtgagaagccctatcagtgtggagagtgtgggaaaagtttcaccaacagttctcatttcagcgcccaccggagagttcacactggggagaatccctacaaatgtgtggactgtgaaaaaagtttcaataactgtacgagatttcgagaacatcggagaatacacactggagagaagccctatggatgtgcccagtgtggcaaacgtttcagtaagagttctgttcttaccaaacatcgggaagttcatgtgagagaaaagcctctgccacaccctccatctctgtattgccctgagaacccacataagggaaagactgatgaatttaggaaaactttttgatgatgatcttctcttcctaaatgcccccttagccattttaccctaatctcattcttggaagcaatcttttcttagctatgaagtgtaatttccaagataaacttgagaatataaataaactaaacactttcatcctgttctcacctctgcctctaacttcatcagtctgttcctcctcttctgtgtgtctcagcttctcctttaagaatgtggcgaagatacattgtccgagttcagaatgaaatacccttcagtacattgaggccactgcaactggattgctaagttcggcaacattcaagatcttccatatgggtgagagttgtcttcaaggatataaaaaatgccaaaagtttttttgttgttattacctactccgtgagatcctggatgaaacttgataacagattttcacatttagatagaactttgaggagtctgatcggaactacatcaaatccatcttggttttgaagagatccacaaaagaagagtgaagattttatagctttcctcagaagtctgttacagtgtacctttttttttttttttgtcaagaagttgatccaaatagctagggcagaatccctgtattgtcactgaaatcctgttactaatgccttgccctccatggaggtgagaagcaattgatcacccctcatccttttctgtacccgaagacttaaatcccctggctgctgcttctccagcctataagtaatcccaggtcctcctactgtttctcatagccctgcacttgcctctcagttgctctgggtgctcctgccggcctcttccgaactaccatgccctcctcagatagaataggaggcctgctcgtggtgtgtctcactaaagcaaagtaggatttcagatgcgttctagttctatcctctaacttctctggctcttatctagaacatgactggcatgttggcatatttcgtacctcccacccctgcactgcagtataatattataatagtgtttctaaaactttaaggggatagggaagaggtaatagacacctgaagcatttctaagaccagttggactcctttggcctgctgtcgatcagatagccacctcagcttagaccagcgctctcaggtctggctgttaaatctcccagtctcttttcctgaggcttctagtccctgttcaccgcatcagaaacctaactgtagtgtgccaagtaacttaacacaactctagagctcactgggtgaaaagtgggaacatttataaaaacttcaatccagaaatccagaacaccgtttttgttttcctcatttacttgttttgtctgaaaaatctctttgagaacccccggcagtaacccagtaaacactgaaggaaaagttctgatgggggatggttaattgacttttgaagttacagatgaaacccagagatttgattttccatggccagttgcttcaggatggagtcagtggcgtttattcccttagtatgtaggtgacccagggtggctttgctttggcaagggagaagtcacaagtttaatgggaagggaaccggagttagggctgtttgtgggtgattattttgctcttctctctccctttctttgtcaaatgctcttatttgaagccatctggaaatgatatttttccttttggtatgtttcaatcttttgaaacttgttcagcaaagtacctaggagggtaggcactgtagaaagaaatctaatttatggtgccagaatagggtgtggcctgttggaaggcaggtgactcaggtagacattgataaatgtttctgatttacatttgttggaaatattatgactgttcacatctcaataggttgatttttctgtgttgtccaagttatagatttctaatgctaagtacagttccatgttggtagtgtgcgtagcacagtaagatgtttgtggtgccagtgggcttgtgtttatattgtgtagatgttctggaattccagctctagagaagatgtaaattaatagaaatcaccacttaataatatgtacacaggattgatattatgtggaagcatgattcaggaaagtagatgacttattcataaatatgaagcactgttacatgtaaggccatgttctagccacagtgaatgatagaaaaaggaaggaaggggcatggtgcctgggctcaaggaactcacagtttgatagaggaagcatcacagcaaaagttggggccacttacaccatggcagttacagaaggccaggagctcagtcatgagaacatcaccttcccctgcagaagagttgcgctaagttgcccagaatcatattctgtaccttcatctctcaaccttccccagtggcaggaaagggtcaagcaagacccattccctctctagtgggacaaactgattctgtttaactctcatatgcctgggagcaagctgaggtggaatttgggttcccctatctctactcctaattgtaaatgggctgtctagacatgtgttacattaatttgatgaactttgttctgaagaaatggaaggtctcccccccattttagaccaacactacctgtctccctgcattttatttgttttcacctggtacatgtaagtcaaaatgaataatcatgttctgaccaatgtgtcttttagatcacataacattgcctttatgaagattcatagaaaaaggtttttttatctagatctcagtgccaaggaaagctctgatcctaagcgcagtatgtgtacacacacacgtctacatgtgtgtgtagatctgtatgtatgtattacaaacactgtgatttttgtaacttaagctgctttttctctctttgttctggctgctggaaagttcaacaaaacttacagcccacctcaaccaactaccccaacctatatttatttaatttcatcttatttccttgtaaattgtgtcaaatcctgtttttgaaaagcagcatagactgacaacttttcactatcatcttatcgaaggcattttggaaactggggtcgtatgtcccacctaggcttgctttgttactgccacaaatacctccagttcttaccagtgatgttattatgcattcaacctaattcattcatctggaaagaaacagttttttaaaaagggaaacctcacacgtaaatggctcagggcagcctggccttggtggaatgagcatgagactggaagctgaaagaagcaagttttaatcttgtcactaaatgagtgttgtttgacacatcatagcctctctgggcctcggctcctcatctgaagagaagttgaacttaactgctaagttgctctggctctaatgtttcatgaggctgtggagcgtgatatagatgcggaagaggttagaagaccaggctgccggcccagctgtcctgtgcctgccacatctggccataccaaatccatcgcatgcttcaggaaagggaggggatgctgtgacagcaaactcagcccaggagcttgttggggaaggagaaagggcaagtccctcgtggtccacagcaggcaccccccaagcacctcgataaccagtggcaggtaggctgaagtgaaggaagcctctgtcaggaggtctggcgcccagtgacagacaagacagctgtgagggagctggggcagccctggctaaaggaatgtctgagtaacttgtgaaactggaagcctctgcctctgaatgcattccaagacctggtgcaaatggatgtccattcattgttttgtatcagtgttcacttagatgtcttcttgaaaacttgtttgtggaataaatgtctaaaataaatggctcccactggtttctgccataa

SEQ ID NO: 32419 - DNA, 2070 bp, Homo Sapiens
atgaaacctgttcatgaaaggagtcaggaatgccttccaccaaagaaacgagacctccccgtgaccagcgaggatatggggagaactaccagctgctccactaaccacacaccctccagtgatgcttctgaatggtcccgaggggttgtggtggctgggcagagccaggcaggagccagagtcagcctggggggtgatggagctgaggccatcaccggtctgacagtggaccagtatggcatgctgtataaggtggctgtgccgcctgccaccttttcaccaactggactcccatctgtggtgaatatgagtcccttgcccccaacgtttaatgtagcgtcttcactaattcaacatccaggcatccactatcctccactccactatgctcagctcccatccacctcgctgcagttcattgggtctccttatagccttccctatgctgtgccacctaatttcctaccgagtcccctcctatctccttctgccaaccttgccacctctcaccttccacactttgtgccatatgcctcacttctggctgaaggagccactcctcccccacaggctccctccccggcccactcatttaacaaagctccctctgccacctccccatctgggcaattgccacatcattcaagtactcagccgctggaccttgctccaggtcggatgcccatttattatcagatgtccaggctacctgctgggtatactttgcatgaaacccctccagcaggtgccagcccagttcttacccctcaggagagccagtctgctctggaagcagctgctgcaaatggaggacagagaccacgagagcgaaatttagtaagacgggaaagtgaagcccttgactcccccaacagcaagggtgaaggccagggactggtgccagtggtagaatgtgtggtggatggacagttgttttcaggttctcagactccacgggtagaggtagcagcaccagcacaccgggggaccccggacactgaccttgaggtccagcgggtggttggcgctttagcttctcaggactatcgtgtggtggcagctcagaggaaggaggaacccagccccctcaacctatcccatcatacccccgaccatcagggtgaggggcgagggtcagccaggaaccctgcagagctggcagagaaaagtcaggcccgtgggttctaccctcagtcccatcaggaaccagtaaaacatagacctttacccaaagcaatggttgtagccaatggcaacctggtgcccactggaactgactcaggcctgctgcctgtgggctcggagatcctggtagcatcaagtctggacgtgcaggccagagccaccttcccagacaaggagccaacgccgccccccattacctcctctcacttgccttcccatttcatgaaaggcgccatcatccagctggctacgggagagctgaagcgggtggaggacctccagacccaggattttgtgcgcagtgccgaagtgagcggggggctgaagattgactctagcacggtcgtggacattcaggagagccaatggcctggatttgtcatgctgcattttgtggttggtgagcagcagagcaaagtgagcatcgaagtgccccccgagcaccccttctttgtatatggccagggttggtcctcttgcagccctgggcggacgacacaactcttctctctgccctgccatcggctacaggtgggagatgtctgcatctctatcagtttacagagcttgaacagtaactcagtttctcaggccagctgtgctcccccaagccagctgggtcccccccgagaaaggcctgagaggacggtcttgggatccagagagctatgtgacagtgaggggaagagccagccggcaggagagggctcccgtgtggtagagccttcccagcctgagtccggtgctcaggcctgctggccagccccgagcttccaaagatacagcatgcaaggggaggaggcacgggctgcgctgctccgtccctctttcattccacaggaggtaaagctgtccattgaagggcgttccaatgcgggaaaatga

SEQ ID NO: 32420 - DNA, 510 bp, Homo Sapiens
atggccgaggaaggcagtgctgctggaggtgtaatggacattaatactgttttacaggaggtgctgaagaccgccctcatccatgatggcctagcatatgaaatttgcaaagctgccaaagcctcagacaagtgccaagcccatctttgtgtgctgtgtgtgcttgcatccaactgtgatgagcctatgtatgtcaagttggtggaggccctttgtgctgaacaccaaatcaacctaattaaggttgatgaccagaaactaggggaatcgagggtactcattgagatggagaagcagcagcaggacgaagtggactgcaatatcaaggaggctcatgagaagctggagatggagatggaggttgctcgccttcatcaatgccaggtcatgctaatgaggcaggatttgatgaggtgtcaagaagagctgtggaggatggaaaagctgaacaaccaagagatgcaaaaacgacggcaactggagcccatgcgagaggagtgcaggcactag

SEQ ID NO: 32421 - DNA, 492 bp, Homo Sapiens
atgagaggcctccgctggcgttacactcggctgctcagctttcacttcccaccaagagtcaccggccatccctggagtctggtcttctgcacgtcaagggacggtttcagcctgcagagcctgtaccggcggatggagggctgcagcgggccagtgctgctggtgctcagggaccaggacgggcagatatttggagccttctcctcctcggctatccgactcagcaaaggcttctatggtactggcgagacattcctcttctccttctccccacagctgaaggtctttaagtggactggaagcaactctttctttgtgaagggagacttggattcactgatgatgggcagtggcagtggccggtttgggctgtggttggatggagacttgttccgcgggggaagctccccttgcccgaccttcaacaacgaggtgctggcccggcaggagcagttctgcatccaggagctggaggcttggcttctcagctga

SEQ ID NO: 32422 - DNA, 5071 bp, Homo Sapiens
ttaagatgatcatatcacctgagagagttcccaagtctacaattgctctactagttactattcagtgtttgtgaaaaattttaatctcagtactgtgaagaagctggaaaaagggatattatggggctaaaagctctctgtttggggctgctttgtgttctttttgtctctcatttttacacacccatgccagacaacattgaagaaagctggaaaataatggccttggatgccatcgctaaaacttgtacatttacggctatgtgttttgaaaatatgcgtattatgagatatgaagagtttatatccatgatattcaggctggattatacccaaccactttcagatgaatacatcacagtgactgatacaacatttgttgacattccagtacgattgtacttgccaaaaagaaagtcagaaacccgaaggcgagctgtgatatattttcatggtggtggtttttgttttggaagttccaaacagagggcttttgacttcctgaatagatggacggcaaacacgcttgatgctgttgttgtaggcgtggactataggctggctcctcaacaccactttcctgctcagtttgaagatggccttgctgcagtcaaattttttcttttggaaaaaattcttacaaaatatggagtggatcccacccgaatctgcattgcgggagacagttctgggggcaatttagcaacagcggtcactcaacaggtgcagaatgatgctgaaataaaacataaaatcaagatgcaagtcttactttaccctggcttacagataacagattcttatttgccatctcaccgagaaaatgagcatggtatagttttgaccagggatgtagccataaaactcgtgagcttatatttcaccaaggatgaagcacttccctgggcaatgagaagaaaccaacacatgcctctggagtcaagacatctgtttaagtttgttaactggagtattcttcttcctgagaagtatagaaaagactatgtatatactgaaccaattcttggaggacttagttattcattgccaggacttacagacagcagagcattacccttgttggccaatgattctcagttacagaatttgccactaacctatattcttacttgtcaacatgatctcttaagagatgatggacttatgtatgttacaagacttcgaaatgttggagtccaagttgttcatgaacatattgaggatggaattcatggagctttatcattcatgacttcaccattttatttacgtctaggtcttaggataagagatatgtatgtaagttggctggataagaatttataaatatgtgatgtgtatgtatagcccttacatagtggattgtaatttgtgatattttgtggttttggagcaaagaacaatgtcatttgagttatctaaatctacatttgcaacatttgtagcagttaatgtgtgtccttgaagagttattaaattttctgacttgcagaccctgaatatgtaaaatgtatgtaatcctgcctattttctccttacttataatttattataattatgttggttctaataagaaccaatgcttattaaagttgagaaataagagtggttattggcaaattaagcaagatactttccagataggcacagaaattgttgtagtgagtgggaagaggaaaaaacatggaacaaacttgctgctaaaaatatatggaaaccactggactaaataaaccctaaggaccctatattagtttcctgtgactattgtagcaaattactacaaattcagtcgctttaaacaacagatatttattcttttacagttctggggtcctaaagcatgaaattagtattaactaggcccaaaccaagtcacaggcaagagacatgactcccttggagactctctagaaggtgctctttgcctcttttaacctctggtggctgccagtattctttgactattcttagatcagtttaatcttgaaggccagcatcttccaatctctttctgcttcatcttcacattgccttcttctctgcctgtgtctaatctccctatgggcttctcttagaaaaacacatgtgtttacatttaggagggtccacctgaatagtctaggataatctctgcatctcacgatcctcaatttaattgtatttgcagatttccccacccttttctatataaagtaaccttcagagattaggatgtagttatcttttgggaggccatttttaaaaatattttttaaaggaggcagcagatcaatattataattcaagaatctgatctaaatatgcattcaataatgaagaacatttgagtatggactagaaaagcttctccaaaaaactttcaaatatatcatctcaaattacctaaagaataaatcacttctgtagcccttttgttgagtggaatcataaacaaaaaactgaaaatttattgctatgaaaacagatccatggtacaatgttataaattttgagtattaagcatagtcagttgaatccaactaagaagttaaaaatgtagtaagaaatgtgtatatgtatgagtatgtgcatgtgtgtgggaaaaatctaccatccaattgacccaaaaacaacttactcagttgggaccagacatttttctcaattctccatgattcagaaggcaattaagaattacaatttcaacagtccacaaacaaaataagatttttttaatgtagagagaaattaattatgttcaaagagccctttttctttcactcaatttcagtaccccaaagctaaaaacgcaaacatgactatgacaaatgaaaataagtatcatgggaatctgtttttttcctctgagaaataaaatctaaatggagatttgatactatatgctatactacatacactaagaatattgtatttttcataattctgatttaatctcctgtaaacttgatatattttaaaatttgtaatttgtttttcatgatactgaatctggttccagttctttttcatcatttaatatactggctacccgttctaattaggaaaacaagtcctagaaatctcttcattttgacagcaagtgctgatttgtaagaaaatcattaaaaatgcagctctctaggaagcacattttgttgattgtcctattgtctgaacattttcacagtgattcctgactaaaaatccttttaattttgtaagcactacactagtgtgtcatgtcactagtatgtactttcaagcctttaaacagaaaggatggctcacagctagataataactaagtttgttttcgttttgaaaaagtttgtatcttgcagagcagaaaagcacttctttttttgctacataagtatgtggtagaaatgtatgctaaggtaggccagtcaatccttttttatttattttgtaaatttggtcccagaatatttctggaaggaaccacaggtagactagcttccattgcagtcccttacctcactaacttcttttgtggctttatccaggcactgttactgtttgtatgctaaagggttcatttcactgggtcttactttcaaagtttgttccattttgtgtggtggcatgagcattgtgatcaagccattaagtttggaaacaactgaatgaaagtcgtctgttataatgtattttactttatttttaaatttcattttaaattgacaataattgtacatattcatgggatacatagtgacgtttcaatacatatcatgtatagtgattatatcagggtaatcggcacatcatctcaaacatttatcatttctttgtgttgggaatttcaatatcttttttttagctgtttgagattatgtaatatattattgttaactatagtcatcctacagtggtatagaaactacctagctgtaatgatgtatcttttaacaaatctaatttatttcttgacagtataggggaagacttgattacaccccatggcattacagctaaaaattccaacgttttcagtctctttgtagctatgttatccagacattgatttgtatttacatctcatcttcctttctaagagaaacagtgatgcagaacctgagagtcaaatttaatattctctaggtaccaaggcaagggtttatgttacagtttgtgtactagtccaagtcccaagttgtgacgatacagctccataacctacctttataccacccagggaaagtatacagaagaaattcttgacttcatctatccgaatttctacaagtcatctgttatttttctgataatctgcctgtgtctcctggaaacataaggtgtaggtttctgacacatatatctaacatgtaaagaagtaacaatttccaaaatacctccaaacagcgccacatcctaaaggaaatttctaggtttttctgctgaaatatccattccagcattgtgtttgtttgctagagctgctataacaaagtatcacaaactgagtgccttaaataaacaaaaggaatttattactttgtggttcagaaggctagaagttggagatcaaggtgtcatcacaccatggtccctctgaaggcaccaaggatggatctgtttcaggactcctggcctgtagcagcataactccaatcttcacatgatattctcccgttgtatgtgttcttccccaattttccctttttataaagatagcagtcagattagattagggcctatcctaataatttcattttaacctgactgtctttgtaaagaccctatctgcaaataaaatcacatgtaaagtattggggcttaggactccaacatatagatatgttttatatatatggtgagatatatatatatttttttatatatggtgagatatatatttatatatggtgagatatatatatatatggtgagatatatatttatatatatggtgagatatatacatattgtgatatatatatatatatatatatatatatatatatatatgaatttggtggaacacaaaagaacacctagcaagtatcatatgttccaatttcttaaaagtaaataaaggccttgtgccattggtggtgttctgaaa

SEQ ID NO: 32423 - DNA, 3251 bp, Homo Sapiens
cagttgcgcccggcagcgacgggaaacgtctctgaattaggtgttccgctcgcctcttgtgcggtgtggagctgcgcgccccccgccgaggcgggcccaggtgccttctccaagagaggcagcagggagggagaaatggcaaggaggttgctgccagcccatgtacaggagtccgtgacgttcagggatgtggccgtgttcttcagccaggacgagtggttgcacctggactctgcccagagagccttgtaccgggaggtgatgctggagaactacagcatcctggtctcactggggattctcttttccaagccaaaggtcatctcccagttagagcaaggagaagacccctggatggtggagagtggagttccccaaggcgcacatctcggatgggaaagcttgtttggaaccatagtttctaaagaagaaaatcaggaagtcatgaaaaaactcataattgatggcacatttgacttcaagttggagaagacctacataaatgaagataagttagagaagcaacaaggcaaaaagaacagacttttcagtaaagtgttagttaccatcaaaaaagtctacatgaaggagaggagctttaaaggtgttgaatttgggaaaaatcttggtctaaaatcatcgcttattagaaaaccgagaatagtttccagaggaaggagaccccgttcacagcagtattcagttctctttaaacaactgggggtcaacacagtgcgtaaatgttataaatgtaatatctgtgggaaaatcttcctccacagttcctccctgagtaaacaccagagaatccacactggagagaagctctataaatgtaaggaatgtaggaaagccttcagccaaagctcatccctaactcagcacttgagggttcatacaggagagaaaccttatatatgtagtgaatgtggaaaagccttcagtttcaccacatctcttattggacaccagagaatgcatactggagagagaccttataaatgcaaggaatgtggaaaaacatttaaaggtagttcatctcttaataatcaccagcgaattcacacaggagagaagccctataagtgtaatgaatgtgggagggccttcagtcagtgctcatctctcattcagcaccacagaattcatactggggagaaaccgtatgaatgtactcagtgtgggaaagccttcacttcaatatcgcggctaagtaggcaccatcgaattcatactggagagaaaccctttcattgtaacgagtgtggaaaagtattcagctatcactcagcccttatcatacatcagagaattcacactggtgagaaaccatatgcatgcaaagaatgtgggaaagccttcagccaaagctcagctctcatacaacatcaaagaattcacactggagaaaaaccctacaaatgtaatgaatgtgggaaagccttctcttggatttcacggcttaatatacatcacagaattcacactggagagaaaccatataattgtaaggaatgtggaaaagccttcagttcccactcaggcgttaatactcatcgaaaaattcatactggagaaaaaccttataaatgtaatgactgtgagaaagccttcaaccaaagctcagctctaattcagcaccagagaattcatactggagagaaaccatataattgtaaagtgtgtgggaaagccttcagacagagttcatcccttatgacacacatgagaattcatacaggggaaaaaccttataaatgtaaagaatgtgggaaggcttttagtcagagctcatctcttactaatcatcaaaggactcataattgagaaaaactgtataaatgcatgtaggaactgaagttatattccatactgagtatcaaaaaattcattgtggggagaaagtgatgaagagtagttaatcataggtaaaacttcagcattagacctcatcacacatcagagacttcatgatgcagggtaaccttgggaatgctagaaaagcttctataaaatgtttattcatatgttcttaagttattaccatgaaatggagaatttttaagattgcagggttagtatttgattgtctagtgatgtacgataacagccaccagctttcctgagcatcactgggaagcctgctgtttatgtacaagtacagccataaaatccagacacagataaatctaggaatctattttttgaaactattatgcaagccagtggtactagaaagaatgttttagaaaagaaatatgtacaggtgacccatagctacctcactgtcactaaaatgttttttaataatcttaaagcagattctgcacttcatggtaaagactttgaattgtttctctgctttctaagccattcacctgagaagaaaatcactccataaactatgcagacgtactgtctttgcgttttcttcctgactacttgttccaaactctgagtcagatctaaagtcactttaagtcacagaacgcatggtatttcacttgtttttctcattaaaagtgattacctttgctgtattaaattgataagtaaaggtcattcagacaaccactgcttttgcaatttactgaaaaatgttataaattatctcagaatgtagccaatagcaagcacagctcagctcccagggtctgcctgcttctgtgagctttctggttaccagccaccagaaggcccaggaacaatgtagaactcaggtcatcatccttggaggtaaaatgaaccagatgattttcacccttacttccactttttcgccttcatcagacaaggttcactttctccccacactctaaaggtcactgggcaaatatttaggctctgagttcagatactctttcttccagcaaatggacttacactcttcaacaagtgatttagctcatttcagcatttctaaaatgtgaatcataagattagcaagctaaaaacagttatctcacaagtcaaaattgttgggctttacagaggctaacatctagtttagccaagtttatcaggagggggcaagcacttaagggctgaaacgacccatttcataaagtgctaagtttttctgccaaggaactttaaaaaatagaaaactggctgggtgcagtggctcacgcctgtaatcccggcactttgggaggccaagacgggcagatcatgaggtcaggagatcgagaccatcctggctaacatggtgaaaccacgtctccactaaaaatacaaaaaaaaaaaaaaaa

SEQ ID NO: 32424 - DNA, 1846 bp, Homo Sapiens
aggagagtccctggtcccagccagcgggagcggcttctccagtttgtggctctcggagagttcgcctcgtccctccctctcagataaccacctatttctgacctctggaggccgggctgagcccggaattttatgaccagcgcccgctggccgtcgtcaccctctaatttctcgcaaaactcccggggacccttcttaatgtcagtagccacagtcgccgccgctcctgcgcctagaagccttccacgaccctcaaccccacagagccccgagcaggctcgggttcccgcaggatacactgcccgcccagtggcctggagggcgcgtcccgggctcccctacgccttttggaatcagcgacagacgcaggtataaaagagagcctccactcccacctctccagggctccccacccgctccttctggccgctttctcctgaaagagcaaggcacccctagaagcttcaggctcctccacaggcgagtgcctacccacctatcaggttcataggtggaagaaattcatctccagatgagactttggacttggacttgggacttttgagttaatgccagaatgaggaaccccagcatgttaattgaacttgatcacccagttgaaggaagaataatagtagatgttggatcttcaggaagctgaagagggcagtgcccagaaatacctgtcttgatagggggatttgagctgaaccaaagcatcaacaccaatcagactgtttccgaagaactagagttttctgggtcagcaatggaaagcctcagagggaatactgctcagggtcctacaaatgaagaagactataaaaacgaaggccaattatcaaggcaaacaaaatgtcctgcacagaagaaatcctcttttgagaacacagtggtcagaaaagtgtcagtgacactcaaagaaattttcacaggggaggaaggccctgaatccagtgaatttagtctaagcccaaaccttgacgcacaacagaaaattccaaagggacatggatccccaatatctaggaaaaactccaaagataattcagacttaattaaacaccaaagacttttctcacaaagaaaaccttgtaaatgcaatgaatgtgaaaaagcctttagttaccaatcagaccttcttgtacacagtagaattcatggtggagaaaagccttttgaatgcaacaaatgtgggaaatctttcagccgaagtacacaccttattgaacatcaaagaactcacactggagagaaaccttatgaatgcaatgaatgtggaaaagcttttagccggagcacacatcttagtctacatcagagaatccatactggagaaaaaccatatgaatgtagtgaatgtggaaaagcctttagccgaagcactaaccttagtcagcatcagcgaactcatactcaagaaaggccttacaaatgtaatgaatgtgggaaagccttcggtgaccgttcaaccataattcagcatcaacgaatacacactggagagaatccctatgaatgcagtaaatgtggaaaagctttcagttggatctcatcgcttactgaacatcagagaacacacactggggagaacccctatgagtgcagtgaatgtgggaaagtgttcagtcgaagctcgtctcttacagaacatcagagaatccacagtggagaaaagcctcacgagtgtagagtgtgtggaaagggcttcagtcgaagctcatcccttattattcatcagagaactcataccggggagaagccgtacaaatgtaatgactgtggaaaagccttctgtcagagttcaactctgatcagacatcagcaccttcatactaaagagtaa

SEQ ID NO: 32425 - DNA, 3628 bp, Homo Sapiens
aaaccttcggcggccggcgctgtgcggcgggcgcggttgcgcgcggcttggggcaaatacttctcaccactgcatgaatggacatttgaaagtgccatagccaaacacttgcaagcatggagacctcatcaatgctttcctcattgaatgatgagtgtaaatctgacaactacattgagcctcactacaaggaatggtatcgagtagccattgatattctgattgaacacgggttagaagcataccaagaatttcttgtccaggaacgagtttcagactttcttgctgaggaagaaattaattatattttgaaaaatgtccagaaagttgcacaaagcacagcacatggtactgatgattcctgtgatgataccttatcttcagggacctactggcctgttgagtctgatgtggaagctccaaatcttgacttaggctggccatatgtgatgcccggactcttagggggcacccatatagatctcctttttcatccaccaagagcacatctacttacgataaaagaaactattcggaagatgataaaagaagcaagaaaggtcattgctttagtgatggatatatttacagatgtggacattttcaaagaaatcgttgaggcatcaactcgaggagtatctgtttacattctgcttgatgagtccaattttaatcattttctaaatatgactgagaaacaaggttgttcagttcagcgtctcaggaatattcgagtgcgaacagtaaaaggccaagattatctttcaaaaacaggggcaaaattccatggaaaaatggaacagaaatttttgttagttgactgccagaaagtgatgtacggttcttacagttatatgtggtcatttgagaaagctcacctcagcatggttcagataattacaggacaacttgttgagtcctttgatgaagaatttagaactctctatgccagatcctgtgtccctagttcatttgctcaggaagaatcagcaagggtgaagcatggaaaagccctctgggaaaatggcacttaccagcattcggtgtcttcattagcatctgtttccagccagagaaacctttttggtagacaagacaagattcataaactagattccagttacttcaaaaacagagggatatatactttaaatgaacatgacaaatataacataagaagtcacggatacaaacctcattttgttcctaactttaatggtccaaacgcaatacgtcagtttcaacccaatcagataaatgaaaattggaaaaggcatagttatgctggggaacagccagaaacagtgccatacctcctgcttaatagggctctgaatagaaccaataatccacctggtaattggaaaaagccatctgatagtctcagtgtggcgtcctcatcacgggaaggctatgtaagccaccacaacacacctgcccagagttttgccaatcggcttgcgcagagaaaaacaacaaatcttgcagacaggaattcaaatgttcggaggtcttttaatgggacagataaccatatccgctttttgcaacaacgaatgccaacccttgaacataccacaaagtcattcctacgtaactggagaattgaatcctacttaaatgatcattcagaagctacaccggactcaaatggatcagctttaggtgaccgatttgagggctatgataatcctgagaatttgaaggccaatgccctttatactcattctcggcttcgttcctctttagtatttaaacccactttacctgagcaaaaggaagttaacagttgtacaactggctcctcaaattcaactatcattggttctcagggaagtgagacacctaaagaggtcccagacacccctacgaatgtacagcatttgacagacaaacccttgccagaatcaatccccaagctcccattgcagtcagaggcaccaaaaatgcacaccttgcaggttcctgaaaaccactcagtagccttaaaccaaactacaaatggccatactgaatcaaataactatatatataaaaccttgggtgtaaataagcagacagaaaatctaaagaatcaacagactgagaatctacttaaaaggcgaagtttcccgttatttgacaactcaaaagccaacttagatcctggaaatagtaagcattatgtatatagtacacttaccaggaatcgagttagacaaccagaaaagcccaaagaagatttgctgaaaagttctaaaagcatgcacaatgtgactcataacttggaggaggatgaggaggaagttaccaagagaaactctccaagtggcactactaccaaatcagtttccattgctgctttacttgatgtgaataaagaggaatctaacaaagaacttgcttcaaagaaggaagttaagggttccccaagttttttgaaaaaggggtctcagaagttaaggtcattacttagccttaccccagataagaaagaaaatctatccaaaaataaagcacctgccttttatagattgtgtagtagctctgacacattagtttctgagggtgaagaaaatcaaaaaccaaagaaatcagacacaaaagttgattcatctcctagaagaaagcattcttcctcatcgaattctcaaggcagcatccacaagagtaaggaagatgtaacagttagcccatctcaagagataaatgctccaccagatgaaaataaaagaacaccttctccaggtccagttgaaagcaagttcttggaaagggcaggagatgcctctgccccaagatttaacactgaacagatccaataccgagattcaagggagattaatgcagttgttacccctgaaagaagacctacttcttctccaaggccaacgtccagtgagcttctacgatctcattcaactgatcggcgtgtttacagtcgttttgagccgttttgtaagattgagagctctattcagccaacaagcaacatgccaaataccagtataaatcgcccagaaataaaatctgcgactatgggcaacagttatggcaggtctagtccattgcttaattacaacactggtgtttatcgctcatatcaacccaatgagaacaagtttcgaggatttatgcaaaagtttggaaactttatacacaaaaataaatagctattaaaatgcaaaatgaatgaggctatcaatatttgtccaaagaaaattgtggacagtctttgtaacatgccaatagattttcctaaggacagaattatgggtatgatgtatatgttcaccagtgtcctagtataaagttatttttctgtgtgataaagttagggtctgctgtagatagaatttctctgtaaacacattatttgtaagtggtaatggtaaaaataatagatgtatttaaatcattttctttagactgaagattttaagtctcacttagaaatttttgtggacgatgtatggtgtatggtgtatggtgtatggattttaaccatttccttttaaaaaggtcatactaccctcagtaaccctttataacatgtgtttatagtgttttcatatcttcaaaaatataagcaaatgggacaaagcccttttttaagattaacttgaagttctacgggataacttgttat

SEQ ID NO: 32426 - DNA, 2460 bp, Homo Sapiens
atgaaagttgtgcctggtgcccatgaagcgagcggcagaagagcgcgggagcccggtacccagcgcaccgagcccagtggagagctgagccgcaggcacccgcgtctccaggatgataggcgacattgcaagaaatctctacacctagcagctcagggggctccaagcagagcagcaagttcgaggatctggatgcggagccgaactgtgatcattgcagggctcgtcaactccctgggctgggtgttgagtgcctacgctgcaaacgtgcattttctcttcattacttttggagcggcagctggcctgggcagcgggatggcctatctgtcagcggttgtcatcgtgggtgagcaggtatttccgaagagacgcgccctcgcccagggcctcagcactaaggggaccggattcggtactttcctaataactgtgctactgaagtacttgtgtgcagagtatggctggaggaatgccatgttgatccaaggcgccgtttccttaaacctgtttgtttttgggaccctcatgaggcccctccctcctgggaaaaacccaaatgacccagaagagaaagatctgcgcgtcctgcccgcgcactccacagagtctgtaatgtcaaatggacagcagggaagaatagaagagaaggatggcgggtctgggaacgaggagaccctctgtgacctgcaagcccaggagtgccccgatcaggccagatcatgtgcgctttccggttctgaagacggtcagctggctcattatgagagtcaagaagggcttcgaggattggtactcaggctattttgggacagcctatttacaaatcgaatgtttgtagcctttgttttctgggcttcatttgcatacagcagctttgtcatctcctttattcatctcccagaaatcgtcaatttgtataacttattggagcaaacgaaggttttccctctgacttcaattatagcaatagttcacattgttggaaaagtgatcctgggcgtcatagctgacttaccttgcatcagtgtttggaatgtcttcctgttggccagcttcgttcttgtcctcatatttttaattctgcctttgatgcatatgtacgctggcctggtggtcatctgcacactgacagggttttccagcggttatttctccctaatgcccatagtgactgaagacttggttggcattgaacatttggccaatgcctacggcatcatcatctgtgctaatggcatctctgcgttgttgggaccaccttttgcagcttccacgcgggcaggtccggaaactgagcatgtctgcaagcgctcagcggcgccggcagcagcggggctagagctgggctgcgtcaggctgagcccattcacctcgcggccacaggagctcagcgccggcgccgcgccgcccagccccgccgagaggggcgcactcgccgccgcggggcccgccgccgctcaccgcagccccctcctggcgacccgcaagaggactcagccgccggctgcgaccaccgtggactccctctatggaagggaatcctgggagtcccggccgtcagaggggttcccaaatccaaagggtccatctccaaggcgtcactccaggggtccgcggttcactttgctgccccttgcaggtgatgctgtgattgttgcctgcggactgggaagcacgatggctccaaaaggccagcggggccgagaagcagggacagagaccagcatttaagggatctctggtgggggcctccctggagttctccacatgtaaatatagcgaaaaaagaaaacactacgttactagaataaacacgtcctaaaatttctgtgcaaaaacacctttttgaacagcaaagatttcacccaccaaaacaaggaagcaagaagcttccacagtgtgcaggatccgaaacaggaccggcccggcgttgggtgagagtgggggaggggttgtcggcttctccatccagcttgccatgttctgtcgtcggtttcacattttcagagagactttaccagatgcaggaaatgaggatgaaggcaactctggaaggatgcaaagaagggagagcaagcactgtacctactgtctgctgtctaagagggctggtctcataactaaaaggtccagtccctgagatcttgtgtgcaaccgtcagaaatagttcaggacatcaaattgcacagagaagattcagatgaagggaaacaagaactctgtggaaaactgttggggacagtggcacgagttgtcttgcaaggtgatgtctgtcccgtggagggacacaagagcgaggacagcatggttctaatggccagggcatgtcttcttattccatgtgacagtggctggctgagttgctagtacgtttttgaaatataccctttgaaatatgttgattattctggacatctgtaaggtgggagatttgaataaaaagacttctgctgtcat

SEQ ID NO: 32427 - DNA, 939 bp, Homo Sapiens
atggtgtggggatctgcagacttgccttccactggggagagggccagcgaggggacagagggggaggaaaggagaggggataatagacccgaggtcagtgttgatgctggagggcccaggtctctgaagttcctgcagctttgcagaaggtccccggctccagcccaagcagggagccaggttgggggtgtgggaaggcagaagtcccagggatcctgggggaggctcaggttgtacctgaaggccacagtctcctcgacagacctcggacgaggttgtaagtgttttaaagaaactagagcagcagagaagagagactcagaagcccgtggcacggctttctcggcgtcccctccagcgagggggtctccattgctgcagttgccggttttgtccaaccaggaggttgacccgaaacagccctccgtcttcctgcccatgaggatgaggacaggaagccagacccgggagagaaagcccagatcagacagatgggggttgggagggcctagtggctgaaactgccctgcttggggacaatgctcaggcaggaccaatccaaacgagggcactgcttatgtggtccttccggagcatcctccaaggcagagcctggcttcgggccctccctgcaaggacacctgcctccactccctgccagaccaggcctggctgcagaggcggaggggcggcagggctgcctgtctccactgtttggcggtgtttacacgtgtcgctgtcagggtgtctggacagtgggggtcgggggcctcccgggcccagacttccccaggcctattctcacactggtgagagggccctaggggaagggtgtgggctgggtggcggggccaggccagctgagacctacaggaccgtggagcatttaggtctcccacccaactccacccggtcctctgagcatcagttacagagccc

SEQ ID NO: 32428 - DNA, 664 bp, Homo Sapiens
ggcccaaagccttccgggagtcgtagtccttccgcccgctcctcgtttctttggaggttggcccttccagctccagttctgcccaggtcacaacgccgacgacatggtggacaccgtgctcatgaacttcctgcggggcggctggcccggggcgggggcctgggctctccgggctaggggggtgcccttccgcgctgccgcccgctgcagttcgcctcgcaggaggtggtgccgtacgggcacttccgccgcctcgactacttctcagaagagaggagcgcccgggacctgctcaagcgcctggaggcgccgcggccgtcggcggtgctggacctggtgcactcggccgaacgcctggcgctggcctcggccgcgcggcccccgcgccccggcgcctgcccccgctgtggggcgctggccagccgcgcgctctgccaggcctgctccctcctggacggcctgaaccgcggtcggccccgcctggccatcggcaagggccgccgggggctggacgaggaggcgacgccggggacgcccggggatccggcccgggcccccacttccgagaccgtccccaccttctagcgactccgggcctcccgccgggatccgacgcgcccgggtgaggtctgcctgtaaatgacactgtgaataaacccgttac

SEQ ID NO: 32429 - DNA, 2938 bp, Homo Sapiens
atggtgtggaatgtgaagggtcctggaggtctgccagagtggatctccatcctgcaggggctgaggcacccagctgctaccagtactaccaccatggggacccgagaagggcgcactcgcacgggccgcggaggccaacgccgagcctgcgcggcgggaggcgctgagaactcactgcgcacgcgccggtcggctggccgcacccacgcggcgcagctcccaaagttgcagacagcccggcgaaccgcgcaatgcgcttcttctgcctgcagcagagaaaaggaaagaaaactccgcaggggctccgttggcttctccacgagtgacaaccatgttttcccagatagaagaccggagccctgctcctttgcgatccgccgagggctgcagagagcatcctcatccatttgggcacccctgcccaggaagagcccggccatccctttccggactggatccttaagaggtgaattttcttccgtggattccgatttgctccgtctgaccagcctaggcaatccagcatcgcgtggtaccagtgccgctgggcacactggcttcacgccggctccgcctcaccagcaagcgcattcccaggtggtcaggctcaggatggaccatgagctttcaaaaaggaaaaaggtggaaatcctcaactatgctgccatctgaataagtgtttctttgtagatgcacagagtcaaggaaaattacatccctgcattatgtaatgtaccaacaacgcacttacccactgttttaatctaggttattcttgaaagcagagcctgagacaaaggtagacacattctatttatgagtctaacacccaggagcaggaatgagagataggggagtgaactggggaaaagggaaactaagtccgagcaaaaccagatactgctcttatcaagtggtccacccctattaatggctacataatgcagaactttctcaggattcttcttaaactttatctcagaactgtctgcctcagggagaaaggagaagtatttctccatcagcagccacctcctgtgtgttgagggctgctcctttggggcattaacccactgcctccaccaccccaaccctctgggctgcaaagagctagctgacagtccagctggtaccttagcatcacacattgctgcatcagagaggtcttaagacaggaagctagagtcttggtgcatgctcgaagtgagacggtgtcagcacagagcagggtaaaatcttcccgttaactcttcaccagagctatgactggaatcagaggttgaaaagatgtgagactgtacccaagaagcatcttataagcctacgtaatatactgttagactcatcgaaatctatttcctcccttctttataatcaaaacttcagtgtccagaataaagttggcagaagggttaaattggaaagttaaatgtactagaaggtgtacatttataagttttgaccttgagtcgtgttcaaggagaaagtgacattggaacttggaaaatttaaaaatgattctacttgaaaaatttgaccattgcatagaaatattagctatcgtctaatcttttgtaatcttagaaacaatcgtgaattgtttggtgaaaaatgaaaaaataaccatttcttatgtctccgtgacctttatagaccaatgtcaccaacttttcctaaggtaattgtttcctactgtcaaatagctctagtgatataaatcttaacaatcaatgaagggaaaactggtggaaacataggaggaaaaatactgggataattttcatcacaaagtattggcattaacattggttagaataggggagaaactgcatgacttgacaactggacattcctgtatgttgtatgaggccctgtcttaacagaaatagtgatgtcatcatcatcctctcttatttggtcttgaattgccaccaatcggataaaacctttgaattatttaactcaatatatgttaagtttctactatgtgctgtgtattggtactataaatatgaataagacataagatattacattcaaaaacatcagaatacatgttcttttaaagtataccccaaaacatttaccatgtgttctggggcgcatgttaggctggatcacaaatcaagtctcaagaatttcaaaagattgaaatcatatagagtatgaattaaaccagaaatcaagtacataaaggtaacaaaaaatttccaaaatgcattaatttaaggaacatacacctcatgacccatgagccaaaaaataaatcacggcaaaattgcaaaaatattttgaaatgaattttaaagaaaatacttagcatattaaatacttagcatattaaagctctaagtacatatgttagaaattttaccgaaaggttggctatcagtgtttccagaagccagggaaaaagtttatacaatttgatcgctgaggcagggaaacaaagtgagacctccgatcgccctgcctttctgaggtgagcactctggatcccatcgcaggagatcagagtcttgctgagttgaggagaggaagattggagttgatactgagatagcttgaattttcaggacaaagtatcaacaaggaggaaggtagacaaaaaaatccagaaatctatgtagagaccccattgtgtacattgcggaacactaagcctaacaattctcaaaattagcgtgagattgggaaatatctaatttccatccagccacagtggagagtcctgactgaaaaccaggcattcgctaaagatcccagaaaggttgtgtgttacatacgtagggctaaactatcctgactaaaaactacactacacttgctcctcacccccacaaaaagcttaaaaacaagcctcaatagtataaagctgatctgtaagtaactaaactacctgcagaacaaagtccaaatttattagttccagtactcc

SEQ ID NO: 32430 - DNA, 6462 bp, Homo Sapiens
acatgacccggcggcagtagccgtggcagcagccgcggcggctccgcgagctcgccgggtgggctcagttcagcgcacgccggagccgagcgcagggggcggggaagggacctgctgcagctgcagccgcctgggcgctcctggagcgcgcggtgactcccccggtcggcccgctccatgcagctccgttgcggaagtgtagcggggggaggcggcggccaccgcggcactaagcacgagaggccggggctcggccccctgcagcactaggctctgggagccgcgcgcggcgcgtcccagtggcccgactcgccgtgcgcccggcgcccaccgcagcctgcatgccccgcgctgcgccttgcccggcccccgccgcctcctgctcgcaccgctgcagccgggcgccggagtaatatgctcactcgagtgaaatctgccgtggccaatttcatgggcggcatcatggctggcagctcaggctccgagcacggcggcggcagctgcggaggctcggacctgcccctgcgtttcccctacgggcggccagagttcctggggctgtctcaggacgaggtggagtgcagcgccgaccacatcgcccgccccatcctcatcctcaaggagactcggcggctgccctgggccactggctacgcagaggttatcaatgccgggaagagcacacacaatgaagaccaagccagctgtgaggtgctcactgtgaagaagaaggcaggggccgtgacctcaaccccaaacaggaactcatccaagagacggtcctcccttcccaatggggaagggctgcagctgaaggagaactcggaatccgagggtgtttcctgccactattggtcgctgtttgacgggcacgcggggtccggggccgcggtggtggcgtcacgcctgctgcagcaccacatcacggagcagctgcaggacatcgtggacatcctgaagaactccgccgtcctgccccctacctgcctgggggaggagcctgagaacacgcccgccaacagccggactctgacccgggcagcctccctgcgcggaggggtgggggccccgggctcccccagcacgccccccacacgcttctttaccgagaagaagattccccatgagtgcctggtcatcggagcgcttgaaagtgcattcaaggaaatggacctacagatagaacgagagaggagttcatataatatatctggtggctgcacggccctcattgtgatttgccttttggggaagctgtatgttgcaaatgctggggatagcagggccataatcatcagaaatggagaaattatccccatgtcttcagaatttacccccgagacggagcgccagcgacttcagtacctggcattcatgcagcctcacttgctgggaaatgagttcacacatttggagtttccaaggagagtacagagaaaggagcttggaaagaagatgctctacagggactttaatatgacaggctgggcatacaaaaccattgaggatgaggacttgaagttcccccttatatatggagaaggcaagaaggcccgggtaatggcaactattggagtgaccaggggacttggggaccatgacctgaaggtgcatgactccaacatctacattaaaccattcctgtcttcagctccagaggtaagaatctacgatctttcaaaatatgatcatggatcagatgatgtgctgatcttggccactgatggactctgggacgttttatcaaatgaagaagtagcagaagcaatcactcagtttcttcctaactgtgatccagatgatcctcacaggtacacactggcagctcaggacctggtgatgcgtgcccggggtgtgctgaaggacagaggatggcggatatctaatgaccgactgggctcaggagacgacatttctgtatatgtcattcctttaatacatggaaacaagctgtcatgaaaatggcccaggggattgggaggacagaggggaagaaagctgggatgcctcttggcaggacggaactgggaagtgccccagctgagttccaagtgatgcagtctcttcccagcccaagcggggagttcatggccaaaagactatgcttcaagatgaccctttggtttccatttcttctttagtaacaggtcaactcaacaagagcaaaacacaaaggctgctaccaagtgttgttgtatttcagttcctttcataggcctccgaggtggccattgactatttggggtatatatgtcatatttattttatctagagtagctggggcagccattttcaggtgtaaatggcagaggactcttcagcctgtcaagctgccagcttatctacgggttaaaaagtgctgcattggaaagtagggggtcatgcctcaaaatgtaagtaagtgcccaccttctaggaagcctgaggtttatttcagggattgccgtctgccccccgccccccttctctttttttcttctctgtttctattcttttatggcagtggtggagtgaggcagggatttttttttttttttttcgtgtttttgacattccttgaatctgttttttattccccttccacagaacaggcctgggactttccaacaccctgctaaggaagttctgtgtccaagtcccacccaggctgggttgtccccacctcctccagcccacacagcccaggcagcatccgggccagtgccctgcatgacagagggtctttgttgtgtaatgtttgttcccaagttgcattttctaaccgaatcagtgtgttttcatgaaactgagtgtttctgtggaccagtagttcctctgttgtcttcagtggtcttcctgtgtggctcaagggttctctgtgagagtctggattttcatttctggaatggctggccccatcccacttttctgtatcatggggacacatataaagcagtgtttaatagagcagtttaagaagttgcttgcatctgttggttcaccatggctcatctggggaccattttggattcatgtttcatggcttgtgactgtccccaagcccactccaaacaaagtgtaaggatcagagttctgtcaaggagcagcagttctgctctccccatcatctttgtgcaaggcccctcggggggcactttaataaaagaatttgaaatgggttgactggccattctcatgctgtgctccctgtctcttctcttctctaaagaatcatgtcccagctcctcaaggtccctctatggttccacatctgagtgttcgccacaagagcagcagcagcaggcacagtgcatgccatatctacctgctgcttctctgctgggaggaatggccaagtagattataaaactcacttctgtctcttaggcagacttgtacggccacaaaattacctagtcttcttcctgctgagctactgaggtattgccaccattttgacaactttgagtaattaaaacactcttctgacccaaaaaggaaaaaaggtcactgacgtgacccccccagcatgctagagagctaattccagttctcatatttgtttgaatttcttcccagaggagaggataggaacctctcctccagggcagtaaatcacctgcatttctggagttgtcggtattgtattcgaaaaggcctggagcccctcctgctcaggaaagaactcattccagggtgtggagacagtgccgtctggcaggtgaaatactgtgggaattcacgccaccaggtgtttgtgcaagtgttggcctgggaagaatgggacttcggccttgtcaggagttgtcttcatctgcagcacgtttcttcctcctgcagtagatcttagctaccccagatatctctatggagagaagtttgtggaaaatgctttgcttcgtggcagagtctgatgctgtaggaaaaccttcgggcatgtgacagcagtgtggtccactccctgttctgccctggcactcagagtcatgtgtaagtaggaaacctgagcaagtcttccgtggaggaccctgagctgccgtctttgggatccttcctgtgtccccaccgtctttcatttatttgctttcctgggcctctatctgggccctaccttgagcttctccagttttattcaagccaccagagtaagaatttgggtgtagatgtcacaactaccttctactcaattcaccaattcatttactgctatggcacgtctcaggaataactctagaaacctctaaatcgaaatattataaaatcttgagcacttagtcctgctggttttagttagaaaggcatccaggaattgttttcctacgcccccttgagtggaaagatcttagttagaagataaagtcaagtttgtgttcaggggatgggaggaagactataaataagatgaagaaatcaaaagtaggaaacatgatgtaaacgaagcatggcagatctgtccagcactgatattgctctataaattgagcttactcagttttggccttatttttttacccaggccccatgtcacccagtcctaaaacagtaaccgtgtctacataacgggttggcccctggtgcatccctggaaaagtcaaaggacgcacacttcgaaattctgcagaacgtatttatacatggttcagaaatcttgcgtatctgacttatagccaaatctgcttgctcgaatagcctcagaggaagtcttgtttaataaaaaccttttgatttcctagtcaagtctttatggttgtctcgaggggtgtgtggctactttaatgaaaggctttcctgctctaaatctctttgctgggctgggcctcttcagactatctggtgaaactcctttccttagaacaaactcagtccgtccatgctctgtggcattttgctagatgataaccaaagccttattcctgtagccagtgtcagcagtcagagaggtggagggtgtgttctgctgtggttatgcatacctatctgctgttcttgaggtgtaaaaggaaaggtgaaaatcgggccaggccaagtactcagctgtcttaataggatgaagccttaagcagtggaaatttcagttattttccacagtattccattttggaggatttggggtgtttactttttaaattcttgaacaacttaacctccatgaggctttgtgaagtcagctgtgaccaccctcctcttactgtgttctcagtattcattcacttccagggaagaatgacagccacagggagatggtggtgggcaagaatgagagtcccaggatccagatttagcctcagatcttccccattcaggaagggttttccatttaacaagagcactagtatgaaaacattagggacaaatctcccatgtctttgaaattcggattctcctcttgagatccccttcctcacctgccaatcaactttataaggccacaagtggtcactggttttccttccacaggtttgaggttctcagctttccttaagcgacccagcagctccgctgttttcagagtgaatatgttaagctttgatgagattctattttcagtaagttagtgcttctgggacacttggagaaagctgtgagagtcattgtctacgcaaagaacaacgaagctgatcctaaaagtgatccaatctaagaaaatggtaaaacgagctctggccacagcacagaattttatgtgaggaactcagatttttgaagacttaacaattgcagagaaaggttgcagcctgcacaccatagcccacctctctgagcagactttggttttgtgtggtgacgtggcacatgtttgtacactgggatttttcaaaggacgctacgcgagcagactgacttgcctcttctgtgagcactgtggcttttgtcagatggagtgccggtctgcagaggactgctctttcgaatccacagtgttatctgtgtaaatagctttaatttttcttctgtgtcttaggtgaagttttgttcatgtagcaaccaggtagacagtgaccaaataaggctgtaaatgtgctgtagttttctactgtgatgtacttgaaggagaacctgtgtcctctacttttctgatctcccacaagtattttgtgtttgtttcctgagtcctgaggttattattttactcctgttttgcccccagttttctttgttttttttctggagacccagggaggcccatggtggagatcatttgtaaggaatggatcatggtctgggtttccaaaactaccctagtacagtgaatgagagaaatctgcctggaaattgtttcagaaccatgtacctttatgctttgtgattgtgaaacattgacttttttgtaaccccaaaatgaaaactgtttagtaaaggggatctattttgtgtgttttgaaacttaggtgcaatgtcccctggaaaaagctaaagaaatgtatatgttcaatgacattttaaaataaaatattatatatatgtatatacgacatattcagc

SEQ ID NO: 32431 - DNA, 2180 bp, Homo Sapiens
gggcagaggaagtgccagtgccactgggaccatggctctgacggtaacgcgtgcaacgactaacagggctgaccggcacccacgaccgacaagtgaagctcacctttcgaggctttacccagaaaacaagaaaaattcactgtggtccagaagcagatatcggtgagctgttccgatggccccactatggggctccactggctggggagtgtctgtctgtgcaggtggtcaactgcagccgtgtattcagccttaggcctctagggaccctggtgatctccctgcagcagctacagaatgctgggcatttggtgctacgggaagccctagtggatgagaatcttcaagtgtccccgatccaggtggagcttgacctgaagtaccagcccccagagggcgctactggagcctggtcagaggaggactttggggcacccatccaggacagcttcgagttaatcatccccaatgtgggcttccaggaactggagcctggggaggcccagctggagcggcgggcagtggctctaggccgcaggctagctcgaagtctaggccagcaggacgatgaagagaatgagctggagcttgagctggagcaggacctggatgatgagcctgacgtggaactttctggtgttatgttcagccccctcaagagccgcgccagggccctggcccatggggatcccttccaggtgtccagagctcaagacttccaggtgggagtcactgtgctggaagcccagaaactggtgggagtcaacattaacccctatgtggccgtgcaagtgggggggcagcgccgtgtgaccgccacacagcgtgggaccagttgccccttctacaatgagtacttcttgttcgaatttcatgacacgcggcttcgtctccaagacttgctgctggagatcacggctttccattcgcagaccctcccctttatggccacccggataggcaccttcaggatggacctgggcatcatcttggaccagccagatggccagttctaccaaagatgggttccgctgcatgatccccgagacacccgcgccgggaccaagggtttcattaaggtcaccttgtccgtgagggcgcgcggggacctgccccctccaatgctacccccggccccagggcactgttcggacatcgagaagaacctgctcctgccgcgcggggtgcccgccgagaggccatgggcgcggctccgcgtgcgcctgtaccgcgccgaggggcttcccgcgctgcgcctggggctgctgggcagcctggtccgcgccctgcacgaccagcgcgtcctggtggagccctatgtgcgggtgtctttcctggggcaggagggcgagacgtcggtgagcgccgaggcggcggcgcccgaatggaacgagcagctgagcttcgtggagctcttcccgccgctgacgcgcagcctccgcctgcagctgcgggacgacgcgcccctggtcgacgcggcactcgctacgcacgtgccggacctgaggcggatctcccatccgggccgcgcggcggggtttaaccctaccttcggcccggcctgggtgcccctctatggctcgccccccggcgcggggctccgggatagtcttcaaggtctcaacgaaggcgttggccaaggcatttggttccgcggccgccttctgctggctgtgtccatgcaggtgttggaagggagagctgaacctgagcctccccaggcccagcaggggtccacgttgtcccggctcacccgaaagaagaaaaagaaagccagaagggatcagaccccaaaggcggttccgcagcacttggacgccagccccggtgccgaggggcctgagatcccccgtgccatggaggtggaggtggaggagctgctgccgctgccagagaatgtcctggcgccctgtgaagatttcctgcttttcggtgtgctcttcgaggccaccatgatcgaccccaccgtggcctcccagcccatcagcttcgagatctccattggtcgcgcaggccgtctggaggagcaattgggccgagggtccagggctggggagggaactgagggtgcagccgtggaggctcagcctctgctgggagccaggccagaggaggagaaagaggaggaagaactggggacccatgctcagcggcctgagcccatggacggcagtgggtga

SEQ ID NO: 32432 - DNA, 2659 bp, Homo Sapiens
atggcttttggagccaggctgtcctccttccagaaggacctgagaagctgttccagacaagacagagcaagcttctgggaatctaaacagccagggaaggtccaatgtgagtcacttcctcagttaggcaccaaggcagtgacagaagtagcatttcctggccatgactttgctgaggttgtcctgctgtttttggaaaggccttctcagggccatggcccagaagggtgggcaaagggaaagaagctgttcacaggggcctctgtaaggagacttggagtcgctgcagccaaggctggagccatgagacggccccctggcaatggagaggcggccagcgaaggtccaggtggctggggtctatggggagtccaggagtccaggaggctgtgctgtgccgggcaccgaaatagcctcgtagtcccgcggagacagcaggcagccgtggctgacgcgggaccaaggcttggcagggagcgcgctgctgtggaagctttggtttctcagggcttggagaaggacagaagctcagagccctcacacaacactggagtgaatgtggctctgactaaccccatctggctagaccagggtcagggagacagcttgggagaccccactcttaaaccaggagaagagacaggaggccaggggatgagtggaccatatggccatggccacccacaaacactcgcagtgcacccacgcttacatgctcagcatacacacattcctgtccatgtgcaccagtcttgcacacactcttctcaggatagccatgcaaccattcacactttcaacatgtatacctgtggacaacgacatggctctctgtgtctcttggatctgagccctcccccagtatggaacacaacatctctgatcagggatggcccttgtggaactggagcttgggatggggagcttggacttaggagtgtggaggagcacatgaagggctttactgcctccttgcctgggtctggtcacgaccgctgcaagcaggctttgctgcagattgggatcaacatgatggcactgcctggaggtcgccacctggactccgtcaccctgccgggtcagcggctacacctgatgcaggtggactcagtccagcgctggatggaagatctgaagctcatgaccgagtgcgagtgcatgtgtgtcctgcaggccaagcccatcagcctggaagaggatgcacagggtgacctcatcctggcaggtggccctggccctggagaccccctgcagctgctgctcaaacggggttgggtcattagcacagagctgcgcaggatcgggcagaagctggcccaggaccgctgggcacgggtgcacagcatgagcgtgcgtctgacctgccatgcccgctccatggtcagcgagtacagtgctgtcagcaggaactccttgaaggaaatgggcgagattgagaagctgctaatggagaaatgctcggagctctcggcagtcacagagaggtgccttcaggttgagaatgagcatgtcctgaagtcaatgaaggcctgcgtgagtgagaccctgagcatgctgggccagcactttggtcagctgctggagctggccctgacacgggaggttcaggcactggtgagaaaaattgatgcctcagacaatatctacaccacagagtccaccacagggaacctgttcagcctgacccaggagggggctcccttgtgccgcatcatagccaaggagggtggggtcgtagcactcttcaaggtttgccggcaggacagtttccggtgcttgtacccccaggcgctccgcacgctggcctccatctgctgcgtggaagagggtgtccaccagctggagaaggtggatggcgttctgtgcttggccgacatcctgaccgacaacagccactcagaggccacacgggctgaggctgcggctgtggtggcccaggtcacctccccacacctgcccgtcacccagcacctcagtagcttcctggagagcatggaggagatcgtgacagccctcgtcaaactgtgccaagaggcctcatcaggggaagtcttcctactggcctctgcggcccttgccaacatcacgttctttgacacaatggcctgcgagatgctcctgcagttgaatgccatccgtgttctcctggaagcctgcagtgacaagcagagagtggacacgccttacactcgggaccagattgtgaccatcttggcaaacatgtctgtcctagaacagtgtgcctctgacatcattcaggaaaatggtatgtctttgcagcattgtacatgttatgtggattatctggatgtaggggactgtgtctttgtgcttgtgtgaatgcctgtgcaggtatgtaaataggtacatgtggccgggcgcaggaatcatgcctgtaatcccagcactttgggaagcagaggtgggcggatcaactgaggtaaggagttcgagaccagcctgagcaacatggtgaaaccctgtctccactaaaaatacagaaattagctgggtgtggtggtgggcgcctgtaatctcagctactcaggaggctgaggcaggagaatcacttgaacctgggaggcggaggttgcagtgagctgagatcacgccattgcactccatcctgggcaacagagcgagactctgtctcaaaaaa

SEQ ID NO: 32433 - DNA, 9542 bp, Homo Sapiens
aagtgcagatagaataaaacttttaccttttcctggaatgaaatagactgttgtttccctggcacttaataaggatagcataatgctagaaattatattgtgttactatgttccatagtcaaaaaatcatgattactagggcaaaaccctgttcatctcttaagaagaatttaactcactttgtaattatttaattcccttctgtctatcttagaatatgtgctctttcattgcagtatctatgttatttttgaaagttctttagattgctgttaagcttcatccagattaataatgatttttcaagtataagttaatggtttctttctatgtggctttctttttaaaagaatatttatagatacttatgaattctgttagagaaaaatgtaaattttaacctgtcatgcatattaaaaacatactttttgatgatattctatgtgtcactctagaattataagccgtcctaaaagtagaaaaatctgatccatcgagattgagaaggagcatgatatagtgggaaaagcatgggttttagaatcagacgaaactgggtaaaaaaatacagttctactacttatttactttgttgccttggaggaattacatggcctttctaatttatgacttcttcatctgaaaaatggcagatgatactctcttggcaagggtgttaggagggaggagaggatgtagacaaaatacaaagtattttgagtagttgagtaattctcttctgacttctccattgagacagaaatctagccataactatgaaattctaaatattttacatttttctctaggaatacggggtgctttgcattcaggaatacagaaaaaacagcaaagtggagtcaagtacacgtaacaacttcatgggcttgaaggatcacctagggcatgacctcggccacctttatgtggagagcactgacccacagttaagtccagctgtaccttggtcaacagtagaaaacccaagtatggataccgttaatgtggggaaggatgaaaaagaggcgtctgaagagaatgcaagctctggtgactctgaagaaaacacaaattctgatcatgagtcagaacaattgggtagcatttcagtagagccaggcttgataactaagactcacagacagctctgcaggtctccctgtttagagcctcacatactcaagcgcaatgaaattttgcaagactttaaacctgaagagtcccagactacatccaaggaagcaaagaaaccacctgatgtggtgcgagaataccaaacaaaactggagtttgcacttaagttaggttattctgaagaacaggttcagcttgtactaaacaaacttggtactgatgctttaatcaatgatattttgggagaacttgtcaaacttggaaataaaagtgaggctgatcaaacggttagtacaattaacactataacacgggaaacttcttccctggaatctcagaggtctgaatctccaatgcaagagattgtaacagatgatggtgaaaatctgagaccaatagttattgatggcagcaatgtggcaatgagccatggaaacaaagaagtattttcctgcagaggaataaaattggcagtggattggtttttggaaagaggccacaaagacattacagtttttgttcctgcttggaggaaagagcaatcccgacctgatgctctcattacagatcaggaaattttacgtaaattagagaaggagaaaatcctggtgttcacgccatcccggcgagtccaggggaggagagtggtgtgctatgacgacaggttcatcgtgaagctggcttttgagtcggacggtatcattgtgtccaatgataactacagggacttggctaatgagaagccagaatggaagaagttcatagatgaacgattattaatgtattcatttgtcaatgacaagttcatgccccctgatgaccctcttggcagacatggccccagtctggataattttctgaggaagaaacctattgttcctgaacacaaaaagcagccttgtccatatggaaagaagtgtacctatggacacaagtgcaaatattaccatcccgaaaggggcagtcagccacagcggtcagtggctgatgaactccgtgccatgtctagaaatacggcagccaaaactgcaaacgaaggaggactggtgaaaagcaacagtgttccttgtagcaccaaggctgatagcacttctgatgtcaaacgaggtgctccaaagaggcaatcagatccaagcataaggacacaagtctaccaagacctagaagaaaagcttcccaccaaaaacaaattggaaaccaggtctgtaccttccttagttagcatcccagctacttctactgcaaaaccccaaagcactacatctttaagcaatggccttccatctggagttcatttcccacctcaggatcaaagaccacagggacaatatccttcaatgatgatggcaaccaaaaatcatggaacgccaatgccttatgaacagtatccaaaatgtgactcacctgtcgacatcggatattattccatgttgaatgcatactcaaatctgagtctctcaggcccacgaagccctgaaaggcgtttctccttagacacagattatagaataagttccgtagcttctgactgcagcagtgaagggagcatgagctgtgggagcagtgactcctacgtgggttacaatgaccggtcctatgtcagctcccccgacccacagctagaggagaatttgaagtgtcaacacatgcaccctcacagccgccttaatcctcaaccgttcctgcagaatttccacgaccccttaaccagagggcaaagttacagtcacgaagaaccaaagttccatcacaagcctcctcttccgcacctggctctgcacctgccgcactccgctgtgggcgcccggtccagctgtcctggcgactacccctctcctccaagttcagcacactctaaggcaccacacctagggaggtccttggtggccacgagaatagacagcatctctgactctcgactttatgacagttctccttcacgacaaagaaagccttattcccgccaggaaggcctgggaagctgggagaggccaggctatgggatcgacgcctatgggtaccggcagacttattccttgcccgataactccacacagccgtgttatgagcagttcaccttccagagcctccctgagcaacaggagccagcctggcggatcccatactgtggaatgccgcaagatcccccgaggtatcaagacaaccgagaaaagatttatatcaatttgtgcaacatcttcccccctgaccttgtgagaattgtcatgaaaaggaatcctcacatgacagacgcccagcagctcgccgcagccattttagtggagaaatcccagctgggttattgaaagatgatgcatctttgtggtgtttagtagttttttgttcagctcaaatgctgagggaggtttgctacaatagcacatgtgatctccttctcagcaaggaggttatatagtatccatttatgtgaaatactgtatcatggaatctgtatgtatagccccacatggtggaagtatcacgggattgctttacatttaaactttttttttttaacatttcctttttaaagctatatccttggctggaaatttttccagtttgatttaatagatgtatctgtgatctttgatattaatctttggtgcatcaggggtttatatgcagcactttttatccttgttttgtgttttattaacttggtgtttgtctatcaattgcaagcaattacaataccttcagaatgtgggacatttgactagacctagcaaactgttttttcgagccaagcttagttagactcttttacagctttttaagttatttttatttggggaaagtgggcttctttgtgctataatcattatttatagaaacaaagttatactacagcactgactttatattttaaacagaatgtaagttaccagttttatgttgaaatgtgttacagtatatatatattagaatgatttacaatatggcacttttcgatgtgttatttttgtttggatttttttttctgttaagaaattagttaatttaatatggtcaatttaaaagaaagcagatgcaatcaatggaaaaatgtttccattttttaaaaatgaataaggcaaaagctgtaactgttacaggttagagctttgttatccagctatgatgtgcttcttgacagtagaagtggaattgaattcctagatttccattaacctgtatttttaatatgtctgtctttttgttttggggcacaacaatactggataaaataaccctttcacagcacttgcctgtttttaatgaatctaattattcacaatgcaacttttatatttaacatactctttagctttcctgctatttatcaaggctggcctgaggtgggtttatgtgttgaggttatgcaacatttcttgatactgcactatagagaaatggtgatggaggagttgtaaatggtaacttaaaatttttgtaagatattgtatattttccattttcctgaaggtagttttcttgggggggcctgttatattattaaggccagactcttgccacaaatagtgtagttttagatacagactaaggtctgttctagtattagtaagggatatttctggtttcaaagtcatgggttttgctagtggtgaatacatttctgcggagtagaagatagattttgcagtcagtggcagacagttgtgtgattgacatcacttgactgttgcgtccaggttttgaattgtacttcacgtaacagatgcattcagatctttttctgtagtctgcttagatgccctggctattctgattatcctacatgctacagtttgaagtgaagccctgaaaaaccagaaagtaccttttactgttgatacaaattgtatctttttaactataagaactattttgatttgtagatctagttaaaacacaagtatgtaactatgattagacttttgggcaacattttatcccttatttaaatacaaatttttaaagtaaaattgaggtctagaatagattagaaaataaaaataacaatttagataaatagaaatgtctgtcttagttttatataatatattaaaacacagtaaataaatttattggcattttctttctcctaaaacttacctagtgtgaacttaaaataaaggtaaaatgctgcctgaaaataatgtccaagcacctttgactaggataacattttcactacttgtgtgacactgtgtgttgcacgaagtaggatttgggtatacagtaaatgcttctaaaaggcattgtgcatattgacataaccaataatctgaaccgtgttcagcaaacttaattcaggaaagtggtattctacacaattattgctgttgtgtttgaaatgagtgtggcactcatctgtatccagaaataatatgggtgaggccacacaacccattctgagtggtgtctgtctgaaagcaaccctactcgcatgtgaaattgttctccttgatttggtcactataaagcaagtttaaatgtagaggctaactcagtgccaaaaacagggttacaaatgtgtagtatcttttattttagtcatattctaagacttctttttagtatgaaatcacttttaaattatacatgtaggttttgcttccattttcttcattttaccattttaattatttgaacattcgccaaattttacatttatttaaatgagatcttaggtgagatgtgtgtgacactttgaatttgaccttcttgtgttattagctgactatttgtcattgcctcatggattttaaattatgggaaaatagtgtagccagctgccacctctactgaagtgagtagctctgaactacccacactaaatccttcagtgtaattaattatgagtttaaaaatagcagttttcttatgtgaagaggacagtttgtcccctttttttgaagcaccgatgttgcgttcagagctgtagaatgagataattggcagactttaggtacagcaaattcttacttatctaaagcaataagtcaaaggagtccatcattaaattaaatccatagctgatcacaagccttcattttagccaaaactttctctctaaccaaatcttttaccagacttgctaataaataaccagagagatgtgttaataagtgaagttgccagaaatggtcaactgatcggaaaaaaaaggattcagactggagtattttgcccctgaataattgacagttgactgtgctttacacagtaactagccagtctgttgtctctgtgtcttagtccagagggaatagtacccaattggccaaatactggcccttagtatctcctcctttcttgcatgggatacagacgttttcagtcttgtttttatgatctctctctatatcctgataagagtttgtcattgacttacacatttggaagaaatgcacaccagtgtaatatatttgatactggtggaaacttgaactttgtgtttttatgaaaattcatttatgagaatatgtaatataactgaagagtattttatgtatatctatatacacaaatatgtatttgttatgaggtattaaaaacaggggttggggggagtgcttctgatggctaacttttctctaattaaactatgtttctttgagttgtgaacgaccgagtctggggtctggacggccaatgataagatttagaaccacttggatggaaagcagttcttcactggttttattcttggtattttcaaagaattattttgatatttttaatagaatgtgtaattttaaaatacacaaaaaacttaaagtagtattgattatacaaataattatttaacatgtcttatggatgtatctatatgtatatagacagtaatatatttataaaacaaatatactttgcttatgttatagctcttagtttgtgacaggtgggaggatggctctgggtgtgtgtgtgtgtgtgtgtgtgtgtgtgtgtgtgtgtgtgttttgaaaactctcaagctgttttccctctgatttacaatggtatttactttaaagtatgtttggttttcattattctttttgctctccaacttccttattcaagataaaataagacatacagttttctggccattctgttggtgtgtggtgcacccattttattgtcatctaactcctggagaattcccacgtgacctgaaatcaaacagattctggctggacatatgcttatgttccaaatatattaaagatgttaattcagctaacagttaagtttccaaggtatacaccaacaaataaaatgaggtattaaaaagagatggattacacacatgcattagaataagagaaaacagtagtgttaataaaagtaaagaaacatacactatcttagccccctagggcaggggttgactttttctgtaaaggatcagatagtaaataatacaggaatcatatggacttcaaatgccattgtaaaaactactcagctctgcctttagagcataagaacagccacagataacatgtaaattagtgtggctgtgttccaataaaactttatttacagaaacgggaagccggtcagattgggcctgtgggccataatttgctgatctcaagcagtaaatcctggtatatgttaatagaagaaatcataattgcatttcagttgacattaaaagaaaatctggtagtttttgatgtccttcaaaagaggattgttagacattgatgttaaagcatcttaattcatttgagttttcttacctgtttacacccattatttattagagatatttcttgtgtttaaccacaaaaaaaagcactctgttaaaatgttttaatatgtattgaatttctttcataaacttttcatttctgttgataaatgggaatcccttaccaaccttttgttttttaaaagtctcatagaccaaaaaaaatctgttgcagcatttaattagccacagatacattttggctgcatttaccagttacatttttccattggttttggcttctaataaataacatatctgccattctttaaaaatgattttaaagaagataaatatattgtaatttcacatgctatagctttattctgtaagattaaaaattgtgactagtataattgtagctataatgtgagtggcatgttacaatgtaactctttatgagaaataaaatgtatctctgctttgtctgtccagatctttaggatttttagatgccttgggactgtccttggtgaatgatattcttcatatgatcatatgtaattttgaattcgttggaagtacacgctgctgagcatgtttattcacagtgctttataccgggtgttgcatcagtaatcattttcataagaacatttaaacagcatgaacatcatcatccacttaaatagttaaactttcttttaaaattggaatgcaactgtaggttttaacaatgtttattgttttttaagtggttactttgtttttccttaatactttctgttaacttaattattactcctgttgcagtgttactgttatgtattagaagtggcttttccccctaagatccttagtcttttaaagacaatttaaggtattggccatttggcagtagaaaatgtgcatgttttaacttggttttataaaatctgtaatgtttcacttcttgaaccatgtaccaaatttgccaattttctgtccaagtgtttcagatgaataacaaaacgctgttcattgaagctttcgccacctttcttaaagcagcgtatgttccaagggaaaaaggcattgaaaagcaatcgtttgtttttatgaagaataggtgttcagattccttcagtttttttgaaattagaaatttcttaccttatgtgaaatattcacaaacgtgcacacttctgcagagacaaagcatttcactgcacgtgtaccaggttattgattttatcttttcctttcagggttttgtcctcccaaaccagagtcatatgctgctagtagaattttttatttgatcctgcgaacttttcttataggaaaagtaaggcaaaggatgtgtagtgcaaccatctgataaactagtgtgattgtatttatcctctgttctgtgtatttctgtaatggaatctttacaattcccaaaacggtattttagacctactggaaatctgtatcgaaacagctatgtgattctgccactgagaaaaaaaaaatttttaattcgtttttcttatgctggtttgtttttctttaatgaagaaattgatctcatatggcatcatagatgctaaataaataaaagcatcatacttctctagtttgcctgcattcagtggctaacattatgagcattgtgtaagataaacacatggtcagtatcaatgtaaatgttagagccatgattaattcctatgaaaattgaaattaaatgtcaaagacaactagacat

SEQ ID NO: 32434 - DNA, 6913 bp, Homo Sapiens
atggcaaactcgacggggaaggcgcctccggacgagcggagaaagggactcgctttcctggacgagctgcggcagttccaccacagcagagggtcgccttttaaaaaaatccctgcggtgggtgggaaggagctggatcttcacggtctctacaccagagtcactactttaggcggattcgcgaaggtttctgagaagaatcagtggggagaaattgttgaagagttcaactttcccagaagttgttctaacgctgcctttgctttaaaacagtattacttgcgttacctagaaaagtacgagaaagttcatcattttggggaggatgatgatgaggtaccaccaggcaatccaaagccacagcttcctattggtgcaattccatcttcctacaattaccagcaacacagtgtgtcggattatctgcgtcaaagttatgggctgtccatggactttaattcgccaaatgattataataaattggtgctttcactgttatctggactcccaaatgaagtggactttgctattaacgtatgcactctcctatcaaatgaaagcaagcacgtcatgcaacttgaaaaagatcctaaaatcatcactttactacttgctaatgccggggtgtttgacgacactttaggatccttttccactgtatttggagaagaatggaaagagaagactgatagagacttcgttaagttttggaaagacatcgttgatgataatgaagttcgtgacctcatttctgacagaaacaagtctcatgaaggtacatcaggagaatggatttgggagtctttatttcatccacctcgaaagctgggcattaacgatattgaaggacagcgggtacttcagattgcagtgattttgagaaatctttcctttgaggagggcaatgttaagctcttggcagctaatcgtacctgtcttcgtttcctattactttctgcacatagtcattttatttctttaaggcaattaggccttgacacattaggaaatattgcagctgagcttttactggaccctgttgatttcaaaactactcatctgatgtttcatactgttacaaaatgtctaatgtcaagggatagatttttaaagatgagaggcatggaaattttgggaaatctttgcaaagcagaagataatggtgttttaatttgtgaatatgtggatcaggattcctacagagagatcatttgtcatctcactttacctgatgtgctgcttgtaatctcaacactcgaggtgctatacatgctcacggaaatgggagatgttgcttgcacaaaaattgcaaaagtagaaaagagcatagctgcggtaaaactcattgaacacccaagttccagtcatcaaatgttatctgaaattaggccacaagctatagagcaagtccaaacccagactcatgtagcatctgccccagcttccagagcagttgtagcgcagcatgttgctccacctccaggaatagtggaaatagatagtgagaagtttgcttgtcagtggctaaatgctcattttgaagtaaatccagattgttctgtttctcgagcagaaatgtattctgaatacctctcgacttgcagtaaattagctcgtggtggaatcctaacatcaactggattttataaatgtcttagaacggtctttccaaatcatacagtgaagagagtggaggattccagtagcaatgggcaggcacatattcatgtggtaggagtaaaacggagggctataccacttcccattcagatgtactatcagcagcaaccagtttctacttctgttgttcgtgttgattctgttcctgatgtatctcctgctccttcacctgcaggaatccctcatggatcacaaaccataggaaaccattttcagaggactcctgttgccaaccaatcttcaaatctgactgcaacacaaatgtcttttcctgtacaaggtgttcatactgtggcacaaactgtttcaagaattccacaaaatccttcacctcatacccaccagcaacaaaatgctccagtgactgtcattcaaagtaaagctccaattccttgtgaagttgttaaggctacagttatccagaattccataccccagacaggagttcctgttagtattgctgttggaggaggacctccacagagttctgttgttcagaatcatagtacagggccacaacctgttacagttgtgaattctcagacattgcttcaccatccatctgtaattccacagcagtctccattacacacagtggtaccaggacagatcccttcaggcactcctgttacagtaattcaacaagctgtcccacagagtcatatgtttggcagagtacagaacataccagcatgtacttctacagtttcacagggtcaacagttaatcaccacatcaccccaacctgtgcaaacttcatctcaacagacatcagctggtagccagtcacaagatactgttatcatagcacccccacagtatgtaacaacttctgcatccaatattgtctcagcaacttcagtacagaattttcaggtagctacaggacaaatggttactattgctggtgtcccaagtccacaagcctcaagggtagggtttcagaacattgcaccaaaacctctcccttctcagcaagtttcatctacagtggtacagcagcctattcaacaaccacagcagccaacccaacaaagcgtagtgattgtaagccagccagctcaacaaggtcaaacttatgcaccagccattcaccaaattgttcttgctaatccagcagctcttccagctggtcagacagttcagctaactggacaacctaacataactccatcttcttcaccatcacctgtcccagctactaataaccaagtccctactgccatgtcgtcgtcctctacccctcaatcacagggaccacctcctactgtcagtcaaatgttatctgtgaaaaggcagcaacagcagcaacattcaccagcacccccaccacagcaggtacaagtacaagttcagcagccccaacaagtacagatgcaagttcaacctcaacagtcgaatgcaggagttggtcagcctgcctctggtgagtcgagtctgattaaacagcttctgcttccgaaacgtggtccttcaacaccaggtggtaagcttattctcccagctccacagattcctccccctaataatgcaagagctcctagccctcaggtggtctatcaggtggccagtaaccaagccgcaggttttggagtgcaggggcaaactccagctcagcagctattggttgggcagcaaaatgttcagttggtcccaagtgcaatgccaccctcagggggagtacaaactgtgcccatttcgaacttacaaatattgccaggtccactgatctcaaatagcccagcaaccattttccaagggacttctggcaaccaggtaaccataacagttgtgccaaatacgagttttgcacctgcaactgtgagtcagggaaatgcaactcagctcattgctccagcaggaattaccatgagcggaacgcagacaggagttggacttccagtacaaacgcttccagccactcaagcatctcctgctggacaatcatcatgtactactgctactcccccattcaaaggtgataaaataatttgccaaaaggaggaggaagcaaaggaagcaacaggtttacatgttcatgaacgtaaaattgaagtcatggagaacccgtcctgccgacgaggagccacaaacaccagcaatggggatacaaaggaaaatgaaatgcatgtgggaagtcttttaaatgggagaaagtacagtgactcaagtctacctccttcaaactcagggaaaattcaaagtgagactaatcagtgctcactaatcagtaatgggccatcattggaattaggtgagaatggagcatctgggaaacagaactcagaacaaatagacatgcaagatatcaaaagtgatttgagaaaaccgctagttaatggaatctgtgattttgataaaggagatggttctcatttaagcaaaaacattccaaatcataaaacttccaatcatgtaggaaatggtgagatatctccaatggaaccacaagggactttagatatcactcagcaagatactgccaaaggtgatcaactagaaagaatttctaatggacctgtattaactttgggtggttcatctgtgagcagtatacaggaggcttcaaatgcggcaacacagcaatttagtggtactgatttgcttaatggacctctagcttcaagtttgaattcagatgtgcctcagcaacgcccaagtgtagttgtctcaccacattctacaacctctgttatacagggacatcaaatcatagcagttcccgactcaggatcaaaagtatcccattctcctgccctatcatctgacgttcggtctacaaatggcacagcagaatgcaaaactgtaaagaggccagcagaggatactgatagggaaacagtcgcaggaattccaaataaagtaggagttagaattgttacaatcagtgaccccaacaatgctggctgcagcgcaacaatggttgctgtgccagcaggagcagatccaagcactgtagctaaagtagcaatagaaagtgctgttcagcaaaagcaacagcatccaccaacatatgtacagaatgtggtcccgcagaacactcctatgccaccttcaccagctgtacaagtgcagggccagcctaacagttctcagccttctccattcagtggatccagtcagcctggagatccaatgagaaaacctggacagaacttcatgtgtctgtggcagtcttgtaaaaagtggtttcagacaccctcacaggttttctaccatgcagcaactgaacatggaggaaaagatgtatatccagggcagtgtctttgggaaggttgtgagccttttcagcgacagcggttttcttttattacccacttgcaggataagcactgttcaaaggatgccctacttgcaggattaaaacaagatgaaccaggacaagcaggaagtcagaagtcttctaccaagcagccaactgtagggggcacaagctcaactcctagagcacaaaaggccattgtgaatcatcccagtgctgcacttatggctctgaggagaggatcaagaaaccttgtctttcgagattttacagatgaaaaagagggaccaataactaaacacatccgactaacagctgccttaatattaaaaaatattggtaaatattcagaatgtggtcgcagattgttaaagagacatgaaaataacttatcagtgctagccattagtaacatggaagcttcctccacccttgccaaatgcctttatgaacttaattttacagttcagagtaaggaacaagaaaaagactcagaaatgctgcagtgaaaaataattccacttacacagtgggggactcaaagtcagccacatttcacatactgttactgaagaaagcaccaagtcttaatggaacaaagaccatagaatgaattattttatctcctcccatgatgctgagaggaagcttcgtattctgatctctgagtgaatccctttgttctctgtttaaaaaaatctaaaaagaaaaaggaaaaaaaaaaaagaactgctgtgggattgtcaaccagcttatctgcaggatgtttcagatctgataaatcctgatggaaactggtatgatcagaattcagtaccatccacattggaatatacatggaatattgtaaaacctacatgagcagatgaaatagaagcattaaatatttttatctatatccaaaaaggagcacatttttatatttacaaaaccgtttaagctggtttgaataatttaaaaaagtttcagcacacctatacccccgatctcagagggggccaccaatatctagctatggatcgtgtgttttgtttagaaatcagtagcttggttttcttacttgagccaatatattttcacttatttattatcataaaaatttaccagtctgaatagatcttgtaaatatttgtgaatagaatgaatacctttcatgccactgcagccactggaaatacattctgtggtgtcctagaagcattattggtaggttctaaagttttctagactttcctgtcaattgtaagtaattgtgatatattctatgcagtggatgaatgttctttaaatttgtgtaaatacttctgcaaaggtactgatgctgtaaagtcaaaacagttttgtggaactgtgatttttttttcttttttctttttttttttctttttttttttgtattatacaccttgtagaactcattttgctggctgaaagagtatggaataatatatctcatgtcattttttagaagaaaaactatttgaaggtattttttggttttccttaacatgtatccactgtaaacgtttgtcgtgtacaagctcagagcttggacagaattttttgtatttgtaaattggtttaaatacatggaattttatacaggttttctcctgtgttatatatgcattatgtgcaggtatgatattttcttcactactttttctatcttaatatagtgtggaattttattgtattattcttccattcttaatactgtaccacattcctgctcagaaactgctcacttccttaaattgtcttttttcccccagcgtgaaatgtatccatttataactgcctattgcctgttctattagcatccaaaaatgtggaaggcctcccaaccaccatttctgctgtgtccttaggatgtgcagtaaaaaatatagacctaacagtttatgttatagaatggctttatttactttggtgactgtttatagtttttaaataaaagactgaacattt

SEQ ID NO: 32435 - DNA, 3895 bp, Homo Sapiens
ctccctgcagccgccaccgcagccgccgcctgggccgctccgtgtccccggtggagccgccgccgccgccgccgggagctcgatgcggacggagcccgggccgagccatggggatcctcagcatcacggaccagccgcccctggtccaggccatctttagccgagatgtggaggaagtgcgttccctactctcgcagaaggagaacatcaatgtgctggaccaagagaggcgaactccattgcatgctgctgcctacgtaggcgatgtccccatcctccagttgctactgatgtcaggtgctaatgtcaatgctaaggacacactgtggctgacccctcttcatcgtgctgctgcctcccgaaacgagaaggtgctggggctgctgctggcacattcagcagatgtgaatgcccgggacaagctgtggcagacaccactgcatgtggctgctgccaaccgggccaccaagtgtgctgaggctctggcacccctgttgagcagcctcaacgtggctgacaggagcgggcgcagtgctctgcaccatgcagtgcatagtgggcatcttgagacggtgaacctgctcctcaacaagggagccagcctgaatgtctgtgacaaaaaggagcggcagcctctgcattgggcagcttttctagggcacttggaggtcctaaaactgctggtggcacggggagcagacctcggctgcaaggaccgcaagggctatgggctgctccatacagctgctgccagtggccagattgaagtggtgaagtacctgcttcggatgggagcggagatcgatgaacccaatgcttttggaaacacagctttgcacatcgcctgctacctgggccaggatgctgtggctattgagctggtgaatgccggagccaatgtcaaccagccgaatgacaagggcttcacgccactgcatgtggctgcagtctccaccaatggcgctctctgcttggagctactggttaataatggggctgacgtcaactaccagagcaaagaagggaaaagtcctctgcacatggctgcaatccatggccgtttcacacgctcccagatcctcatccagaatggcagcgagattgattgtgccgacaaatttgggaacacgccactgcatgtggctgctcgatatggacacgagctgctcatcagcaccctcatgaccaatggcgcagataccgcccggcgtggcatccatgacatgttccccctgcacttagctgttctctttggattctctgactgttgtcgtaagcttctttcctcaggtcagttgtacagcattgtgtcttcactcagcaatgagcatgtgctttcagctgggtttgacatcaatacacctgacaaccttggccgtacctgtcttcatgctgctgcttccggagggaatgttgaatgtcttaatttgctgttgagcagtggagctgacttgaggaggagggacaaatttggcaggaccccactgcactatgcagctgctaacggtagctaccagtgtgcagtaacattggtgactgctggggcaggtgtcaacgaggccgactgtaaaggctgctctcccctccactacgctgccgcttctgacacttacaggagagcggaaccccatacaccttccagccatgatgccgaagaggacgagccactgaaggagtcccgcaggaaggaggccttcttctgtctggagttcttactggataacggtgcagacccctccctgcgggacaggcagggctacacagctgtgcactatgcagccgcctatggcaacagacagaacctcgaactgctcttagaaatgtcctttaactgcctggaggatgtggagagcaccattccagtcagccctttgcacttagctgcctacaacggtcactgtgaagccttgaagacgctggcggagacgctggtgaatctggacgtaagggaccacaagggccggaccgcactcttcctggccacggagcgcggctctactgagtgtgtggaggtgcttacagcccacggcgcctctgccctcatcaaggagcgcaagcgcaagtggacacccctgcacgctgctgctgcctctggccacactgactccctgcacttgctgatcgacagtggggaacgagctgacatcacagatgtcatggatgcctatggacagaccccactgatgctggccatcatgaatggccatgtggactgtgtacatctgctgctagagaaaggatccacagctgatgctgctgacctccggggccgcactgccctccaccgcggggcagtgactggctgtgaggactgcctggctgccctgctggaccacgacgcatttgtgctgtgccgagactttaagggccgcacgcccattcacctggcctcagcctgtggccacactgcagtactgcggaccctgctgcaggctgccctttccacagatcccctggatgccggggtggattacagcggatactcgcccatgcactgggcctcctacactggacatgaagattgtctggagttgttacttgaacacagcccgttttcgtacctggaaggaaaccccttcactcctttgcactgtgcagtgattaataaccaagacagcaccacagagatgctactgggagctctgggtgccaagattgtgaacagccgagatgccaaaggacggaccccccttcacgccgctgccttcgcggacaatgtctctgggctccggatgctgctgcagcatcaagctgaggtgaacgccactgaccacactggccgcactgcgctcatgacggcggctgagaacgggcagaccgctgctgtggaatttctgctgtatcgagggaaggcagaccttactgtgttggatgagaacaagaacacggccctccacttggcttgtagcaagggccatgagaaatgtgccctcatgatcctggcagaaacccaagaccttggccttatcaatgctaccaacagtgcgctgcagatgccactccacattgctgcccggaatggtctagcttctgtggtacaggccctgctgagtcatggggccacagtgctggctgtggatgaagaaggtcacaccccagcactggcctgtgcccccaacaaagatgtggcagactgcctggccttgatcctttccaccatgaagcctttcccacccaaggacgccgtcagtcctttcagcttcagcctgctcaagaactgcagcattgcagccgccaagacggtgggtggctgcggcgccctgccccatggggcctcctgcccctacagccaggagcggcccggcgccattgggttagatggctgctactctgagtagccccctccagtgtccctcccccgccggtggcttgatatctaattctatttatttagaaaaagtctaaacatttagggcactttaaaggagaacacgactgggtggagggggcggaggggaaggaagccctggggagcagctgctcacccctttgccacaccatcttggcctggcaggggtctgggactgacagggagcaccccaggcccttggtacccccagggcgaccccttctgccaagtgtcccaaaatgattgctaaatgcctggctcccccactctttgactccatctcttggttccctctttctgctgccagctcccccgactcttccctggggactcctctctgtgtcccccttctcccctgcccctactgccaggcagatcccctcttcttccatacccatgccctgcatgacctgtgatgctgcagacaccaccatcctgtgtgcaggtgtgtgttggggggcacggaggggcatgttccatgtcctgttgcaccctccaccctgtgacccatgtactcggttgtaggaagtaaagagaactgagcac

SEQ ID NO: 32436 - DNA, 673 bp, Homo Sapiens
aaatagtaatatatggtgtggtccaaatgatttgctaatgtgggaaagaggatatgcttgtgttcacaccccgtcaggtcctctttggattccagcacgaggcatcaaaccataccatggcatggctaggacccaacccggtaccaaaatgaagaaaatgaccctacaggacccacaatcccggatgatgtggcttccttggatgacacaggccctggacattacctgggggatgctgaagaagacaactcaggaggccaagcaaatcctgctccaggcacagacaccattcactccaggaagctgccattcattcgacataagtaggtgcttcatctgataagcgctgcttgtgtaatttatcaatgacagagaaggcagatagcagcatgcatacttggggctgcatttgaaggagagcaacatccctttgttttcacagaggagaacaagcatgagttgagattgtggtgcttcttgaagtctcatccagatcagaaacctgctgctctgtccacattccatccaccaaagcaacccatatggccatgtccagcatcagatggggaaaggcagttctcctctagcacgaggagctgcaaagccacatggcaaaggatgagtgtgtaaaaaataaatgcaggagggcaggaggcattgggaacaatgatcc

SEQ ID NO: 32437 - DNA, 643 bp, Homo Sapiens
gcggccgcgcggccccgcccgtcggcctcgctcccgccacagagcccgcagcacgccgccgccgcagcctaggtcacagatctgtgaaaatctttaaaggcatgtgttttgccatatatgcaagtgaatcaacttgccagataaaagtttgctgcctaaatatgattactaggaaagccaagtctctcttcctggatttcttctcctataaaccgcctattgatacctacccacttctctatggagcacagatgaaggatattggtcatctccagcatctagcacaacgtctgcaatggaacaggcgagctgtgaatatttgtggaatgcatgggtggactaaagacctatcacctcactctagaatgcccagcatgttggagcatgttaagcactatatgagctgctgaggatacaggaataaacaacaacacaggtgtgtcctctgcccaaaccaggcataaatgagcttccaaatgaacacaaacaaatctggaaggcttttgaggaagaaggaccattaaaaaagctgctgacgactgcctggaatctggtttggagcatctccaaagccaacgtactttcccccaagaaaatacaggaagatctctctgcccaggcttggaaatacataaggatcagg

SEQ ID NO: 32438 - DNA, 1593 bp, Homo Sapiens
atgacgattcttgatggagcagagcggaaagggttgacccaaaccaaacccagaggcccacagagccacacagccactcacggagatgttcccatgggctgcccagatggtagcatctctggagggatgaagaagcaagaggaaatgtggaccttggggaagtctagtagtgactctggaactccaggaacacagcttatagactttagccccagctccccacataagggtctggaggctgagtataagaagggccaggatccatgctgggaaactgcttggtccatgatggtgatcctcaaggcaataaacaggactgagacctgcagaggagctggcctgactgcagaggacaaaagcaggggtgtgagcagccctcacgaaaagttctgcagtggggtcccccagcgtggggcccttctcgagacccttaaagagaaggctcgtttggtggaccatacccgggcagcgcgggcccgggcctggactggttctacttgtgttctgagcgcggccgccctcatcccttccccggggctggggtgggtcaccggccgacaaacacaggaggggccgcgtccccgtccccgacgcgctcacaaacgccgtggtcgcccgaaccttcggccccgcagcattcggctacaggaccgcgacactgcagggccccggctctgcgcgctgcgctccggccgctcggcgcgggaggacgtgcggtcgcgcctgcctcggtggccgcgcggggtgggagcatttcagagcgcacaagccatggtggccaaacagcggatccggatggctaacgagaagcacagcaaaaacatcacccagagggggaacgtagccaaaaccctgaggccgcaagaggagaaatatcctgtgggaccatggctgttggcactgtttgtttttgttgtctgtggctcaggtcaaccacataaattggcctctcctggagactgccagaactttctcaaagttgtaacatccagagggagtcaccccacccccaagaccggcaactgagatgtttaaaggaactggctggccctgaaggaaagactgaggccattcatctgctctggagttcatcctcgggatctgagatgcacagcctgaagacatctcatcagccatcagctcccttaagctatctttcagatcattcagagcataaggatgggcatgtgagaaagccagggatttgacaccacctccctcccactggaggcgggaggacaacggaagcggtcagccagtttctgcgggaaacaagcaggccacacggaatagaaaaaaacgctcccccacttgttccctgatcacttcatcgtggatgtcagaccaaattgccttctcacaggacatcttggtgcatccgcgttctcaagcggaaaggacattttgcttttctgttggcaggattagtagccacgcgggtcgtccgcagcagtgctgtttttttggtttttcccttggtttcactaatgcgtgcatgtggccctctgaacgatcactggtttactttctatggatacaatctctcctccattgagaattgattttacaaataaatgtcttcgttcaacctta

SEQ ID NO: 32439 - DNA, 8311 bp, Homo Sapiens
gagttccaccatcttcctctgaagacgtagccatcttgctccatgaaggtcaggacaatctgacatgcacttgtttcttgcctctatacttgaagagtagtccccttccctccctagaccttggagaagtaccctccattactttcccaagatggcagaccccatcatggatctgttcgatgacccaaatttatttggcctggactctctgactgatgacagctttaaccaggtcacacaagaccccattgaggaagcccttggactgccaagctctctggactccttggatcagatgaaccaggatggtggaggtggtgatgtggggaattcatcagcaagtgaactggtccctccaccagaggaaacagctcccacagaactttccaaagaatccacagctccagctccagaatccataaccttgcatgattataccactcagcctgccagccaggagcagccagcccaacctgtcttacagacatcgacgccaacatcaggacttttgcaagtctccaagagccaggagatcctgagccaagggaatcctttcatgggtgtctctgccacagctgtctcctccagtagtgctggagggcagccacctcagtcagcccctaagattgttatccttaaggccccaccaagctcctcagtcactggtgcccatgtggcacaaattcaggcccaaggtatcaccagcacagctcagcccctggtggcaggcacagccaatggtggaaaagtcacttttaccaaagtgctaaccggcacaccccttcgaccaggtgtttccattgtctctggtaatacagtgttggccgccaaggtccctgggaaccaggctgctgttcagcgcattgtccagcccagccgaccagtaaagcagctggtcctccagccagttaagggttcagctcctgctggaaaccctggggccacagggcccccactgaagcctgcagttacactgacctctacacctacccagggtgaatcgaaacgcatcaccctggtcctccagcagccacagtctggaggtccccaaggacatcggcatgttgtgctagggagtctaccaggcaagatagtgttacagggcaaccagctggcagccctgactcaagccaagaatgcccaagggcagcctgccaaggtagtaactatccagctgcaggtgcagcagccacagcaaaaaatccagattgtaccacaaccaccatcatcgcagccacagccccagcagccaccctccacccagccagtgactctgtcctctgtacagcaggctcagataatgggaccaggacaaagcccaggacaaagactttcagtaccagtcaaggtggtactgcagccacaggctggctcttcccaaggggcctcttctgggctctctgtagttaaagttctgagtgccagtgaagtggcagctttgtcatcaccagcaagctctgctcctcattcggggggaaagacaggaatggaggaaaaccgcagattggaacaccagaagaagcaagagaaagcaaatcggattgtagcagaggccattgcgagagcccgtgcccgcggtgagcagaacatacctcgagtcttaaatgaggacgagttgcccagcgttcggccagaggaggaaggcgagaagaaacgcaggaagaagagtgctggggagaggctgaaagaggagaagccaaagaagagtaaaacatctggtgcctccaaaacaaagggcaagagcaagctcaacaccatcactcctgtagtgggtaagaagagaaaacgtaatacctcatctgataattcagatgtggaagtcatgcctgcacagtcacctcgagaagatgaagaaagcagcattcagaagagacgctcaaaccgccaagttaagcgaaaaaaatatacagaggacctggatataaagatcacagatgatgaagaagaagaagaggtggatgtaactggtccaataaaacctgagcctatcctccctgaaccagtgcaagaaccagatggcgagactttgccttccatgcagttctttgtggagaatcccagtgaagaagatgcagccattgtagacaaagtgctttctatgcggattgtgaagaaggagctcccttctggacaatatactgaagcagaagaattctttgtcaagtacaagaactactcctatctgcattgtgaatgggctactatctcccaactagagaaggataagaggatacatcaaaaattaaagcgcttcaaaaccaaaatggctcagatgagacacttcttccatgaggatgaagagccctttaatccagactacgtagaggtggataggatattggatgagtctcacagtattgacaaggacaatggggagcccgttatttactacctggtgaaatggtgctctctgccctatgaggatagcacatgggagctaaaagaagatgttgatgagggcaagattcgagaatttaaacggattcagtcaaggcacccagaactcaaaagggtgaatcgtccgcaggcaagtgcctggaagaaattggagctatcacatgaatataaaaacagaaaccagctacgggaatatcagttggaaggggttaattggctgctctttaattggtataacaggcagaactgcatcctggctgatgagatgggattgggcaaaactattcagtccattgccttcttgcaggaagtatataatgtgggcatccatggtcccttcttggtcattgccccactgtccacaattactaactgggagcgagaatttaatacatggacagaaatgaacactattgtgtaccatggcagtctggccagcaggcagatgattcaacagtatgaaatgtactgcaaagattcacggggacgcctcatcccaggcgcatacaagtttgacgctctgatcaccacttttgagatgattttgtcagattgtcctgagcttcgtgaaattgaatggcgttgtgttatcattgatgaagcccatcgactgaaaaaccgtaattgcaagctgcttgatagtctcaagcacatggacctggaacacaaggtgctactcacaggaacaccattgcaaaatactgtagaagaactgtttagcttgcttcatttcttggaaccgtcacaatttccctcagaatcagagtttctcaaggactttggggatctcaagacagaggaacaggttcaaaagctacaggccattcttaagccaatgatgctgagaagactcaaagaggatgttgaaaaaaacttggcacccaaacaggaaacaattattgaagtagagctgactaatatccagaagaaatactatcgggctattttggagaagaatttctccttcctttccaaaggggcaggtcataccaacatgcctaatctacttaacacaatgatggagttgcgcaagtgctgcaaccacccatatctcatcaatggtgctgaagaaaaaatcctaacagaattccgtgaagcttgccatattatacctcatgactttcacctgcaggccatggttcgttcagccggcaaactggttcttattgacaagttgcttccaaagcttaaagctggtggccataaagttctgatcttctctcagatggtgcgctgcctagacatcctagaggattatttaatccagaggaggtacttatatgaacgtattgatgggcgagttagaggcaaccttcgacaggctgccattgaccgcttcagcaagcctgactcagaccgctttgtcttcttactgtgtacccgggctggtggacttggtattaatcttacagctgctgatacctgcatcatctttgattcagactggaatccacaaaatgacctgcaggcccaggcacgatgtcatcgaattgggcagagcaaagctgtgaaggtgtaccgcctcatcactcgtaattcctacgagagagagatgtttgataaggccagcctcaagttggggttggataaggctgtgcttcaatccatgagtggtcgggatggcaacattactggaatccaacagttctctaagaaggagattgaagatcttttaagaaaaggagcatatgcagccatcatggaggaagatgatgaaggctccaagttttgtgaagaggacattgaccagatcttgttaagacgaactacaaccatcaccattgaatctgaaggaaaaggttccacctttgctaaggcaagctttgttgcttctgaaaacaggacagatatttctttggatgaccccaacttttggcaaaagtgggccaaaaaggctgacctagacatggatctgctcaacagcaagaataatttggtaattgacacacctagagtacgaaaacaaacgcgccactttagcactctgaaagatgatgacctggtggaattctctgatttggaaagtgaggatgatgagcggccacgctcccgcagacatgaccgtcatcatgcctatgggcgcactgactgctttcgggtggaaaagcatctcctggtatatggttggggacgatggcgagatattttatctcatggacgcttcaagcgacgtatgactgaacgagatgtggagaccatttgtcgggccattctcgtgtactgtcttctacactaccgtggggatgaaaatattaaaggcttcatctgggacttgattagcccagctgaaaatggcaagacaaaagaattgcagaatcattcaggtctatctatccctgtgcctcgtggacgcaaaggaaaaaaagtaaagtcacaaagcacttttgatatccataaggcagattggatccggaaatataaccctgacactttgttccaagatgaaagttataagaagcacttgaaacatcagtgtaacaaggtactgttgcgggtacgaatgctatactacctgaggcaggaggttattggagaccaagcagaaaaggtgttagggggtgcgattgccagtgagattgacatatggttcccagtagtggatcaactggaggttccaacaacttggtgggacagtgaggctgacaagtcgctgctcattggagtctttaaacatggctatgagaaatataataccatgagggcagacccagccttatgtttcctagaaaaggctggccgaccagatgacaaagcaattgcagcagaacatcgagtgttggataacttctctgacatagtagaaggggttgactttgataaagattgtgaagatcctgaatataaaccactccaaggtcccccaaaggaccaagatgatgagggtgatcccttgatgatgatggatgaggagatctcagtgattgatggagatgaagcccaggtgacccaacagccaggccatttattctggcctccgggctctgccctaacagctaggcttcggcgtctagtaacagcgtatcagcgcagctacaagagagaacaaatgaagatagaggctgcagaacgtggggaccggcgaaggcggcgttgtgaagcagccttcaagctgaaagaaattgcacggcgggagaaacaacaacgatggacaaggcgtgaacaaactgatttttatcgagtggtgtctacgtttggtgtggaatatgaccctgacaccatgcagttccattgggatcgcttccgcacttttgctcgactagacaaaaagacagatgaaagccttaccaagtacttccatggctttgtggccatgtgccgccaagtatgccgccttcccccagcagctggagatgaaccccccgaccctaacctgttcattgagcccatcactgaggagagagcctcacggactctctaccgtatagaattgcttcggcgcttacgggaacaagttttatgccacccccttttggaagatcggctggcattgtgtcagcctcctggtcctgaattgcccaaatggtgggagcctgttcggcatgatggggagcttctaagaggggcagcccgccatggggtgagccaaacagactgcaacatcatgcaggacccagacttctcttttctggctgcccgtatgaattatatgcagaaccatcaagcaggagcaccagctccatccttgtcacgctgctctactccactgctgcaccagcagtatacctcacgcactgcctcaccactgcccctgcgcccagatgctcctgttgaaaagtcacccgaggagacagctacccaggtccccagtctggagagtctgactttaaagctagagcacgaggtggtggccaggagccgaccaaccccacaagactatgagatgcgagtatccccctctgatactacccctctggtttcccggagtgttccaccagtcaaactggaggatgaggatgattcggactctgagctggacttgagcaagctgtcaccatcttcttcttcttcctcatcctcatccagctccagctccagcactgatgagagtgaggatgagaaggaagagaagctaactgaccagtcccgctcaaagctctatgatgaagagagtctcctgtccctcactatgtcccaagatggattcccaaatgaagatggagaacaaatgacccctgagcttctgctactgcaggaaagacaaagagcctctgagtggcccaaggatcgtgtcctgataaaccgtattgacctcgtctgccaggctgtactctcagggaagtggccttctagccgtaggagccaggaaatggtaacaggaggaattttggggccaggcaaccacttgctagacagtccctcattgactcctggagaatatggtgactctccagtccccacaccacgaagtagtagtgcagcttccatggcagaggaggaagcatctgcagtcagcacagcggcagcccagttcaccaaacttcgccgaggcatggatgaaaaggagtttacagttcaaatcaaagatgaggaaggattgaagttaacattccagaagcacaagttgatggcgaatggagtaatgggagatggacatccactgtttcataagaagaaggggaacagaaagaagctagtagagctggaggtggagtgcatggaagagcctaatcaccttgatgtggacctggagacccggatccctgtcatcaataaggtggatggtactttgctggtgggtgaggatgcccctcgccgggctgaactggagatgtggttacagggtcatccagagtttgctgttgatccccgatttctagcgtatatggaggatcgcagaaaacagaagtggcaaagatgtaaaaaaaataataaggcagaattgaactgtttgggaatggaaccagtacagacagctaactctagaaatgggaaaaagggtcatcacactgaaacggtgttcaaccgggttttgccagggcctattgcaccagagagcagcaagaagcgggcccgtaggatgcgaccagacctttctaagatgatggccctcatgcagggtggaagcactgggtctctatctctgcataacacgttccaacacagcagtagtggcctacagtctgtgtcatctttgggtcacagcagtgccacttctgcatctttgccttttatgccatttgtgatgggtggtgcaccatcatcccctcatgtagactccagcaccatgcttcatcaccaccaccaccacccccacccccaccatcaccaccatcaccatccaggcttgagagcccctggctacccctcttcaccagtgactaccgcctctggtactaccttgcggttgccaccactgcaacctgaggaggatgacgatgaggatgaagaagatgatgatgacttatctcagggctatgatagctcagaaagggacttctcactcattgatgatcctatgatgccagctaactcagactccagtgaagatgctgatgactgaagccccagcatgggccccattgcttgggcggctgctgtattttcatttactctggcccttggactatggaaacgtgggaggggcaggggagatgtggggaagtccaggactccaggaggtgaaaaggaaaaaaaaaaaaaaatgtacctgattgctcccaattatgagaggattgggtgggcaggggaactcctaaaataatacatgaccacttcctcatttctggggaaggaaaggagactagagcagctggtgtgctcacccctccctagtcacctccattaaccacagactatgtagcgctggccctagcctctggcagagcctgttcctggccgaactgtggatacagctggagggtcaggaactgttaccttctttccccttggcattaataaatttaagttaatcctt

SEQ ID NO: 32440 - DNA, 7851 bp, Homo Sapiens
ctgggcccaaaacttgggtggaaggcagaggcctccgggaccctccccgccccctcctcccccccgccggctcccccgccctctcctccgcgcccctttaagctatccagcagacggagacagagttgatccaggaggggctggcagagtgctggagggggaaggctgggggcggagggaagggcggcaggagcccgaccggtcccacccctagctacaaccccgggcaggaagagctcgtcgcggtagcagcggtcgaaggggaccaagctccagagggcgggcgcccgagccgtgcggggagcgggcggggcagccatgctcctgtctgggggcgatcctccggcgcaggaatggttcatggtgcagacaaaatcgaagcctcgggtgcagcggcagcggctgcaagtgcagcgcatctttagggtcaagctgaacgccttccagagccgcccggacaccccctacttctggctacagctcgaggggccccgagagaacatgggcaaagccaaggaatacctgaagggcctgtgcagcccagagctgtggaaagaggttcgctacccaccgatcctgcactgtgccttccttggggcccaaggcctcttcctggactgcctctgctggagcacccttgcctacctggtgcctggcccccctggctccctgatggtgggcgggctgactgagtctttcatcatgacacagaactggctggaggagctggtggggcgactgcgctggggccctgcccctctgctgaccccccgggggatctgggaggctgaggtgacccgggcctttggggccctggtctggatccgtggtgaccagcatgcaggggacctactgcagctgcccccagcggtccaggagctgctgctgagcctggtgcgggatgctgcgggcaaggaagacatcatcgagtggctcagccgcttcggcatctctgactcccactccgatccggaggttctaatctgccctccccagcagcagaaggaagccccagccatggtgtccgtgggagagagtcctggaccctttgtggacatggggaccctccagaacaggggcccagaaaattcaaagagattatctagcctgggagccactgggtccctgatcacagcccagagcacaccgcaggaggcagcaaaccagctggtacgggtcggttccaacaaccaagatggtatggacagtgctcaagaggaagggacagtgcaagccaccagcagccaggactccacgaaccacacacaagccttgttgaagcaaaggcaggtccagaagatagaagataaactcctcttccaacctccagtatcagccctgggtgtgtgcccaccctggaaggcctggaccccggggccagcctttgggccattgtggccgggggctattgctgcaaccttctggaggatcaatgagctgcattctctacatctggcctggctcctgtcccaggcgtgcttcaatttccccttctggcagagacctctgggccccattcagttgaagctgccagggcagaatcctttgcccttaaatctggagtggaagcagaaggagctggctcctctgcctagtgcagaaagcccagctggtagaccagatggggggctgggaggagaagcagccctgcagaattgcccaaggccagagatttccccaaaagttacgagtttattggtggtccctgggagctcagatgtaaaagacaaagttagctcggatctcccacagatagggccacccttgacctctacaccccaactacaggctggaggtgagccgggggatcaagggagtatgcagttagattttaagggactggaagagggacccgctccagtgctgccaacagggcaagggaagcccgtggctcaaggggggctgacagatcagtcagtacctggagctcaaacagtgcctgaaactctcaaagtgcccatggctgcagcagtgcccaaagctgaaaatccctccagaactcaagtgccatctgcagctcccaaactgcctacatctcgaatgatgctggcagtgcacacagagcctgcagctcccgaagtgcctttggctccaacaaagccaacagctcaactgatggccacagctcaaaaaacagttgtgaatcaaccagtgttggtagctcaagtggaacccacaactccaaaaactccccaggctcagaagatgcctgtagcaaaaacatcacctgcaggtcccaaaacacccaaagctcaagccgggcctgcagctacagtttccaaagcacctgcagcttccaaagcacctgcagctcccaaagtacctgtgacccccagagtctccagagctcccaaaacacctgcagctcagaaggtgcccacggatgcagggccaaccttggatgtagccagacttctgagtgaggtccagcctacatcaagggctagtgtctccttactgaagggccaggggcaggctggaaggcagggtccccagtccagtggcaccttggccctcagcagtaagcaccagtttcagatggaggggctcctgggggcttgggagggggccccaaggcagccacctcgccacctgcaagcgaacagcacagtgaccagcttccagaggtaccacgaggccctgaatacacccttcgagctgaacctgtcaggggaacctggaaaccaggggttgcggcgagtggtcatcgatggcagcagtgtggccatggtgcatggcctgcagcacttcttctcctgccgaggaattgccatggcagtgcagtttttctggaaccggggacaccgagaggtcactgtgtttgtacccacctggcagctgaagaagaaccggagggtgagagagagccactttctgacgaagctacactcgctcaagatgctttcaatcacaccctcccagcttgagaatggcaagaagatcaccacctacgattataggttcatggtaaagctggcagaggagacagatggcatcattgtcaccaatgagcagattcacatcctgatgaatagttccaagaaactgatggtcaaagatcgcttgctgcctttcacctttgcggggaatctcttcatggtgcctgatgaccccctgggccgtgatggccccaccttggatgagtttctgaagaagccaaacaggttggacactgacattggcaacttcctgaaggtgtggaagacccttcctcccagctcagccagtgtcactgagctgagtgatgacgctgactctgggcccctggagagtctgccgaatatggaagaagtcagggaagagaaggaggagaggcaggatgaggagcagagacaggggcagggcacacagaaggcggctgaggaggacgaccttgactcttcgctggcgtcagtgttcagggtggagtgcccgtccctttcggaggagatcctgcggtgcctcagcctccatgatccccctgatggggccctggacatcgacctcctgccaggggcagcttctccctacctgggcatcccctgggatggaaaggctccctgccagcaggttcttgcccacctggcccagctcaccatccccagcaacttcaccgcactctccttcttcatgggcttcatggactcccacagggatgccatccctgactatgaagccctagtgggccccctgcacagcctcctcaagcagaagcctgactggcagtgggaccaggagcatgaggaggccttcctggccctgaagcgagccctggtgtctgccctctgcctgatggcccccaactcccagctgcccttccgcctggaggtgaccgtgagccacgtggccctgacggccatcctccatcaggagcactcagggaggaagcaccccatagcctatacctcaaaacccctcctccctgatgaggagagccagggcccccagtcagggggtgacagcccctatgctgtggcctgggccctcaagcatttttcccgctgcattggagacaccccggtggtcctggacctttcctatgcctcccggaccactgcggaccctgaggtgcgggagggccgcagggtttccaaagcttggttgatccgatggtccctcttggttcaggacaaaggcaagagggccctggaattggccctcctccagggcctgctgggggagaaccgcctgctcacccccgcggcctccatgcctcgcttcttccaggttctgccgcctttctctgacctgtccacgttcgtctgcatccacatgtcgggctactgcttctaccgtgaggatgagtggtgtgctggctttggtctctatgttctatcgcccaccagcccccctgtctccctttccttctcctgctccccttacacgccaacctatgcccacctggcagccgtggcctgcggcctggagcgctttggccagtccccactcccagtggttttcctcactcactgcaactggatcttcagcctcctgtgggagctcctgcccctctggagggctcggggcttcctctcctctgatggggctccactccctcacccaagcctgctctcctacattatatccctcacctctggcctctcatcccttccgtttatctaccgaacctcctaccggggctctctgtttgctgtgacagtggacaccctggccaagcagggtgcccaggggggtgggcagtggtggagtttgccaaaggatgtgccagcccctacagtgagtccccatgccatgggcaagaggcccaatttgctggcattacagctgagtgacagcaccctggccgacatcattgccaggctgcaggctgggcagaaactgtctggctcctcaccgtttagttctgcctttaactcactcagcctcgacaaggagagtggcctgcttatgttcaagggagataagaagcccagggtctgggtagtcccgacgcaactccggagggatctgattttctctgtgcatgacattcccttgggggcccaccagaggcccgaagagacctacaagaagttgcgtttgctggggtggtggcctgggatgcaggagcatgtgaaagattactgcaggagctgcttgttctgcatcccccgaaatctcataggcagcgagttgaaggttattgagtccccatggcccctcaggtcgaccgccccctggtcgaacctgcagatcgaggtggtgggcccggtcaccataagtgaggagggccataagcatgtacttattgtggctgacccaaacaccaggtgggtggaggcattccccctgaagccctacacacacacggctgtggcccaggtgctgcttcagcatgtgtttgcaaggtggggtgttcctgtgaggctggaggcagcccaggggccccagtttgcccggcacgtccttgtgagctgtgggctggccctgggagcccaggtggcctccctgagtcgggacctccagttcccctgcctgacgagctcaggggcctactgggaattcaagagggccctcaaggagttcatcttcctgcatgggaagaagtgggcggcctccctgcctttgctgcacctggccttcagggcctcctccactgatgccacaccgttcaaggtcctgaccgggggtgagtcaaggctcacggagcccctgtggtgggagatgagcagcgcaaacattgaagggctcaagatggacgtcttcctgctacagctggtgggggagctgctggagctccactggagggtggctgacaaggcgagtgaaaaggccgagaacaggcgtttcaagcgggagagccaggagaaggagtggaatgtgggtgaccaggtccttttgctgtccctccccaggaatggcagcagtgccaaatgggtgggtcccttctatatcggggaccggctgagcctgtcactctataggatatggggcttcccaaccccagagaagctggggtgcatctatcccagcagtctgatgaaggcctttgccaagagtggcaccccgctgtccttcaaggtcttggagcagtgagcgggagcagcgggggtgccccctgccccagggccgtgggtttctgctgctaggcctccccctgtcccagcagtgctctcagtccactgggggccctcagttgtgccttttgtagagaacttgcttcataaagctttgctgaattgccttgaactagggaccagcatccccatggaaacatccccagtttggggtacttggagaatttgccaaaggctgtcagatatgggtccctggcagttttacactgggaaatggagtgctcctctaggctataccaggctcagtgtcttctccccaagtatcctctttccccttcacatgtaggtgtgtggtggtgtgcacacacactcacgaaagaatctatcttggccatgaaactgtggctgttgaccttggaattggaaccacagtcctttcccatacagaaaccccaaatgtgggctcctccctccaacctgttcttttggggaccctttgcccttagagctgtcacagatgacataagcctgggcaggctgtggggaggccgctgcctcctagcctcacggtcagctttctcaagccaggtgtggcctgcacagctctcagggcagggctggccatcctcccaggcctcaagggcagtgtcttggagtgggaggatggccagccacaagccaccagcttgtcagcatgggaagggcaagggggaaatgggttggcctacctcatttgactccagccaatggagacaattcctgacccctgctttgatggtgttgaccccacaggaatcaaggatcttgatgccaagtgtggcatctctatctgaagagctgcttctgttagacccaggggccccggcctctgttttaagggggcagggcgtctgcaacaggagtggcacacggtgaagtgctggcatggctctacctcccaacccctcccaaccccatcccaaagcctacagtcctctgctccttctacctccactgtatcctgcatcccagaccctacagattgtgtgattgcttcatctgtatcaccccccgagtcctgtggacctgccttctgtgtagagcaaaacccaggctccctcacagccattctttgcagagatcacccttgcagtgagtgtgagttccttccaggtgtgtgcgcgtacactcaccctctgaattgctgccgctgccaaggaagtgggctccaggtgaaggccagtgccacgtcactctggctggccttcttagtagtttcatttctccggaagctgagccagtctcctggtctagcccaggttgccagaacgcttggcattgcagagtgctagagccagtggagaacttgccaacttgattgttttacagcagaggaaagaggatcacagagggaaaatgattcacccaaagtcacacagcaagttcatggctgagctgagaccaggattaagcttcctgactcccagttcaccatgaaaagggttctggcaacaggttcaagctggagaatccttcaaaatgctacacccacattctctccaactcttcatctccctgatcttccagacaaactacctggatgttgcccttaaaccatttctagctgttaaccctgtccagaaaaatgattgagtgatagctgagaagtggaaagtgtgggatttttggcaggtgctctctttcctccgccccccgcgccattctttctcttcctcctctctgtaatggtatgtccagcctcactctccctccctggtgctgtatgcgttccccctgttagctacatttgtgatcacatacccttcttttaagtgaatttttttcatttgatttgtcaataaacgaatcaaactgg

SEQ ID NO: 32441 - DNA, 570 bp, Homo Sapiens
tgaccctaagggctggagtccgccgagaaggggctgactggggcacagggtcggctgataaacagcgtggtccgttcttcctcctggactacgggaaagtctggcttcacctgtgcacaacagatttttattgttaggtatattgaccaaagtttaacgagaagaactgtgatcagctgggaggattgctgcaaggaatggaattagctcatagcttactgctgaatgaagaagcatacaatcaactaggtgaagttcagaaggcagagtttatttttgagtggttgagatacttggagaagctcttgttggcaaccagcaggaatgatgtaagggagaaacagaagactcttgttgaacagctcctgtctttgttgaacagctccccagggcctcctacccgcaaactgcttgctaagaatctagccatactttatagtattggagacacattctccgttcatgaagcaatcgataaatgtaatgatcttattcgtagcaaagatgattctccaagttatcttcccactaagctgtaagtgaaacattaaaacagaacagaaaacaaaa

SEQ ID NO: 32442 - DNA, 2091 bp, Homo Sapiens
tcgtgtggatgctgctgtggacgtctgcgtcgtcctcgtgtggatgctgctgtggacgtctgcgtcgtcctcgtgtggatgctgctgtggacgtctgcgtagtctcgtgtggatgctgctgtggacgtctgcgtcgtcctcgtgtggatgctgctgtggacgtctgcgtcgtcctcgtgtggatgctgctgtggacgtctgcgtcgtcctcgtgtggatgctgctgtggacgtctgcgtcgtcctcgtgtggatgctgctgtggacgtctgcgtcgtctcgtgtggatgctgctgtggacgtctgcgtcgtctcgtgtggatgctgctgtggacgtctgcgtcgtctcgtgtggatgctgctgtggacgtctgcgtcgtcctcgtgtggatgctgctgtggacgtctgcgtcgtctcgtgtggatgctgctgtggacgtctgcgtcgtcctcgtgtggatgctgctgtggacgtctgcgtcgtcctcgtgtggatgctgctgtggacgtctgcgtcgtcctcgtgtggatgctgctgtggacgtctgcgtcgtcctcctgtggatgctgctgtggacgtctgcgtcgtcctcgtgtggatgctgctgtggacgtctgcgtagtctcgtgtggatgctgctgtggacgtctgcgtagtctcgtgtggatgctgctgtggacgtctgcgtcgtcctcgatgctgctgtggacgtctgcgtcgtcctcgtgtggatgctgctatggacgtctgcgtagtctcgtgtggatgctgctgtggacgtctgcgtcgtcctcgtgtggatgctgctgtggacgtctgcgtagtctcgtgtggatgctgctgtggacgtctgcgtagtctcgtgtggatgctgctgtggacgtctgcgtcgtcctcgtgtggatgctgctgtggacgtctgcgtagtctcgtgtggatgctgctgtggacgtctgcgtcgtcctcgtgtggatgctgctgtggacgtctgtgtagtctcatgtggatgctgcgagttttcgttgctctggggtagattcgtagcggaggaacaactgggcgacacgctaagtttatgtttaactttttaagtaactgcctaactgttttccaaagcagctgcaccatttttcattcccatccatgctattgtttttcagttaaatagctccactcctccccctccccaccctccacagaactgccagtaaaactggactatggagtattgggtggggtcacctacaaggtcatctgcagcaagtgagaccatcgcccctcctgcctggagaggtgggactggggaccctgtgacaggaggagctgcccttcctggagcctggtttttctttttcctctgtgctccatgagaagtcagtttagtgggctacagccagcaaaggaaccaaaaccaacaggagctctgggggtgccttgcatggcgaggctccgtggctgcacgcgtgtatgcaggtggctgtgggtgtctgtgtgtcctgggccactgtgtgcgatggtcccactgggaggtgtggcccccaaagagtggaacccacaggtggacacacccatgcaccctcgttcttgcccaaggtcacacatcgagacagcagggcccagatggatggccccaagctcggtggctcccgtgctgcccacacctggggacaggcccactgtggggggtaaggggtggaggtgttctaattcgggctgagccgtgtgactggcaggggccccagctgttgggcctgggcaggactgtttttagaaaagccccaactccctgcccctacccgggcccgtggctatttatagtccgggcctggagaagtcagtgagtcactagcgttcgcctctgcagggtcagtccaagcccccttagtgaggtggtctagcatgtcccccagtcccccaagcctctatctgacatctgctagcccagagccccaggggtccccaggaagggctcagagctggtggccccccccaggccttggcagcacctccttgtctgatgggactttgtggttcctggtggacatttaacattgtcggtttctctcatctggaaacaaacctccatgacgc

SEQ ID NO: 32443 - DNA, 4906 bp, Homo Sapiens
gacctcgacagggaacgcaagcaaaaccacacatttaaaacagacttggtaaaatcagctcgttatttaaagaaacggacgattcctttttctctcctggtttagtcttcgacccacaggccccttgcttctttcgaacggcggctgtatcccatgaccttttcactttccaagccaacggactgggggtcgttacacacgcggagggcccggaacgcacggctcctcgcctgcaaattccgagcagtccggattttggggctgcctcccggccacaccagccagcagctcgcacccacatggaggcagggccctggccctcgccccggaccggcgcgtggcggggcgcgtgggtcttcgagggcccgcgacgcggcgcacatgccggtgcccgcctcccgcgtcggcgagaagacagggagctcggacacggggaggctgacccggagcctacccatgaggcagcgcgccggctgcacgagagcccccccctttccacggctcggctgccagctccgcaatgggagccgccgccgtcgccgcagtgtagtttttcgtgctcctccttttcctcctcctctttctcctcctcctcagggctccagtcaggccgatccgctccgctcacggaaggaaaacagaaataacttgctggcttgtctggagtcacatggtaattcaaaaatggcagaactgtttatggaatgtgaagaagaggagctggaaccatggcagaagaaagtaaaagaagttgaggatgacgatgatgatgagccaatctttgttggcgagatatcaagttcaaaaccagcaatttcaaatattttgaacagagttaaccccagctcatattcaaggggactaaagaatggtgcactcagtcgaggtattactgctgcattcaagcctacaagtcaacactacacgaatccaacatcaaatccagtgcctgcctcaccaataaattttcatcctgagtctagatcttcagatagttctgttattgttcagcctttttctaaacctggttatataacaaactcatcacgagttgtgtctaataagtcatcagagttactgtttgacttgacccaggatacaggattatcacattaccaagggggaccaacactttctatggcaggtatgagtgaaagttcatttttatcaaaacgtccttctacttctgaagtaaataatgttaatccaaagaagcctaaacccagcgaaagtgtttctggagcaaattcctcagctgtattaccttcagttaaatctccttcagtgacttcttcccaggctatgctagcaaaaggtacaaatacctcatcaaatcagtctaaaaatggaacaccttttccaagagcttgtccaaagtgcaacattcatttcaatcttttggatcctttgaaaaatcacatgaagtattgttgtccagacatgataaataactttttgggactggctaaaacagaattttcaagtacagtaaataaaaacacaactattgattcagagaaaggaaaattgatcatgttagttaatgacttttattatggaaaacatgaaggagatgtccaggaggaacagaagactcacacaacctttaaatgcttcagttgcttgaaaattctaaaaaataacattaggtttatgaaccacatgaaacaccatttggaacttgagaagcagagcagtgagagctgggaaaaccataccacctgccagcactgctaccgtcagtttcccacaccatttcagttgcagtgtcacatcgaaagtacacatacgccccatgaattttctactatttgtaaaatctgtgaattgtcatttgaaacagaacatgttcttttacaacatatgaaggacaatcataaacctggtgaaatgccatatgtctgccaggtttgtaattatagatcatcatcattttctgatgtagaaactcattttagaacatcccatgaaaacactaagaacttgctatgcccgttttgcctcaaagttattaaaattgcaacaccatatatgcatcattatatgaagcatcagaaaaaaggaatacatcgttgtacaaaatgcaggctgcagtttttgacatgcaaggagaaaatggatcataagactcaacaccatcgaacatttataaaacctaaacaactagaaggattgcctcctggaacaaaagttactattcgagcttcagttggacctctgcaatcaggagcttcacctacaccttccattagtgcaagtgcttctacccttcagctctcacctccaaggactaaaaatataactgctaaaaatcctgcaaaatctaatacaagtaaacctaatacagtcaaatccaacgcaagtaaacctaatacaagtaagcctaatggaagtaaatctaaatacaaaccaaaaatctctaatatgcaaaagaaacaaagcacattggctagtagcaataaaaaaagtaaagtcaatacagcattgaggaatttaaggtatcgtcggggcattcacaaatgcattgagtgttgttccgaaataaaagattttgcaaaccactttcctacgtacgtccactgtagtttttgcagatacaacactagctgtagcaaagcctatgtaaatcatatgatgagctttcatagtaaccgtccaagcaaaaggttttgtatttttaagaagcattcagaaaatctccggggcattactctagtgtgccttaattgtgatttcctaagtgatgtttctggcttagataatatggctacacacttaagtcaacataaaactcatacttgccaagttgtaatgcagaaagtttctgtttgtatcccaacttctgagcacctttctgaattaaaaaaagaagctcccgcaaaggaacaagaacctgtgtctaaggaaattgcaagacctaacatggctgaaagagaaacagaaacatcaaattctgaaagtaaacaagataaagctgcttcttcaaaagaaaaaaatggatgtaatgcaaattcatttgaaggctcatcaacaacaaaaagtgaagaaagcataacagtttcagataaggaaaatgaaacctgtcttgcagaccaggaaactggctcaaaaaacatcgtcagttgtgattcaaatattggtgcagataaagtggaaaagaaaaaacaaatacaacacgtttgtcaggaaatggagttgaagatgtgccaaagttcagaaaacataatcttatctgatcagattaaagatcacaactccagtgaagccagattttcttcaaagaatattaaggatttgcgattagcatcagataatgtaagcattgatcagtttttgagaaaaagacatgaacctgaatctgttagttctgatgttagcgagcaaggcagtattcatttggaacctctgactccatccgaggtacttgagtatgaagccacagagattcttcagaaaggtagtggtgatccttcagccaagactgatgaagtagtgtctgatcaaacagatgacattcctggaggaaataaccctagcacaacagaggcaacagtagacctggaagacgaaaaagaaagaagttgaaattagtcattttaagtttcagtgtaccaacgataagggcatttggaacagtgctatcaggtgagctcagtggtgctgttgtaggttcagaaatggaaatatgtaagggaggtcacacatacactttacctgtatgttcaacctatgttatcaaacaaatcaattcaccaataatagcatgattagtagggattcccaaaaagtttttaaaaacacgaacaggattttaatgataattaaatttgcagtggaaaggtctcatttaatggttttcaaggaaatgggatttggttgctgacatgaattgatgatattagtaatatttataaagcctttcaaacttccatcaatcctaagctaaaaatctttattacctgtatatccttttcagttaactgagaggaagggatttggaaaccatgtacttttggggagtaattgattaaaaacaatggctgattggcattgttaatgaaggctttatttgtgaggatgatgctggtaaatggagcatgcttagagtactaaattgatctaatgagaatttggatgaacataaacttaattttggatttaatataacattccagtcagacgcatgtaaacagaatatttgaatctttgtacctccatacaagtgttagcctgccaggctgtaagcttaccttaattaaactttcagtgaaagtggaattattaagatataaatttatatttgtgctttttgtcagtgtgtaagctgtgtagaaattctttgatgtattagttgtattaatgtaaagtagaaacccattgttgaaactcctgtagctattatgcttttaatattgttttaatgatcttccttagaaataggcccataaaaatggtctggaagccaaaccaaagtatggtataatgtagatattgtaaagcagtaaactgaaaacatgtcctggcatgtattcagccatgtttaagtgacttttctgtaattgtaaaataaaaacttcaaatgggacctaaaacagtgatgtaaaagaactggttttggaaatttagcctaatttatctataagatggctgctaaattgatttttcagttctttttatcatctagaatataatagatatagaaatgaataatatgaagaacagtagtttgctttgaaatactaataaacttttatttaaaatgcttcatttttacttcttaaaatgtgctttggattcttaaattttgtttcactgaatgttcaatgttttaaatggcgattaaaatactctgctgtatatagtagtttttgagtaaatatttgcaataaaaatctgcccccgaata

SEQ ID NO: 32444 - DNA, 2714 bp, Homo Sapiens
atgagccacctggcgtcctgcgggatgggcctgctgctcactgtggacccaggaagcgggacggtgctgtggacacaggacctgggcgtgcctgtgatgggcgtctacacctggcaccaggacggcctgcgccagctgccgcatctcacgctggctcgagacactctgcatttcctcgccctccgctggggccacatccgactgcctgcctcaggcccccgggacacagccaccctcttctctaccttggacacccagctgctaatgacgctgtatgtggggaaggatgaaactggcttctatgtctctaaagcactggtccacacaggagtggccctggtgcctcgtggactgaccctggcccccgcagatggccccaccacagatgaggtgacactccaagtctcaggagagcgagagggctcacccagcactgctgttagatacccctcaggcagtgtggccctcccaagccagtggctgctcattggacaccacgagctacccccagtcctgcacaccaccatgctgagggtccatcccaccctggggagtggaactgcagagacaagacctccagagaatacccaggccccagccttcttcttggagctattgagcctgagccgagagaaactttgggactccgagctgcatccagaagaaaaaactccagactcttacttggggctgggaccccaagacctgctggcagctagcctcactgctgtcctcctgggagggtggattctctttgtgatgaggcagcaacagccgcaggtggtggagaagcagcaggagacccccctggcacctgcagactttgctcacatctcccaggatgcccagtccctgcactcgggggccagccggaggagccagaagaggcttcagagtccctcaaagcaagcccagccactcgacgaccctgaagctgagcaactcaccgtagtggggaagatttccttcaatcccaaggacgtgctgggccgcggggcaggcgggactttcgttttccggggacagtttgagggacgggcagtggctgtcaagcggctcctccgcgagtgctttggcctggttcggcgggaagttcaactgctgcaggagtctgacaggcaccccaacgtgctccgctacttctgcaccgagcggggaccccagttccactacattgccctggagctctgccgggcctccttgcaggagtacgtagaaaacccggacctggatcgcgggggtctggagcccgaggtcgtgctgcagcagctgatgtctggcctggcccacctgcactctttacacatagtgcaccgggacctgaagccaggaaatattctcatcaccgggcctgacagccagggcctgggcagagtggtgctctcagacttcggcctctgcaagaagctgcctgctggccgctgtagcttcagcctccactccggcatccccggcacggaaggctggatggcgcccgagcttctgcagctcctgccaccagacagtcctaccagcgctgtggacatcttctctgcaggctgcgtgttctactacgtgctttctggtggcagccacccctttggagacagtctttatcgccaggcaaacatcctcacaggggctccctgtctggctcacctggaggaagaggtccacgacaaggtggttgcccgggacctggttggagccatgttgagcccactgccgcagccacgcccctctgccccccaggtgctggcccaccccttcttttggagcagagccaagcaactccagttcttccaggacgtcagtgactggctggagaaggagtccgagcaggagcccctggtgagggcactggaggcgggaggctgcgcagtggtccgggacaactggcacgagcacatctccatgccgctgcagacagatctgagaaagttccggtcctataaggggacatcagtgcgagacctgctccgtgctgtgaggaacaagaagcaccactacagggagctcccagttgaggtgcgacaggcactcggccaagtccctgatggcttcgtccagtacttcacaaaccgcttcccacggctgctcctccacacgcaccgagccatgaggagctgcgcctctgagagcctcttcctgccctactacccgccagactcagaggccaggaggccatgccctggggccacagggaggtgaggtgggctggatgccacacagatggtctccgtgctggctcactgaagagctgagcctgtggctggcctcagaatcaggctgggtgcagtggctcacacctgtaatcccagcattttgggaggctgagtgagaggatcacttgagctcaggagttcgagaccagcctggccaacatggcaacaccccatttctacaaaaaatttgtaaaattagccaggcatggtggcgcacgcctgtagtcccagctgcttgggaggctgaggtgggagaatcacttgagcccaggagttcgaggctgcagtgagccaggatcatgccactgcactccagcctggtccacagagagacactgtcaccccctttcccccacaagactggcagaggctgggcagcctggggctgatgaagcagagatgttcgctggatcccaggccctggcacccctcaggaaatacaagaaaaagaatattcacatctgtttaatgtgcataaagccaaggaaaggacagttccgaattcaatag

SEQ ID NO: 32445 - DNA, 5994 bp, Homo Sapiens
ggatttggcggtggcctttgttggctgcagtaagagctcagtctcttcaccaggggctcccagtccttccatctgggaggccaaggcggcttcgcgttctgagaatagacagaacctctgttactctgtgaccggcaggcaccgggagatccgtagctcagacgccaggacatcccggaagctgggaaatggtgaatgtgccagggactgttgacattcagggatgtggccatagaattctctcgggaggagtgggaacacctggactcagatcagaagcttttatatggggatgtgatgttagagaactacggaaacctggtctctctgggtctcgctgtctctaagccggacctgatcacctttttggagcaaaggaaagagccctggaatgtgaagagtgcagagacagtagccatccagccagatatcttttctcatgatactcaaggcctcttaagaaagaagcttatagaagcatcattccaaaaagtgatattggatggatatgggagctgtggccctcagaatttaaacttaaggaaagagtgggaaagtgaggagaaaaatcagtacaataaatctgatacaacattaagccaaggcataagccccagaagacatcagaaaactcattttctacataaccattgcaaacgtaaaaaatgtgagaaagcctttcatgaatgcaccaaccatgtccatcagagtatctttattcaagagaagtctgccaaatgtaataagtgtatagaaacttttatccagtcatcaaaacatactcagcctcagagaatccatattggagaaaagtcacacagatgtaataatggtgagaaaatccttagtaaattgtcaagtctaagaaaacataagataatccataatgaagagaaaccttacaaatgtaaagaatgtgacaaagcctttaaccatcgttcacaccttactcaacatcaaataattcatactggagagaaaccatacaaatgtaaagaatgtggcaaagccttcaattctagttcatattttactagacatcagagaattcacactggagaaaaactttacaaatgtaaagcgtgtagcaaatgttttactcattcttcaaatcttcttgtgcatcagagaattcatactggagagaaaccttacaaatgtaaagaatgtggtaaatcatttaaagtgtcttcagcccttactcagcatgagagaattcatactggagagaaaccctataaatgtaaggaatgcagcaaagcctttaactgtaggtcgtacctaactaaacatcagagaattcataccggagaaaaactttacaaatgtaaatcatgtagcaaatctttttctcgttcctcaagtcttattgtccaccagagaattcatactggagaaaaaccctataaatgcaaagaatgtggcaaagcctttaattgtagttcacgccttactcaacatcaaagaattcataccggagagaaaccctacatatgtaaagaatgtggcaaagcctttaactgtagttcatcccttactaaacatcagagaattcatactggagtaaaactttacaaatgtaaagcatgtagcaaatctttctctcattcctcatgtctttctgtgcatcagataactcatactggaatgaaaccatatatatgtaaggattgtggcatctcctttaaccggtcttcaaaccttagacgacatcagatgattcatactggagagaaaccctacaaatgtaaagaatgtggcaaattatttaatcgatgctcaacccttactcgacataaaagtattcatactagagaatttctatagttgtagtaaatgtgaaaagagttttatccaaaatttagaacttaaaaatcaccatagagtttatagggaaaccgactttacagattgaataaatgggaggaagtatttaatcagaactcaaatctgaatgtgtcaggacttacacaaaaaaggactaaagcacagatccccactttaaaattaaataagagtatttgttatggaggattactctaaagccaaagcagttacttattttgttatgtgtttcaaatgagcaaaagcattgatgtttggacaagtaattattcagtgagcatgttatttgtattgaaaacatttgaaatttgtataaagcaaatcataatttaattctcagattagttgttataccttaatgcctagtgtttatataaaaacatatagtctattttttctgcatcagagctgtaagaggtcgttctatagtaggtgaacatcattaatatcaacttattttcttggaaatttaatggcaaatgtaaaatacatgaagaaaatctaaaagaggctctttgtgtttgaatcattaaacagtaatatgtgtaaacatatagtacatatttagggcattagtattctatactaaagtaaaagaggaatattctgaatttatttattacatcaattgctccttaagtagaaaaacactggtcagttatttaaaatactggcatacctttatagtacaatgaagtagtaatcttgaatattatttgatgtgttaaaaataaaaacatcttcacagatatcagagaaaagtgaaaactcatatctgaaagattataaatatactttatatcaattttccagagaacttaaacttctaataatattggtaatattctcatggttactattttatattctttcctgctttttgtagctactggtgtactatgacagttataataaagattatatgggggtatacttaaatgccatacttttaaaatcctgaatcattgtttataaagttttattcaatatttttctttgcacatgccctttttcagtccaattgaacacttagagatttttctttgctttcacttgcattaaatggaatatacagatgtactaagatagaaagaaaaaggtgaaagagaactatacaggcagaaatgcatgtgtgtgtacctgtcttcaaatggaaaagaaaatgatggatcacaacaggaaactggagaactgttgatttattacagttctcaaattagaaacctcccaaattcttaaagctaaattagcttttcattgcacactgaatttttctctgataaatctaatgtcttctgggttcagactttatcccgtacaaatccttttttcttgcctgtgattcatgtgagaagaattatataattttcttatttcaaagcttataaactattacttataagttctcatggattttaagaatgtttttgtaaaatttaatggtgctgtccaggtgtggtggctcacgccggtaatcccagcatttcgggaggctgaggcaggaggatcatttgaggtcaggagtttgagaccagcctggccaacatggtgatatctcgtctctactgaaaatacaaaaattagctggatgtggtggcacacacctgtaatcccagttactcaggaggcaaaggcaggagagttgcttgaactgaggagatgaaggttacagtgagccaagtttgtgcctcacactccagcctgggtaacagagtgagactctgtctataaacaaacaaattatctgtcatctacctatagacataaccctactgaggaggatggggataaaaggtctgcatctaagtcactttgaaaaacagtattttgattgaatgctgtaagactacacaaatgctgtattctactgagtaatattttattttcctacaaggatatgcattagcaattctgaaacagttttacatgttattatataatatatggaggctgtttctcagtgtagttcacaaaagttaaatggtgaatgctagcatgaatcttgtggtcctagcccaaagttggaaatatcaggatgaacccatgactaatacatctggatggatggatggatgaatagatataaagataggtaggtaggtaggtaggtaggtagatagatagatagatagatagatagatagatagatagatagatgaagcgatgtctaagatatctggaaggatggatggatggatggatggatagttagatagatagatagatagatagatacatagatagacgattcagagatagataatgttccaaactcttgagggccaagaactggtgacatcttgtatcaacacatctaggtctacaatcttggtttctaaacaacattcattaaaaggacccaagggttgaagttagaaaatacaagttgagctagagtatcttgtaaagccacaaagaaaaaagtgcttaataaaaatgatggggacttttcaaagggagccaacctgaaagacctcccaatggtccaagctccaacaatatgagcaataagttatgatagctttggattatggcccacagaataaagtaatactcatctctactgtgtgaataaaagagattaaataaggaaagaaggaatgaaatctacaatatttaaaatacagatcaatgtagttggataatgcaaaataaatcaacactagaacatcacagtaataattaccatagggaagattccccgaggaattcaaaaatttcaggaaaaacttaaacactaaagagtgtatttgggccagtctcggtggcacatgcctgtaatcctagcactttgggaggcctctgcgggtggatcacctgaggtcaggagttcaagaccagcctagccaacatggtgaaaccccgtctctattaaaaatgaaaaaattagtcgggcatggtggtgggtacctataatcccagctacttgggaggctgaagcaggagagtcacttgaacctgggaagcagaagttgttttgagccaagatcatgccattgcactccagcctgggcgacaagagcagaactctgtctcaaaaaaaaaaaaagaaaagaaaagtgtatttgcatattttaagtatctaccatctaatatttattaatacaattttttcttaatttcttagacttgtgactatttgaaacaaattataacactgtattgtaggatttataatttgtagttgtaaaatttataacacatggaataagaagataaatggaactgttctgtagcaaatttttcatgttttatatttaagacagtatagtattaactctaaaagtatggtggatatgttaaagattcatattgtattccctgcagcaaccactaaaaaatgcaaagaagtgtaatgtaaatgctaaaaaaggagataattataaaatatttatttgcacaatatttatgtatcttttagtcataatagcccaaaacaggaaacaaccaaaatgtccattaataagaaaatgaactaattgtatagcttttagaacaaaatacagctcaggaatatgaaaaaccaagcacacatcctggataaaattcataaacctgctcaatgagagaaaagttggacacaaaattgtactttatgtattttgtattttattccaggcaaaataatcctatggtgaaaaaaatcaacaagataatctctgcttgagaaaaaggaccaaagacaagtgaattttctgagggtgatgaaagtgttgcttcgaaaaggggtgaagtttatatgggtctatttatttgtctaacatgtacagttaaggtttatgccttgcaatgtatgtacatcttcacaaaaaaaatcttaaaaaaattaaatgggtgggggtagggaaagggttgaagtatagatgaagcagaagtggtacatgattagtagttgaagctgggggcaggtctatatattttatttttatgtctttaatagcatttgtataaatgtacaatattcgtttacaatgttagctcaggatcttgtttacctttggacagggagggagggagaaatttattttctgggtaggagtaaagctggttctattcctcagttatgtaaattatctgttataatccaaaaagctttacatgaatgtttctgtatgtaatgtggtatatcaataaaaaattaaatatta

SEQ ID NO: 32446 - DNA, 903 bp, Homo Sapiens
catggagctttaattccaatggagggagggagaaaacaaccaacctgtgggctggaacagctggtcgtgagtgtcaggactagagaagaagacaggaaccaggatgggaagacggacatgttacattttaagctggagcttcccctgcagtccacggagcacgttctcggtgtgcagctcatcctgactttctcctatcgattacacaggatggcgaccctcgtgatgcagagcatggcgtttctccagtcctcctttcctgtcccgggatcccagttatacgtgaacggagacctgaggctgcagcagaagcagccgctgagctgtggtggcctagatgcccgatacaatgtaagggcgcttctcattgtccagctcctttgtttcttatctgtgaccaacgggaccagcccctttgcctatgactacgacctcacccatattgttgctgcctaccaggagaggaacggtgggtcacaggtagagcccattcagccgctgctcaggactttcaaggttagtgggggcaacagagacaagcagaactggaacccttgtgatgaaaatgtcaaaacccgtgaatgctcaacgatgggagcaaatgtgctgcccaggatttgtctttttcgtcctgatcttcagacccgggaccacccgcacccctccagcatcccgtggtccagcaggctagtgatggttaaatgccatcattatcccaccactggcttgccaggattctgggcgatggtaaagttcgcctgggtgcagtatgtcagcatcctgcttatcttcctctgggtgtttgaaagaatcaagatcttcgtgtttcagaatcaggtggtgaccaccatccctgtgacagtgatgccccagggagaagtgtgtaaggagcacttatcctag

SEQ ID NO: 32447 - DNA, 2711 bp, Homo Sapiens
atggctacatttggggacagcacccatcgccacagagtctctgtgaggacaaaggagaggatggtccacgccgtcagtgcagaacatgtacccgaaaagtcgttcatgcaccacagaaccagacacctgtgtgcgtcttatgtgcaagtgctgcacaacacagagacatctcacttgtggaatgggtacattcggggacagcacccaccccacagagtccaccaggtcagtgcagaacaggcacctggcccgaacggagcggggcctgctgagcgggcgcggcaccagccgccgcaacccaaagccccgggcttcctgcagccaccgccgctgcgccagcccaggacgaccccgccgccaggggcccagtgcgaggtccccgccagcccccagcggccttccccgcccggggcgctcccagagcaaacgaggtccctgagagctccacctagttcacaggataaaatcccacagcagaactcggagtcagcaatggctaagccccaggtggttgtagctcctgtattaaggtctaagctgtctgtgaatgcccctgaattttacccttcaggttattcctccagttacacagaatcctatgaggttggttgtgaggattatcctactccatcagaatatgttcaggattttttgaatcatcttacagagcagcctggcagttttgaaactgaaattgaacagtttgcagagaccctgaatggttgcgttacaacagatgatgctttgcaagaacttgcggaactcatctatcaacaggccacgtctatcccaaatttctcttatatgggagctcgcctgtgtaattacctgtcccatcatctgacaattagcccacagagtggcaacttccgccaattgctacttcaaagatgtcggactgaatatgaagttaaagatcaagctgcaaaaggggatgaagttactcgaaaacgatttcatgcatttgtattctttctgggagaactttatcttaacctggagatcaagggaacaaatggacaggttacaagagcagatattcttcaggttggtcttcgagaattgctgaatgccctgttttctaatcctatggatgacaatttaatttgtgcagtaaaattgttaaaattgacaggatcagttttggaagatgcttggaaggaaaaaggaaagatggatatggaagaaattattcagagaattgaaaacgttgtcctagatgcaaactgcagtagagatgtaaaacagatgctcttgaagcttgtagaactccggtcaagtaactggggtagagtccatgcaacttcaacatatagagaagcaacaccagaaaatgatcctaactactttatgaatgaaccaacattttatacatctgatggtgttcctttcactgcagctgatccagattaccaagagaaataccaagaattacttgaaagagaggacttttttccagattatgaagaaaatggaacagatttatccggggctggtgatccatacttggatgatattgatgatgagatggacccagagatagaagaagcttatgaaaagttttgtttggaatcagagcgtaagcgaaaacagtaaagttaaatttcagcatatcagttttataaagcagtttaggtatggtgatttagcagaacacaggagagcaagaaaatgtgtcacatctataccaaattaaggatgttgagttatgttactaatgtatgcaactttaattttgtttaacactatctgccaaaataaactttattccctataacttaaaatgtgtatatatatataagtttattatgtacagttaattctactgttttggctgcaataaaatcgattttgaaataaatgaaatgttgaaaattttgctagttggttagatgcttatcctttaaattctacttttcttgaggtgaaaaagtcttcctctggaaatacatatcactgcaaaaatgtagcatccttttttaggtaggagtattatagctttcattttagtttgacatttagtgtcccaatgaattgaatttcaaatatgaatcataatcttgaaaatctttagcactaaagtcttggaatatatcaacaactgatttacatatgcagatgctatttgataccaagggctttttaaatgtcatgggggggaaatcccaacttggtgaactcccagctaaacagccaagacttcactgaagatttattccaattctagaattgttcttttttatttttattttttcaactgactaacttcattaccttaaagcctagaacattattctgctttatttatatggctttctcacttttattttgtagcatgggttgcatcgacttttttactagagaattttactagatatttgtcattcaagttttcatctgctttataattgatacaccttgagggtcacttttctaatacttttactataatgtggtaccacctcagccctaataaataatatttttacctaatgtcaaatctttttccagctaactaaaaactatgtacaaaaggattgcttgtaaatatgcatgtaaatagttctgttaataacccactgttttacatttggtacatctgtgtctgctaatacagttagctttctcacttttctgcttgtttgttcagtctgaattaaaattagactttgaaaataaagcttaaatagttctgtttcctctaaaaaaaa

SEQ ID NO: 32448 - DNA, 4635 bp, Homo Sapiens
tctctgctctggacttgggaggctccgttgcctgctcccggagggagacgcgctgccgaggagaacccagcgggagaacatttcaggataggaataggccaagtgctgagaagatgagtcttaggattgatgtggatacaaactttcctgagtgtgttgtagatgcaggaaaagtcacccttgggactcagcagaggcaggagatggaccctcgcctgcgggagaaacagaatgaaatcatcctgcgagcagtatgtgctctgctgaattctggtgggggcataatcaaggctgagattgagaacaaaggctacaattatgaacgtcatggagtaggattggatgtgcctccaattttcagaagccatttagataagatgcagaaggaaaaccactttttgatttttgtgaaatcatggaacacagaggctggtgtgccacttgctaccttatgctccaatttgtaccacagagagagaacatccaccgatgtcatggattctcaggaagctctggcattcctcaaatgcaggactcagactccaacgaatattaatgtttccaattcattaggtccacaggcagctcagggtagtgtacaatatgaaggtaacataaatgtgtcagctgctgctttatttgatagaaagcggcttcagtatctggaaaaactcaaccttcctgagtccacacatgttgaatttgtaatgttctcgacagacgtgtcacactgtgttaaagacagacttccgaagtgtgtttctgcatttgcaaatactgaaggaggatatgtattttttggtgtgcatgatgagacttgtcaagtgattggatgtgaaaaagagaaaatagaccttacgagcttgagggcttctattgatggctgtattaagaagctacctgtccatcatttctgcacacagaggcctgagataaaatatgtccttaacttccttgaagtgcatgataagggggccctccgtggatatgtctgtgcaatcaaggtggagaaattctgctgtgcggtgtttgccaaagtgcctagttcctggcaggtgaaggacaaccgtgtgagacaattgcccacaagagaatggactgcttggatgatggaagctgacccagacctttccaggtgtcctgagatggttctccagttgagtttgtcatctgccacgccccgcagcaagcctgtgtgcattcataagaattcggaatgtctgaaagagcagcagaaacgctactttccagtattttcagacagagtggtatatactccagaaagcctctacaaggaactcttctcacaacataaaggactcagagacttaataaatacagaaatgcgccctttctctcaaggaatattgattttttctcaaagctgggctgtggatttaggtctgcaagagaagcagggagtcatctgtgatgctcttctaatttcccagaacaacacccctattctctacaccatcttcagcaagtgggatgcggggtgcaagggctattctatgatagttgcctattctttgaagcagaagctggtgaacaaaggcggctacactgggaggttatgcatcacccccttggtctgtgtgctgaattctgatagaaaagcacagagcgtttacagttcgtatttacaaatttaccctgaatcctataacttcatgaccccccagcacatggaagccctgttacagtccctcgtgatagtcttgcttgggttcaaatccttcttaagtgaagagctgggctctgaggttttgaacctactgacaaataaacagtatgagttgctttcaaagaaccttcgcaagaccagagagttgtttgttcatggcttacctggatcagggaagactatcttggctcttaggatcatggagaagatcaggaatgtgtttcactgtgaaccggctaacattctctacatctgtgaaaaccagcccctgaagaagttggtgagtttcagcaagaaaaacatctgccagccagtgacccggaaaaccttcatgaaaaacaactttgaacacatccagcacattatcattgatgacgctcagaatttccgtactgaagatggggactggtatgggaaagcaaagttcatcactcagacagcaagggatggcccaggagttctctggatctttctggactactttcagacctatcacttgagttgcagtggcctcccccctccctcagaccagtatccaagagaagagatcaacagagtggtccgcaatgcaggtccaatagctaattacctacaacaagtaatgcaggaagcccgacaaaatcctccacctaacctcccccctgggtccctggtgatgctctatgaacctaaatgggctcaaggtgtcccaggcaacttagagattattgaagacttgaacttggaggagatactgatctatgtagcgaataaatgccgttttctcttgcggaatggttattctccgaaggatattgctgtgcttttcaccaaagcaagtgaagtggaaaaatataaagacaggcttctaacagcaatgaggaagagaaaactgtctcagctccatgaggagtctgatctgttactacagatcggtgatgcgtcggatgttctaaccgatcacattgtgttggacagtgtctgtcgattttcaggcctggaaagaaatatcgtgtttggaatcaatccaggagtagccccaccggctggggcctacaatcttctgctctgtttggcttctagggcaaaaagacatctgtatattctgaaggcttctgtgtgacaggaaacccaagcctaagaaacaattaagtggttctcatctctaattaactgtgaaaccatttaatccaaacatgtaagcacacactcacttattaagtcacatacttttctaggtgctggggattgagaacgaatcgatgtaagattcctcctttagggcagagacagaccactgacaaatacacagatagacaaggaatttcccatggtaaaaagggatatcagtaattagaggaccgtgagactcagagatgtgtgtgtgtgtgtgtgtgtgtgtgtgtgtgtgtgcgcgcgcgcacgtgcacatgtgtgtaggtagatggagggggtgattattttgggtggtcagggaagtgctcagtgagggaagaacttgtcatgagaatctctgagcgtgccaggcagactcggatatttttataaatttttaacatggccacttgcagaagagcttgaatgggacgtgcagcgagaatgtgaaggatggagcaggtagctcatctggccttgtaggtgccgggaacgggcaagacatgttttgaaatgtaagatcacagactgttttttgcaagaccacattatattactttattattttctgctttttcttttaacgacattagtgtttttgatcactatattttaaaatgctttttgtgagccttttggttatgtggaatctgttccttagctctgattttttattcttatggagcgtcttaggttactacatgaaggtaagactgccacagtcccccagggaggcacactgtgttttactgattgatttgaagatgatagagagcctagggggatgagtctattggactcaaaggttacattttgtttttccatttaatttaataatcaacaaaacgacaaagtcagtttaatatctttcttctgctgagtcttcaggatgttagctagtctttcaaaagccattgctacaaaagtgcaaatttctcatttcctgtgggtctctagaaactctctcaatatttaaagccaaacaaatccatcttttctgagagacagaaactaaaaaattcagagttaattcactattaaaaacagcaaggccctgctatttcccaagaataaagaaatttaaaattctcattgtaagaagtatgaacttgaagctagaattggtttatttctggcagctacttacaatattaagaactttactttttaaatttgagacaatttcacaggaaagcaagaaattagtctattgtgaaatgtttttacaactaacttggaatatactgcaaatcactagtaagtagagacacatttaagataaaatgattaataaaacaattggtaattctgaataaggatctgaataaatccagatcacagactgttcctttaccaatatgtaaaagaatgtgcaaaattagtaaaaatatacccaaaaatttaccagcaacagagaagcaaagaatggagttcaaccttacactataaacatctaatagatatgtatgaaaatttaaaaactagaaaaggttgggcatggtggctcatgcttgtgatcccaggactttaggaggccaaggtgggaggattgtttgagcccaggagttcaagaccagcttgagcaatatagtgagaccctgtctctacaaaaacaaacaaacaaacaaacaaataaataaataaataaaattagctgggaatggtgatgcacacctggagtcctagctactcagaaggctgaggcaggacgatcacttgacctcagaagtctgaggttacagtgagctatgatcataccagtgcactccagtctgggtgacagaacaagaccctgtctccaaaaattaaataaa

SEQ ID NO: 32449 - DNA, 11690 bp, Homo Sapiens
atggatgaggactttgaagaacatgcagaaacttttgagaaaacccctctgaggaaggcaaagtttgttgagagcccacgaattccagaatccgagcttggctcaccaaccctcacttcagctcagaaactggacgtggatgcatactgccctggtgatgctgaacaggagcttggcccccctccatctgtagatgaggcagcaaacacactcatgactcgtctgggtttcctccttggagagaaagtcacagaagttcagccaggtgaccaatacagcatggaagtacaggatgaaaatcagacctcagcaatcacccagcggataagtccttgttccactctgactagcagcactgcctctccaccagccagtagcccctgctctacactcccacccatcagtacaaatgcaactgccaaggactgcagctatggggctgttactagtccaacctctacccttgaaagcagagatagtggcatcattgctacattaacaagctattctgaaaatgtggaacgcacaaaatatgctggggaaagcagtaaagaattaggatctggaggaaacataaaaccttggcagtctcaaaaatccagcatggactcctgtttgtatcgagtagatgaaaacatgactgcttccacctatagtctgaataagatcccagagagaaatttggaaacagtgttatctcaatcagtacagtctattcctttgtatctcatgccacggccaaattcagtagcagccaccagctctgcccacttggaagaccttgcttacctggatgagcagagacatacacctttgagaacttctctacgaatgccaagacagagcatgggtggtgctcgcacacagcaggatttaagagttcgctttgcaccttataggcctccagatatctccttgaagcctctgctctttgaagtgcccagcatcactacagagtcagtgtttgttggccgagattgggttttccacgaaatagatgctcaacttcaaagttcaaatgccagcgtgaaccaaggagtagtgattgtgggaaacattggattcggcaaaactgccatcatctccagactggtggccctcagctgccatggtacaaggatgagacagatcgcctcagacagcccacatgcctcccccaaacatgtggatgccaacagagagctgccactcacacagccaccttcagcccactcatctatcaccagtggaagctgcccaggaactccggaaatgcgcaggcggcaggaggaggctatgcgaagactagcctcgcaggtggttgcctatcactattgtcaagcagataatgcctacacttgcttggtgccagaatttgtccacaatgttgctgccttgctctgccgctcacctcagctgacagcctatcgggagcagcttcttcgggaacctcacctgcagagcatgctgagccttcgttcctgtgttcaagaccccatggcctccttccggaggggagttctggagccactagaaaatctccataaagagagaaaaatcccagatgaagatttcatcattttaattgatggattaaatgaagcagaatttcacaaaccggattatggggatacaattgtatcgtttctgagtaaaatgatcggaaagtttccttcttggctcaaactaattgtaacagttaggaccagtttacaggaaattaccaagctgctgcctttccataggatttttttggatcgactagaagagaatgaagccatagaccaggacctgcaggcttacatcctgcaccggatacacagcagctcagagatccagaataacatttcacttaatggcaaaatggacaatactacatttggcaaactcagttctcatctcaagaccctcagtcaagggtcctatctatatctgaaacttacatttgacctcatagagaaaggctatctagtgttaaagagctctagctacaaagtagttcctgtttcgctctcagaggtttatttactccagtgcaatatgaagttcccaacccagtcttcctttgaccgggtgatgcctctcctgaatgtggcagtggcctctctccacccactgactgatgagcatatcttccaggccatcaatgctgggagcattgaaggcacactagaatgggaggattttcagcagagaatggagaacctctccatgttcctaatcaagcgcagagacatgactcgtatgtttgtacatccttcttttcgagaatggcttatctggagagaagaaggagagaaaaccaaatttctctgtgatccgaggagtggtcacacgttacttgccttctggttttcccgccaagagggaaaactaaaccgacagcagactattgaactgggacatcacatcctcaaagcacacatttttaagggtttgagtaaaaaagttggtgtatcatcctccatcctccaaggtctctggatctcttatagcacagaaggtctttccatggcactggcgtctttacgaaatctctacactccaaatataaaggtcagccgactgctgattttgggaggtgccaatattaattaccggacagaggttttaaataatgctccaattctatgtgttcagtcccatcttggttacacagaaatggtagccctgctgctggagttcggggccaacgtggatgcctcttctgaaagtggcctgactcccctgggatatgctgcagcagcagggtacctgagcattgtggtgctgctgtgcaagaaacgggccaaggtggatcatttggataagaacgggcagtgtgctttggttcatgctgcactccgaggtcatctggaggttgtcaagtttttgattcagtgtgactggacgatggccggccagcagcaaggagtatttaagaagagccatgccatccaacaggccctcattgctgcagccagcatgggttatactgagattgtctcctacctacttgatcttccagaaaaagatgaagaggaagtagagcgagcacagatcaacagctttgacagtctctggggagagacagccctaacagctgcagccggaaggggcaaactggaggtgtgccgtttgctcttggaacaaggggcggcagtggcccagccaaaccgccgaggagcagtgccactattcagcacagtgcgccagggccactggcagattgttgatcttttactcacccatggagctgatgtcaacatggcagacaagcagggccgcactcccctgatgatggctgcttccgaaggccatctaggaaccgtggactttctgcttgcacaaggtgcctccattgctcttatggacaaagaaggattgacagccctcagctgggcttgtttgaagggccatctctcagtagtacgttctctggtggataacggagctgccacagaccatgctgacaagaatggccgtaccccactggatctggcagctttctatggcgatgctgaggtggtccagttcctggtagatcatggggccatgatcgagcacgttgactacagtggaatgcgccctttggatagggcagtggggtgccggaacacttctgttgttgtcactcttctgaagaaaggagccaagataggttgtcagacgttaccgagtcgcccacgaggtccagccacatgggcgatggccacctccaagccagacatcatgatcatcctgttgagcaagctgatggaagagggggacatgttttataagaaaggtaaagtaaaggaagctgcccagcgctaccagtacgccctgaagaagttccctagagaagggtttggtgaggacttgaaaactttccgggaactaaaggtgtctctcctcctcaacctctctcggtgtcgcaggaaaatgaacgattttggaatggcggaggaatttgctactaaggccctggagctgaaaccgaaatcttatgaagcttactatgcgagagcaagggcaaaacgcagcagcagacagttcgcagcagccttagaggacctgaacgaggccatcaagctgtgtcccaacaaccgtgagatccagagacttctgctgagagtggaagaagagtgtagacagatgcagcagccacagcagccaccgccgccaccgcagcctcagcagcagttgccggaagaagcagaacctgagccacagcatgaagacatatactctgtacaggatatattcgaggaggagtacctggaacaggatgttgaaaatgtttccattggcctccagacagaggcccggcccagccaggggctcccggtcatccagagcccaccctcctctcccccgcatcgggactcagcctacatctccagctcacctcttggctctcatcaggtttttgacttccggtccagtagttctgtaggctctcccactagacagacctatcagtccacctcacctgccctttctccaactcatcagaactcacattacaggcctagcccaccacacacttccccggctcatcagggaggatcttaccgtttcagcccccctcctgtgggaggacagggcaaagaatacccaagccctcccccttcccctctccggagaggccctcagtatcgggccagccctccagctgaaagtatgagtgtctatagatcccagtctggttcacccgtgcgctatcagcaggaaacaagcgtcagtcagcttcctggcagacccaaatctccattatccaaaatggcccagcggccctaccagatgcctcagctccctgtggcagttccccagcaagggctcaggctacagcctgccaaggcccagattgtgagaagtaaccagcccagcccagccgtccattcaagcaccgtcatccccacaggagcctatggccaagtagcccattcaatggccagtaaataccagtcttcacaaggagacataggagtcagccagagccggttggtttatcaagggtcaattgggggaatcgtaggggatggaaggccggtgcagcatgtccaagccagcctgagtgcaggcgccatctgtcagcatggaggattgaccaaagaggatcttccacagcgaccttcctcagcataccgaggtggcgtgagatacagccagacaccacagatcggacgcagccagtcagcatcctattacccagtctgtcactcaaaactagatctggagcgctcctccagccaactaggttcccctgatgtgtcgcatttaatcagaagacctatcagtgtcaaccctaacgaaatcaaaccgcacccgccaactcccaggccgttgctgcattcccaaagtgtaggccttcgcttctctccatctagcaatagtatctcctccacctccaacctaactccgaccttccggccatcttcttccatccagcaaatggagatcccactgaaacctgcatatgagaggtcatgtgacgagctgtcgccagtgtctccaactcaaggaggttaccccagtgagcccacccgatccaggaccacaccattcatggggatcatagataaaacagcacggactcagcagtacccccacctccaccagcagaatcggacctgggcagtgtcatctgtggacaccgtcctcagtcccacgtctccaggcaacctgcctcagcctgagtccttcagtccaccatcatccatcagcaacattgccttttataacaaaaccaacaatgcacagaatggccatttgctggaggacgattattacagcccccatgggatgctggctaacgggtctcgtggagacctcttggagcgagtcagccaggcctcctcctatcccgacgtgaaggtagctcggactctacctgtggctcaggcataccaggacaacctgtacaggcagctgtcccgagactctcggcaagggcagacatcccctatcaaaccaaagagaccgttcgtggagtctaatgtttaaaagacgttttgttggagtgagacccatatgttttcactgcacattttcaggcttggtttccacattcgaggtagttctctggcttaatttctcatgtagtttctgtgtggtgttcagaggtggcagcccacatgctgaaatcctttgcatgcagccgactgggaagcggcctcccgggagccaggacttcagtttctcttgtctgtgcccagccacatgctctctccctctcttcagatgccaacgaggagattttcgtgctgtgtgctttaacccagggagatcagacacactggtcagctttttccaggagacaatcgctttcactgatgttcttgttgtgtaattgtctttttccttttttaaaaaataaggtgttcttgttcgttttcttctagaaactttagaaagagtgcgatgcccctttgcctttgcatccttagccagtgtcacccacacagccagccgcagcgcattctcatgctgtggcccctccccagaccgccagcgccctgcagccaccaggtctgcagtgtgcattaggattattgctggtcttcctagggggtaaaaggatcagagagagaagaattaagtgctaaattggaagaaaaccccaatataattatgtaaaatgtcactacattgattttccaagaggcattgtaggaacatgtcaaaaacagccagccctttaaatattgcagtcagccaaggaaattagatgagaattgtggctattaagagaattcactgagagttattctctagatttttagccgacaattaaccactaaaagctgctgcttttccagggtgggggagggaatgaatacatagaaaaacaaaaaagattgttctggattctcagtgaaaggctataggaagtctgttctggagacatctactttttagatcctgatacatcactgagtgtcatactccactaaaaggaaactctaaccgaaggctggctggtgtgacaatcccgttagttggatcttcacctacagccagattttgttctagtggccctcttcctgtaaacccagatggtgtcatacagaaattgtttctttcagaagcagattggaatctcttgggaccatgagactgagtcccaatatttccacccagggtcatgcccgttgttgtctacttccattttgagatctatagtttgattatctattattacaggaactgtttcttttctttttctaggagtgtttatgagagtgtgatattttaaagtcagacgcagcaaaaactgtttcagggtgaagaaagacccctttcagccctgttttgcagccctgggtgggggcatgagatagacagcaagcttctgatcttgaagcttgtctagaagacacatcttctaggtctcgtggtcatttggtaggctgacctttgagtgagcgaggccactattgagtggatagcaagaacattggaaccaaagcctcggcacaggcctggcactggctgtacatcagctcttacaactaaacaactcaactaagcaactgaaacgaaacaaaggagcattcgttctctgttgttaggaatcattctgctctgttagggaagggctgcaggaagggcagtttcctgaataaaaatctggctgcgaccagtcccatgtgtctggtaagtaagtaagtaagtaagtgccctttgaagggatcattaagacacagggagcatgaacctgagatcagaagcatttctttactaatttagattctgcgaaatagacggacctctccacccccaaacctaaaacaggccaggacttgtctctgtgctgaaagcaaatagcaagactaactcaagccccagcctctttccacactccctgatacctaaggactgctttctcagctagaccagggtgggcatcagcgacgccttctcagctagaccagggtaggcatcagcgtcctctctccatctctatacccctctctctcacatcaggaagatgaaatgtgtagctctagcggcaacctctagccaggagcccagtggcctctcagattgctttttggccaggtctcagcactgctggcatctttacatcttactccttaaaaccgcctctcgctgaggagccactgcattttgaagaatttctcagtgtctgtcaggaaagtgctcctgctcatttggaacgccacacaccacccgcactcacctgtccaggcgaatgagcaggtcctgtagctttacaaatatgccgctgatgccgcttctccccagggtctctcagttttccaggacaaaaagatttagggcctataccctatgggcaaaacacctaaaatgtcaacagtcaaaatgccattctttttggccatcataagagggagtaggtatcactgctgcatgccagttgtttttgactagaatatgccaaccagagcttgttggggcaggagacgtttttccttacaagcagactgcctgtgccctgtgccctgtttgctacttcactgccatggaatgatccgagtactgtatttcagagctgccccttccccagcagcaaacactcgctgagtccatgtctggcttcaggtgggaggaaatgtttcagatgaaacttactcaattcataccaccctgaaatggaggacagaggtgacaaacttcagtttaataggtttctcaccaagttgtatgttccattggcccaggattcttgcactaatgggtttctatcacatcatgtctataaatgggtgcactttactgtttgaatttgtaactgaagtactggatatttaagtgtgagtaatgtcttcattagaaaatagcagaaccgctcttgtcttttagtgtatttttcaagaaaaaaggaaaggaaagacatcaagcagtggatcacaacatttatagcacaagaaataacttgtatataagcatcaaaaagattaagaattttttaatatgaaaaatatttgcagtgattttaaagtgcttttccagcaatgttcttagggactcctgagacacggttactttatctactggatcagtaaggcacacaattaacaattaacaattaatgtttatttacaaagtaaagggaaaacctgtgtaacatgagaatttggcatgacaaaatggagaccattttgtatctgctgttgtatcttgtccgggttgcagacgtgcactattaaagtcccaagttaatagagcacaaacccttctcgctcctcccccatgtgcccctctttttagatgtgtataacttaaactcgatggctcaggaaaattccactaattagaatcatgtacagtaccccaggtcgttgtccagatatacaagtttgctaatgtagttaagcctggattattaaacacttttcctaaattattgtaaacagaacagcttagagaaaggtattctcagtccttaatattgtatagtagtttatgagcccctctctaaatattggtatttttatattccagagatgtacccaatagaaaaaattaaaaattaatcagtatctaatttaatatccataagtatttttccttagattttagtcacgtacagtgggctatgtggatgtcacttgtgcttcaccatagtttaccactaggtgtcactgtggctctgcactgcgcttgttttgtagcaaagaacagcggcatcccctcgggagagaggagctgcttccagggcaacaggcaagcgggctcagaggttcaggagaaggcaacagaggcctggaaggggtcttcgtgcatctgtgccagttgtgcaagacgaactctttgaacactacatgctttggacttcagccaggcagaggctggaagaaggttgaccagagctcccttgctctggtagagggatgggtacatggagaagccccttcttccccatgagcctccctcctgtcagttcctctcagcctccagcttttataactccagaagcgtcacagttgggtggtttgattcagagagagttatttttctactgcagaaatgccttggacaaaaccagtgctcactgaatctttgccacaaaatggaataggctatcccagggggcaagaggtgcccgcccctgtgcccagcctcctcttgatgctcccagtgcccagcagcctcgcacaccctgcctgtctgttcctgggctgcccatttctcaagaaaccgacctgcaaaggcagccggctgctgcctccacaccgagggctgtgcggtcctgctgctcgctcactgggaggtgcagctctttctcctcttcctctaggaattccagaccgaccatctaccatgactaacaacaatgaacaaagggcttaggggcaagagctacctgcaaagacgtgtcatggaacccttcaccatgcaatgccttgaactcagctctggctgctcccaagaaaaggtggctggctgggggcctggacacaagcacaatggggctggtggagccactgtgcagagctacttgaataatcactgggttttcatcaactccttttgtcatacagaccactcaagggctgaagtgttggtaaccttcatttcggtgtccaaagcctcacagcaggtgagccaccctgagatgcttgtggccacatggtggccacagtcagagctttgaaagtcagtaccaaatgaacgcataattggacaccaaaaatcaagtgttactttcatgtttcctcaccccatcatctcattgcctcctgctgactctgataccgacgctgagctgacttgccaggctgccgctggacgcgtagagatcaggccagcgccgcgctcatttttccaggtagacctactctgtggaacggaagtgccctagctgctttgtttttgtagcacttgctggctgaatttttcttttgctaatcgctaaccagaaagtctggttagagggggctcaactcaatccctttggtccccagcgccagacaagagttaattctggaaaattcagtacttgaatgtacctgccttattgcataccaatttactggggggaaaaaaaaagttaagagatgccggctccagatctccacttcattcacaggtgattttggaaatcctgtaagttacacttcctgttctggttttgttttgttttttgtttcctttggctgattcctgctgagtgaggccagttcctcatcaggctcagggcaggtgccttttcaggcgtggcctcctttccatctagcacagcatctttgtctctgttctgtctcctccaaatccaagatgattttaattagtacagacatgtacagtctacaattaaagagtgatttgtactaatatgattttgattcttcctcctctttgctgtcctttcaagacacttgctggaaaaagctttaatgcacttagttttcctttaggttttctatgactcagatgtaaaggactttctctgtacagtatattatccaatgcatgtttgttctctctcctgatatattgaacaccacacagttgtgaagccgtgcagtggggatgccccacaccccacagaggcatctacccctgtgtataaggaaagacattttcctttgctgtacttgcttgagcagttttattgtctgtacatgtgagctgtgtgagatagatgtgaaaagttcaaatgaatgcattttcctgccccatgtatacagattgtcatctgtacaaggaactgtatgtatgaaagcaaatgtacttatttataaatggctaacacttgg

SEQ ID NO: 32450 - DNA, 9310 bp, Homo Sapiens
atgacaatagaagatacttcagtggaaacacatttttctgaaatggttgcactcaagatcgttggtggggcctccactaactgggggaattctctcatgctggtggtacctggacacccaggcacatacctgccgtgcacaagggtctggatccctgaccctgatgaggtatggcgctcagctgagttaaccaaggactacaaagaaggagacaagagcctacagctcagactggaggatgaaacgattctggaatacccaattgatgtacaacgcaaccagctgcccttcttacggaatccagatatcttggtgggagaaaatgacctgactgcccttagctatcttcatgagcctgcagttttgcataatttgaaggtccgtttcctggagtccaaccatatctacacttactgtggtatcgtacttgttgccattaatccttatgaacagttgccaatctatggacaagatgtcatctatacctacagtggccaaaacatgggagacatggacccccacatctttgctgtggcagaagaagcctacaagcagatggccagagatgagaagaatcagtccatcatagtcagtggggagtctggagccgggaagacggtatcagccaagtatgccatgcgctatttcgccaccgttggtggctcggccagtgaaaccaacatcgaagagaaggtgctggcatccagtcccatcatggaggccattggaaatgccaagaccacccgcaatgacaacagcagccgttttggcaagtacatccagattggctttgacaaaaggtaccacatcatcggggccaacatgaggacttacctcttggagaagtccagagtggtcttccaggcagatgatgagaggaattaccacatcttttaccagctctgtgctgctgccggtcttccagaatttaaagagcttgcactaacaagtgcagaggactttttctatacatcacagggaggagacacttccatcgagggtgtggacgatgctgaggactttgagaagactcgacaagccttcacactcctcggagtgaaagagtcccatcagatgagcatttttaagataattgcttctatcttgcaccttggaagtgtggcgattcaggctgagcgtgatggtgattcctgtagtatatcaccccaggatgtatacctaagcaacttctgccgactgctaggggtggagcacagtcagatggagcactggctgtgtcatcgcaagctggtcaccacctcggagacctacgtcaagaccatgtccctgcagcaggtgatcaatgcgcgcaacgccctggcgaagcacatctatgcccagttgttcggctggattgtggagcacatcaacaaggccctgcacacctccctcaagcagcactccttcatcggggtcctggacatctatgggtttgagacatttgaggtaaacagctttgagcagttctgtatcaactatgcaaatgaaaagctccagcagcagttcaactcgcatgttttcaaactggagcaagaagaatacatgaaggaacagatcccttggaccctgattgatttttatgataaccaaccttgtatcgacctcattgaagccaagctgggtatcttggacctgttggatgaagaatgtaaggtccccaaaggaactgaccagaactgggctcagaagctctatgaccggcactccagcagccagcacttccagaagccccgcatgtccaacacggccttcatcatcgtccactttgcagacaaggtggagtacctctctgatggttttctggagaaaaacagagacacggtgtatgaagagcagatcaatatcctgaaggccagcaagttcccactagtggctgacttgtttcatgatgacaaggaccctgttcctgccaccacccctgggaaggggtcatcttcgaagatcagcgtccgttctgccagaccccccatgaaagtctccaacaaggagcacaagaaaaccgttggccaccagttccgtacctccctgcatctgctcatggagaccctgaatgccacgacacctcactatgtccgctgcatcaagcccaacgatgagaagctcccctttcactttgacccaaagagagcagtgcagcaactcagagcctgcggggtgttggagacgattcgaatcagtgcagctggctacccatccaggtgggcctaccatgactttttcaaccggtatcgggtgctggtcaagaagagagagctcgccaacacagacaaaaaggccatctgcaggtctgtcctggagaacctcatcaaggaccccgacaagttccagtttggccgcaccaagatcttctttcgagcaggccaggtggcctacctggagaagctgcgggctgacaagttccggacagccaccatcatgatccagaaaactgtccggggatggctgcagaaggtgaaatatcacaggctgaagggggctaccttaaccctgcagaggtactgccggggacacctggcccgcaggctggctgagcacctgcggaggatcagagcggctgtggtgctccagaaacattaccgcatgcagagggcccgccaggcctaccagagggtccgcagagctgccgttgttatccaggccttcacccgggccatgtttgtgcggagaacctaccgccaggtcctcatggagcacaaggccaccaccatccagaagcacgtgcggggctggatggcacgcaggcacttccagcggctgcgggatgcagccattgtcatccagtgtgccttccggatgctcaaggccaggcgggagctgaaggccctcaggattgaggcccgctcagcagagcatctgaaacgtctcaacgtgggcatggagaacaaggtggtccagctgcagcggaagatcgatgagcagaacaaagagttcaagacactttcagagcagttgtccgtgaccacctcaacatacaccatggaggtagagcggctgaagaaggagctggtgcactaccagcagagcccaggtgaggacaccagcctcaggctgcaggaggaggtggagagcctgcgcacagagctgcagagggcccactcggagcgcaagatcttggaggacgcccacagcagggagaaagatgagctgaggaagcgagttgcagacctggagcaagaaaatgctctcttgaaagatgagaaagaacagctcaacaaccaaatcctgtgccagtctaaagatgaatttgcccagaactctgtgaaggaaaatctcatgaagaaagaactggaggaggagcgatcccggtaccagaaccttgtgaaggaatattcacagttggagcagagatacgacaaccttcgggatgaaatgaccatcataaagcaaactccaggtcataggcggaacccatcaaaccaaagtagcttagaatctgactccaattacccctccatctccacatctgagatcggagacactgaggatgccctccagcaggtggaggaaattggcctggagaaggcagccatggacatgacggtcttcctgaagctgcagaagagagtacgggagctggagcaggagaggaaaaagctgcaagtgcagctggagaagagagaacagcaggacagcaagaaagtccaggcggaaccaccacagactgacatagatttggacccgaatgcagatctggcctacaatagtctgaagaggcaagagctggagtcagagaacaaaaagctgaagaatgacctgaatgagctgaggaaagccgtggccgaccaagccacgcagaataactccagccacggctccccagatagctacagcctcctgctgaaccagctcaagctggcccacgaggagctcgaggtgcgcaaggaggaggtgctcatcctcaggacccagatcgtgagcgccgaccagcggcgactcgccggcaggaacgcggagccgaacattaatgccagatcaagttggcctaacagtgaaaagcatgttgaccaggaggatgccattgaggcctatcacggggtctgccagacaaacagcaagactgaggattggggatatttaaatgaagatggagaactcggcttggcctaccaaggcctaaagcaagttgccaggctgctggaggctcagctgcaggcccagagcctggagcatgaggaggaggtggagcatctcaaggctcagctcgaggccctgaaggaggagatggacaaacagcagcagaccttctgccagacgctactgctctccccagaggcccaggtggaattcggcgttcagcaggaaatatcccggctgaccaacgagaatctggaccttaaagaactggtagaaaagctggaaaagaatgagaggaagctcaaaaagcaactgaagatttacatgaagaaagcccaggacctagaagctgcccaggcattggcccagagtgagaggaagcgccatgagctcaacaggcaggtcacggtccagcggaaagagaaggatttccagggcatgctggagtaccacaaagaggacgaggccctcctcatccggaacctggtgacagacttgaagccccagatgctgtcgggcacagtgccctgtctccccgcctacatcctctacatgtgcatccggcacgcggactacaccaacgacgatctcaaggtgcactccctgctgacctccaccatcaacggcattaagaaagtcctgaaaaagcacaatgatgactttgagatgacgtcattctggttatccaacacctgccgccttcttcactgtctgaagcagtacagcggggatgagggcttcatgactcagaacactgcaaagcagaatgaacactgtcttaagaattttgacctcaccgaataccgtcaggtgctgagtgacctttccattcagatctaccagcagctcattaaaattgccgagggcgtgttacagccgatgatagtttctgccatgttggaaaatgagagcattcagggtctatctggtgtgaagcccaccggctaccggaagcgctcctccagcatggcagatggggataactcatactgcctggaagctatcatccgccagatgaatgcctttcatacagtcatgtgtgaccagggcttggaccctgagatcatcctgcaggtattcaaacagctcttctacatgatcaacgcagtgactcttaacaacctgctcttgcggaaggacgtctgctcttggagcacaggcatgcaactcaggtacaatataagtcagcttgaggagtggcttcggggaagaaaccttcaccagagtggagcagttcagaccatggaacctctgatccaagcagcccagctcctgcaattaaagaagaaaacccaggaggacgcagaggctatctgctccctgtgtacctccctcagcacccagcagattgtcaaaattttaaacctttatactcccctgaatgaatttgaagaacgggtaacagtggcctttatacgaacaatccaggcacaactacaagagcggaatgaccctcagcaactgctattagatgccaagcacatgtttcctgttttgtttccatttaatccatcttctctaaccatggactcaatccacatcccagcgtgtctcaatctggaattcctcaatgaagtctgaagatgcatgtttccagcattagtttgattcccaatgtgagcaagaaggaagtatatacagtaaagtaaattcaaggatctgttaaatctggtaaaagtagatcaaatcagagattgacagcctgtggagggtgctgaactatacagaattagacacaactatgtcattattttttgtacctactgctcagaataaaaacacttgaaatatggaagattttaagtttgatttcagtccaacacatatacataatttatagacaccaagcagtccccatagacatataaaaggtgtcaattctataaaacgaagctgcctagttttgatctttgcatagaactagagaatgtccaaattaaaataccaaatatatataagtcacataaattgccttcaaagggctttaacaaataatggtactaataaccatgataatggcatatactgacatttcccaaagtttgcaaaccataggtgtggttgagtttgtggtgagatgttttaagaacaaaaatatggggatgagacttctgagaaatattcccaaaatattttttaatggctgattatacacagacagtggtgtaactgacctccagaccagacattttgagtactggtttctgaagcaaaattagaagtgccagtcctcagtgtgctcaaacgcttttgtgttatcttgatttaatggaagagattattaaaatgctgctatcccaaactccaagtgagaaagatggaaaaatattttgtttctgatgctagtccatacactttccaagtcccacaaaactttcacaaaaatgtatataagctaaatattagaaacggataacaaacttgttttatttatagatgtaaaaaccaaacaagtcaatatgaaagcttttaatctcttaataccattaagcttccagtaagagcatcacataatgctctactgttccagaaaccaaatagtaaaacaaactaaagttcgcacatcagatcatctgaaaaaccttcaaaaataatcagttcagggatattatacaaaagtttgggttttttttttttaagagaataaaatggcttaggtcaactttcccttttcaggttattttcaacgtttttcaaatttagcacacaaaaaattgtaaatatctctcccacaaaataaggattttaaaaaagtaattcagtaatataacaggcttagatgtttgctgctcttagaattttttttaacttgtttttggtttcttcaaaagcaagcattcaattggaaacccatattctttccacacttttttttactgtcttttctgtatttcttgatagcagtatgctgttcccataagaaaaaaatggtatttgcaaatcatggaagaacagcctctgtattacattgagaaaataagatttatccatgaattggaagtagaacagcctgccttcaccctcttttactcaaccacccaacttaaaaggctcttggaaacacagcacactccacgctaccttctgcactgtgcccttagagcacagcttcctcagttgttctctgcatctcctggggcttaggccagtcttagcctgggttaaggctgctgacattgtgttccaatcagttgtcatgggcattatcccctctacatccacattaaacatgccggcttctcttgggcatcggcagagctgtgcctttttctttcagttacagttacataatcactgacgtccatgacacttacccatggatccatgtgctgacttcatttagaaggccaatctaaaacaactgggtttgtggctacctctttaaagttgtttgtgaaggataatttgttttttaatgcactttagtttgaaagtgagtctcttatgtaaggaccatccttaaaagaccaaaaatgccttgttagagtgttaaggagttttgacatgcagtggttccacaaacacagtggcttactatccttatacactgtcttataccatcattctctccatctctcttggtcactactctctgctgtcactggttaatcactaggtgccaagagcttactgaataaaagcttggcaattagaataaatggggagggaaggaccttatgaatagtccatttagcctaagaaatggcagatttagttcttctcttccaaaagataaaggtatatcctggaattgtacttaaaacttacagatgactaacaaatatatactttatatgtagttaatatttagatctgtcttatttaatacttggaggctagaagaagcatctttaggggaactatataatcttttgttagcattttctctgcattttaaaaaatcatttcaattcaaacatttatcagtgtcatgaaatcagtaatgactctttaacaattcaggtttgaactctgcattagatgtctctttaattttttaatatttaaaatttagttgacatttttttcaccaggtgcctttagcggttactaagataactgacatcagttgtttctctgaaataagtgttgctgtgggaataattttaatgttcaaggtgatatcatgggggagttttgtcttttaaaacattagaagcattttaaatattaagaatcaaatatttatagatcaaaacttgtgttttaagtattatacgggacctgtttacttatagtaaatgtgaatgtacacatgagttgttgctgaagctgacaagcatattacatacatgcattttccctgtgccctcatagttgcagttagagttccagtacctgtaggctcacctgggaggcagattagacccaaaggtagatgtttttcccctttccatgaagcatgtcagtgggagttgcttcctttgatttccctagtactaaattttaaggcttttgtaaaaacaaaacaaaactaggagcttggaacagttaaaaatcaacactgctaccatcaattcatcaaatatttacttagagctttcatacattaagattccagtaaccaataaattagaattcatttcttctgcataaagtaaattttcatacacttgacctactaagacagcaagggtgtcctaaattgaggcatttgtataatgcctgcataactaaatggtcactaaaatgggacagcatggggcaagaccttgtagttcttcacagaatatttgtggtcagtttctccaattaatttgctgcatgagccaaataaccataattcactttttatacccactggtgccataattagagaattagagggtgtagacagaggttaatgccaatgagaaacacaggacagggttttttttattataaaggtcattagatacaaaagattgtttttcaaaaaatttctaattctaacaaaggggatcaatcagaaatgaaactaagctactttctaaagtgacactgtatcagaataatccagatttgaatataacattttgccaccaactgacatttagatgaaggactgcctctctgaaagagttcagatcatattcaggggtgaatccaacaccatggaagaaagactactgatgaaaatattttcccactttgcacaaatctgtaaactacacctttgtttatagaaaaatgcttgtaatagtcactgtaatatttagctgtggataaaaatttgtggaaataaatacttttgaat

SEQ ID NO: 32451 - DNA, 2031 bp, Homo Sapiens
atgcgttccttagcgaaagctgagaaccttttaattcgctctcagtcaacaccaaagaccctcaagcaaaagcaagagctcccgggcgtcttcgaaaaaagcgcctttgacagttctggcttttctggattctgtgcttcaccaatagaggaatcccatggagcattaattagttcttgcaattccagaaccatgactgatgggttggtgacattcagggatgtggccatcgacttctctcaggaggagtgggaatgcctggaccctgctcagagggacttgtacgtggatgtaatgttggagaactatagtaacttggtgtcactggatttggagtcaaaaacgtatgagaccaaaaaaatattttcagaaaatgatatttttgaaataaatttttcccagtgggagatgaaggacaaaagtaaaacccttggccttgaggcatccatcttcagaaataattggaagtgcaaaagcatattcgagggactaaaaggacatcaagagggatacttcagtcaaatgataatcagctatgaaaaaataccttcttacagaaaaagtaaatctcttactccacatcaaagaattcataatacagagaaatcctatgtttgtaaggaatgtgggaaggcttgcagtcatggctcaaaacttgttcaacatgagagaactcatacagctgaaaaacactttgaatgtaaagaatgtgggaagaattatttaagtgcctatcaactcaatgtgcatcagagatttcatactggtgagaaaccctatgagtgtaaggaatgtgggaagacctttagctggggatcaagccttgttaaacatgagagaattcacactggtgagaaaccctatgaatgtaaagaatgtgggaaggcctttagtcgtggctatcaccttacccaacatcagaaaattcatactggtgtgaaatcttataaatgtaaggaatgtgggaaggcctttttttggggctcaagccttgctaaacatgagataattcatacaggtgagaaaccttataaatgtaaagaatgtgggaaggccttcagtcgtggctatcagcttactcagcatcagaaaatccatactggtaagaaaccttatgaatgtaaaatatgtggaaaggctttttgttggggctatcaacttactcgacatcagatatttcatactggtgagaaaccctatgaatgcaaggaatgtgggaaggcttttaattgcggatcaagtcttattcaacatgaaagaattcatactggtgagaaaccttatgaatgtaaagaatgtggaaaggcctttagtcgtggctatcacctttctcaacatcagaaaatccatactggtgagaaaccttttgaatgtaaggaatgtgggaaggcctttagttggggttcaagccttgttaaacatgagagagttcatactggtgagaaatcccatgaatgtaaagaatgcggaaagaccttttgtagtgggtatcaacttactcgacatcaggtatttcacactggtgagaaaccctatgaatgtaaggaatgtgggaaggcttttaattgtggatcaagccttgttcaacatgaaagaatccatacaggggagaaaccctatgaatgtaaagaatgtgggaaggcttttagtcgtggctatcaccttactcaacatcagaaaattcataccggtgagaaacctttcaaatgtaaggaatgtgggaaggccttcagttggggttcaagcctagttaagcatgagagagtccatactaatgagaagtcttatgaatgtaaagactgtgggaaggcctttggtagtggctatcaacttagtgttcatcagagatttcatactggtgagaagctttatcaacgtaaggaattcgggaagacctttacttgtggctcaaaacttgttcatgagagaactcatagtaatgataaaccctacaaatataacgaatgtggggaagcctttctgtggacaacttactcaaatgagaaaattgatactgatgaaaccttatga

SEQ ID NO: 32452 - DNA, 662 bp, Homo Sapiens
atggcggcggcgccagcggtgtgcgcctcgcaggggagcccgccgggtgcaccgtccgcgccggcggccgcgccagcacccgcggccggcctgggccgctgccggatggcgctgctgctggccgtggcgctggatgtggcgggcatggcggcgctgctgaccggcgtgttcgcgcagctgcaggtgcgcggccgcgacttcggggacctgctcatctactcgggcgcgctgctggtgttcctgagcctgctgggctggatcctctggtacaccggcaacatcgagatctcgcgccaggagctggagcgcgactacggcctgcggccctcggcgctcgcccgcctggcgcgcaagctctcccgccgctggtcggcgcccgccgccgcgggccagcgccccgcgcccggctcccggagagcgcgccgagccgcccgcgcgcccccgccgcccgccgccggctcccgccgcgtgcgcctgcagctcgccacgctcgaggccgggcccggggcggcgggcgcgggcagcgagtgaggcccagacaaccccttggctccagctgtcaggaccagactgagatgtgcagctgcccctacatccgtggccagacggacgctccctgtaccccctccctcctcacttggataaaaagcagatttgcctta

SEQ ID NO: 32453 - DNA, 2655 bp, Homo Sapiens
atggacaggaagcgggtcagacctcatgggcccttcaccgactcaccctccgcccacttggtggagagctaccccttcgacttcctggaattcctcaaccaccagcgcttcgagcccatggaactgtatggggaacacgccaaggcgtggggcatcgtggacctctcggggcaccagcacttgtttgggaacctgaagcgaggagggcccgcgtccgggccgggggtgacgcctgggctgggcgctcccgcgggggccccagggccgcttcctgccccctcgcagaccccgccaggaccccccgcggcggcggcctgcgaccccaccaaggacgacaagggctacttccggagactgaagtacctgatggagcggcgcttcccctgcggcgtgtgccagaagtccttcaagcagtcctcgcacctgcctcatccgccaccgccgctgccacaaggacacgggagcgccgcccctgctggtgttggggtgccccctcctgccaccgggggtggcgatggcccgttcgcctgcccactctgctggaaggttttcaagaagcccagtcacctccaccagcaccagatcatccacacgggcgagaagcccttctcctgctccgtgtgcagcaaaagcttcaaccgcagggagagtctgaagcgccacgtgaagacgcactcggccgacctcctgcgcctgccctgcggcatctgcgggaaggccttccgcgacgcctcctacctcctcaagcaccaggcggcccacgcgggggcgggcgccggggggcctcggcccgtgtacccctgcgacctgtgcggcaagtcctactcggctccgcagagcctgctccgccacaaggccgcccacgccccgcccgctgccgctgcggaggcgcccaaggacggggcggcctcggccccgcagcccccgcccaccttccccccgggcccgtacctcctgccccccgaccctcccaccacagacagcgagaaggcggcggcggccgcggcggcggtggtgtacggcgctgtgcccgtcccgctcctgggcgcccacccgctgctgctcggcggcgcggggaccagcggggcgggaggctcgggcgccagcgtcccaggaaagacgttctgctgcggcatctgcgggcgcggcttcgggcgccgcgagaccctgaagcgccatgagcgcatccacacgggcgagaagccccaccagtgccccgtgtgtgggaagcgcttccgcgaatccttccacttgagcaagcatcacgtggtgcacacgcgcgagcggccctacaagtgcgagctctgcggcaaggtcttcggctacccgcagagcctcacccgccaccgccaggtgcaccggctccagctgccctgcgccctggccggggcagccggcctcccctccacccaaggcacaccgggggcctgtgggcccggggcctcgggcacgtctgcagggcccaccgatgggctgagctacgcctgctcggactgcggcgagcacttcccggatctctttcacgtcatgagtcacaaggaggtccacatggcagagaagccatacggctgcgacgcctgcggcaagaccttcggcttcatcgagaacctcatgtggcacaagctggtccaccaggccgcccccgagcgcctgctcccgcccgcacccggcggcctgcagcccccggacggctccagcggcacggatgcggccagcgtgctggacaacgggctggcgggggaggtgggggcggccgtggcggcactggcaggggtgtctgggggtgaggacgcaggcggggcggcggtggcaggtgctggcgggggtgccagttccggccccgagcgcttcagctgtgccacgtgcggccagagtttcaagcacttcctgggcctcgtgactcacaagtacgtgcacctggtgcgacggaccctgggctgcggcctctgcggccagagcttcgcgggcgcctacgacttgctcctacaccgccgcagccatcggcagaagcggggtttccgctgcccggtgtgcgggaagcgcttctgggaggcggccctgctgatgcgccaccagcgctgccacacggaacagcggccgtaccgatgtggcgtgtgcggccgaggcttcctgcgctcctggtacctgcggcagcaccgcgtggtgcacactggcgagcgggccttcaagtgcggcgtgtgcgccaagcgcttcgcgcagtcgtccagcctggcagagcaccggcggctgcacgctgtggcccggccccagcgctgcagcgcctgtggcaagaccttccgctaccgctccaacctgctggagcaccagcggctgcacctgggcgagcgcgcctaccgctgtgagcactgcggcaagggcttcttctacctgagctccgtgctgcgccaccagcgcgcccatgagccgccgcggcccgagctccgctgccccgcctgcctcaaggccttcaaggatcccggctacttccgtaagcacctggctgcccaccagggcggccggcccttccgctgctcctcctgcggcgagggcttcgccaacacctacggcctcaagaaacaccgcctggcgcacaaggccgagaacctcggggggcctggagcaggggcgggcaccttggccgggaaggatgcctga

SEQ ID NO: 32454 - DNA, 1041 bp, Homo Sapiens
ctcgccgcgctgagccgcctcgggacggagccatgcggcgctgggcctgggccgcggtcgtggtcctcctcgggccgcagctcgtgctcctcgggggcgtcggggcccggcgggaggcacagaggacgcagcagcctggccagcgcgcagatccccccaacgccaccgccagcgcgtcctcccgcgaggggctgcccgaggcccccaagccatcccaggcctcaggacctgagttctccgacgcccacatgacatggctgaactttgtccggcggccggacgacggcgccttaaggaagcggtgcggaagcagggacaagaagccgcgggatctcttcggtcccccaggacctccaggtgcagaagtgaccgcggagactctgcttcacgagtttcaggagctgctgaaagaggccacggagcgccggttctcagggcttctggacccgctgctgccccagggggcgggcctgcggctggtgggcgaggcctttcactgccggctgcagggtccccgccgggtggacaagcggacgctggtggagctgcatggtttccaggctcctgctgcccaaggtgccttcctgcgaggctccggtctgagcctggcctcgggtcggttcacggcccccgtgtccggcatcttccagttctctgccagtctgcacgtggaccacagtgagctgcagggcaaggcccggctgcgggcccgggacgtggtgtgtgttctcatctgtattgagtccctgtgccagcgccacacgtgcctggaggccgtctcaggcctggagagcaacagcagggtcttcacgctacaggtgcaggggctgctgcagctgcaggctggacagtacgcttctgtgtttgtggacaatggctccggggccgtcctcaccatccaggcgggctccagcttctccgggctgctcctgggcacgtgagggcgcccaggggggctggcgaggagctgccgccggatcccggggaccctcctactgatgcccgtggtcaccacaataaagagccctccaccctccccac

SEQ ID NO: 32455 - DNA, 6281 bp, Homo Sapiens
cccagagccgtgccgagcgcgatgagctcgccattaagtacaatgcggtcagcgagaggctggagcaggctctgcggctggagcctggggagctggagacgcaggagcccagggggctggtacggcagagcgtggagttgcggaggcagctgcaggaggagcaggcctcctaccggcgcaagctgcaggcctaccaggagggccagcagcggcaggcccagcttgtgcagcggctgcagggcaagattctccagtacaagaagaggtgctcggagctggagcagcagctgctggagagatccggagagctggagcagcagcggctgagggacacagagcacagccaagacctggaaagcgccctcatccggctggaggaggagcagcagaggagtgccagcctggcccaggtgaatgccatgctccgagaacagctggaccaggcaggctcggccaaccaggctctgagtgaggacatacgaaaggtgaccaatgactggacacgctgccgcaaggagctggagcaccgggaggcggcgtggaggcgcgaggaggagtccttcaacgcctacttcagcaacgagcacagtcgcctgctcctcctctggaggcaggtggtggggttccggcggctggtcagcgaggtgaagatgttcactgagagggacctgctgcagctgggaggggagctggcccggacatcacgagctgtccaggaggcgggcctgggactgagcacgggcctacggctggcagagagccgggccgaggcagccctggagaaacaggccctgctgcaggcccagctggaggagcagctgcgggacaaggtgctccgcgagaaggacctggcgcagcagcagatgcaaagcgacctggacaaggctgacctcagtgccagagtgacagagctgggcctggcagtgaagcgtcttgagaagcagaatctggagaaggatcaggtcaacaaggacctcactgagaagcttgaggccctggaatccctgcggctacaggagcaggcggccctggagacagaggatggagaggggctacagcagaccctaagggacctggcacaggccgtcttgtcagactctgagagcggcgtccagctgagcggctctgagcgcaccgcggatgcttccaacggcagcctgcgggggctctcgggccagcggaccccgtccccaccgcggcgctcctcgcccggccgaggccgttcaccccgccgaggcccctccccggcctgctcagactcctccacgctcgccctgatccactccgccctgcacaagcgccagctgcaggtccaggacatgcgtgggcgctatgaggcaagccaggacctactgggcaccctgcggaagcagcttagcgacagcgagagcgagcggcgggccctagaggaacagctgcagcgcctgcgggacaagaccgacggcgccatgcaggcccacgaggacgcccagcgcgaggtgcagcggctgcggagcgccaacgagctcctgagcagggagaagagcaacctggcccacagcctgcaggtggcccagcagcaggccgaggagctgcggcaggagcgggagaagctgcaggctgcccaggaggagctgcggcgccagcgggaccggctggaggaagagcaggaggacgcagtgcaggatggcgcgcgggtgcgccgggagcttgagcgcagccatagacaactagagcagctggaagggaagcgctcagtcctggccaaggagctggtggaggtgagggaggcgctgagccgcgccacactgcaacgggacatgctgcaggccgagaaggccgaggtggccgaggcgctgaccaaggctgaggctggccgcgtggagctcgagctctccatgaccaagctgagggcagaggaggcctccctgcaggactccctgtccaagctgagcgccctcaacgagagccttgctcaggacaagttggatctgaaccgccttgtcgcccagctggaggaagaaaagtccgccctgcagggccggcaacggcaggcagagcaggaggccacagtggcgcgggaagagcaggaacggctagaggagctgcggttggagcaggaggtggcgcggcagggcctggagggctccctacgagtggcggagcaggcccaggaggcattggagcagcagctccccacgctgcgccatgagcgcagccagctgcaggagcagctagcgcagctctcccggcagctgagcgggcgggagcaggagctggagcaggcccggcgggaggcccagcggcaagtggaggcgctggagcgagcggcccgtgagaaggaggcgctagccaaggagcacgctggcctggctgtgcagctggtggctgcggagcgtgaaggcaggaccctgtcagaggaggccacacgcctgcgcttggagaaggaagccctggagggcagcctgtttgaggtgcaacggcagctggcccagcttgaggcccgccgggagcagctggaagccgaggggcaggccctgctgctggccaaggagaccctgactggggagttggcgggcctgcggcagcaaataatagctacacaggagaaagccagtctagacaaggagctgatggcccagaagctggtgcaggctgagcgggaggcccaggcctctctgcgggagcagcgggcagctcacgaggaggacttacagcgactccagcgtgaaaaggaggcagcatggcgggagctggaggccgagcgggcccagctgcagagtcagctgcagcgtgagcaggaggagctgctggcccggctggaggctgagaaggaagagctgagtgaggagattgctgccctgcagcaggagcgcgacgagggcctcctcctagcagagagtgagaagcagcaggccttgtctctgaaggagtctgagaagacggcgctgtcagagaagttgatgggtacacggcacagcctggccaccatctccctggagatggagcggcagaaacgagatgcccagagccggcaggagcaggaccggagcaccgtgaacgctctgacgtctgagctgcgggacctacgggcccagcgggaggaggctgctgcggcccacgcccaggaggtgaggaggctgcaagagcaggcccgagacctgggcaagcagcgggactcctgtcttcgcgaggcagaagagcttcggacccagctgcgtctgctggaggatgcccgtgacgggctgcggcgggagctgctggaggcccagcgcaagctgcgtgagagccaggagggccgggaggtgcagcgccaggaggcaggcgagctgcgacgcagcctgggcgagggtgccaaggagcgcgaggccctgcggcgttccaatgaggagcttcggtctgctgtgaagaaggcagagagcgagcgcatcagcctgaagcttgccaatgaggacaaggagcagaagctggcactcctagaggaggcacggacagctgtgggcaaggaggccggggagctgcgaactgggctgcaggaggtggagcgctcacggctggaggctcggcgggagctgcaggagctccggcgtcagatgaagatgctggacagtgagaacaccagactgggccgggagctggcggagctgcagggccgcctggcgctgggcgagcgggcagagaaggagagcaggcgggagaccctgggcctccggcagaggctgctgaagggcgaggccagcctggaggtgatgcggcaggagctccaggtagcccagcggaagctgcaggaacaagaaggcgagttccggacccgcgagcgacgcctgctgggctccctggaggaggcgcgtggcactgaaaagcagcagctggaccacgcccgcggcctggagctgaagctggaggcggcgcgggccgaggctgcagagctgggcctgcggctgagcgcagccgagggccgggcacaaggcctggaggccgagctggcccgcgtggaggtgcagcggcgcgcggcggaggcccagctgggtggcctgcgctcggctctgcgccggggcctcggcctcggtcgcgcgcccagcccagccccgcggccagtgcccggttcccctgcccgggacgcacccgcagaaggaagcggggaagggctcaacagccccagcaccttagaatgcagccctgggtcccagccaccatctccaggacctgccacctccccagcctctccagacctggacccggaggcagtgcgcggggccctccgggaattcctgcaagagctgcggagtgcccagagagaacgggacgaacttcggacccagaccagtgccctgaatcgccagctggccgagatggaggctgagagggacagcgcaacctcgagggccaggcagctgcagaaggcggtggctgagagtgaggaagcccggcgcagtgtggatgggcggctgagcggggtccaggcggagctggcgctgcaggaggagagtgtgcggcgcagtgagcgggagcgccgggccacgctggaccaggtggccacactggagaggagcctgcaggccaccgagagcgagctccgggccagccaggagaagatcagcaagatgaaggccaatgagacaaagctggagggcgacaagcggcgcctgaaggaggttctggacgcctccgagagccgcactgtcaagctggagctgcagcggcgctcgcttgagggggagctgcagcgcagccgcctgggcctcagtgaccgcgaggcccaagcccaggccctccaggatcgggtggattccctgcagagacaggtggccgacagcgaggtgaaggcagggaccctgcagctgaccgtggagcggctgaatggggccctggctaaggtggaggaaagcgagggggccctgcgggacaaggtgcggggcctgacagaggccctggcccagagcagtgccagcctcaacagcacccgggacaagaacctgcatctgcagaaggctctgaccgcctgtgaacatgaccgccaagtactccaggaacggctggatgccgcccggcaggcattatctgaggcacggaagcagagcagctccctgggcgagcaggtgcagacgttgcgaggcgaggtggctgacctggaactgcagcgggtggaggccgagggccagctacaacagctacgggaggtgctgcggcagcggcaggagggtgaggctgcagccctgaacaccgtccagaagctgcaagacgagcggcggctgctgcaggagcgcctgggaagcctgcagcgcgccctggctcagctggaagctgagaagcgggaggtggagcgctcagccctgcggctggagaaggaccgtgtagccctcaggaggacgctggacaaggtggagcgggagaagcttcgtagccatgaggacacagtgcggctgagcgcagagaagggccgcctggaccgcaccctcacgggggctgagctggagctggcagaggcgcagaggcagatccagcagctggaggcgcaggtggtggtgctggagcagagccacagcccggcccagctggaggtggatgcgcagcagcagcagctggagctgcagcaggaggtggagcggctgcgcagcgcccaggcgcagactgagcgcaccctggaggctcgggagcgggcccaccgccagagggtgcgtgggctggaggagcaggtgtccacactgaagggccagctgcagcaggagcttcgaaggagctcagcacccttctccccaccctccggccccccagagaaatgagctcctgctggcatctggagaacacccctgtgcctgggacaggggaggacccttcttttggacagcccccccacccagagcccggtcccttgggggcctcaagctggggtgggatgaggaggcgctctgctggcagtgctgaggacgggtactccagctccaggcctggagaggcttcccagcaacacctgcagtccagcccccctcttctaggatgagccactgtagatcattaaagttcctccttgagaggctgagccgtagccaggattggggagagcccttgtctctggtcagccctggagcatgggatcgtgggaaagaggagggggaccaggcccagggcaggggtcagaggcccaggccctgacttcggcttcccagagatctctccgccttagttaagagcatgtgtcgggaaattcctcagagtgctcagagtccctgtatttttatacctttttacaatgttaactgttcagaactgttttttgtaacaaaaccttgtttttaaaaaag

SEQ ID NO: 32456 - DNA, 1944 bp, Homo Sapiens
ttcgggtgtgctgtggtcatcctccctgcgcacctacagccgcagaccgccggtggggggcgggggatgccgggctgccgcatcagcgcctgcggcccgggggcccaggaggggacggcagagcagaggtcgccgccgccgccctgggatcccatgccgtcctctcagcccccgcccccaactccgaccttgactcctaccccgaccccgggtcagtccccgccgctgccggacgcagctggggcttcagcaggcgcggccgaggaccaggagctgcagcgctggcgccagggcgctagcgggatcgcggggctcgccggccccggagggggctctggcgcggctgcgggggcggggggccgcgcgctggagctggccgaagcacggcggcggctgctggaggtggagggccgccggcgcctggtgtcggagctggagagccgcgtgctgcagctgcaccgcgttttcttggcggccgagctgcgcctggcgcaccgcgcggagagcctgagccgcctgagcggcggcgtggcgcaggccgagctctacctggcggctcacgggtcgcgcctcaagaagggcccgcgccgcggccgccgcggccgaccccccgcgctgctggcctcggcgctgggcctgggcggctgcgtgccctggggtgccgggcgactgcggcgcggccacggccccgagcccgactcgcccttccgccgcagcccgccccgcggccccgcctccccgcagcgctgacctccacgcccggacccctggccaccccgacaagcttcgccgaggtgccgaccgaccgactgatcgcggacgccggctggaaggactacggatccgcaggaagaggcagttgggggccaggggcccagtagaggaggctgagctccttccaactcctcagaacctccactctatggatctggacctctggattcggctttctccctgggcactgccttcaggaagacgttgagaattgaccttacacaatcccagcgccctcctcacaggagcctttcactttacagtggcaaggggctggttctggagaactggctgatgctctgaatttcttcatataccccacatttgactttggcttacactgtacaattggagatgttgctacaggtccctgagatgcaatcagattaagcgtagcaagcattgccaatgggaaagtcaaaataatttattttttttccctttccccctaccccatccccagccaagaatttcttttcaagatatcgtcatcattcttaaacaacattcttaacccccagctggggtccccattttaatagatgtcattgcttcaagtctaacggcgccgggaggcctgtttgagggaaaacattagtttgaaaaatccccgttcccttcatccactgcccttgttctccacgtgggagtgtgcttgtggcccctcagaaagatagtctgctggctcctaggggttggggtgggggacacacctttttctcaggaagaggtgatggcaatgtaaaacatctaagcaaagttttaaatgaaaaaaaggaaacacatttaaacatcctgataatggagggaaggggggcacatttacacatagcccagaacttgtagaattctgcatagtgaatgtatattgaattagtctcctgccttatacattcaggaggaataaatttccataatgtaaggcaaatgcatggggttctgaggttcactttgcaagtgcccttgctgcctttcctctgtgtctattatggctctttaagttgacggttcctggagcagcttgtatttagtttcgtttggcagtctggccctgttgactttgatttgcagaccaattctcccttgacctgactcacagccgcctgctcttacccccctcctcaggaagtcttcctcattaaaggatgtgatgacggagctcagggatga

SEQ ID NO: 32457 - DNA, 3587 bp, Homo Sapiens
ccagctgttccccgggcagggtcgcctctaggtgctcacctccgccacttcgccatggcgggtcctggcccgggcgcggtgctggagtccccccggcagctgctgggccgcgtgcgcttcttggcagaggcagcgcggagcctccgcgccgggcggccgctgccagcagcgctggctttcgtgccgcgagaggtgctctacaagctttacaaggacccagcgggaccgtcgcgcgtgcttctgccggtgtgggaggcagagggcctggggctgcgtgtgggcgccgcaggcccagcccccggtaccggctccgggcccctccgcgccgcccgcgacagcattgagctccggcgcggcgcctgcgtgcgcaccacgggcgaggagctgtgcaatggccacgggctctgggtgaagctgacaaaggagcagctggcagagcacctgggcgactgcgggctgcaggaaggctggctgctggtgtgccgcccggcggagggcggagcccgcctggtacccatcgacactcccaaccacctccagcggcagcagcagctctttggcgtggattatcggccggtgctcaggtgggaacaggtggtggacctgacatactcacatcgcctgggatcgagacctcagccggcagaggcatacgcagaagctgtacaaaggctactctatgtacccccgacatggacctacgagtgcgacgaggacctgatccacttcttgtatgaccacctgggcaaggaggatgagaacctgggtagcgtgaagcagtatgtggagagcatagacgtttcctcctacacggaggagttcaacgtgtcctgcctgacagacagcaatgccgatacctactgggagagcgatgggtcccagtgccaacactgggtacggcttactatgaagaagggcaccattgtcaagaagctgctactcacagtggataccacagatgacaactttatgccaaagcgggtggtggtctatgggggtgaaggggacaacctgaagaagctgagtgacgtgagcattgacgagaccctcatcggggatgtctgtgtcctggaggacatgaccgtccacctcccgatcatcgagatccgcatcgtggagtgccgagatgatgggattgatgttcgtctccgaggggtcaagatcaagtcatctagacagcgggaactagggttgaatgcagacctgttccagccaactagtctggtgcgatatccacgcctagaaggcaccgaccctgaagtactgtaccgcagagctgtcctcctgcagagattcatcaagatcctcgatagtgtcctgcaccacctggtacctgcctgggaccacacactgggcaccttcagtgagattaagcaagtgaagcagttcctactgctgtcccgccagcggccaggcctggtggctcagtgcctgcgtgactctgagagcagcaagcccagcttcatgccacgcctatacatcaaccgccgtcttgccatggaacaccgtgcctgcccctctcgagaccctgcctgcaagaatgcagtcttcacccaggtatatgaaggcctcaagccctctgacaaatatgaaaagcccctggactacaggtggcccatgcgctatgaccagtggtgggagtgtaaatttattgcagaaggcatcattgaccaagggggtggtttccgggacagcctggcagatatgtcagaagagctgtgccctagctcagcggatacccccgtgcccctgcccttctttgtacgcacagccaaccagggcaatggcactggtgaggctcgggacatgtatgtacccaacccctcctgccgagactttgccaagtatgaatggatcggacagctgatgggggctgcccttcggggtaaggagttcctggtcctggccctgcctggttttgtgtggaagcagctttctggtgaggaggtgagctggagcaaggacttcccagctgtggactctgtgctggtgaagctcctggaagtgatggaaggaatggacaaggagacgtttgagttcaagtttgggaaggaactaacattcaccactgtactgagtgaccaacaggtggtggagctgatccctgggggtgcaggcatcgtcgtgggatatggggaccgttctcgtttcatccaactggtccagaaggcacggctagaggagagcaaggagcaggtggcagctatgcaggcaggtctgctgaaggtggtaccacaggctgtgctggacttgctgacctggcaagagttggagaagaaagtgtgtggggatccagaggtcactgtggatgctctgcgcaagctcacccggtttgaggacttcgagccatctgactcgcgggtgcagtatttctgggaggcactgaacaacttcaccaacgaggaccggagccgcttcctgcgctttgtcacgggccgcagtcgcctgccagcacggatctacatctacccagacaagctgggctacgagaccacagacgcgctgcccgagtcttccacttgctccagcaccctcttcctgccacactatgccagtgccaaggtatgcgaggagaagctccgctatgcggcctacaactgcgtggccatcgacactgacatgagcccttgggaggagtgaggcgtgccgccggctgtgggaccagcaagactgcacgtgtccctcttggccttgcccagggcgaagacaccttccctgccctggtttggctgacgtgctcagcaaaaccccatgtgccctgctcctgtgtgcagttggggtaggggcagctggcatggtcaggtaacactagtggcccagccccgcagacccacaagccctacccgtgctggggcttgcttcccgaggtatttcacctcttaagagggaatcttccacaagcccagcacaagctgccaggcctgagctacttgaagggggccatctaggtccccaacccatggactttgcctccattttcagctccgccttttttctcctattttctctctggctttcttcagccatgactcacaactaaaaacataaaacactggaggttagtggaggcccctccccaagcagggagcctgggatgggcagggagtgatagccaaactccttggtcacctgctccaagaaggaagcagtagctgagcacctgccctcacattctgctcttttcccctctccctccataccagagatgtggtgagctctgttcttctaccaacccagtctcaacacacaaagtgccaccaccttccctgactcagaacccacatccactcaatgtgaactctactaccacgacctccccatattcctcacttctccatcacctccagcctgactccctgtctgccctttcacccccaagattttgcacaggttaaggccagttatggcctttttgaaatctgtaatagctcccctttccccaactctaaagcctagaccttaaacctgttcctagagctatgcacacccctgccccagtttaccgttcctccctcagggcctccgtgacactccatgaaaagaagttcttgcataccggaaagttgaataaatggatgaattcattc

SEQ ID NO: 32458 - DNA, 5661 bp, Homo Sapiens
atgtttgctgtttcacctgtatcgactttccaaaagtttggagaattaggtggatttgcagcaatccaagccaagctccattcagaagatatagaacttggggctgtctcagcactgattcagcccttaggagtgtgtgcagagtacctcaattcctccgtggtacagcccatgctagacccagtcattcttactacaatccaggatgtacggagtgtagaagagaaagacctcaaagacaagagattggttagcatccctgagctcttgtctgccgttaagttactttgcatgcgcttccaaccggatctggtgacaattgtggatgaccttcgactagatattctattgcgcatgctgaaatcaccacatttcagtgctaagatgaattctctcaaagaagtaaccaaactaatagaagatagcactttatccaaatctgtgaagaatgctatagatacagacagattattagattggctagttgaaaactcagttctgtcgattgcactggaaggcaacatagaccaagcacaatactgtgaccgtataaagggaattattgaactcttgggtagtaaattgtcgttagatgaactcactaaaatttggaagatacagtcaggacaatcatctactgtgattgagaacattcatactattattgctgcagcggctgtgaaatttaattcagatcagcttaatcatttgtttgttctcattcagaaggttttagacgtactctgggaactggctcaccttccaaccctgcccagtagccttattcagcaggccttggaggagcacctgacaatccttagtgatgcatatgcagtgaaagaagcaatcaagaggagctacatcatcaagtgcatagaagatattaagaggagcattattcaagacttgaagaagaattttgaaatagtgaaattggtaacgggaagtttgatcgcttgtcatcggcttgcagctgctgtggccgggcctggaggcttaagtggctcgacactagtggatggccggtacacttaccgggagtatttagaggcacatctaaaatttctagcgtttttcttgcaagaagctactctgtatctgggctggaatcgtgccaaggagatctgggagtgtcttgtaactggccaggatgtttgtgaattagatagagagatgtgttttgaatggtttacaaaaggacagcatgatcttgagagtgatgttcagcagcagctcttcaaggagaaaattcttaaattggagtcatatgaaatcactatgaatggttttaacttatttaaaactttttttgaaaatgtgaatctttgtgatcatcgattgaaaagacaaggagctcagttgtatgtagaaaagctggaattgataggaatggatttcatttggaaaatagccatggaatcacctgatgaagaaattgctaatgaagctattcagctaatcataaactatagttacattaatctaaatcctagattaaagaaggattcagtatctttacataagaaattcattgctgattgctacacaagattagaagcagccagttcagcacttggtggccccactctaacacatgctgtgaccagagcaacaaaaatgcttacagcaactgccatgccaactgtagcaacctcagttcagtctccttatagatctactaaacttgtaataattgagagattgctgcttctggcagagcgctatgtgatcactatagaggatttttactctgttccacgaactattctacctcatggtgcctcatttcatggacatcttttaacccttaatgttacctatgagtctaccaaagataccttcactgtcgaggctcacagtaatgaaaccatagggagtgtccggtggaaaatagccaagcagttgtgctctcctgtggataatatacagatatttacaaatgatagcctgctgacagtgaataaagatcaaaagctactccaccaactgggcttttctgatgaacaaatccttacagtgaagacttctggcagtgggaccccatctgggagttcagcagattcttcaaccagctccagcagcagcagcagtggggtttttagttcttcatatgccatggagcaggagaaatccctccctggtgtagtgatggctctcgtatgtaacgtatttgacatgctttatcagctcgccaatctggaagagccaaggataactctacgagtacggaagcttctgctcttgatacccactgatccagccattcaggaagcccttgatcaacttgattctttaggaagaaagaaaacattgctgtctgaatcaagttctcagtcctcaaaatctccatccctgtcatcaaagcaacagcaccagccaagtgccagttcaattttagaaagtctgtttcgatcttttgccccgggaatgtctaccttcagagtgctctacaacttagaagttctaagctccaaactcatgccaacagctgatgatgacatggccagaagctgtgccaaatccttctgtgaaaacttcctcaaagctggcggtttgagtttggttgtaaatgtcatgcagagagactccatcccatcagaagtagactatgaaacaaggcagggtgtttattccatctgtctacagcttgcaagatttttacttgtcggacaaacaatgcccacgttattagatgaagacctcaccaaagatggtatagaagcactttcttcccgcccattccgaaatgtcagccggcagacaagcagacagatgtccttatgtggtaccccagaaaagtcatcctaccgacagttgtccgtgtctgataggtcttctattagggttgaggaaatcatccctgctgctcgagttgcaatacaaacaatggaagtaagtgatttcacttctactgtggcttgcttcatgagattgtcatgggctgcggctgcaggacggcttgatcttgttgggagtagccagccaattaaagaaagtaattccctgtgtcctgctggaattcgaaacagactcagcagttcaggaagcaattgcagctctggaagtgaaggagaaccagtagccctgcatgcgggaatctgtgttcgacaacagtctgtatccaccaaagactcgctgattgcgggagaggctttgtctcttcttgttacgtgcctacagcttcggagccagcaactggcatctttctataacttgccctgtgttgctgatttcatcattgatattctgctcggatcaccaagtgctgagattcgccgggttgcctgtgatcagctgtacactcttagtcagacagacacatcagcgcatccagatgtgcagaagccaaatcagtttcttctaggcgtaatcctcacggctcagctgcctctctggtctccaactagtattatgagaggagtcaatcagagactgttatctcagtgtatggagtattttgatttgagatgccagttattagatgatctgacaacttcagaaatggagcagttaaggatcagcccagctacgatgcttgaagatgagattacttggctggataactttgaacctaatcgtacagctgaatgtgagaccagtgaagcggacaacatcttactggcagggcacttacgcctcatcaagacccttctttcactctgtggggcagaaaaggaaatgcttggttcatcactcattaaaccattgttagatgacttccttttccgagcttctagaattattttaaatagtcattctccagctggcagtgccgccatcagtcaacaggactttcatccaaagtgtagtacagcgaatagccgattggcagcctatgaagtccttgtgatgttggctgatagttcaccttcaaatcttcaaattattataaaagaactgctttctatgcatcaccagcctgaccctgctcttaccaaggagtttgattaccttcccccagtggatagcaggtccagttcagggtttgtggggctgagaaatggtggtgcaacttgttatatgaatgcagtcttccagcagctgtatatgcaacctgggctccctgagtcattactttcagtggatgatgacacagacaatccagatgatagcgtgttttaccaagtgcagtctctctttggacatttaatggaaagcaagctgcagtactatgtacctgagaatttttggaagattttcaagatgtggaataaagaactttatgtgagagaacagcaggatgcatatgaattctttactagtctcattgatcagatggatgaatacctcaagaaaatggggagagaccaaatttttaagaatacatttcagggcatctactctgatcagaagatctgtaaagactgtcctcacagatatgagcgtgaagaagctttcatggctctcaatctaggagtgacttcttgtcagagtttggaaatttctttggaccaatttgttagaggagaagttctagaaggaagtaatgcgtactactgtgaaaagtgtaaagaaaagagaataacagtgaaaaggacctgtattaaatctttacctagcgtcttggtaattcacctaatgagatttgggtttgactgggaaagcggacgctccattaaatatgatgaacaaataaggtttccctggatgctaaacatggagccttacacagtttcaggaatggctcgccaagattcttcttctgaagttggggaaaatgggcgaagtgtggatcagggcggtggaggatccccacgaaaaaaggttgccctcacagaaaactatgaacttgtcggtgtcatcgtacacagtgggcaggcacacgcaggccactactattccttcattaaggacaggcgagggtgtggaaaaggaaagtggtataaatttaatgacacagttatagaagaatttgacctaaatgacgagaccctggagtatgaatgctttggaggagaatatagaccaaaagtttatgatcaaacaaacccatacactgatgtgcgccgaagatactggaatgcctatatgcttttctaccaaagggtgtctgatcagaactccccagtattaccaaagaaaagtcgagtcagcgttgtacggcaggaagctgaggatctctctctgtcagctccatcttcaccagaaatttcacctcagtcatcccctcggccccataggccgaacaatgaccggctgtctattcttaccaagctggttaaaaaaggcgagaagaaaggactgtttgtggagaaaatgcctgctcgaatataccaggtaagaaccatataaaaaattctaagggggaatatccacgtggacatcaaaatgtatctagtaggtccagaagtacttctgctggattagttgtaccactggggctacatcgtcttacacacttgtctcatgaaccttttatgccacgacacagagggggccatagagctagagccatggagtgctaagaacacaagtatgaatacacactcatgattggcaggcacaatcactgacctgctctgtgagtgtgaaatgtcacaaataaacagagttgtggggagtgggcagtaaagaaatcgtgttgctgaaataaacttattttgtctggagagaaaaacaagttaaggttcataacctttgagtgggactaataaaacaatc

SEQ ID NO: 32459 - DNA, 3042 bp, Homo Sapiens
acacagagccgcctttcagccgcccgagaactgcccgccgcactccacgactgcggcgcctgctctcgggccggggtctgcgcgcaccacgcggccggcagaaagggtaagagaagggaaccccgctttgcagggctccaacttcggcggacgcgttacggcgagggcgaaatgagtcggccgtgaacggtgtttcctgttccgaatcccgagagccctggaaagttttgaaggaggaggcatggcccggcagccttatcgttttccccaggcaaggattccggagagaggatcaggtgttttcaggttaaccgtcagaaatgcaatggcacatcgtgattctgagatgaaagaagaatgtctaagggaagacctgaagttttacttcatgagcccttgtgaaaaataccgagccagacgccagattccgtggaaactgggtttgcagattttgaagatagtcatggtcaccacacagcttgttcgttttggtttaagtaaccagctggtggttgctttcaaagaagataacactgttgcttttaagcacttgtttttgaaaggatattctggtacagatgaagatgactacagctgcagtgtatatactcaagaggatgcctatgagagcatcttttttgctattaatcagtatcatcagctaaaggacattaccctggggacccttggttatggagaaaatgaagacaatagaattggcttaaaagtctgtaagcagcattacaagaaagggaccatgtttccttctaatgagacactgaatattgacaacgacgttgagctcgattgtgttcaattagaccttcaggacctctccaagaagcctccggactggaagaactcatcattcttcagactggaattttatcggctcttacaggttgaaatctcctttcatcttaaaggcattgacctacagacaattcattcccgtgagttaccagactgttatgtctttcagaatacgattatctttgacaataaagctcacagtggcaaaatcaaaatctattttgacagtgatgccaaaattgaagaatgtaaagacttgaacatatttggatctactcagaaaaatgctcagtatgtcctggtgtttgatgcatttgtcattgtgatttgcttggcatctcttattctgtgtacaagatccattgttcttgctctaaggttacggaagagatttctaaatttcttcctggagaagtacaagcggcctgtgtgtgacaccgaccagtgggagttcatcaacggctggtatgtcctggtgattatcagcgacctaatgacaatcattggctccatattaaaaatggaaatcaaagcaaagaatctcacaaactatgatctctgcagcatttttcttggaacctctacgctcttggtttgggttggagtcatcagatacctgggttatttccaggcatataatgtgctgattttaacaatgcaggcctcactgccaaaagttcttcggttttgtgcttgtgctggtatgatttatctgggttacacattctgtggctggattgtcttaggaccataccatgacaagtttgaaaatctgaacacagttgctgagtgtctgttttctctggtcaacggtgatgacatgtttgcaacctttgcccaaatccagcagaagagcatcttggtgtggctgttcagtcgtctgtatttatattccttcatcagcctttttatatatatgattctcagtctttttattgcacttattacagattcttatgacaccattaagaaattccaacagaatgggtttcctgaaacggatttgcaggaattcctgaaggaatgcagtagcaaagaagagtatcagaaagagtcctcagccttcctgtcctgcatctgctgtcggaggaggaaaagaagtgatgatcacttgatacctattagctaaagttctgctaaagatgattaaagttcaggcatccttatccagcggctgagcagaggaaccccaaatgacttggacaagcagttccaaaatgactctcttatttaattgtggagtgggaaagaggactcacagttagccagctgaccatgactgaagttccagctttactttttataaacttgaatgataaagaatagaccatgggctactactgggcattagtgcaatataacagcgataataaaattctctattagtctgttaatttatgacatgatctcggaatggaaaaagatcatttcagagtgtgcgaaataatagtctttaaccatgtaattaaatatgtgtgtttattgtcaaataaggatttgttttaaaggtgattcttgggtttgaagacatttgttaattcatggtctgtacagaaatgaagctggttgcaataccaatctagagagtccaagctggtgaactattaagctgtttaaagatcacccttggcctggcacagtggttcacacctgtaatcccagcactttgggaggcctaggcaggcagactgagctcaggagcttgagaccagcctgggcaacatggcaaaaacccacctctacaaaaagtacaaaaattagtcgggcgtgatggcaggcatctgtagtcccagctacttgggaagctgaagtgggaggatcacctgagctctggaggtggaggctgccatgagccatgatcgtgccactacactccagcctgggtgacagagtgagatcctgtctcaaaaaaaaaaaaaaatcacccttaaatcaacaaaaagacctcatgctcatgcagtggacatttcttggcctgttttcctgtgggttttcttcagcatgatatgaagcaactgttggcatagccagtgggataaataagaaatggaatcatttggctgcctcgtcacttgtgctaatggtcagttgtacacacatgacatgtggaagtgacctgtagcagcggtcactcattttaacaattgaactctgctgggttgggtatttacctttgtctagaaaagaaatatgatatattttctctaaataaatttattttcatcattc

SEQ ID NO: 32460 - DNA, 1819 bp, Homo Sapiens
atttacaaaatgttcatggcagggcccacttcacagggctgtgaggattacagaggataatctgggtgaggcgcatcagccccagcgccgcctgccacaattctatccggccccacatatgcatcgtccataagcgtccggcccctgcattctcgcttttccacgtggccgaggtgcacaccccaacccactgggccagtctccccgccctcttacctgctcttctttcccgactcgtctttaatacccaccaggagccagtcgccgcgggcctggctctgtggtggcaagttgcatgggttctcccatcaggacctcccgatgagcctacgaggtcggttctattactgtcgccacttcagagggaggaaacaggcccgcagggttggggaacttcccgaggtcactgaactggtgtcaggcccagattggaatccaaacacatcccagcccatgcccggctccccagcgccggctcccaggcgtcttcccgggtgccagcggcacccgcatccattcaaatgctgcccagtccccgctcctcagtcgcttccctctactacgcgcccgcatctccccccgacccctcagggtcaggcctctcggtggcttttcctttttctcttccagaaactaaggggtgagaccgacgtttgtgtgccggacgcgtgcaggtggcggcgacgctcccgggagacgcggggggagaaccagtctgtgcgcgcggctgtgagaagccccgaccaagctttccacgcgcttgtttcgggcagcagaggacgcgagggccgactgcgtccccagtgcgcaggctcggccgggggcgcgtaatcaggcagcccagcggtcccttcaaaccgaggcagggaagctctacgtcttgggggccgcatggtgccgagagcgcagaccagacccgccccgcctctccgtgccacgcacgcgctcggctccgcgcttaatggctggagtgcagtggcgcgatctcggctcatcgcaacctccatctcccgggttcaagcaattctctgcctcagcctcccgagtggctgggattacagaagcagtatctgactgtgttgcccaggctggtcttgaactcctggtctcaaatgattctcctgctttggcctcctaaagtgctgggattacagacatatttattcaatttttaatgtcagaccataagcaacgcgaatgaaatttggtgccatcactcggatcaggggacctcccttgggagatcaatcccctgtcctcctgctctttgctccatgagaaagatccacctacgatctctgctcctcagaccaaccagcccaaggaacatctcaccaattttaaatcggatcttctcagcttagcggctgaagactgatgctgccagatgactttggaagccccctggaccatcacagatgcccagctttggataactcttacagtggaggaagacaggaatatcaggtctctgagcccaagctaagccatcatatcccctgtgacctgcatgtatgcatccagatggcctgaagtaactgaagaatcacaaaagaagtgaaaatggcgcgtgcctgccttaactgatgacattaccttgtgaaattccttctcctggctcatcctggctcaaaagctcccccactgagcaccttgtgacccccactcctgcctaacagagaacaatcccctttgactgtaatttcccactacctacccaaatcctataaaacggccccacccctatctccattcactgactctttttggactcagcccacctgcacccaggtgaaataaacagccttgttgctcacac

SEQ ID NO: 32461 - DNA, 3591 bp, Homo Sapiens
tctttccggcttctttgcaaaaggatagaaccgtctcgaccagggcactaggactggaagatcgggctgtgtctaggccgctgtccgcgaaatccgagacgttttttcagcttggctaggaccgacttcgctgccggtttgagctttctctgcactcgggggtctcctgccgtcctcgaccggtggcgtaacttgggaagagattctgagcagagcactggttcagattctgaggtcctcactgagcggacttcctgctccttcagtactcacactgacctggcctctggtgctgcaggccctgtgcctgctgccatgtcttccatggaggagattcaggtggagctgcaatgtgctgacctctggaagcggttccatgatattggaactgaaatgatcatcaccaaagcaggcaggaggatgtttcctgccatgagagtgaaaatcactggcctagatccacatcagcagtactacatagcaatggacattgtgcctgtggacaataaaagatacagatatgtgtatcatagctccaagtggatggtggctggcaatgctgattcccctgtgcccccaagagtttatatacaccctgattctctagcttctggagacacctggatgagacaggtggtcagttttgacaaactcaagcttaccaacaatgagttggatgatcaaggacatatcattctgcactctatgcacaaataccagcctcgagttcatgtgattcgcaaagacttcagcagtgacctttcacccactaagcctgttcctgttggggatggggtgaaaacgttcaactttcctgagactgtgttcaccacagttacggcctatcagaatcagcagattaccagattaaaaattgaccgaaacccttttgctaaaggattcagagattctgggagaaacagaactggacttgaagccatcatggagacatatgcattctggagacctcctgtgcgcacactcaccttcgaagacttcaccaccatgcagaagcagcaagcctcaaagaagacttctcaaggatacacagtgaatcagcactcctcagagacagatgccattgaattatacgagagaagagtctggctcatggaacgaagaggcagcacaggcacttccccaaccacctccagcactgggacaccatccccttcggcttcttctcatcttttatctccatcctgttctcctccaacttttcatctggcccccaacactttcaatgtgggctgccgagaaagccagctgtgtaatctaaacctctctgattatccaccatgtgcccgaagcaacatggctgccttgcagagctacccagggctgagtgacagtggctacaacaggcttcagagtggcaccacttcagccactcagccctctgaaaccttcatgcctcagaggactccatccctgatctcaggaataccaactcctccctcgttgcctggcaacagcaagatggaagcctacggtggccagctggggtcctttcccacttcccagtttcagtatgtcatgcaggcaggcaatgctgcctccagctcctcatcaccacacatgttcgggggcagccacatgcagcagagctcctacaatgccttctcccttcacaacccttacaacctgtatggatacaatttccccacttcccctaggctagctgcaagcccggaaaaactgagcgcctctcaaagcactttactctgttcttctccttccaacggggcctttggagagaggcagtacctgccgtcagggatggagcacagcatgcacatgattagcccttcacccaataaccaacaggcaaccaacacttgtgatggccggcagtatggggcagttccaggctcctcctcccagatgtccgtgcacatggtttaaaggccagtccaaacaccacggagcatttggcaatcaaggccccagagtctccgtggtcagatcctcctctttgggagtccagtgtctttgaaaaacaggaaccgtgttttttttttttttttttttctggccgaagacatatacccaagaacaagagatacctttaagccagtgaaggatacttgcgatagaatcatccgcaactcagtggccattcttctgccttcccagaccttagttttataaagcattgtctgttccagagtggcctttgaagagactgaataatcacttcgtcataatgttaagggagatgctagtgtgtggcagccatgaaaagttacacatacacacccacatacagacagacctacctatacatacgtgcacacacacatacatattcatacacaattcatacacatgcaatcatacatgcacactgactctgaactgggtgaactctgtggagggaggcccagaatgggtgctttcaccaagaatttgtctgtgtacaactctagatggagtgggccagcagtagctgccagtctttctcccctgcagcttcctctgcttctggaatgaaccatgtatcctggagaccctcccaatggatgagagtggaaagacatcagtacaactggacttggcttccggaaaaagattgcttttgaactttggctctcttcacttgtatgctatcattgatattcccagtggtgcccgtggaaagagggagaaagagaagctgaacaggagaaagacaaacagaaagaatagagaacaggaacgaggtggagagcaagactgacagagaaagtgtgagcaatgatgagaattttaattcaccaaggagacgtgtttttggtttgtccccccaaaccccgcccgccccactacaggttatggaaagaatcatggcattactgaggagtaaacctctctggcacactgagcatggtcagggcattggtcagagggacagagcaaggaatgcatcctgagcccacagctttgaccactgtgatccagaagagaggtgcactacgtgggaagtgctgattccacagcatgcagcctggtaggggaaggaaaataaaagggtgtgaagaaggaatagttttataatctcggaagatgataccaagagcagaggcaacaaatagaggcctggcctccaggtgccggatccagacacctgacctagaatgcctgcccgctatccctgtggcaggaaatatcccctcatgtcccagggaattgcagatgggtcttctatacccttctacctgcccttagatctccatttttatcaaatagtacattgcattttgaagttttgggttttgtccttcatctttccctttcccttcaaatcttttaatggtaagaaagcaagtgaagcttggtgcaagctaaaatttttaaatggtgtggaaatgcaaataataccaagtaaaataatacagatattattaaagtttctggttttgaggtgttgtagataaatgtatttatgtgcctagtggggaatccaatattatgaatatgaaaaagggggcaataaaagggtatgtaaaatatgtatgaagaaaaggtgtacaaaaatttgcccttatgcacggaactctgtttctaagtgccaagcacagaaagccgctaaataaaatctttgcaattgtt

SEQ ID NO: 32462 - DNA, 455 bp, Homo Sapiens
atggagacgctgccaggcttgctgcagcggcccgaccccggggcgcttagcgcagcgcagctggagcagctgcgaaaattcaagattcagactcggattgctaacgaaaagtacctaaggacccacaaagaagtagagtggctcataagtggtttcttcagagaaatatttttgaaaagaccagacaacatcctagaatttgctgcagactacttcacggatccaagacttcccaacaagattcacatgcagctaattaaagacaagaaagcggcttaattagcaaaatcatgatgctcagctgttgggagagaccagacggaatccagcctcgggggtcatctggaggcatgagagccctactgccatcagtgtgggtttccaagctgccttgggctctgtctactgtcgcaaaagcttttaaagatattcattaaacacggaccttcctgctc

SEQ ID NO: 32463 - DNA, 594 bp, Homo Sapiens
ctgcgacccaatgggagtccccgccaggagacacaaccggcggctctccggggatttataaggtcccgccagcaaccgcgcgttgggattcgtggtgttgctggagacccgtatggtgtctgcagtcagcgaccctccaacttcaactactggatcaaccatgtgtgagtgcatctccatccatgtgggccaggccggagtgcagatgggcaatgcctgctgggagctgtactgcctggagcacgacatccagcccagtggcaccatgcccagccacaaggccctggggagcagtgataactccttcaacaccttcttcagggagacccagcctggcaggcatgtgtcctgggctgtctgtggacctggagcctgctgtcatagcacaatgaagtcgctgtagagggaagggaccactgaaggtgccacctgctctccccgtctcaagcccaggcaggacctggccttagaagtgggtctctggtcgggaggctgaggcaggagaatcgcttgaacccgggagacagaggctgtggtgagccaagatcgcgtgattgcactccagcctgggcaacaagagtgaaactctgtctc

SEQ ID NO: 32464 - DNA, 5936 bp, Homo Sapiens
tcctgagatggccccagatctgcaagagacatttgagagaagctatttattagcagacgtgaagaaatggattctgcacttgattatttagccatgacttatcaatgatgatggattggaaagcagtagctgcccagaagttaaatctgtcttctaaaaagaagaaacatcggccttccacttcttccgctgccgaaccaccgctctttgcaaccagcttcagtgggattctgcagacctcccctcccccagccccaccctgcctgctgagggctgtcaacaaggtgaaggacaccccggggctgggcaaggtgaaagtcatgcttcgcatctgttccaccttggctcgagatacttcagaatccagctctttcttaaaggtggacccacggaagaagcagatcaccttgtacgatcccctgacttgtggaggtcaaaatgccttccaaaagagaggcaaccaggttcctccaaagatgtttgccttcgatgcagtttttccacaagacgcttctcaggctgaagtgtgtgcaggcaccgtggcagaggtgatccagtctgtggtcaacggggcagatggctgcgtgttctgtttcggccacgccaaactgggaaaatcctacaccatgatcggaaaggatgattccatgcagaacctgggcatcattccctgtgccatctcttggctcttcaagctcataaacgaacgcaaggaaaagaccggcgcccgtttctcagtccgggtttccgccgtggaagtgtgggggaaggaggagaacctgcgggacctgctgtcggaggtggccacgggcagcctgcaggacggccagtccccgggcgtgtacctctgtgaggaccccatctgcggcacgcagctgcagaaccagagcgagctgcgggcccccaccgcagagaaggctgcctttttcctggatgccgccattgcctcccgcaggagccaccaacaggactgtgatgaggacgaccaccgcaactcacacgtgttcttcacactgcacatctaccagtaccggatggagaagagcgggaaagggggaatgtctggaggtcgcagccgcctgcatctcattgatctcggcagctgtgtgaaagctcttagcaaaaatcgagaaggaggctcagggctgtgtctctcgctgtctgctctgggcaatgtcatcctggctctcgtcaatggcagcaaacacattccatacaaagagagcaagctcgccatgttgctgcgggagtctctggggaacatgaactgccgtaccaccatgatcgcgcacatctcggccgcggtcgggagctacgcggagaccctgtccaccatccagattgcatcgagagtcttgaggatgaagaaaaagaagacgaagtacacatccagctcgtccggcggggagagctcctgcgaagaaggccgcatgcgcaggcccacccagctgagacccttccacaccagggccacggtggaccctgacttccccatcgctcacctgtccagcgaccccgactactcctccagcagcgagcagtcctgcgacaccgtcatctacatcgggcccaacggcacggccctctctgacaaggagctcaccgacaacgagggccccccagactttgtccctatcgtgccagccctgcagaagacccggggcgacagccggcccgcagaggcaggagaggctgcagccggcaagtcagaaagggactgcctgaagtgcaacacgtttgccgagctgcaggagaggctggactgcatcgacggcagcgaggagcccagcagctttcctttcgaagaactgcctgctcagtttgggccagagcaggcaagcagaggcccccggttaagccaagcagcgggggcaagcccactctctgagtctgataaggaagataatgggtccgaaggtcagctgaccaacagagaaggccctgaactcccagcctccaagatgcagaggagtcactcacctgtgcccgccgcggcacccgcccacagccccagcccggcctcacccaggagcgtcccgggcagcagtagccagcacagcgcctccccactcgtgcagagccccagcctccagagcagccgggagagcctcaactcctgcggcttcgtggaaggcaagcccaggcccatgggctccccccggctgggcatcgccagcctgtccaagacctcggagtacaagccacccagctctccttcccagagatgcaaagtctacacccagaagggggtcctgccgtctcccgccccactgcctccctcgagcaaggattccggcgtggcgtctagggagtccttgctgcagcccgaggtgcgtacgcccccggttggaatgagcccccaggttttgaaaaaatccatgtctgctgggagcgaagggttcccggaaactcctgtcgatgatgagcagcaggcagctactccttcagagtccaagaaggagatcctgagcaccacgatggtgacggtgcagcagccactggagctgaacggtgaggacgagctggtgttcacgctggtggaggagctgaccatcagcggggtcctggacagcggccgccccaccagcatcatcagcttcaacagcgactgctctgcacgggccctggcctcgggctcgcggcccgtcagcatcatcagcagcatcagcgaggacctggagtgctactccagcacggcccccgtctccgaggtcagcatcacacagttcttgcccctcccgaagatgagcctggatgagaaggcccaggacgcagggagcagacgctcttccatcagctcctggctgagcgagatgagcgcgggcagtgagggtgagcagtcgtgccacagtttcatagcccagacgtgttttgggcacggggaggcaatggcagaacctgtggcctcggagtttgtcagcagcctccagaacaccgctgtggtgtgcagagagaagcccaaggccagccccgacaacttgctcatcctgtctgagatgggagatgactctttcaacaaagcagcccccatcaaaggctgcaaaatatccacagtgagcaaggccatggtcaccatctccaacacggccaatctgagcagctgcgaggggtacatccccatgaagaccaatatcacagtttacccctgcattgccatgagcccccggaacatccaagagccggaggcccccaccgccacccccaaagcaggccccacattagcccagtcccgggagagtaaggaaaacagtgcaaagaaagagatgaaatttgaggacccgtggctgaaacgagaagaggaagtgaaaaaagagacggctcatcccaatgaagaagggatgatgaggtgtgagactgccacgggcccctcgaatgctgagaccagagcagagcaggagcaggacggaaagcccagtccgggagacaggctcagcagcagcagcggagaggtgtcggcctccccggtcactgacaacttcaggagggtcgtggatgggtgtgagatggccctgcccggtttggccacccagagccccgtgcatcccaacaaaagcgtcaagtccagcagccttcccagggcctttcagaaggccagccggcaggaggagccggacagcctctcctattactgcgctgctgagaccaacggggtgggtgcagcctcgggcaccccgccctccaaggctaccctggaggggaaggtggcttcccccaagcactgtgttctggctcggcccaaagggactccccctctgccccctgtccgaaagtccagcctggaccagaagaaccgggccagccctcagcacagtgccagcggcagcggcaccagcagccccctgaaccaaccagccgccttcccggcgggcctcccagacgagcctagcggcaagacgaaggacgccagcagcagcagcaagctcttcagtgccaagctggagcagctggccagcagaagcaactcgctgggcagggcgacagtcagccactacgaatgcctctccctggagcgggccgagagcctgtcctccgtgagctcccggctgcacgcgggcaaggacggcaccatgccccgcgcggggaggagcctgggccgcagcgccgggacctcgccccccagctccggggcctcgcccaaggccggccagtccaagatctccgccgtgagcagactcctcctggccagccccagagcgcgcggcccgtccgcctccaccaccaaaaccctcagcttctccaccaagtccctgccgcaggcggtgggccagggctccagctcgccccccggtgggaagcacacgccctggtccacgcagtccctcagcaggaacaggagctcgggcctggcctccaagcttcccctgcgggccgtcagcgggcgcatctcggagctgctgcagggtggcgcgggcgcccggggcttgcagctgcgggccgggcccgaggcggaggcgcgcgggggggccctggccgaggacgagcccgcggccgcgcacctgctcccgtcgccctacagcaagatcacgcccccgcggaggccccaccgctgcagcagcggccacggcagcgacaacagcagcgtgctgagcggggagctcccgccggccatggggaagacggccctgttctaccacagcggcggcagcagcggctacgagagcgtgatgcgggacagcgaggccaccggcagcgcgtcctcggcgcaggactccacgagcgagaacagcagctccgtgggcggcaggtgccggagcctcaagaccccgaagaaacgctccaatccaggttctcagagacggaggcttatcccagcactatccctggacacctcttcccctgtgagaaaaccccccaacagcacaggcgtccgctgggtggatggccccttgcggagcagcccgaggggccttggggaaccctttgagattaaagtctatgaaatcgatgacgtggagcgcctgcagcggcgacgagggggtgccagcaaggaggccatgtgcttcaatgcaaagctgaagattctggaacaccgccagcagaggatcgccgaggtccgcgcgaagtacgagtggctgatgaaggagctggaggcgaccaaacagtatctgatgctggatcccaacaagtggctcagtgaatttgacttggagcaggtttgggagctggattccctggagtacctggaggcactggagtgtgtgacggagcgcctggagagccgtgtcaacttctgcaaggcccatctcatgatgatcacctgcttcgacatcacctccaggcgccggtagatgagccagacccttgtcctagtggtcccccgctccccaggacttcagagatgttgcacgcccctaggccctctgtgctggggcatcaaagacaatgaatgaggatgaaggttggtggcaagtctggagcgggcgttgagcggaaggcgagttttcttttgttttctgtaggaaaggtgcaaacgtcaaacaccgtggaaggagaaaaggatgggaagcccgaggggtgtccaagccctgtgagactgaaaaagcactttgaggaaccttaaagaccttgtttgtacataagaactgctagcaaaagagacctcactcttctcttgctttcgtgagaaaggaggggcgtggatgtaggattgctgtggaaagcgaacacaaaacaacccagaatgactgattaagtgccttgcaaatctttattattatccaaacatttatgttcatactttcttgtgtacagatggtgctagtcaagatgaaaacaacaaaacaaacaagaaaaacattttggaaatgtattcacagctctttttctcttggtgttttatcctatttctgacttgctgtttctaagtaagttgtgtttgtagagctatttcttaatcagtattgcttatgaataaatattacctgtcttttatggtt

SEQ ID NO: 32465 - DNA, 1425 bp, Homo Sapiens
atggagctggactccgaagaggccctgggaaccaggacagaggggcctagtgttgtccagggctgggggcacctgctccaggccgtgtggaggggccctgcaggctcggtgacgcagctgctgcggcaatggtgccagcgtggaggagaggtgcacctgcgctggggggtgaaggggtcccttctctgggtggggcaggatgggggtcccagcactggggaccacgcaggccggaccccgctccacctggccgtgctgcggggccacgcgcccctggtgcgtctcctgctgcagcgaggggccccggtggcgacggtggaccgggcggggcgcaccgcgctgcacgaggccgcctggcacggacactcgcgggtggccgagctgctgctgcagcgcggggcctcggcggcggctcgctccgggacggcctcacgccgctgcactgggccgctgccctgggccacacgctgctggccgcgcgcctgctggaggctccgggcccgggacccgcggcagcggaggcggaggacgcgcgcggctggacggcggcgcactgggcggcgcgggcgggcggctggcggtgctggagctgctggcggccggcgtcgcgggcctggacggcgccctgctcgtggctgccgctgcggggcgcggggcgcgctgcgcttcctcctggcgcgcggggcgcgggtggacgcccgggatggcgcgggggccacagcgctgggtctggcggccgccctaggccgctcccaggacattgaggtgctgctgggccacggggcagacccaggcatcagggacaggcatggccgctctgcgctgcacagggctgccgccgacggacacctgcttgccgtccagttgctggtcacccagggggccgaggtggatgcgcgggacaccctgggcctcacacccctgcatcacgcctctcgggaaggccacgtggaggttgccggctgcctgctggacaggggtgcccaggtggatgctaccggctggctccgaaagacccccctacacctggctgcagagcgagggcatgggcctaccgtggggcttctgctgagccgaggggccagccccactctgcggacgcagtgggccgaggtggcccagatgcctgaggggacctgccccaggcgctgcctgaacttggaggggggcagaaggagtgtgagggcatagagtccacgggctgagccagacagcaggctccaggctccaccgccccagtgatttccaggctctctggctgaggctgcctgcctgaaggggacatcagggaagaggcttccggaggaggggatgggagaaagtaggggatgtggcttgagctgcagtcacaggccttggctggaccagggatggcccccagctcccaggagggcccactgaccctgcagctccagccttctccat

SEQ ID NO: 32466 - DNA, 8114 bp, Homo Sapiens
atggctgcggcgcctgggctgctcgtctggctgctcgtgctccggctgccctggcgggtgccgggccagctggaccccagcactggccggcggttctcggagcacaaactctgcgcggacgacgaatgcagcatgttaatgtaccgcggtgaggctcttgaagatttcacaggcccggattgtcgttttgtgaattttaaaaaaggtgatcctgtatatgtttactataaactggcaagaggatggcctgaagtttgggctggaagtgttggacgcacttttggatattttccaaaagatttaatccaggtagttcatgaatataccaaagaagagctacaagttccaacagatgagacggattttgtttgttttgatggaggaagagatgattttcataattataatgtagaagaacttttagggtttttggaactgtacaattctgcagctacagattctgagaaagctgtagaaaaaactttacaggatatggaaaaaaaccctgaattatctaaggaaagggaacctgaacctgaaccagtagaagccaactcagaggaaagtgatagtgtattctcagaaaacactgaggatcttcaggaacagtttacaactcagaagcaccactcccatgcaaacagccaagcaaatcatgctcagggagagcaggcttcatttgaatcttttgaagaaatgctgcaagataaactaaaagtgccagaaagtgaaaacaacaaaaccagcaatagttctcaggtctcaaatgaacaggataagattgatgcctataaacttttgaaaaaagaaatgactctagacttgaaaaccaaatttggctcaacagctgatgcacttgtatctgatgatgagacaaccagactcgttacttcattagaagatgattttgatgaggaattggatactgagtattatgcagttggaaaggaagatgaggagaaccaagaagactttgatgagttgccattacttacctttacagatggggaagatatgaaaactccagcaaagtctggcgttgagaaatatccaacagataaagagcagaattcaaatgaagaggacaaggttcagctaactgtgccccctggcatcaaaaatgatgataaaaatatactaacaacctggggggacactatcttctctattgtcacaggaggtgaagaaacaagagatacgatggatttagagagctctagttcagaggaagaaaaagaagatgatgatgatgcattagtcccagatagcaaacaggggaaaccacagtcagcaacagattatagtgaccctgacaatgtagatgatggtctttttattgtagacattcctaaaacaaataatgacaaagaagtaaacgcagaacatcacattaaaggaaaagggaggggagttcaggaatccaagaggggcctggtacaagataagacagaattagaggatgaaaatcaagaaggcatgactgtgcacagttctgttcacagcaataacctcaactctatgccagctgctgaaaagggtaaagacacattaaaatcagcttatgatgatacagaaaatgacctaaaaggagcagctattcatatctcaaaaggaatgctccacgaagaaaagcctggagagcagattttggaaggtggctcagagagtgaatctgcacagaaagctgcagggaatcaaatgaatgacagaaagattcaacaggaatccctgggtagtgcaccactcatgggagatgaccaccctaacgcatccagagacagtgtggagggagacgctttggtaaatggggccaaactgcacacgctttcagtggagcatcaacgtgaggaattgaaagaggaattagttcttaaaactcaaaaccaacctagattctcctctccagatgagattgatttgcccagagaactggaagacgaggttcccattctgggaagaaatcttccctggcaacaagaaagagatgtggctgccacagccagtaagcaaatgagtgagaagataaggctctctgagggagaagccaaagaggactccttggatgaagagttttttcatcacaaggcaatgcagggcacagaggtaggacagacagaccaaactgacagcacaggaggaccagctttcctttctaaagtagaagaggatgattatccctctgaagaactactagaggatgaaaacgctataaatgcaaaacggtctaaagaaaaaaaccctgggaatcagggcaggcagtttgatgttaatctgcaagtccctgacagagcagttttagggaccattcatccagatccagaaattgaagaaagcaagcaagaaactagtatgattttggatagcgaaaaaacaagtgagactgctgccaaaggggtcaacacaggaggcagggaaccaaatacaatggtggaaaaagaacgccctctggcagataagaaagcacagagaccatttgaacgaagtgacttttctgacagcataaaaattcagactccagaattaggtgaagtgtttcagaataaagattctgattatctgaagaacgacaaccctgaggaacatctgaagacctcagggcttgcaggggagcctgagggagaactctcaaaagaggaccatgagaacacagagaagtacatgggcacagaaagccaggggtctgctgctgcagaacctgaagatgactcgttccactggactccacatacaagtgtagagccagggcatagtgacaagagggaggacttacttatcataagcagcttctttaaagaacaacagtctttgcagcggttccagaagtactttaatgtccatgagctggaagccttgctacaagaaatgtcatcaaaactgaagtcagcgcagcaggagagcctgccctataatatggaaaaagtcctagataaggtcttccgtgcttctgagtcacaaattctgagcatagcagaaaaaatgcttgatactcgtgtggctgaaaatagagatctgggaatgaacgaaaataacatatttgaagaggctgcagtgcttgatgacattcaagacctcatctattttgtcaggtacaagcactccacagcagaggagacagccacactggtgatggcaccacctctagaggaaggcttgggtggagcaatggaagagatgcaaccactgcatgaagataatttctcacgagagaagacagcagaacttaatgtgcaggttcctgaagaacccacccacttggaccaacgtgtgattggggacactcatgcctcagaagtgtcacagaagccaaatactgagaaagacctggacccagggccagttacaacagaagacactcctatggatgctattgatgcaaaccagcaaccagagacagccgccgaagagccggcaagtgtcacacctttggaaaacgcaatccttctaatatattcattcatgttttatttaactaagtcgctagttgctacattgcctgatgatgttcagcctgggcctgatttttatggactgccatggaaacctgtatttatcactgccttcttgggaattgcttcgtttgccattttcttatggagaactgtccttgttgtgaaggatagagtatatcaagtcacggaacagcaaatttctgagaagttgaagactatcatgaaagaaaatacagaacttgtacaaaaattgtcaaattatgaacagaagatcaaggaatcaaagaaacatgttcaggaaaccaggaaacaaaatatgattctctctgatgaagcaattaaatataaggataaaatcaagacacttgaaaaaaatcaggaaattctggatgacacagctaaaaatcttcgtgttatgctagaatctgagagagaacagaatgtcaagaatcaggacttgatatcagaaaacaagaaatctatagagaagttaaaggatgttatttcaatgaatgcctcagaattttcagaggttcagattgcacttaatgaagctaagcttagtgaagagaaggtgaagtctgaatgccatcgggttcaagaagaaaatgctaggcttaagaagaaaaaagagcagttgcagcaggaaatcgaagactggagtaaattacatgctgagctcagtgagcaaatcaaatcatttgagaagtctcagaaagatttggaagtagctcttactcacaaggatgataatattaatgctttgactaactgcattacacagttgaatctgttagagtgtgaatctgaatctgagggtcaaaataaaggtggaaatgattcagatgaattagcaaatggagaagtgggaggtgaccggaatgagaagatgaaaaatcaaattaagcagatgatggatgtctctcggacacagactgcaatatcggtagttgaagaggatctaaagcttttacagcttaagctaagagcctccgtgtccactaaatgtaacctggaagaccaggtaaagaaattggaagatgaccgcaactcactacaagctgccaaagctggactggaagatgaatgcaaaaccttgaggcagaaagtggagattctgaatgagctctatcagcagaaggagatggctttgcaaaagaaactgagtcaagaagagtatgaacggcaagaaagagagcacaggctgtcagctgcagatgaaaaggcagtttcggctgcagaggaagtaaaaacttacaagcggagaattgaagaaatggaggatgaattacagaagacagagcggtcatttaaaaaccagatcgctacccatgagaagaaagctcatgaaaactggctcaaagctcgtgctgcagaaagagctatagctgaagagaaaagggaagctgccaatttgagacacaaattattagaattaacacaaaagatggcaatgctgcaagaagaacctgtgattgtaaaaccaatgccaggaaaaccaaatacacaaaaccctccacggagaggtcctctgagccagaatggctcttttggcccatcccctgtgagtggtggagaatgctcccctccattgacagtggagccacccgtgagacctctctctgctactctcaatcgaagagatatgcctagaagtgaatttggatcagtggacgggcctctacctcatcctcgatggtcagctgaggcatctgggaaaccctctccttctgatccaggatctggtacagctaccatgatgaacagcagctcaagaggctcttcccctaccagggtactcgatgaaggcaaggttaatatggctccaaaagggccccctcctttcccaggagtccctctcatgagcacccccatgggaggccctgtaccaccacccattcgatatggaccaccacctcagctctgcggaccttttgggcctcggccacttcctccaccctttggccctggtatgcgtccaccactaggcttaagagaatttgcaccaggcgttccaccaggaagacgggacctgcctctccaccctcggggatttttacctggacacgcaccatttagacctttaggttcacttggcccaagagagtactttattcctggtacccgattaccacccccaacccatggtccccaggaatacccaccaccacctgctgtaagagacttactgccgtcaggctctagagatgagcctccacctgcctctcagagcactagccaggactgttcacaggctttaaaacagagcccataaaactatgacctctgaggtttcattggaaagaaagtgtactgtgcattatccattacagtaaaggatttcattggcttcaaaatccaaaagtttattttaaaaggtttgttgttagaactaagctgccttggcagtgtgcatttttgagccaaacaattcaaaaatgtcatttcttccctaaataaaaatcaccttttaagctagagcgtccttacaactttgaaatgtgcaataaagaatacctgtgttttagctaatgtagcatatgtaattgcaaaatgatttagaatgtcatgaaaaatatgaacatttcctgtggaaatgctttaagaacatgtatttccattatcctatttttagtgtacaccagctgaatacggagcaatggtgtttataagcgtttttttaaactatctggtcacaaagactgttacgctaaaaatgtttactaaaagatcactaaactatctcccctcttgctgaagttctttgtagtaatagctcataaaaatttgtttattaatatttcccaagtgtctgttgactcattggactgttatgaggcttgtgccatttggggaacatgtaaactcaggctcccagaactgaagatggtggctggtggcacacttccggctgctcctccgtcacctgtgaactctacaagtgacgtctttttatttcaaagaagtttatttcccacttgtatagcattcacatgctttctttacgatcctcattgtctatttgagaatggttttctgagagtgagtttacattagtagcaagagttgtttgacctgatgttccattgtttttaccattcctgtagaaaaagggtgcacaacagaaaaatgaaaatgatgtgtcatggccgtaaaagtatagaaatctttaaaaattttaaaatgtacagtcccttatctatctttcccattccttgccactgatttttgaggaatataataaaaagattggaagagtataatgccatgagaaagaatgatttaggactgtgagggttataacatgccctaggtcagcaaccaagggttgaaatcagttctgttttagggggaaatggggggggcgacagatattattccaaaattaatattaattaatatttaaacgttggtgtttttatttaaaaatcagtaactaaccatctggaattgcaccatacttaaagtcttatccattactacactgtctttaaaacaatgtttctttaaatactctacaacgtttctaagaacgaacttcagacattttaattacagtaataatagcactccttttaaggagtttcagatccacactaaaactaaaatcataaaaggctgatacttttgtttgctgctaggctatattcttccattctttgaagtcctatgatgtaatatttttgaaacctagtgtatgtcttgtcactgttgtgatatttaatcgattaagaataccttgtaaaaaggagcaaaagcttcaatgtgaaacaattttctctctttatactaaacaactgaagatagatagtttagaaagataaggacctttgaaagaagacaactctgtcaaagttcataaggaatataaaaattcttcaggaaaagagaattcaatctatatgtcctcccgtttaatatcaagaatagaagaaattaagaggaaaactccacagaagagcataggccacttttagccatgtaaaaataagattaagtcacaaatacaacttttgaatttacctgtcaatatctctttaggacacaaaacaatgctgaagttaatataatttctaattttaaatgtcatttaagtgtagattatgccatctaggaaggtaagtaggaaaggtaaattaaatctatttttaaaattcaaaatattagagtatttttcccctctaaagccttttttggtgattattctgtatctgacataattgagaaactggtaagctgtaaagattccagtgtagcttctctgagaagttgtgagccagtccataactgcttcctcacatccatctgattgcaccatttctgcagcaaaccccaaagcagggtgccaatatgcagatggcatagggagtatcatccctcagccaaatcacttttccatctctaaagtttcatctattttggaagtcatctccaactaattgtgtctggatttagttgctaaaattgtcttatttatgaagcagcaatattcagcctgaaagcatttctgccatagttgttgtagttatatcgccaatggctgatttttttcattggaaagtaaatttaagtaattcgtgggatgtggtatattctgtgtcaacttcaagataatcactcattttctcgttatattcaggtctgaattaaagttaagttaatcac

SEQ ID NO: 32467 - DNA, 9161 bp, Homo Sapiens
ccaggaggagtgtcaggaagtgcatcagcctgtttcgggaggacagcaccttggccttggcagtggggtctgaatctcccctggccacccctgcgtccccatcggcggcaccagagccggagaaaggggttgtgagcgttcaggaacggatcagaggctggactgccgagagctcagaggctaagcccgaggtcaggaggaggacgttccaggctcggccgctgtcggcggatttgaccaaattgttttcaagttcagcttccagcaacgaagtcaaatatgagaagagtgctgagctgagcggcgagtttcctaaggaaccgagagaaaagcaaaaggaggggcacagtttggatggagcatgcatcccgagaagcccctggaagcctgggacactccgggataagtccaggcagacggagcagaaggttagctctaaccaagaccccgacagctgtcgcggtggaagctcagtggaggccccgtgcccttctgacgtcactccagaggatgaccggagcttccagactgtgtgggccacagtatttgagcaccacgtggagagacacacagtggctgaccagtcgggacgttgtctctccaccacaccccctggtgacatggcccatgcccgtgtctcagaacccaggccgaggcctgagatgggctcttggctgggcagggacccaccagacatgacaaaactgaagaaagagaactccagagggtttgacaatcccgagacggagaaattgggaccaaccacccttttgaatggtgaactgagaccgtatcacacgcctctccgggacaaataccctttgtctgaaaaccacaataataacaccttcctcaaacacttggaaaatcctcccacatcgcagagaattgagcccagatatgacattgtgcatgcagtgggagagcgtgtgcacagcgaggccatctcaccggcaccggaggagaaagcggtcacgctccgcagcctcaggtcttggctctcactgaaggacaggcagctgtcccaggaggtcacccctgctgacctggagtgtggtttggaaggtcaggcggggtccgtccaaagggccagtttgatttgggaagctcgaggcatgcctgaggctagtggaccgaagtttgggggcaattgcccgtttcccaaatggacaggcggggcagtggtgagctcgcacaaagccaccgtggcagtcagcgaagagcactgtgctcccggggccacctccgtcagggctatcaaggctgccatctgggaaagccagcatgaggggccagagggggccagaagcaagccaggagtgggagcaaggggcccaccccagggatgccccctcgatcctctttccagggctacgaatgggccttctgactcccaagcacgaacacatccagatgcatttgctgtgcagaaagggcccttcattgtagccgccagggagggtgatccagggccggcccaggtgccacagcctgcagtcagaatgcggaaagccggcgccatggaccagagaatggacagatggcggcggcggactttaccccccaacgtgaaatttgatacattcagttctcttgtcccagaggactctccacatgtggggcacagacgaacagattatgtgagccccacagccagtgccttaagaaaacctcaactatcccactacagggtggagacccaggaggtgaacccaggtgcttcacgggaccagacttccccagcagtgaagcaagggtcacctgtggaacccaaggcgacattttttgcagtcacctatcagattcccaatactcaaaaggcaaagggtgtggttctgtcaggagctgaaagcttgctggaacattctagaaaaatcactccaccctcgtctcctcattctttaacatccactttggtttctcttggtcatgaagaggcattggagatggcaggcagtaaaaactggatgaagggacgagagcatgaaaatgcaagcattttaaaaactctgaagccaacagaccgtccatcatctcttggggcctggagtctggaccctttcaatggaagaatcattgatgtggatgccttatggagtcatcggggatcagaagatggccctcgtcctcaaagcaattggaaggaaagtgcgaacaagatgtcccccagcggcggagctccccaaaccaccccgactctgaggagtcgtccaaaagatcttcctgtgagaaggaagactgatgtgatcagtgacacgttcccaggtaaaatcagagatggctacagatccagcgttcttgacattgacgccctgatggcagagtaccaggagctgtcgctgaaagtccctggggaggctcaggagaggaggagtcccaccgtggagcccagtacgttgcctcgggagaggcctgttcagctgggcggggtggagcagagaaggaggagcctgaaggagatgcccgataccgggggtctctggaaaccggccagttctgccgaaataaatcacagtttcactcctggcttaggcaagcagctggcagagaccttggagacagccatgggcaccaaatctagccctcccttctgggctctgccaccctcggctccttctgaaaggtatccagggggctctcctatacctgcggatcccaggaaaaaaacggggtttgctgaggatgacagaaaggcctttgccagtaaacatcatgttgcaaagtgtcagaattacctggctgagtcaaagccctctggtcgggaggatccaggcagtggggtcagggtgtcacccaaatcgccccccactgaccagaagaaagggaccccaaggaaatccaccgggcggggagaggaggacagtgtggcccagtggggtgaccacccacgtgactgtggacgggtgccgctggatatcaagagggcctactcagagaaggggccccctgccaacatccgagagggcctgtccatcatgcatgaagccagagagaggaggcgagagcagcccaaagggaggcccagccttactggagagaatttggaggccaaaatgggaccctgttggtgggagtcagggactggagacagtcacaaggtgctgccacgggacctggagaaggaggatgccccccaggagaaggagcgaccgctccagcaggtgtcccctgtggcctcggttccctggagaagccacagcttctgcaaagacaggaggagtgggccctttgtggaccagctgaagcagtgtttctcccggcagcccactgaacccaaggacactgacaccctcgtgcacgaagccggcagccagtatgggacgtggacagagcagtgccagagtggggagagcttggccactgagtccccagatagcagtgccacatcgacaaggaaacagccccccagcagccgtttgtcttctctgtcctcccaaacggagcccacctcggcaggggaccagtatgactgctccagggaccagcggagcaccagcgtggaccactccagcactgacctggaatccaccgatgggatggaggggccgcctccaccggacgcctgccctgaaaagagagtagatgacttctccttcattgatcaaacctcagtcctcgactcaagtgccctcaagacccgggtgcagctcagcaagagaagccgccgccgggcccccatctcccactccctccggcgcagccgatttagtgagtccgagagcagatcacctttggaggatgagactgacaacacgtggatgttcaaagactcaacggaggagaaatcacccaggaaggaggagtcggatgaggaggagacggcatccaaagctgagaggacccctgtcagccatcctcagaggatgcctgcgtttccaggcatggatccggcagtgctaaaggctcagctgcacaagaggccagaggtggacagtcctggcgagacccccagctgggcaccccaacccaagagccccaagtcccccttccagcctggggtgctgggcagtcgcgtgctgccttccagcatggacaaggatgagaggtcggatgaaccctctccccagtggctaaaggaattgaaatccaagaagaggcaaagtctttatgagaaccaagtttgaccaggcagggaacactgccacatctacgtaacagaagccttaaccatcagaacccgcagacgaggccgagctgctgccgtttcttcctgcacaacgcttacgtgcctgggcccttcccattggattgagaacgctatccagtgcccctgtcctcgccaggctctccctggatccagacgggaagacccaacctccaggagcactcgctcatctccccagacagcacttcaggctgggaaaggagccaggctgcccagaaacgtccatgtgggtggttttgctttttatgtaaaaatttgcatttctacctattttagacaccttcatcagctccaagaacatcagtgtgaggctggaattgtctccccaggttctgaaaaacacctgcatttgtgaaagcacctcctcacccgaccccggggcaggtctttttttggaaggacatttccaaggaagatcaaactgttcattttctgctgtagtctcggtgcagggtattaccgctgggttgaggttttctattctttttttttggtgagttccttcttccccttgaggaatcagcagttccaatttttaaacatactctccctgattatgtgtatttctctttctagtggggctgtgtgcatcgttggcctatgttattgtatgtcatttttgtttgctttagaaggcgataaagcaataattcagctaattttctttgaaacttgataggtatatatgtgtttacgttaaaggacaggaggaaagatgtgcgaataatttgttctgaagtatccagtcacctcaggttatcttatccctatccaagctgtttagaagttataattgtcactcttgtatttatttccatggcttcttttcatttgagctctggtttcggtagggtgacctttgccccttggccttaagggttcataaactgcagcccaagtggtggtgcctttgcttatgaatcatcagacctgccctagtaatctttttctccagagtcttctttgaacatgacgtgggctgctggcatggaggagttgttccaaactggcctcagaacagatgcatgaatgaagggtactttttgcttttgctcacctcattttccttcatctttcttgatgaatccattatttgcaaatgctgtcaaaacatgctttccttctccctggctacctctcaggagttcatttgtctctctgtctcagcttcctccctcatcttcctttacccctcttctctgtcttagtgggtggatgggcatggatagaaatcctctgtttctttaggttaggataaacacctgggccctggtgaggcagttgctgttcagcaccagggacagcaactgcagggctgtgaggccggagcccaccttgtgtcctgttcgatgagctttggttactgatgagcaattgccagatcatgtcacccacccagccttttacacctgggagcctcatgcatctgggtttgggagtttggccctgctgatgatagtttgttttctcttcattccctgaattagtcatcagttctccgtggccatttggggattcatgcctgcaactgcttcagtcgaattcttttttaaagatccagtttatgttttataataattttgatcttatggctttcaacgtcaataggatcccctttaaaaataccctgctagtgttttgttttgttttgtttttctgagacaaggtcttactctgttgctcaagctggagtggagtggcacgatcatagctcactaacacctgggctcaagtgattctcccacctcagcctcccaagtagctgggactacaggtgtatgctaccatgaccagctaatttttaaatatttttgtagagacaagggtcttaccatgttgcccaggctggtctcgaacttctgggctcaagcaattgtccctcctcagcctcccaaagtgctcggattacagacatgagccactgcacctggcctgaaacacattcctagtcttttgatcctgacttcttatctgggctgctgtctctctttccttcaggtggaaaggaccccttggtaccatctcaagcagtaggaaaggacctgctcttacatatattgatggtcctcatgcaaaactctcaattcttaattagtcatgtctcagctcaaggatatcagacaggaatgaaacacacttgaaaatgagattgacctggagattttttttccctaatctctcataccttaattggaaaaataatcaattaattctatgttaattaggatatacaaagttcaccctccttgaaagtgactagggcaagccctgaagatcttcctcacctccttttatttttctataaccttgtctcctccagcaccacagggaagacaatcacagtgggtcaagagcgaccctctttcacgtgggctctgccatgacctctgagacctgcttatgatcagtgcaatgaagttagaagtaactgatgattgggagcctttgcagatagctgggcaaatgggtgatttacttatccccattctaaatggagtgagctctctttgaggctaagcaaggaggcgttgtatgctagtttctagactttgcctggagacccctttggaaatctgtcttctttttaaactcacttaatatgccttaatcatctgtgtgtaatggagtcatccgctcctcaatctaaccctcctcccctggggctttggctgtcctcaatgagagtttcatgcagaatggaaaatcctctatatgtacaatctctctccccctcatttctcttcctcctcacctccaccacccctttgcacatcagcattttaacagctgatcttttgagaagcctgtatctttttcctcttcagtagatacccttcttcatggtcctttgcctaatcaaacagaggcttttggcctttgaaaatccatgacaaggcctcagaaatcagtgttgtggaggattactccatgccaccggagaaactctggtgaaagagaaacctcgtggtctttaggatgttgggattttgagtgaacctgacctgatagcctcaggattcagggaaaggacaatcagatggcggtgttttccagggggacgcgccaaatcatgtggtttcagacaattgtgtttgcctttgtgcctccctggaagggaggccaactaagggtatcaccaagaagccaaaagagaaataggcatgagcctgtggttttaaactttacaggctgggcaaaggatttagaaagacccttagcatgattttcctaaaagagaccttagctgctccaacctggtgctgatagctgctttgttgatctatgctttaaaatttttctttataatgcccccagatggctcctggaactagtcgtaattgcaaactgtaaaaatccctcctccccagtgtagatatttaaaccagagtaagtgatggggagacattctgtggtctctgaatgtgccttccccctcaccgtgtgttaaaacacaaaagccgaagttccatggcatcatgattccgaggggctggagggataggacccactccacatctaaaggggatctgctttgggctcggtcccattagcgagtgggggactcttgctgtgtgctaagaggctgctaggactcacccagttggaattctgggtgggctcaggaagtttagagccacgtaaaaagctggtaggcatgagtgtgccaggtctttgccagcctgcgtctccttttgcaccccccaatccagagtttgctttcttttgactaaattggctcctgcagggggaagggcagaaagctaggccctctgctctggaaagtcggcctgaggtttccggcaagttaacccttaaaatggacacccctcagcccgccctcccctttggccttcccagaatctccttcagtggttgctctcacacctgtgccataacatcatcttccatgacttggacgggcacttccttgacaattcctattggcatcacacgggctacaaattatgctgttttctaaagaatttgaacttttttttttttcttttcttgagacacggtcttgctctgttggccaggctggaatgcagtggcacaatcatagctcactccagcctccaactcctgggctcaagcaatcctctcatctccacctccagagtagcctagatgacaggcgcacatcaccacgcccagctgatcttttaaatctgttttgtagaaacaggatctcactatattgcccaagctggtcttaaacttggtctcaagtgattctactgcctcagcctcccaaagtgctgggattacaggcctgagccaccatgcccagctgaatttgagctttttaataatctcattccacatagccttatagatcctgtaaatagggggggtcacaaaagtaatatattgtgttatggaagataattttgtactgtgctgtttcctaaatcataccaatatcctaaagtcatgcacttcccagatgatcgtgatcctccaaatgctttgtaagatggggcagggcgtggaaatatatatatatacacacacacacagagacacacacacacacaagtatagtatatattttcctaacctttcttctgggtccttcctcagatctttgagtcacgatagaaaaggagctcgagttctttgtgtaggaaagttaagcttcctgcctgcggtgttcttgcaattgccttaggaattcacaagctctaggagttctgaacggaaggcagacgagaggcactttatccagtcccagaaagaatctctaaccgtgtgactgagaagtcatctagaaaaacttatatttttaatgtaaaaacaaatggggcttaccagacctcacagagtattggacgtctacaagtgcttttatattttgtaactgtaaagaagtttcatatgcacagaagagcagttggaaatctggtcgactgcaataaaacaagatgacctttgcatgtacaaagatgttgcattcagactatgaaaatagcaaataaagctttggtgcaagttg

SEQ ID NO: 32468 - DNA, 8083 bp, Homo Sapiens
ctcgggcagcccagtctttgccatccttgcccagccggtgtggtgcttgtgtgtcacagccttgtagccgggagtcgctgccgagtgggcgctcagttttcgggtcgtcatggctggctacgaatacgtgagcccggagcagctggctggctttgataagtacaagtacagtgctgtggataccaatccactttctctgtatgtcatgcatccattctggaacactatagtaaaggtatttcctacttggctggcgcccaatctgataactttttctggctttctgctggtcgtattcaattttctgctaatggcatactttgatcctgacttttatgcctcagcaccaggtcacaagcacgtgcctgactgggtttggattgtagtgggcatcctcaacttcgtagcctacactctagatggtgtggacggaaagcaagctcgcagaaccaattctagcactcccttaggggagctttttgatcatggcctggatagttggtcatgtgtttactttgttgtgactgtttattccatctttggaagaggatcaactggtgtcagtgtttttgttctttatctcctgctatgggtagttttgttttctttcatcctgtcccactgggaaaagtataacacagggattcttttcctgccatggggatatgacattagccaggtgactatttcttttgtctacatagtgactgcagttgtgggagttgaggcctggtatgaacctttcctgtttaatttcttatatagagacctattcactgcaatgattattggttgtgcattatgtgtgactcttccaatgagtttattaaactttttcagaagctataaaaataacaccttgaaactcaattcagtctatgaagctatggttcccttattttctccatgcttgctgttcattttgtctacagcgtggatcctttggtcaccttcagatattttagagctacatcctagagtattctactttatggttggaacagcttttgccaacagtacatgtcagctgattgtttgccaaatgagtagtacccggtgtccaactttgaattggttgctggttcctctcttcttggttgtcttagtggtaaacctaggagtagcctcttacgttgagagcattctcctgtatacattaacaactgcttttactctggcccacatccattatggagtacgagtggtaaagcagctgagcagccattttcagatttaccccttctcattgaggaaaccaaactcagattgactaggaatggaagaaaagaatattggcctgtaataatctttctttgggcacaaagaagtactgtaaataaatgcttgtaaatatttcctccatcaccattgaactagactgatctgcttgacagacgtgggatctcagtatggtacttggacagcaggaatgatacatataatctgaacttgggaaattttggacctactaactctaagcctattttattttttataaaactatgtgacattttggttgagcagaatgtacgttagaccagcaaaatgttcctaatggttctaacttcgtgagtttacaatgttgtgattcatgcagggttaaagatgctttgtttttattttttaagtaccaaaattggtttcagaacactgataacactcagaaaaccacagtgtgttttcatatttggaactttgtaatagcgggagtagcagtagtccaaacctagtatagggaaaggataaaaataagtcaccttcaccaagagatgccaatgattaccaaacaacagacagttgccaaatactggtttctctttcccctgaaaatggcttttgttctcaaatgataagagagctaatacatttagctaatattctagctctctttattatggaacagatcttgatagatggtttaattttctcctaaagagaaataatcagttgagaatttgagaatgggttgtaattatcgctcacccattgggatggttcattgtttaaatatggcattttccccccttcagctgcaggttcctgagatttggtgcctgtgagctctgattgtaggaatgcatgtgacagtcccagtcctatggtaatgacttaggaggaatgcagataaaagtaccttgtaagataaatataaattggagttaggaatttcatgaacctcactatgaccaaaattaattttttgattcagtttgtctgtctgtctgtccttcccctctcttcttttttcagggtgaggtgctgtgtttcttatttcatacgagataaaacagagagaagttctctcttctccagcttgtccatttccccacttgaagaaaacttttgatatatatgccttactgagtacatgccccctttaatgttaacatgacttggagtaatttctgaggtttactgacaaacataaaaatccctttaattgtagtgtagttgttctataaaccatattttttcatgatgtggatattttcttctatttctttgtcttcatttaatttggtggtggtgaactttacttgctgattttcttttatttttcactgaatgaagtttgtgcttgaatgaagagtgtatcttaaaccccctttttttggacaggctgcacttggataaaataggcaccactgtgttgatatgtaattaaattcataactatttatgaatgtgaccattgttaaatttaattatagtgtatttctttcttgaatttcagtctgctgctttgtaaaaaataactgtaattgatatttcatttttaaaatttataaattccaatcattgtcattcaagttattagaaatgagtcacggcactaactcatggttctatactcattttaagaaattgtaaaggttgaggtgtatttggtgactttctctgagacacagatgaacgttggaaatagatgagaaatggatgcagaataatgcagatagtgatcccatgtttgttaattgccatcatggaagtcagagaattaaccaattaagtgacggtaactattttttgtataccttgttctttgtgatctataaaattaaactggataaaatgttaattgggggtagggaaaaagctttgttttaagatttctaagctaattattttaccgttttgttgaccttgtacacaagaatgagattaatctgtattatataagaaaagaactgataaatatttataaaatgacaaacttggaccacaggctttcttgaccttgtacagtatagtaaaaataccctttacttctgacattttaaggtcacgtcctatagtttgggggcccttttacttcaaaggtgtgtttctgccctcttttggttgtatcaaatttatttgaaaattgttttgtgctgtactttatgacttgtttccctatggtggtaaagaatgatgccatagtcagttttattgacattgttagatgaaagaaaagtagctgtcaacaaggggaaagtgaaattgagcaattcactgtttcaggatacttgaggatctttagtgtactgctgactctttttcttgttttgtctgccattcttgaaagtgcatcttgagagcccccatttgttgtgtagagatatagcagctgaagcaggacttcattccagatagctgtgtgcatttatgtcatgccaattactataacatttccaaagtatgaaaggtctttcaggcttatgcatgatattgtgggtgacttcatgccccagcctttctccccagcatacagtgagctgccttttggggagcaatgccatgataaggagcatacgtgcatgttttccgtactttcagaatagagtgccttagctaggccagaggctcgtattgtgtttctgctgaccaaagttgcatacacctgtaagaagtgtctttttaggttatggtattaaaaaagtcgtttcaggcttatcagataataattctcctatatttgaggggggcatgggataaaaagatttaataatacctggatagagaatgctaatgctgccttttgtgatcctttaatattatccatgcttttataaagtgcagtacacattttgacattgccacagtttacagtgtcattcttccacgaataggtaattgatagagtttatgggtcttagtcttaagggtaacagagtgaataccttccaaataaaaagctaaatattcctccttgtcattttaatgtcattattgaaatacttttaattctaattttcaaaagaaagctaaatgctgattgtggtttaggatgttacagtactaataccatcatgttatttattctaatatagaggcattgagaggaggggagtgtatgtctagagttaccccaattctaaataggtaccaaaagagtattgattatgacctggagcctgagctttgggagaatatacaaaggaaaaagcaggcatagtttccactttaaagggaagaagggactttaacatcctatgaatttgaaacatcctatgaatttgaaagtttcctaagtgttgttttcaaagaactggtttattttatagtcagtcaaaatgcatttggaatgtaccttgcttccataacagactttgactctatgacctatgaagaataaaaagataatctgaaggtgtttgagtcagaggctacttttcccctttatattttatatagaagcctatttgtaattcttcctcttcgttcttcacctgggtttcctcttatctacccaccacctaggacagaggctgcccactcaggtcttgccttgttgcccctagatgttgccacattcacatctccttgatggccttagatctcttgactagtcaaggactgggaacgtgccagggggaacaaagtaagcttgatgggctggaacttttgactttgggtccccaaacagccaaaaacagatacagaaatctttggttgtgtggatgcctgtgttcagagtggccttatcttgacctcagttctggatttaagtactctatagaaaatttgtgaagtcagaccagaattttctttgtcccatgaggtgtctttgtaagtcagcatgctcttgcttgaacaccctgtgggtgaataactttagtaagttagctgccagcattagaaccttccaggaagaattttaactagtatgctacatttgaagcactctgacatgtacatttaaagtgacagttttaaaagtaaaatggtgttaaatctctgaaacttgaacgtatgatgctctggacattttaggaagcttaagtaaatttctgattttcctttattgattatgtaacccacgtgatttgcatattttagtttttatgtttgacagtggtacaaatgactgacattggcaggcagttattgtagggtatatggttaatcacgattgtctaacttttccagagaaagtggtgatatgcttcttccttgcatggagctgtgggaattggatttgttggctcttcatttccagtgtttctacagtgcagaataaatgtaactttttaagcctgcatgctagtaatatgctttgctctttagtaaacaaatatgcaatagatagtaatctatctactttttttaaagcagggatctgctccctatctagacagatcttttaatgcattaatatttagagtagcaaaagaagttttgccatttgtagctctctcacaggtagcttaagcgagggggttgtgttgcatgtgcttagaaaggccaggatcccagaattggaaggtgccacatatacttttagaatattttaacaaaggcttgtctctaggaaaatccacttggactgcagcaggattgttctggtcttccacagaccattcacatggtctttctctccagagaatcattcttagaaagccaggctaaatcagagtagtgctgtttttaaagcaagtatattggatgatggctatagggtaccttaatgctgtgttgaaattggaagcagactgctcttcagcagcacatatactgcaactgaagttagagacagtactgaagacgagggagtagctaaatgctgtggatatttcatgtctgtttggctaatgtcttctcttgaggagtttctatgggtagcaattaaaattagaatttattttaaggtttttattaaaatatatacaatttgccataaattctagattctgatattcttgacaagcactttttgaatatctcaagagtaagttcttgacctggaacatatatagttagtacttgatgtcactaaccaagttgtagaaggagcctgttataattctgcaagatctgtgaatagcattataaatctggggcaggtgcctgtaatcccagcactttgggaagccaaggcaggtggattgcttgagcccaggagttcgacaccaacctgagcaacatggcgaaaccccgtctgtaataaaaatacaaaaaaattagctgggcatggtggcatgtgcctgtaatcccagttactggggaggctgaggcaggagaatcacttgaacctgggagatggagattgcagtgagcagagattgtgccactgcactccagccagagtgacagagcaagactccatctcaaaaaataataataaaaataaacaaatctgtttaaattactgttgcctttcagcattagactttgagtttaataactacaaattgagactgctcacaatattaactttttttgtaggttattttgttgtttagataacttgcctccctagaggagcattcaggagataaagacctagctacatgtaatgatatgatcatttcaaaaatgtgccaagaaagcaaaattcattattgaactctaaatttctgggtgtttttttttttaaagtagcattttctctgggtaaagggaaaggcaatgaatgattgccaacatgtaaactccctgctgcccgccttcccccagtcccctccatctaacataatacagtaaatttgtagccagttgtagaaaaagaaattgatatctttctgagtaaggtttcatgccctgtgactaagaataggtggaggaatcatggccaaatcaaatatgaattgtttagcttggtcctgttgcagttggctttctgtagtgttctgaaacaagaggacgattccattccttctcaggaacctagaaacaacaccgcttgagcaactggaatatgtttgctgcaagcagaatattttggggagaggaagagtagtttaattcaagtagtttaattgaacatattagtcattggtctgtctgggacgtgcagtgttcatagtagcaatgtatgtaccatttattttatctggttgtgtgtgatgtgtgtgtatgcctatttaatatgtacacatatattcactacatatgtatgtatgatatattcatatatacatgcagtctgcttgattatcagcaaaatggtcagcctttatcagatagtttcttcatgtggagttcatctgcatgtggcccttactctgaagcctcttcctgatctggagccacagtctgtctgtcttccagttcatctcagtcctcgagaaaggccctttaaatatgtcactttcccattttcctttaaccatgggttgtgtgagccagaaagagctttgagaaagatggctgcttccaccagggtggaggcttctaggtctgcatgatgatggggcccgtttctggccagagggtggctctgggagcagttgtgctgcgggcttgctgggggagaactctaactgttgcagaaacagagcttcatggcttgcttaaattacttagctggaatattttaaagtgtcagataatgtgatgtacaaagagagtatgccgatgcatttcattgtttttgcattatctgtatcagtgtttcccattgctagcccgaataatcaagaccagactgtttcttgtcactggattctggaagccttgccctttcaactggatttatgtttgtttctgctgctgtgaaaccccaaagtaatgcagtaggttttaattgaaaattgtttaattctattattgataattatttattgtaataaaagtaaaagagtaatttttaaatcctttt

SEQ ID NO: 32469 - DNA, 3945 bp, Homo Sapiens
atgccatcactgacctgggatgctgttaatctggactcagattctctcaccggggaagattccctgcttgattgctctctgctctctaaccctactactgaccttctggaagagtttgcccccacagcaatctctgctccagtccataaagctgcagaagatagtaatctcatctcaggttttgatgtccctgagggctcggacaaggtggctgaagatgagtttgaccctattcctgtattgataaccaaaaacccacaagatctccagagggagtccaatccctgtcctgtaataactgtagagcactttaaagaatcactgggtgttaaaggccttccgctgtatccagacccctccagagtacctggcacaaagactcagaacaacttagaatctgactacttggccagagatggcccttcaagcaacagctcattccacagcagcgaagaggaagggactgaccttgaaggagacatgctggactgcagtgggtctcggcctctccttatggagtctgaagaagaagatgagagctgcagaccccccccggggaagctgggaggagccgttccattcgctccaccagaagtctctcctgagcaagcaaagacagtgcaaggtggaagaaagaaccagtttcaagccttcacacagccagccactgatgggctcagtgagccagatgtttttgccatagctcccttcaggagctcaagggttccaaatgatgacatggacattttctccaaagccccatttgtctccaagagcagtatggctccttcccagccagaggagtcagacgtgtttttgagagctcctttcactaagaagaaaagcatggaggagttaacagttatccaatgcacctcccaggagctgcctgcacagaccggtctcctcagtcagacaggtgatgtccccctgcccgcgggccgtgagagagctgtgtacacctctgtccaagctcagtattccacagctggttttgtgcaacagtctaacctcctgtcccattctgtacaagcagcagaccatctggacagcatctctcccaggggatcctgcctggaatctgggggtcattctaatgacagaaacaaaggacctcagctccagaaagaagctgtctcaggccccatggctggcaaaccattccgcccccagtccttatccaagtattcccgtcactatagcccagaagacgagccaagtccagaagcccagcccattgctgcctacaaaattgtttcacaaaccaacaagcagtcgatagctgggtctgtttctatcacatccctttcctccaggactacggagctgccagctgctgatccatttgctctagcacccttcccttcaaaatcaggcaagaaaccctaggagcaaaacctgagcctcaagcctcttgtctctatcccaccctcaatacccgccatggcactcccagcttagccttctgaagaagaaatattatcagttcttatatttcaattccctgcgtcagagcagaattgcttgacccagggaggcagactttgcagtgagccaagattgtgtcattgcactccagcctgggcgagaagagcaaaactccgcctcaaaaaaaaaaaaaaaattgtcactggagacatgatgggtggagactctacataccttctttgaatacagaaacggatgcaaacacatgcaaattacttttttttttttttttggtgatgcatgaaaaaactttgacttgtggattacattaattattagtaacagttagattctgccgacttgtattacagtagggtcttatttccttaaagagaaaaaaaaatacagtcatgccccacttaatgatgagggagacattcagagaaatgcatccttaggtgattttgtcattgtgtgaacatcacagagtgtacttaacacaaacctagatggcacggcctactacctacctaggctatatggtccagcctgttgctcctgggctacaaacctgtacagcatgttactgtactgaatactgtaggcagttgtaacacaatggtaagtatttctgtatccaaacattttagacatagaaaaggtacagtaaaaatatggtataatcttatgggaccatcatggtatatgtggtccatcattgatggaatcgtttttatgcagcacatgactgtatataatcaacaaacaactctactttcttgttttcgtttgttgtgtttttgctttacacatttgatagggaacatagaagttgtgacctttcatttcagtggaaagcattgagccagaatatatttattcctaaaccatcgagccacacatgcattgatgaaccctgaaagaatccacagtaattgactaacaggcagtactgaatgaaagatgtcatatgtggtgaaaaatatttaatatatcagtttcttgggctcacatacagccctttagttccaagtgcttggttagattagaaaatgggatgaacacaatttgatgctgaagcagctgctgagcagcacccagggagtctaggtcatacgccctatattgttttcggcccacttattgttgagttgaaaagtctcatatttgtagactagagtgtatgtgtttagaggctcatgttgtatctgagttttctctggcaactaagatctctttctaaacgttctagaaagatactggtatcttactggcccattatttagtaagttttagaatacatgtacatcagtgttttcaactgcttggtggacatttcactgatgcataatcaaagtagcagattataatcatcagagtgatctgacaaggaaattctgtatttgcttccataaagaaaaataatcaaaacatatatcagatataatatatatgcagtatatcacataggaaattttattgtaggaaattagagaaggatgctactcaattcattctctagcaggaagaatacagcttaaaaatcacttgggtccctttaataaagaaaagtgtgattctgtgttgtgtgtttggaactgaaattggagaacacgtgccagtcgactgtgaaatggttgctggataaaaccacagatgtggttttatccgagaaatgtgggactgaaattattttgatgagaggtacataagagagctgcagaaaagactgtagcttctgaggaggcaggagtaccttgttaatatccaaaccacccctgagttctaatgttccaactccacctaaacgaggaattggaaactttaaatggaattatctaatttaaattcttagttttttctttgtctttctcagctgatacttgtagttttgttttgttttttaaccaccaagaacacttgcaagtttgttactgaaaacatcactaaaggaaaagaagagtttcaaaatgcttgaaaagtagtatgtggttgggaattgtttttgttcaagtccctggaagtcctcttggcttagctcccttgttcctgttcccacttcatttccttacttaacattcccctattttgagcatgtcaataagtgcatgatgaatggcacagttgaatgatcatgttaactttaattgcttcctttgttgctgtaaacagtttcttgttaagtttcagccaagtctgtgacaatctcaccaaataagaatgaaatgggcggggtgtggtggctcacacttggaatcccagcactctgggaggctgtgttgggccgatcgcttgagctcatgagttcaagaccaacctgggcaacatggcaaaaccttgtctctacaaaaaatacaaaaattagccaggcatggtggtgcacacctgtagtcccagctacttgggaggcttaggtgggaggatggcttgagcacgggaggcagaggttgcactaagccaagatcgtgtcactgcactccagcccaggcaatagagccagaccctgtctcaaaaaaa

SEQ ID NO: 32470 - DNA, 5540 bp, Homo Sapiens
atggagagcagtgagggcaggagagtggagaacagctctgttgaggggacggaggaggaaaaggagaatggaggaggaccagtaaccggcagggtcacggaaacccagggtgggcagacaggctcagagctcagcccagttgatggacctgttccaggtcagatggactcagggccagtgtaccatggggactcacggcagctaagcgcctcaggggtgccggtcaatggtgctagagagcccgctggacccagtctgctggggactgggggtccttggcgggtagaccaaaagcccgactgggaggctgccccaggcccagctcatactgctcgcctggaagatgcccacgatctggtggccttttcggctgtggccgaagctgtgtcctcttatggggcccttagcacccggctctatgaaaccttcaaccgtgagatgagtcgtgaggctgggaacaacagcaggggaccccggccagggcctgagggctgctctgctggcagcgaagaccttgacacactgcagacggccctggccctcgcgcggcatggtatgaaaccacccaactgcaactgcgatggcccagaatgccctgactacctcgagtggctggaggggaagatcaagtctgtggtcatggaaggaggggaggagcggcccaggctcccagggcctctgcctcctggtgaggccggcctcccagcaccaagcaccaggccactcctcagctcagaggtgccccagatctctccccaagagggcctgcccctgtcccagagtgccctgagcattgccaaggaaaaaaacatcagcttgcagaccgccattgccattgaggccctcacacagctctcctctgccctcccgcagccttctcattccaccccccaggcttcttgcccccttcctgaggccttgtcacctcctgcccctttcagatctccccagtcttacctccgggctccctcatggcctgtggttcctcctgaagagcactcatcttttgctcctgatagctctgccttccctccagcaactcctagaactgagttccctgaagcctggggcactgacacccctccagcaacgccccggagctcctggcccatgcctcgcccaagccccgatcccatggctgaactggagcagttgttgggcagcgccagtgattacatccagtcagtattcaagcggcctgaggccctgcctaccaagcccaaggtcaaggtggaggcaccctcttcctccccggccccggccccatcccctgtacttcagagggaggctcccacgccatcctcggagcccgacacccaccagaaggcccagaccgccctgcagcagcacctccaccacaagcgcagcctcttcctagaacaggtgcacgacacctccttccctgctccttcagagccttctgctcctggctggtggcccccaccaagttcacctgtcccacggcttccagacagaccacccaaggagaagaagaagaagctcccaacaccagctggaggtcccgtgggaacggagaaagctgcccctgggatcaagcccagtgtccgaaagcccattcagatcaagaagtccaggccccgggaagcacagcccctcttcccacctgtccgacagattgtcctggaagggcttaggtccccagcctcccaggaagtgcaggctcatccaccggcccctctgcctgcctcacagggctctgctgtgcccctgcccccagaaccttctcttgcgctatttgcacctagtccctccagggacagcctgctgccccctactcaggaaatgaggtcccccagccccatgacagccttgcagccaggctccactggccctcttccccctgccgatgacaagctggaagagctcatccggcagtttgaggctgaatttggagatagctttgggcttcccggccccccttctgtgcccattcaggaccccgagaaccagcaaacatgtctcccagcccctgagagcccctttgctacccgttcccccaagcaaatcaagattgagtcttcgggggctgtgactgtgctctcaaccacctgcttccattcagaggagggaggacaggaggccacacccaccaaggctgagaacccactcacacccaccctcagtggcttcttggagtcacctcttaagtacctggacacacccaccaagagtctgctggacacacctgccaagagagcccaggccgagttccccacctgcgattgcgtcgaacaaatagtggagaaagatgaaggtccatattatactcacttgggatctggccccacggtcgcctctatccgggaactcatggaggagcggtatggagagaaggggaaagccatccggatcgagaaggtcatctacacggggaaggagggaaagagctcccgcggttgccccattgcaaagtgggtgatccgcaggcacacgctggaggagaagctactctgcctggtgcggcaccgggcaggccaccactgccagaacgctgtgatcgtcatcctcatcctggcctgggagggcattccccgtagcctcggagacaccctctaccaggagctcaccgacaccctccggaagtatgggaaccccaccagccggagatgcggcctcaacgatgaccggacctgcgcttgccaaggcaaagaccccaacacctgtggtgcctccttctcctttggttgttcctggagcatgtacttcaacggctgcaagtatgctcggagcaagacacctcgcaagttccgcctcgcaggggacaatcccaaagaggaagaagtgctccggaagagtttccaggacctggccaccgaagtcgctcccctgtacaagcgactggcccctcaggcctatcagaaccaggtgaccaacgaggaaatagcgattgactgccgtctggggctgaaggaaggacggcccttcgcgggggtcacggcctgcatggacttctgtgcccacgcccacaaggaccagcataacctctacaatgggtgcaccgtggtctgcaccctgaccaaggaagacaatcgctgcgtgggcaagattcccgaggatgagcagctgcatgttctccccctgtacaagatggccaacacggatgagtttggtagcgaggagaaccagaatgcaaaggtgggcagcggagccatccaggtgctcaccgccttcccccgcgaggtccgacgcctgcccgagcctgccaagtcctgccgccagcggcagctggaagccagaaaggcagcagccgagaagaagaagattcagaaggagaagctgagcactccggagaagatcaagcaggaggccctggagctggcgggcattacgtcggacccaggcctgtctctgaagggtggattgtcccagcaaggcctgaagccctccctcaaggtggagccgcagaaccacttcagctccttcaagtacagcggcaacgcggtggtggagagctactcggtgctgggcaactgccggccctccgacccttacagcatgaacagcgtgtactcctaccactcctactatgcacagcccagcctgacctccgtcaatggcttccactccaagtacgctctcccgtcttttagctactatggctttccatccagcaaccccgtcttcccctctcagttcctgggtcctggtgcctgggggcacagtggcagcagtggcagttttgagaagaagccagacctccacgctctgcacaacagcctgagcccggcctacggtggtgctgagtttgccgagctgcccagccaggctgttcccacagacgcccaccaccccactcctcaccaccagcagcctgcgtacccaggccccaaggagtatctgcttcccaaggcccccctactccactcagtgtccagggacccctccccctttgcccagagctccaactgctacaacagatccatcaagcaagagccagtagacccgctgacccaggctgagcctgtgcccagagacgctggcaagatgggcaagacacctctgtccgaggtgtctcagaatggaggacccagtcacctttggggacagtactcaggaggcccaagcatgtcccccaagaggactaacggtgtgggtggcagctggggtgtgttctcgtctggggagagtcctgccatcgtccctgacaagctcagttcctttggggccagctgcctggccccttcccacttcacagatggccagtgggggctgttccccggtgaggggcagcaggcagcttcccactctggaggacggctgcgaggcaaaccgtggagcccctgcaagtttgggaacagcacctcggccttggctgggcccagcctgactgagaagccgtgggcgctgggggcaggggatttcaactcggccctgaaaggtagtcctgggttccaagacaagctgtggaaccccatgaaaggagaggagggcaggattccagccgcaggggccagccagctggacagggcctggcagtcctttggtctgcccctgggatccagcgagaagctgtttggggctctgaagtcagaggagaagctgtgggaccccttcagcctggaggaggggccggctgaggagccccccagcaagggagcggtgaaggaggagaagggcggtggtggtgcggaggaggaagaggaggagctgtggtcggacagtgaacacaacttcctggacgagaacatcggcggcgtggccgtggccccagcccacggctccatcctcatcgagtgtgcccggcgggagctgcacgccaccacgccgcttaagaagcccaaccgctgccaccccacccgcatctcgctggtcttctaccagcacaagaacctcaaccagcccaaccacgggctggccctctgggaagccaagatgaagcagctggcggagagggcacgggcacggcaggaggaggctgcccggctgggcctgggccagcaggaggccaagctctacgggaagaagcgcaagtgggggggcactgtggttgctgagccccagcagaaagagaagaagggggtcgtccccacccggcaggcactggctgtgcccacagactcggcggtcaccgtgtcctcctatgcctacacgaaggtcactggcccctacagccgctggatctaggtgccagggagccagcgtacctcagcgtcgggcctggcccgagctgtctctgtggtgcttttgccctcatacctgggggcgggttgggggtgcagaagtctttttatctctatatacatatatagatgcgcatatcatatatatgtatttatggtccaaacctcagaactgacccgcccctcccttacccccacttccccagcactttgaagaagaaactacggctgtcgggtgatttttccgtgatcttaatatttatatctccaagttgtcccccccccttgtctggggggtttttatttttattttctctttgtttttaaaactctatccttgtatatcacaataatggaaagaaagtttatagtatcctttcacaaaggagtagttttaaa

SEQ ID NO: 32471 - DNA, 2754 bp, Homo Sapiens
tggtggtgacattgctctctgggcttttggtttgggagccacttctctgctcctccactgttgcctctggcttcccatagaggggcctgggagggttcccctggtcttaaaaggggcccaagcccccattctggcacaccccactccactgtcctggcagcagcaggtgtggccaatggaggggggtgctggcccccaggattcccccagccaaactgtctttgtcaccacgtgaggctcacacctttcatccttccccaccttccctagtccctgcactaggttggacagcccccattggctacaggaaagcgggaggggtgtgagtcccctactccctctttgcagtggccccagcccccttaccgtctgcctgggatctgagtacatattgcagtgatggagatgcagtcacctattgtccagaggcaggagaggcaggtccgagaccgcggggtgacccggtccaaggcggaaaaagtgcggccgcccactgtgccagtgccgcaggtggatattgtgcctgggcggctcagtgaggccgagtggatggcgcttacagccctcgaggagggcgaggacgtcgtaggggacatcttggccgacttgctggctcgagtcatggactctgctttcaaagtctacctgactcagcagtgcattccattcaccatcagccaggcccgggaggccatgctgcagatcaccgagtggcgcttcctggcccgggacgagggagaatctgcagtagctgaggaccccacatggggtgaggacgaggagccttcggcatgcacgacggactcctgggctcagggttcagtgcccgtgctgcacgcgtccacctcggagggcctggagaacttccaaggcgaagtacactcctcaggagcctctccggactcctctgccattgctcctgctctcccctttccgacatctcactgcccgagtgcatttccccaggaccctgggggcgtggaccggatccctttaggaaggtcgtggatgggtcgaggctcccaggagcagatggaatcttgggagccttctccgcagctgagagtcacgtcggcccctcctcccacatcagagctgtttcaggaggcagggcccggaggtcctgtagaggaagcggacggccagtctagaggcctctcctcggccgggtccttgagcgcgagcttccaactgtcggtggaggaggcgcctgccgacgatgccgacccttctctggatccgtacctggtagccagcccccaggcctcaactgggaggggacaccccctcggcttccatttgtcgttggaagacctctactgttgcatgcctcaactggacgcggctggggatcggctggaactcaggtcagagggggtgccctgcatcgcctcgggcgtgttggtgtcctacccctctgtgggcggcgccacccgcccctccgcgtcctgccagcagcagcgggccgggcactcggatgtgcggctgagcgcccaccaccacaggatgcgccgcaaggcggccgtgaaacgcctggaccctgcgaggctcccgtgccactgggtgcgccctctggctgaggtcctggtcccagactctcaaacacgccccttggaagcctaccgcggacgccagcggggcgagaagaccaaggcccgggccgaaccccaagccctcggccccggcacccgtgtctccccggcagcgttcttccctctccggccaggcattcctttccgtgacttggactcgggccccgcactcctgttccccactttaaatttaggcctatcgtcgccatccctcgagtcaaagctgccactcccaaactccaggatccgcttcctcaccacacacccggtgctccctgatgtggcccgcagccgcagccccaagctgtggcccagtgtcaggtggcccagcggttgggaggggaaggccgagctgctgggcgagctgtgggctggccggacccgcgtgcctccacagggtctggagctggcagacagggagggccaggatcctggcagatggcctcgaaccacacccccggtccttgaagccacttcccaggtgatgtggaagcccgtgttgctgccagaagccctgaagctggcccctggtgtgagcatgtggaaccggagcacccaggtgttgctcagctctggtgtgcctgaacaagaggacaaagaaggtagcacctttcctcccgttgagcaacatcccatccagacaggcatcgggaaggttgtatcccaggacctagctcggtgtggggcccaagtgatccttacttgtcagagcagggaatgtggacagcaagccctggctgagatccaagcagcctcaaacagcaaccgcctcctgcttggcgaggtggaccttagctccatgacctctattcggagctttgcccggaggcttctacaggagaatcctgagatacatctgctggtaaacaatgctggagtcagtggattccgaagacacttaccccagggggcctggatctcacctttgtcactaactatgttgggccctttctgctcacaaatctactccaaggatctcaaacaaggtgtactcccagtcctctacttgagcttggcagaggagccgggtggtatttctggaaaatatttcagcagttcctgtgtgataactcttcccgttaaagcctctcgggatcctcatgttgcccagagcctctggaatgcctcagtccgactgacaagcctagtcaagatggactga

SEQ ID NO: 32472 - DNA, 1229 bp, Homo Sapiens
gcggagctctgtgggcgggtggctgttgttggggccgtcgaggcggcggcgactctgcgtccccggctcctgatggaggcggggccgcatccccggccggggcactgctgcaagcctggggggcggctggacatgaaccacggcttcgtgcaccatatccgacggaaccagatcgctcgggacgactatgacaagaaggtgaagcaggcggccaaggagaaggtgaggaggcggcacacgcccgcgccgacgcggccccgcaagccagacctgcaggtgtacctgccgcgacaccgagatgtctctgcccacccacgcaacccagactatgaagagtccggtgaaagcagcagtagtggaggctctgagctggagccttctggccatcagctcttctgcttagaatacgaggcagacagtggagaggtcacatcagttatcgtctatcagggtgatgacccaggaaaggtgagtgagaaggtgtcggcacacacgcctctggatccacccatgcgagaagccctcaagttgcgtatccaggaggagattgcaaagcgccagagccaacactgaccatgttgaaggcgttctctccaggctggattcactgcactcggaagaattctgcccagggaatttagtgtgggggtaccaggaccagtttgtctgatcttgagacccccagagctgctgcatccatagggtgttgcaggactacacctggcctgccttgcagtcattctttcttatatgttgacccatttgcccagcctgatattctggaattcttttttttttttttttttttttttttttgaggattttgtgtggctaatgtgttctagaagcagagactccagggagaaccagaatttatgaagcctcgtgcaacatggtgctttctcaccgaggtcatatgcctggctgctgctgttccactcagctccatgagccacgtttgttattttatgtttcttctgtgcttttgctcatttccacccatgtgtttatagaccttttttcagccctttttctttgttcctttccctcatctttttgcctcaggtagaatccatcagttttcctccccctccaaatgactgtgtacctccagctgctcaggactttggaggtgggggcggggcctggggatctacccttctaaaaaactctccaagtaattctgataccaataaagtgggagacctccatttttgaggcctatttgc

SEQ ID NO: 32473 - DNA, 4623 bp, Homo Sapiens
atggagggagaagaggcagtggctgtgaagaatataaagagatacgtatgtacttaccttagtgtgcaagagagggatcccagagctcacagatttctgggtcttctttatgaattggaagaaaacacagagaaagccgttgaatgttacagggaacatcttctagattgtgaaggtgaagatggatggaataaactttttgactggattcagtcagaactttatgtaagacctgatgacgtccatatgaacatccggctagtggagttgtatcgctcaaataaaagattgaaggatgctgtggcccgctgccatgaggcagagaggaacatagctttgcgttcaagtttagagtggaattcgtgtgttgtacagacccttaaggaatatctggagtctttacagtgtttggagtctgataaaagtgactggcgagcaaccaatacagacttactgctggcctatgctaatcttatgcttcttacgctttccactagagatgtgcaggaaagtagagaattactggaaagttttgatagtgctcttcagtctgcaaaatcttctttgggtggaaatgatgaactgtcagctactttcttagaaatgaaaggacatttctacatgcatgctggttctctgctcttgaagatgggtcagcatgggcatatgttgctaaacttaagtcgtggcaagcaagattttttaaaagaggttgttgaaacttttgccaacaaaagcgggcagtctgtgttatataatgctctgttttctagtcagtcatctaaggatacatcttttcttggtagcgatgatattggaaacattgatgtacaagaaccagagcttgaagatttggctagatacgatgttggtgctattcaagcacataatggtagtcttcagcaccttacttggcttggcttacagtggaattcattgcctgctttacctggaatccgaaaatggctaaaacagcttttccatcatttgccccaggaaacctcaaggcttgaaacaaatgcacctgaatcaatatgtattttagatcttgaagtatttctccttggagtagtatataccagccacttacaattaaaggagaaatgtaattctcaccacagctcctatcagccgttatgcctgccccttcctgtgtgtaaacggctttgtacagagagacaaaaatcttggtgggatgcggtttgtactctgattcacagaaaagcagtacctggaaactcagcagaattgagacttgtagttcagcatgaaataaacactctaagagcccaggaaaaacatggccttcaacctgctctgcttgtacattgggcaaaatgccttcagaaaatgggcaggggtcttaattcttcttatgatcaacaagaatacatagggagaagtgttcattattggaagaaagttttgccattgttgaagataataaagaagaacagtattcctgaacctattgatcctctgtttaaacattttcatagtgtagacattcaggcatcagaaattgttgagtatgaagaagatgcacacataacttttgctatattggatgcagtacatggaaatatagaagatgctgtgactgcttttgaatctataaaaagtgttgtttcttattggaatcttgcactgatttttcacaggaaagcagaagacattgaaaatgatgccgtttttcctgaagaacaagaagaatgcaaaaattatctgagaaagaccagggactacctaataaagattatagatgacagtgattcaaatctttcagtggtcaagaaattgcctgtgcccctggagtctgtaaaagagatgcttaagtcagtcatgcaggaactcgaagactatagtgaaggaggtcctctctataaaaatggttctttgcgaaatgcagattcagaaataaaacattctacaccatctcctaccaaatattcactatcaccaagtaaaagttacaagtattctcccaaaacaccacctcgatgggcagaagatcagaattctttacggaaaatgatttgccaagaagtaaaggccattacgaaactaaatagcagtaagtcagcatcccgtcatcgttggcccacagagaattatggaccagactcggtgcctgatggatatcaggggtcacagacatttcatggggctccactaacagttgcaactactggcccttcagtatattatagtcagtcaccagcatataattcccagtatcttctcagaccagcagctaatgttactcccacaaagggttcttctaatacagaatttaagtcaaccaaagaaggattttccatcgctgtgtctgctgatggatttaaatttggcatttcggaaccaggaaatcaagaaaagaaaagtgaaaagcctcttgaaaatgatactggcttccaggctcaggatattagtggccagaagaatggccgtggtgtgatttttggccaaacaagtagcacttttacatttgcagatgttgcaaaatcaacttcaggagaaggatttcagtttggcaaaaaagaccccaatttcaagggattttcaggtgctggagaaaaattattctcatcacaatgcggtaaaatggccaataaagcaaacacttccggtgactttgagaaagatgatgatgcctgtaagactgaggacagcgatgacatccattttgaaccagtagttcaaatgcctgaaaaagtagaacttgtaacaggagaagaaggtgaaaaagttctgtattcacagggggtaaaactatttagatttgatgctgagataagtcagtggaaagaaaggggcttggggaacttaaaaattctcaaaaatgaggtcaatggcaaaccaagaatgctgatgcgaagagaccaagtactaaaagtgtgtgctaatcattggataacaactacaatgaacctgaagcccctctctggatcagatagagcatggatgtggttagccagtgatttctctgatggtgatgccaaactagagcggttggcagcacaatttaaaacaccagagctggctgaagaattcaagcagaaatttgaggaatgccagcggcttctgttagacataccacttcaaactccccataaacttgtagatactggcagagctgccaagctaatacagagagctgaagaaatgaagagtggactgaaagatttcaaaacgtttttgacaaatgatcaaacaaaagtcactgaggaagaaaataagggttcaggtacaggtgcagccggtgcctcagacacaacaataaaacccaatcctgaaaacactgggcccacattagaatgggataactatgatttaagggaagatgctttggatgataatgttagtagtagctcagtacatgattctccgttggcaagtagccctgtgagaaaaaatattttccgctttgatgagtcaacaacaggatttaacttcagttttaaatctgctttgagtctatctaagtctcctgccaagttgaatcagagtgggacttcagttggcactgatgaagaatctgatgttactcaagaagaagagagagatggacagtactttgaacctgttgttcctttacctgatctagttgaagtatccagtggtgaggaaaatgaacaagttgtttttagtcacatggcagaactctacagatatgataaagatgttggtcaatggaaagaaaggggcattggtgatataaagattttacagaattatgataataagcaagttcgtatagtgatgagaagggaccaagtattaaaactttgtgccaatcacagaataactccagacatgagtttgcaaaatatgaaagggacagaaagagtatgggtgtggactgcatgtgattttgcagatggagaaagaaaagtagagcatttagctgttcgttttaaactacaggatgttgcagactcatttaagaaaatttttgatgaagcaaaaacagcccaggaaaaagattctttgataacacctcatgtttctcggtcaagcactcccagagagtcaccatgtggcaaaattgctgtagctgtattagaagaaaccacaagagagaggacagatgttattcagggtgatgatgtagcagatgcagcttcagaagttgaagtgtctagcacatctgaaacaacaacaaaagcagtggtttctcctccaaagtttgtatttggttcagagtctgttaaaagaatttttagtagtgaaaaatcaaacccatttgcatttggcaacagttctgccactgggtctttgtttggatttagttttaatgcacctttgaaaagtaacgatagtgaaactagttcagtagcccagagtggatctgaaagcaaagtggaacctaaaaaatgtgaactgtcaaagaactctgatatcgaacagtcttcagatagcaaagtcaaaaatctctctgcttcctttccaatggaagaatcttcaatcaactacacatttaaaacaccagaaaagggaagaaatggaaaaatgtcagccatgatgatgcagtattttagtagcaagttgatggtgttttggtttcccatgggaaatattgtcactggagcattagcagctatcggtcacttattagggtaa

SEQ ID NO: 32474 - DNA, 2905 bp, Homo Sapiens
ggctaaggtgcgcgtgctcgctggttctaacccttctgttgggcgtttctgctgagaggcgggaggcgctgagagtctgtgcggaggtccgtggacagactgctttgctcgttgttgctcttcggaggcggcgatccccgaaggcgagctgaaatacggctgcaggctacaatttgcagccgacgattatggaagacggcaagcgggagaggtggcccaccctcatggagcgcttgtgctcggatggcttcgcatttccccaataccccattaaaccgtatcatctgaagaggatccacagagctgtcttacatggtaatctagagaaactgaagtaccttctgctcacgtattatgacgccaataagagagacaggaaggaaaggaccgccctacatttggcctgtgccactggccaaccggaaatggtacatctcctggtgtccagaagatgtgagcttaacctctgcgaccgtgaagacaggacacctctgatcaaggctgtacaactgaggcaggaggcttgtgcaactcttctgctgcaaaatggcgccaatccaaatattacggatttctttggaaggactgctctgcactacgctgtgtataatgaagatacatccatgatagaaaaacttctttcacatggtacaaatattgaagaatgcagcaagtgtgaatatcagccactgttatttgctgtgagtcgaagaaaagtgaaaatggtggaatttttattaaagaaaaaagcaaatgtaaatgccattgattatcttggcagatcagccctcatacatgctgttactcttggagaaaaagatatagtcattcttcttctgcagcacaatattgatgtgctttctcgagatgcgtttcgaaagattgcaggagattatgccattgaggctaagaatagagtcatttttgatctaatttatgaatacgaaagaaagagatatgaagatcttcctataaatagcaatccagtgtcttctcagaaacaaccagccttgaaggctacaagtggcaaggaagattctatttcaaatatagccacagaaataaaggatggacaaaaatctgggacagtgtcttctcagaaacaaccggccttgaaggatacaagtgacaaggatgattctgtttcgaacacagccacagaaataaaagatgaacaaaaatctgggacagtgcttcctgctgttgaacagtgtttaaacaggagtctctacagacctgatgctgttgcacagcctgtgacagagaatgagttttctttggaatctgagattatttcaaaactatacatcccaaagagaaagattatttctccacgatctataaaagatgtgcttcctcctgttgaagaggctgttgacaggtgtctctacctactggaccgttttgcacagcctgtgacaaaggataagtttgctttggaatctgagaatatttcagaaccatactttacgaacagaaggactatttctcaacaatctgcagaaaatttagatgctgcatgtggcattgacaaaacagaaaatggaaacatgtttgaagaccaaaatgttgataaggaaggaaaagcactaccagcaactggacaaaaagcaaatgtgtctcctgagcaaccgcctttattcacgaatcttctgagcgacctcctttatccacgcttactctgaaagaggcagatcccagttcaaaagcagccatgagaaggaaggattcaccacctccaggaaaagtgtcttctcagaaacaaccagctgagaaggctacaagtgacgacaaagattctgtttcaaatatagccacagaaataaaggagggaccaatatctgggacagtgtcttctcagaaacaaccagctgagaaggctacaagtgacgagaaagattctgtttcaaatatagccacagaaataaagaagggacaacaatctgggacagtgtctcctcagaaacaatcggcctggaaggttatatttaaaaagaaagtttctcttttgaatattgccacaagaataatgggtggtgggaaatctggaacagtgtcttctcagaaacaaccagcctcaaaggctacaagtgacaagacagattctgctttgaatatagctacagaaataaaggatggactacagtgtgggacagtgtcttctcagaaacaaccagccttgaaggctacaactgacgaggaagactctgtttcgaatatagccacagaaataaaggatggagaaaaatctgggacagtgtcttctcagaaacaaccagccttgaaggctacaactgatgagaaagattctgtttcgaacatagccacagaaataaaggatggagaaaaatctgggacagtgtcttctcagaaaccaccagccttgacggctacaagtgacgaggaaggttctgttttgagtatagccagagaaaacaaggatggagaaaaatctaggacagtgtcttctcggaaaaaaccagccttgaaggctacaagtgatgagaaggattctttttcgaatataaccagaggaaaaaaggatggagaaatatctaggaaagtgtcttctcagaaaccaccaaccttgaagtgtcttctgagaaaccaccaggcttgaagtgtcttctcggaaaaaaccatccttggaggccacaagtgatgagaaggattctttttcgaatataaccagagaaaaaaaggatggagaaatatctaggaaagtgtcttctcagaaaccaccagccttgaagggtacaagtgacgaggaagattctgttttgggtatagccagagaaaacaaggatggagaaaaatctaggacagtgtcttctgagaaaccaccaggcttgaaggctacaagtgatgagaaagattctgttttgaatatagccagaggaaaaaa

SEQ ID NO: 32475 - DNA, 6243 bp, Homo Sapiens
atgagagaatctagacagactgttggaattaaactcaccaaggtgactaggtataagatcaagtttggggaaacatatattttgaagaattgcttcttatgttgttttctttttatttacagtatatctctctaccgggggaattgcaggcccatacgatttgagccaccaatgctggatttccatgaacaaccagttggaatgccaaaaatggaaaaagtctacttacataatcctagttctgaagaaacgattactttagtatcaatatctgctacaacatcacattttcatgcatcattttttcaaaataggaaaattcttccaggaggaaatacatcatttgatgtagtttttcttgcaagagtagtaggaaatgtagaaaatactttatttattaatacatctaatcatggggtatttacttaccaggtatttggtgttggagttccaaatccatatcgattgaggccgttccttggggccagagtccctgtgaatagcagtttctcacctataataaacatccacaatcctcacagtgagcctttacaggttgtagaaatgtactctagtggaggagaccttcacctagaactcccaacgggtcaacaaggaggtaccagaaaactgtgggaaattcctccttatgaaaccaagggagtgatgagagccagtttttcatctagagaagcagataatcacacagccttcataagaataaagactaatgcttcagacagcacagagtttatcattcttcctgttgaggttgaagttacaacagctcctggaatttattcctcaactgaaatgttagattttggtacactaagaacacaagatctaccaaaagttttaaaccttcatttattaaattcaggaacaaaagatgtaccaataacaagtgttcgacctacaccacaaaatgatgctataacggtacactttaaaccaattacattaaaagcatcagaaagtaaatacaccaaggttgcaagcattagttttgatgcatcgaaggcaaaaaagccatctcagttttctgggaaaataacagttaaagcaaaggaaaagagttattctaaacttgaaataccatatcaagcagaagttttagatggttatttgggatttgatcatgctgcaacattatttcacatccgagacagccctgctgatcctgtggaaaggccaatttaccttactaacactttcagttttgcgatcctcattcacgatgtgttgctaccagaagaagccaaaacaatgtttaaagttcacaacttcagcaaaccagtcttaattcttcctaatgaatcaggatacatttttaccctgctttttatgccttccacatcatccatgcacattgataacaacattttacttattaccaatgcttctaaatttcatttacccgtgcgggtatacacaggctttttagattactttgtattgccccccaaaatagaggaacgtttcatagattttggagtactgagtgctacagaagcaagtaatattttatttgcaattataaacagcaatccaattgagttggctataaaaagttggcatatcataggagacggtttatcaatagaacttgtagctgtggaaagaggcaatagaactacaataatttcaagcctgccagagtttgaaaaatcctctttatcagatcaatcatcggtaacattagcttcaggctattttgcagtcttcagagtcaaacttactgcaaaaaaattagaggggattcatgatggagccatccagatcacaacagactatgagatcctgacaatccctgtgaaggctgtgattgcagtaggctcactgacctgcttccctaagcacgtggttcttccaccttcctttccagggaaaatagttcatcaaagtttaaatattatgaattccttctcacagaaggtaaaaatacagcaaatacgatctttgtcagaagatgtgcgattttactataaacgattacggggcaataaggaagacttggagccaggaaaaaaatcaaagattgcaaacatttattttgatcctggactacagtgtggggatcattgctatgttggcttgccttttctatccaaatctgaacccaaagtgcagcctggtgtagccatgcaggaagatatgtgggatgctgactgggatttgcatcaaagcctgttcaagggatggacaggaataaaggaaaattcaggtcatagattgagtgctatatttgaagtaaatacagaccttcaaaaaaatataatatcaaaaatcactgctgagctctcctggccttccatacttagctcaccccggcacttgaaatttccacttactaatacaaactgctcctcagaagaagagattactttagaaaatcctgcagatgttcctgtctatgttcagtttattcctctggctttatattccaacccttcagtgtttgtagataagttagtatcaaggtttaacttgagtaaggtggcaaagatagatttgagaacactagaatttcaagtcttcagaaacagtgctcatccactgcagagttcaacaggatttatggagggcctctctcgacatttaattttaaacctaattttaaaacctggagaaaagaaatctgtcaaagtaaagtttactccagttcacaacagaactgtttcttcacttatcatagtcagaaataacctgactgtgatggatgctgtgatggtccaaggacaaggaacaactgagaacttgagggtggcaggcaagcttccaggtccaggaagctccttacgctttaaaatcacggaagcattgttaaaagattgtacagatagtttaaaactaagagaaccaaatttcacattgaaaagaacatttaaggtagagaatacaggacaacttcaaattcacatagaaaccattgaaatcagtggatactcatgtgaaggatatggctttaaagttgttaattgtcaagagtttactctaagtgccaatgcttctagagatataatcatattgtttactcctgattttacagcttctagagttattcgggaactgaagtttataacaaccagtggctctgagtttgtatttatattgaatgcatcccttccttaccatatgttagcaacctgtgcagaagccctacccagacctaactgggaactggctctgtatatcatcatctcaggaataatgagtgcactgtttcttttggtcattggaacagcctatttggaagctcaaggaatatgggagccatttcgaaggcggctatcctttgaggcctcgaacccgcccttcgatgtgggaaggccatttgatctcaggagaatcgttggtatttcatctgaaggaaacttgaacacactcagctgtgaccccggtcacagtagggggttctgtggagcaggcggttcatcatcccgacccagtgccgggagtcataagcagtgtggcccatcggtccacccacacagcagtcacagcaatagaaactcagctgacgtggaaaacgtcagagccaaaaacagttcaagtacctctagtaggacttctgctcaagcagcttcttcacagtctgctaacaaaacaagcccccttgtcttagattcgaacacagtgactcaaggtcatacagcgggcagaaagtccaaaggggcaaagcagagccagcacggcagccagcaccatgcccacagcccgctggagcagcaccctcagcctcctctgccaccgccagtgcctcagccccaggagccgcagcctgaaaggctgtctcccgcccccctcgcacacccttcccacccagaacgtgccagcagcgcgaggcacagttccgaggactcggacatcaccagtctcatagaagccatggacaaagacttcgaccaccatgactccccagccctagaagtgtttacagagcagcctccatcgccattgccaaaaagcaaagggaaaggaaaacctcttcagcgcaaggtgaaaccacctaagaagcaagaggaaaaggagaagaagggaaagggaaagccacaggaagatgagctgaaggactctttggctgatgatgatagctcctccaccaccacagagacctccaaccctgacacagaaccgctcctcaaggaggatacagaaaagcaaaagggaaaacaagccatgcctgaaaaacatgaaagtgaaatgtctcaagtgaagcaaaaaagcaaaaaactcttaaatattaagaaagaaatcccaacagatgtgaaacccagttcattagaactaccatatactccccctttggaaagtaagcaacgtagaaatctcccaagcaagattcctcttccaactgcaatgacaagtggatccaaatcacgaaatgcccagaaaacaaaaggtacaagtaagttagtggataacagaccacctgccctagcaaaattcctcccgaatagtcaagaattaggcaacaccagtagctcagagggtgaaaaagactctcctccaccggagtgggattccgttccagttcacaaacctggcagctctactgatagtctttataaactttctctgcaaaccctcaacgcagacattttcttaaaacaacgccagacctcaccgacacctgcttccccgtctcccccagctgccccctgcccctttgtggcccggggcagctacagcagcatcgtcaacagcagctccagcagtgaccctaaaataaaacagccaaatggaagcaaacacaagttgacaaaggcagcctcgctcccgggcaagaacggcaaccccacttttgctgcagtcacggctggctacgacaagagcccaggtgggaatggctttgctaaagtttcttcaaacaaaacaggtttctccagcagccttggcatttcacacgctcctgttgacagcgatggctcagacagctcgggtttgtggagtcccgtcagcaacccaagcagccctgacttcactcccctcaattcgttctccgcctttggaaactcttttaatctaactggtgaagttttcagcaaactcggattatctcgatcgtgcaatcaggcctcacagaggagctggaacgagtttaatagtggcccttcatacctttgggagtcgccagcgacagatcccagtccttcctggccagccagttccggctccccgacccacacagccacatcggtcctcggtaacaccagcggcctgtggtccaccactccattcagcagctccatttggtccagcaaccttagcagcgcccttcccttcaccactccagcaaacacgctggcaagcatcggcctcatgggcacagaaaactcccctgctcctcacgctccctccacctccagtccagctgacgacttgggacagacctacaacccgtggcggatatggagccccacgattggaagaagaagctcggacccttggtctaattcgcactttcctcacgagaattaaattaagcaaaaaacaaacaaacatagtgggccctcgtctagatcatgatgtgccagtttctgagacatctttttaaggctcttactgcagctcccctccccaccctcctcttctttgcaaaacagacccaagcagggcaggctcagaccactcgcttctttcagatctttcttgcaattatgataacatgagatttgctgttgtgcttttagagaaaagtctggactcagccacaaactctaataagacctgtacatctgagaacctttcccgttactgcgttttcaccacctgtcttccccatgctttatttatctgtatgaacacagatttgacattacagctaaggaaataatttgagttgattcagaaatcctggcatgtgacaattttgttaaattaccaagtttggtttttaataatttctcaatattatgcgccaagatctaattttaaaactgtatgaggactttgtgctgaaaatagagtatttttttaaagtaaggctgtcttggtttaaaagcagattacagaaatgtaagtcaacttaagaacggtgaatgaatgtaaaaacattcagttgagaccatatgcattttctgtgctgtttgtacttgaggtatgtaacatttgtatacctgaacttattttaaagatgaactgaaatgcacatagccaagtcttgagatacaagattgaatgtgtatttcttaaaaatacaactttgtgttgtactttgaaataaatgatgcttttttc

SEQ ID NO: 32476 - DNA, 3566 bp, Homo Sapiens
gcttgtggaactgctgactcaggatgtcggggttcaggctgggtgaccacgtgtggctggagcctccctccacccacaagaccggcgtggccatcgggggcatcatcaaagaggcaaagccaggcaaagtcttggttgaagatgacgagggcaaggaacactggatccgagcagaggactttggtgtcctcagtcccatgcaccccaactcagtccagggtgtggacgacatgatccgcctgggggacctgaacgaggcaggcatggtgcacaacctcctgatccgctaccagcagcacaagatctatacatacacaggctccatcctggtggccgtcaacccgttccaggtgctgccgctctacaccctggagcaggtacagctctactacagccgccatatgggcgagctgcccccgcatgtctttgccatcgccaacaactgctacttcagcatgaagaggaacaagagggaccagtgctgcatcatcagcggcgagtctggggctggcaagacggagaccaccaagctcatcctgcagttcctggccaccatcagtggccagcattcgtggattgagcagcaggtcctggaagccaaccccatcctggaggcctttggaaatgccaagacaatccgcaacgacaactcaagccgctttgggaagtacattgacatctactttaaccccagcggggtgatcgagggcgcgcgcatcgagcaatttctcctggagaagtcccgggtctgccggcaggctcccgaggagcggaactaccatatcttctactgcatgctcatgggggtgagtgctgaggacaagcagctgctgagcctgggcacgccctccgagtaccactacctgaccatggggaactgcacttcctgtgaggggctcaacgacgccaaggactacgcccacatccgctcggccatgaagatcctccagttctccgactccgagagctgggacgtcatcaagctgctggctgccattctccacctggggaatgtggggttcatggcttcggtcttcgagaacctggacgcctcagacgtgatggagacgcccgcctttcccaccgtgatgaagttactggaggtgcagcaccaggagctccgggactgtctgatcaagcacaccatcctcatccgaggggaatttgtcaccaggtccctgaacattgcccaggctgctgaccggagggacgcctttgtcaagggcatctatgggcacctcttcctgtggattgtcaagaagatcaatgccgccatcttcacaccaccagcccaggaccccaaaaatgtgcggagggccatcggcctcctggacatatttggctttgaaaatttcgagaacaatagcttcgagcagctctgcatcaacttcgccaacgagcacctgcagcagttctttgtgcagcacgtgttcaccatggagcaagaggagtaccgctcggagaacatctcctgggactatatccactacaccgacaatcggcccaccctggacctgctggccctcaagcccatgagcatcatctccctcctggacgaagaaagccgcttcccgcaggggacagatctcaccatgctgcaaaagctgaacagcgtccatgccaacaacaaggccttcctacagcccaagaacatccacgatgccagatttggcattgcccattttgccggcgaggtgtactaccaagcagaaggcttcctggagaagaaccgagacgtgctgagcacagatatcctcaccctggtttactcctccaaaaacaagtttctgagggagatattcaacttggagttagcagagaccaagctgggccatgggaccatccgccaggcaaaggcaggaaaccatctcttcaagtctgcagactcaaataaacggccctccaccttaggaagccagttcaaacagtctctggaccagctgatgaaaatcctgaccaactgccagccttacttcatccgctgcatcaaacctaatgagtacaagaagccgctgctgttcgaccgggagctgtgcctgcggcagctgcgatactcgggcatgatggagaccgtgcacatccgcaagtcgggcttccccatccgctacacgttcgaggagttctcgcagaggttcggcgtgttgctgcccaacgccatgcggatgcagctgcaaggcaagctccgccagatgaccctgggcatcactgacgtgtggctgcggacagacaaagactggaaagcggggaagacaaaaattttcctgagggatcatcaggacactctgctggaggtacagagaagccaggtgctagacagagcggcgctcagcatccagaaagtccttcggggctacagatacaggaaggagttcctgaggcagaggcgggcagctgtgaccctgcaggcctggtggagaggctactgcaacaggaggaatttcaagctgatcctcgtgggctttgagcgcctgcaggctattgcccggagccagccgctggcgaggcagtaccaggccatgcggcagaggacagtccagctgcaggccctgtgcaggggatacctggtgcgccagcaagtccaggccaagaggagggcagtggtggtcattcaggcccatgccaggggcatggctgcccggcgcaacttccagcaaaggaaggccaatgcgccgctggtcatcccggccgaggggcagaaaagccaaggcgctctccctgccaagaagcgcagatccatctacgacaccgtcactgacacggagatggtggagaaggtgttcggcttcctccctgccatgattgggggccaggagggccaggcctcgccgcactttgaggatctggaatcgaagacccagaagctgcttgaggttgacctggacacagtccccatggcggaggagcctgaggaggatgtggatggcctggccgagtacaccttccccaagtttgctgtgacttacttccagaaatcagccagccacacacacatccggcggcccctccgatacccgttgctttaccacgaagatgacactgactgcttggccgccctggtcatatggaacgtcatcctgaggttcatgggtgatctcccagagccagtgctgtatgccaggagcagccagcagggcagctcagtgatgcggcagatccatgacacgctgggcagggagcacggtgcccaggttccacagcacagtagatctgcacaggcaagtggggggcagcagcgggcagaggagggcgacacctaccaggtggccagccagctgaacattggagaggaggcattggagcctgatggccttggtgcagaccggcccatgtccaacctggagaaggtgcacttcatcgtgggctacgccatcctgcggcccagcctcaggatgggctcagaattctccaggaacaagcaggcgctaatgtctttgttcatggaggtccctaactccagagtacaaaagtcaagcactagcaagaactcaatcaacaggctctattctagtaccctgggaggtggcaaatgggcttctggagctcagcaggcatcagatggggagtga

SEQ ID NO: 32477 - DNA, 5449 bp, Homo Sapiens
atgaagaagcacggaagtactcatgtcggattcccagaaaacctgactaatggtgccactgctggcaatggtgatgatggattaattcctccaaggaagagcagaacacctgaaagccagcaatttcctgacactgagaatgaagagtatcacagtgacgaacaaaatgatactcagaagcaattttgtgaagaacagaacactggaatattacacgatgagattctgattcatgaagaaaagcagatagaagtggttgaaaaaatgaattctgagctttctcttagttgtaagaaagaaaaagacgtcttgcatgaaaatagtacgttgcgggaagaaattgccatgctaagactggagctagacacaatgaaacatcagagccagctaagagaaaagaaatatttggaggatattgaaagtgtgaaaaaaaagaatgataatcttttaaaggctctacaattgaatgagctcaccatggatgatgataccgccgtgctcgtcattgacaacggctctggcatgtgcaaggccggctttgcgggcgacgatgccccccgggctgtcttcccttccatcgtggggcgccccaggcagcagggcatgatggggggcatgcatcagaaagagtcctatgtgggcaaggaggcccagagcaagagaggcatcctgaccctgaagtaccccatggaacacggcatcatcaccaactgggatgacatggagaagatctggcaccacaccttctacaacgagctgcgtgtggctcccgaggagcaccccatcctgctgaccgaggcccccctgaaccccaaggccaaccgcgagaagatgacccagatcatgtttgagaccttcaacaccccagccatgtacgtggccatccaggccgtgccgtccctgtacacctctggccgtactactggcatcgtgatggactctggtgacggggtcacccacactgtgcccatctatgaggggaatgccctcccccatgccaccctgcgcctagacctggctgggcgggaactgcctgactacctcatgaagatcctcaccgagcgtggctataggttcaccaccatggccgagcgggaaatcgtgcgtgacatcaaagagaagctgtgctatgttgccctggacttcgagcaggagatggccacggcggcctccagctcctccctagagaagagctacgagctgcccgatggccaggtcatcaccatcggcaacgagcggttccgctgccccgaggcgctcttccagccttgcttcctgggcatggaatcctgtggcatccatgaaactaccttcaactccatcatgaagtctgatgtggacatccgcaaagacctgtacaccaacacagtgctgtctggcggcaccaccatgtaccctggcatggcccacagaatgcagaaggagatcgctgccctggcgcctagcatgatgaagatcaggatcattgctcctcccaagcgcaagtactccgtgtgggtcggtggctccatcctggcctcgctgtccaccttccagcagatgtggatcagcaagcaggagtatgatgagtcaggcccctccattgtccaccgcaaatgcttctaggtggactctgacttagttgcgttacaccctttcttgacaaaaccaaacttctcagaaaacaacatgagattggcatggctttatttgttttcttgtttcattttttgttttgttttttattggcttgactcaggatttaaaaaccggaatggtgaaggtgacagcagtcggttggaggaagcttcctccaaagttctacaatgttgccaaggactttgattgtacattgttcttcttttcaatagtcattccaaatattgtgagacgcattgtttcaggaagccccttgccctgctaaaagccatcccacttctctctaaggagaatggcccagtcctctccctagttcacacaggggaggtgatagcattgcttttgtgcaaattacataatgcaaaattttttgaatcttcgccttaatactttttaattttgttttattttgaatgatcagccttcgtggcccccctcttttgtaccccaacttggggtgtatgaaggcttttggtctccctgagagtggctggaggcagccagggcttacctgtactctgacttgaggagagttggataaaagtgcacaccttaaaaaaaattgaggaagcacagtatttcagtacagtggacagcttagcatgttgacaactgagaataaaatgctcagttctgaactggacaatgtaagacacaacgaggaaacactggaaatggaaattcaattacgtcattgtagactggctgctgctctacatgattgtgaccaaagtcagatagctgaaagagacttctttccagagaacaagacatgaacaggtttatttacagaagacaatgaattctcatttatctcacctaaaagagaacagattctttctcaacaagtctaatgtagacagtaaaatcaacaggctaaaaattaagctccacgaaacaagataaaactctgagagaaaagacggggcaggccgccatctttcccgttcaggcaacttagtcattccagcctgcgggctttggagagtacaaaccgacgagggacagaagagatcccacagcacagcatagctgctttaccaaatcatggccagactgcttctgtaagcaggcccctgatcctgttccacctcactggacaggacctcccaactggggcctccagctacccccaccagcattccttggccaatggaaatgtgaaatgttcctgggacagagctcccggagaggggcaggcccccacctttgctcttttggtgactagccattctggcctgcgggctttggagagcccaagctgacaaggggtggaagaggtacctcagcacagcacagccacgctacaaaaacgtggccagactcttgtttacgtcagtccctgaccacatttctagtcagcgggtgaagtctttcaaccagggtctctggctaccttgactgctgttctctggccgacagaggtctcaggcctccctgagtcagagctcccagggggaggaccagattgtcatctttgctgtttgggtgacccagccatttcagccttagggcttcagagtgtctgaggtggaccaggggctgaagtgaacccccagcacagcacagctgctctataaaaacgtggccagacttttttttttgaagcaagtccctgttcttgttcgtcctgactaggtaagacttctcaacttgcctccagccacatcttataggtgtgttcagattggcaacaggttcgtacctcagtggtacagagcttccagaggaaggggcagactatcatcttccctggaaaatacaaggcaattagggactggaggggacccccagcataccacagcagccctacagaaaagtggccgggctctctacttgatgggcagatcctcctggcctgggtctctagccagcccaccactggagctatcaagccagtagcaactctgcagttcctgggacagagcttccaggagcaaatgaaatcctttctgccactgcctctgcagtggaactgcccttgctaccctcagaagatgcaagggagcaaagaccctaagtgccctatcaacacctccaataagctgcagttgacccaaagaacaagccagtccatctcccacgggtaccacacaccctccactactcatcaccagacagggaaccctggcttgggctcacagcacagaccctccatcctgggctgattacactaagtgattgctaactcacatgtctctgggatggagcacccaggaaacaagcaaagtggtggagcagcaagtcaggtgatgtggagcccagaggtcagggatggctatctctctagggtccacttgcccttgtgagacactttgtcccacactccttagtctgctcgcctctcccatggccccagcctggccacacctgcttacggggcactcttagatgcccacaccatagcttccatgctagtggactgtaccatatcagtggagagctgcagcaaggtggcccctagagccacgcaccagcctgcacattgcctctccatacggcagccctttatttggaaacttcctaaatcactttgctgtgtgtgtttacacgggtgggttttgctttacttgccctgagagcacacgggagtgcagcacacaccccaacccacatcagctgccattaaagaaaagaaatttcagcccagaatttcatgtccagcaaaattaagcatcataagtgaaggagaaataagatccttttcagacaagcaaatgctgagggaatttggtatcaccagatctaccttacgagagctcctgaaggaagcactaaatatggaaagaaaagatcatcacctactactacaaaaacactgaagtacacagtccaatgatgctaaaaaccaagcacatatgtaagtctgcaaaataaccagctgacagcatgacgacaggataaaatccacacataccattactaaccttaaatgtaaatgggctaaatgctcccattgaaagacacggggcaagctgggtaaagaaccaagacccactggagtatgccgtcttcaagcaacccatctcacgtgcagtgccatacataggctcaaaataaaggaatggagaaaaatatttcaagcaaatggaaaacagaaaaaaggtgttgcactcccagtttctgacaaaacagactctaccaataaagataaaaaaagagaaggacattacaaaggtggtcctgacctttgataaatctcattattgcttgataccaacctgggctatttgtattgcccaaaccaataggataatttgctgaggttgtggagcttctccccttcacagagtccctgatctccgaaaatttggttgagatgtaaggttgattttgctgtacaactccttttttgaagttttactcatttccaacaaggaaggcaagttttcctgcttccattgacaaaggagagcaggcacctcctttcctgagtttcagcttgcttctgacagggaaggtgagtgtaagtttttccagcttctaagatggcagagaatgatcacccagtctgagccttatttccaggtaagtagcagaattagagttttgtcttaaaatttttgtttaatgactaaaatttaagattacccatcagctgcttttaattcctccttaccattagaacactcagttaatcatatgaattgtgcatttgtttgttttgcttaactctttttgtttatgtttggggttttattgttgtttcacttttctcccatctcttcctgacttggtcaaatccaaaggaatgttccaaattgtggggagcaaggcatctgaattggctaaaactcctgtggctgcaaaa

SEQ ID NO: 32478 - DNA, 6948 bp, Homo Sapiens
atgggctgcactgccagcattgttctgcttcaagcttttcgttctgtggtccagaggagctgtccacacatttgtagacgacgccaagaggaaccatcccacgaaattttgcctctggaaagtgacgatgaaatgaatagacccagaaccctcatcataatgcaagaaaagcctaggcttctcgagcctttggattatgagactgtcattgaagaacttgaaaagacctaccggaatgatcctcttcaagatctcttgttcttccccagtgatgacttttcacctatgtcacattttagggacgtggcgcaccaacaggaagtgtccatgcagtcagcaagcatgtcatttcatcagctctcccttcagcagtggaccatgtctgcaggcctcgcagcaggcaaccctcttcactgggctttcttggatggtaaactcagaccacagacctcagagtctttgccagggggaggtcctggtgcagcagccacagtttcctgggatatccgcacgttgtactcaacagtacctgaagatgcagagcacaaggcagaaaatttactggttaaggaggcttgtaaattttatagttcccagtggcatgtggtaaactacaaatatgaacaatattctggagacattcgacagctaccccgagcagaatacaaaccagagaagcttccttcacattcctttgagattgaccatgaagatgctgataaggatgaagataccacttcccactcgtcttccaaggggggtggaggagcgggaggaactggtgttttcaagtccggctggctctacaaggggaattttaacagcaccgtgaacaacaccgttactgttcggtcattcaaaaagcgctacttccagctgactcagttaccagataactcctacattatgaacttttacaaagatgagaaaatatccaaagaacccaaaggatgcatctttttggattcctgtacaggagtggtgcagaataacagactaagaaaatatgcctttgaattgaaaatgaatgatctgacctattttgtgctggcagctgaaacagagtcagatatggatgaatggatccacaccctcaaccgcattctgcaaatcagtcctgaggggcccctccaagggaggaggagcacagagctcactgatctgggtctggattcgctggataattctgtaacttgtgaatgcacgccagaggaaacagattcttcagagaacaacctacacgcagactttgcaaagtacctcacagaaacagaagatactgtaaaaacaactcgaaacatggagaggctaaatctgttctctctagatccagacatagataccttgaaacttcaaaaaaaagatctcttggaacctgagtctgtgatcaaaccatttgaagaaaaagctgccaagagaatcatgatcatctgtaaagccctcaactcaaatcttcagggatgtgttacggagaatgaaaatgatccgataacgaatattgagcctttttttgtgagtgtggcactttatgacctcagagacagcaggaagatttctgctgattttcatgtggatctaaaccatgctgctgtcagacagatgctcttgggggcttctgtggctttggaaaatggcaacatcgacaccatcactccaagacaatcagaagaacctcacatcaagggacttccagaggaatggctaaaatttccaaagcaggctgtattttctgtaagcaatccacattctgaaattgttttggtggccaaaatcgaaaaagtcttgatgggaaacattgcaagtggtgccgaaccttatattaagaacccagactccaacaagtatgcacaaaagatactaaaatccaacagacaattctgcagcaaattgggaaaataccgtatgccttttgcttgggcagtaagatcagtatttaaggacaaccagggaaatgtggacagagactcaagattttcaccattgtttagacaagaaagtagcaagatttcaactgaggacctagttaaactagtatcagattatagaagggccgacagaataagcaaaatgcagaccattcctggaagcctggatattgctgttgacaacgttcccttggagcatccaaattgtgtaacatcgtcctttatccctgtcaagcctttcaacatgatggctcaaacagaacccacagtggaggtggaagaatttgtttacgattcaacaaagtattgtcggccttacagagtatataaaaatcaaatttatatttaccccaaacacctcaagtatgatagccagaaatgcttcaacaaggcacggaatataactgtgtgcattgaattcaaaaattcagatgaagaaagtgccaagcccctgaaggtgagccaagtcagcaaagggacccagcataaagtgggaaggcagaacaccccagccggccctcgtatggtctacgcagaactgccgcatactggcccaatagctaatgtgggggacccgtgggatgctcacattatggaaggtgcacgtggccaagtgcctgaggaactggaaaaatggctctgggaatgtatttatggaaaacctggagggcccctcttcacctcagccgcctacacagcagttctgcaccactctcagaatccggatttctcagatgaggtgaaaattgagctaccaacacaactccatgagaaacaccatattttgttttctttttatcacgtcacctgtgacatcaatgcaaaagctaatgccaaaaagaaggaggctctggaaacgtcagttggatatgcttggcttcctctgatgaaacacgatcagatagcttctcaagagtacaacatcccaatagcaacaagtctgcctcctaattatttaagctttcaagattctgcaagtggaaagcatggtgggagtgacattaaatgggttgatggtggcaaaccacttttcaaagtgtcgacatttgttgtatcaacagtaaatactcaggatccacatgtgaatgcatttttccaagagtgccaaaaaagagagaaagatatgtctcagtcacctacctcaaatttcatccgctcttgtaagaacttattgaatgtggaaaagattcatgcaatcatgagttttctgcctataattttgaatcagctcttcaaagttctggtacagaatgaggaagatgaaataactacaactgtcaccagggttctgaccgacattgtggccaagtgccatgaggagcagctggatcattctgtccagtcatatattaagttcgtgttcaagaccagggcatgcaaggagaggactgtacatgaggaactggctaaaaatgtgactggtcttttgaaatcaaatgactcaacaacagtaaagcatgtcctaaagcattcctggttcttctttgcaattatcctaaaatcgatggcacagcacttgattgacacaaataaaatccagcttccccggcctcagagatttcctgaatcttaccaaaatgaattggacaatcttgtcatggtcctatccgaccatgtgatttggaaatacaaggatgcacttgaagaaacaagaagggcaaaccacagcgttgccagatttctcaagcgctgctttacatttatggaccgagggtatgtgtttaagatggtcaacaattacatcagcatgttctcctccggtgaccttaagaccttgtgccagtataaatttgattttcttcaagaagtatgtcaacatgaacactttatccctttgtgtctgcccataagatcagcaaacattccagatcctttgacaccttcagaatcgactcaagagttacatgcatcagatatgcctgaatattcagtcacaaatgaattttgtcgcaaacacttcttaatcggaattctgctccgagaagttggctttgccctgcaggaagaccaagatgtcagacacttagctttagctgtcctaaaaaatctaatggctaagcattcatttgatgatcgatacagagagccaagaaagcaggcccagatagcaagtttatacatgcccctgtacggcatgctcctggacaatatgccaaggatttatctgaaggacctgtatccttttactgtcaatacatctaatcaggggtctagagatgatctaagcaccaatggaggatttcaaagccagacagctatcaaacatgcaaactctgtggatacatcattttctaaagatgttttaaattccatagcagcattttcatcaatagctatttctacagtaaaccatgctgactccagagcatctttagcaagtcttgactccaatccaagtaccaatgagaagagcagtgagaagacggacaactgtgaaaagatcccaagacccttgtctttgattggctcaactcttcgatttgacaagttagatcaagcagaaaccaggagtctcctgatgtgttttcttcacattatgaaaacgatttcgtacgagactctgattgcctactggcagagagctcccagcccagaggtgtccgacttcttcagcatcttggacgtttgtcttcaaaatttcagatacctaggaaaacgcaacataataagaaaaattgctgctgcatttaaatttgtgcagtccacccagaacaatggaactctcaaaggatccaatccttcctgccagacatcaggtctcttgtcacaatggatgcactccacttccagtcatgaaggccataagcagcacagatcacaaactttacctataattcgaggcaaaaatgcactttctaaccccaaactcttacagatgttagacaataccatgaccagcaactccaatgaaatagacatcgtgcatcatgtagacactgaggccaatatagctacggaggtttgcctcactattctggacctgttatccctcttcacacagactcatcagagacaactccaacaatgtgactgtcaaaattcattgatgaaaagggtctttgatacctacatgctctttttccaagtcaatcagtcagccacagcgctgaagcatgtgtttgcctccttgagactgtttgtatgcaagtttccttcagcgttctttcaagggcctgctgacctctgtggatcattctgttacgaagtcctaaaatgctgtaaccacaggtcacggtcaactcagacagaagcctcagcccttctgtactttttcatgaggaagaattttgaatttaacaagcagaagtcaattgtccggtcccacttacaactcatcaaagctgtgagccagttaatagccgatgctgggattggaggctctcggtttcaacattcgcttgcaattaccaataatttcgccaatggagataagcaaatgaaaaacagcaatttcccagcagaggtgaaggacctgactaagcgtataaggactgttttgatggccacagctcagatgaaggagcacgagaaggaccccgagatgctggtggatctccagtacagcctggcaaactcctacgcaagcactcctgaactacgcaggacctggctggaaagtatggccaagattcatgccagaaacggagatttatctgaggctgccatgtgttacatccatattgctgctctcattgcagagtatctgaaaagaaagggttactggaaagtggaaaagatttgcacagcatccctgctctcggaggatacccacccctgtgatagcaactcattactaacaactcccagtggaggaagcatgttctctatgggatggccagcttttttgagcattacaccaaacattaaggaagaaggagcgatgaaagaggattctggaatgcaagatacaccatacaatgagaatatcctggtggagcagctatacatgtgtgtggagtttctctggaagtctgagcgatatgaactcattgctgatgtcaacaagcccatcattgctgtctttgagaaacaacgagacttcaaaaaattgtcagatctctactacgacattcatcggtcatatctgaaagtggcagaggtggtgaattcggagaagcggctgtttggtcgctactatcgtgtggcattttatgggcagggcttttttgaagaagaagaaggtaaagagtatatttataaagagcctaagctgacaggtctgtccgagatttcccaaagattactcaagctctatgcagataaatttggagcagacaatgtgaagataatccaggattccaacaaggtaaaccccaaggatttggaccccaaatatgcctacatccaggtgacctatgtgacgccgttctttgaggaaaaggaaatcgaagaccggaagacagatttcgaaatgcaccacaacatcaaccgctttgtcttcgagacacccttcacgctgtcgggcaagaagcacgcgagtcacctgttcccctacgtgaagaagagaatacaagtaattagccaatcgagcacagaactgaatccaattgaagtggcaattgacgagatgtccaagaaggtttctgagcttaatcagctttgcacaatggaagaagtggacatgatcagactgcagctcaaactgcaaggaagtgtcagcgtgaaggttaatgctgggccaatggcctatgcacgagcttttcttgaagaaaccaatgcaaagaagtaccctgacaaccaagtaaagcttttgaaggagatcttcaggcaatttgcagatgcatgtgggcaggcccttgacgtgaatgagcgcctcatcaaagaggaccagctggagtaccaggaagaactgaggtcccactacaaggacatgctcagcgaactctccacagtcatgaatgagcagattacgggcagggacgacctgtcaaagcgcggagtggaccaaacctgcactcgagtaattagcaaagcaactccggccctacccacggtctccatctcatctagtgctgaagtctga

SEQ ID NO: 32479 - DNA, 722 bp, Homo Sapiens
atggtgggcaaccttggactgatagttctaatttggaacgacccccatcttcatatgcccatgtacttattccttggtggtttagccttttcagatgcttgtacttcaacctctataacccctaggatgctggtcaatttcttagacaagactgcaatgatatccctagctgagtgcatcacccagttttacttttttgcttccagtgcaactacagaatgcttcctcctggtgatgatggcctatgaccgctatgtagccatatgtaatcccttgctttatccagtgatgatgtccaacaaactcagcgctcagttgctaagtatttcatatgtaattggtttcctgcatcctctggttcatttcactcagggtacatccaatgaggacatggatgacgaaaatgcaacattgctgacagagtttgttctcacaggacttacatatcaatcagagtggaaaatacccctgttcctggcattcttggtctgtacagacttttcatttcttcatgactcactcttggggatcatccgggccagagtgaatgtgaatggaagagcagtgccttcttgtggtcaccatggtttgggcagcagttgtgactacttccccaaggggaaaacaagtatctgggaaaaggtttgggggttataaggcccatgactcctttcacatggagatttgctctctactgcaaaattaaaagtgttattatggaa

SEQ ID NO: 32480 - DNA, 1946 bp, Homo Sapiens
cagctcctccctcacggtggcctctttcggcccaactcatgcctcttgcaacctgcccaagtgtcagctcctgcctcacactggcctgttgaggcccagcttatgcctctcgtggcctcaacaggcccattccctgcctgtcggcggcctctacaggcccggcctctacctcacagtgggctctccaggcccacctcttcctcaccgtggcctcctggggcaatgctcctccctctcgggagcctctgcgggcccagctcctgccagtggcctctgtaggccaagcccatgcctcagggcagcctttccaggcctagtgtttgctgctttgcatcctctccaggccctggacttcctccagtcggcctctccaggcccagctcttcctctcggcggcctctgcaggcccagactgtcgtcaagtcagtctgtccagggccagctcctgcctcccggtggcctctgcaggcccaagtcgttctcaagtcggcttccccaggcccagctccggcctctcggcggcctctccgggtgcaaaagttcctcgagtcagcctctccaggcccagctcctcctgcctcccagtggcctctttcggcccagcccagctcatgcctcccagcggccttcccaggccccgcttttgactttcggtggcctctgcaggcctcgacaaggcctggcctcctgcctcccgaaggcctgcacaggcccagcctctgcctcacagcagactctccacgcccagctagctctcgcctcactgcagcctcccaagtccaaagctcctgcctctcggccgcttcggcaggcccagctcccgcctgccagtggcctcttcaggcccatggggctcattcctcacaacggcctttccaggcccagtttttcccttccggcggcctctccgggcccagaacctcctcaagtcggcctctccagacccacttgcaccctccgggtgtcctctctgggcccagctcttcttcctggttgcgtctccaggcccgactcctgcctctcaacaacctctttggactcagtgcctacccatctcctggcggccttggtcggcccacagcttcctgaagccaagctccccaggcccaggtcaggcctcacggtggcctctccaggctcagctcctgccctccgatggcatctgcaggccccaaacggcctccggtcggtgggctcctctaggcccagcttgggcctcccggcggcctctgcaggcccaagtcgtcctcaagtcggcctggaattgggcctggaagagcagcaagtcggcctccccgggcccagctccgtcctctcggcggcctctccaggtgcaaaacttcctcgagtcagcctctccaggcccagctcctcctgcctcccagtggcctctttcagcccagcccagctcatggctctcagcggccttcccaggtcccgcttttgacttttggcagcctcttcaggcccagaacttgacctccagtcggcctttgcagtcccggcctcctgcctcccgaaggcctgcacgggcccggcctcggcctcggcctcacagcggactctccacgcccagctagctctcgcctcactgcggcctccccagtccaaagctcctgcctttcggccgcttctgcaggcccagctcccgcctgccagtggcctctttaggcccagcttattcctcacaacggcctttccaggccccgtttttcacttctggcagcctcttggactctaatttttttatcttttgtgtataaatcccaaaatatggaattttggaatatttccatcattatataaatattttggtaggtaatttatttggagtgagtttctgcaccaagcccgaattttttattttattttccttattatttggtgttaaacaggtttaatgacggtcatggcaactttctggcacaataaaaaatatccccgtg

SEQ ID NO: 32481 - DNA, 1152 bp, Homo Sapiens
aggaaggattccctatcttggacctgaggctgctttcttgaagaaaacttgactttatttcatttagtgggaagagcagcagcccagctattaagttctaatatgcaataggctgcaggctgtgaagtgttcgtggcagtagactctgaagctaaggagctgagggcttaacaagtttctagaagctgccatcaacatgccaagtcagtaaaactgatagttgatcagatttcaaggtctggggagtatatccactgtgtactgggtcttgagctctagagagctaggccttgctaaaataaaagaattaccttacctaccatctttgttcaagtctcagtggaatttgttacggccctggctgacctccgagcagaggctagctgtcccatctgtctggactacttgaaagacccagtgaccatcagctgtgggcataacttctgtctctcctgcatcattatgtcctggaaggatctacatgatagtttcccctgccctttttgccacttttgctgtccagaaaggaaatttataagcaatccccagctgggtagtttgactgaaattgctaagcaactccagataagaagcaagaagaggaagaggcaggaagagaagcatgtgtgtaagaagcataatcaggttttgactttcttctgtcagaaagacctagagcttttatgtccaaggtgcagtttgtccactgatcaccagcatcactgtgtttggcccataaagaaggctgcctcctatcataggaaaaaactggaggaatacaatgcaccgtggaaggagagagtggaactaattgaaaaagtcataactatgcaaaccaggaaatcactggaactgaagaaaaaggtaaaacatagggcagaagaagtcaagtctgaatttgagcaacttaggttatttctccaaaatgagcaagagactgttcttaggtaattacaagatgaagagatggatattttagcacaactaaatgaaagcctaacaaaattttcagattatacctcctcattaaaatatctactaaaggaggtagagagcatgtatgtaaagtcagaactggaatcactggcaaatgttaaggatatctgtcacagatataaaaatttaaaattccctgaacctttttcattcaaa

SEQ ID NO: 32482 - DNA, 3760 bp, Homo Sapiens
gcatttaaacttccctcttagaactgcttttgtggcatcccataagttttgaacccattaaaagagccagtaaatcctgtggaaaatggccttcagtgatcttacatcgaggactgtgcatctttatgataattggatcaaagatgctgatccaagagttgaagattggctcctcatgtcctcgcctctgccacaaaccatcctcctaggattctatgtctattttgtcacttccttgggaccaaagctcatggaaaatcgcaagccctttgaactcaagaaagcaatgataacgtacaattttttcatagtactcttttctgtgtatatgtgttatgagtttgtgatgtctggctggggtataggttattcatttcgatgtgacattgttgactattcacggtcacccacagctttgaggatggcacgtacctgctggctttattacttctccaaatttattgagctattagatacgatcttttttgttctgcgcaagaaaaatagccaagtgactttccttcatgtattccatcataccatcatgccgtggacctggtggtttggagtcaaatttgctgcaggtggtttgggaacattccatgcccttctaaatacagctgtacatgtagtcatgtattcctactatggactttctgcattggggccagcctaccagaagtatttgtggtggaaaaaatatttgacatcattacagcttgtccagtttgttattgtcgccatccacataagccagttctttttcatggaggattgcaagtatcagtttccagtctttgcgtgcatcattatgagttacagtttcatgtttctgctgctctttctccatttttggtaccgtgcttacaccaaaggtcagaggttgcccaaaactgtgaaaaatggaacttgcaaaaacaaagataattgaagcccaacataagtctatgatcgaaactgatacattgtcttccttgacaatcaagagatatttacctatgcagtgcattttgtatatttttcaaaactaagagcttgtatttttatggtaagttattgggatgtctgatatttgagagcccgaagcttccagataacagtcttctgataattagagcctacagcagccagaatttgtttttgtttttgtttttgtttttttagctgcttttaaacctaatccaaaggttttgtttaaaacattttgttgcagtgaaaaaaagatatgaagcaatacagtactcttcaaagaagtccaataaagatgaaaaatatcattaggtattttgagcacagacggagatccatgtgataaaatagattccttctgctgggtctggaaagtctggaaaccacctgtaggccctggctttgtcatttattgactgtattcagaagatactatatttgctctagagttaactcccattttagcaagctagcacaggtgaaaattgagtgagtttttgataacttgtcatttaaaatcattaatgataattttcaatggatcttttcagtagccatcaccagttttgctgataagacttcctcacaacccatttgttgtacaaactgtttcaaagtagcaatcctttgggttagtacacttgataccaagtttcattcagttgattattttcaaaacaaggtgatttgttttaatgggttaatgaatactttgctattactgttttacaattaactttgtatatctctggaaagaggtgaatttgtcaatgaaaaaagtattgtgtagttcagtgggaaaaacctgttgtctgttatagtatcacatcactttcttacattgtcatggtttaaattattatcttggtgaaatatataggttagatacttaaatgttcatattattagcacactacaggtactacccttaaatcataaataatattacccattgtacacagtttccagatatgagttagagtggctgtgaagcaactagaggcaaattgtggcacagagaatatccaggggaaaattgattatgtaagcaagggctgttctactttgagagagagacagacagactacataatagtaatatattatataattaatgttatagatacactgaacaataaaacattttctggaattatgaattaattaacaacctggatttctgtttccagacctataaaccatgtaatgaaggactgaaattcgtttggcatacactttgtttctttaaaattgctagtttctttctgttatttttacattttcttgtcagagaatcaaaactattagtcagtagagttttgtccatgaaataatatttggacatttgtgaatttttccctattttttttcttcttttatttatactcaattttgaagcactgtttatgtttgtaggactttaaacaattagtacttaaagccccagttaattttgaacacacagagatacttattgtactctgtgtacagtaagtatttttatgtttacacttaccagattcataaggttatttgcctttaagtgatcttttgtgattttacttgattacagcatgagaaggtaaaggttgataaatgggagtaattacatatatatatataatttattatttttttttctgaagcagagttttactcttgttgcccaggctagagtgcaatggcacaatctcggttcactgcaacctctgcctcccaggttcaagtgattctcctgtctcagcctcccaagtagctgggattacaggtgcccgccaccatgctcagctaatttttgtatttttagtagagacagggttggccaggctggtctcgagctcctgacctcaggtgatcctcccacctcggcctcccaaagttctgggattacaggggtgagccactgtgcccggccataattttatatttttagaaaataaagaatgaaggacaaaagagcacagctaaatgaaactgctgctctaatttattccactggaaaggtctcaggactccttaactgttttccaggtttggctcttcatatctaacctgtgctaaaatgagaaggtatgctaggtgctgttagaaatcacaccatttccaaagaacccaagtagtatagagaccaaaatgaggcaaaaataaaagagatgaaacaggagagtttatttcttgcatactttccgaccttcatcatacaacctctcctaacctccctgtagtctttaaaatgtttaacttgcctataagctaacatgtaataaaacacatactcaattatatgaatagaagtggagagccagaatgctacaaaagaaatcacagctgctagaagtatcctccatagaaacatcaacatgattgtggatcaaaatgattttcactggatatggaatttgtatgggccatatttattaaaagagttctgtgtggtcacatagagttcctttgggatttcatcccacttttcaggacttaatttgtttgggtttgcttacctaacaagcaacaacaacaacaaaataaatagttccaaaatctagtttattacataaatctctatgaatccttgagggcctatatctatattataaataaatacaaatatagatttttaaatatctatgggactttgccatttacagccttaagtataaaattacgagattatattctttccattaccctttatttctgctaactttttaaagactggaacattctgtggatgttgtcaaagtttgagtttgtttttccctgtgtattataataaatttgtggtattgca

SEQ ID NO: 32483 - DNA, 3248 bp, Homo Sapiens
ttttttaagctccgaaatagtaatcttttggctcgacgccgaggaattccagaatgcattctgttggtcactcagcgtattacaaaataccctgtcttggtggaaaggatattgcagtacacaaaggaaagaactgaggaacataaagacttacgcaaagcgctttgcttaattaaagacatgattgcaacagtggatttaaaagtcaatgaatatgagaaaaaccaaaaatggcttgagatcctaaataagattgaaaacaaaacatacacgaagctcaaaaatggacatgtgtttaggaagcaggcactgatgagtgaagaaaggactctgttatatgatggccttgtttactggaaaactgctacaggtcgtttcaaagatatcctagctctacttctaactgatgtgctgctctttttacaagaaaaagaccagaaatacatctttgcagccgttgatcagaagccatcagttatttcccttcaaaagcttattgctagagaagttgctaatgaggagagaggaatgtttctgatcagtgcttcatctgctggtcctgagatgtatgaaattcacaccaattccaaggaggaacgcaataactggatgagacggatccagcaggctgtagaaagttgtcctgaagaaaaagggggaaggacaagtgaatctgatgaagacaagaggaaagctgaagccagagtggccaaaattcagcaatgtcaagaaatactcactaaccaagaccaacaaatttgtgcgtatttggaggagaagctgcatatctatgctgaacttggagaactgagcggatttgaggacgtccatctagagccccacctccttattaaacctgacccaggcgagcctccccaggcagcctcattactggcagcagcactgaaagaagctgagagcctacaagttgcagtgaaggcctcacagatgggcgccgtgagtcaatcatgtgaggacagttgtggagactctgtcttggcggacacactcagttctcatgatgtaccaggatcaccgactgcctcattagtcacaggagggagagaaggaagaggctgttcggatgtggatcccgggatccagggtgtggtaaccgacttggccgtctctgatgcaggggagaaggtggaatgtagaaattttccaggttcttcacaatcagagattatacaagccatacagaatttaacccgtctcttatacagccttcaggccgccttgaccattcaggacagccacattgagatccacaggctggttctccagcagcaggagggcctgtctctcggccactctatcctccgaggcggccccttgcaggaccagaagtctcgcgacgcggacaggcagcatgaggagctggccaatgtgcaccagcttcagcaccagctccagcaggagcagcggcgctggctgcgcaggtgtgagcagcagcagcgggcgcaggcgaccagggagagctggctgcaggagcgggagcgggagtgccagtcgcaggaggagctgctgctgcggagccggggcgagctggacctccagctccaggagtaccagcacagcctggagcggctgagggagggccagcgcctggtggagagggagcaggcgaggatgcgggcccagcagagcctgctgggccactggaagcacggccggcagaggagcctgcccgcggtgctccttccgggtggccccgaggtaatggaacttaatcgatctgagagtttatgtcatgaaaactcattcttcatcaatgaagctttagtacaaatgtcatttaacactttcaacaaactgaatccatcagttatccatcaggatgccacttaccctacaactcaatctcattctgacttggtgaggactagtgaacatcaagtagacctcaaggtggacccttctcagccttcgaatgtcagtcacaaactgtggacagccgctggttccggccatcagatacttcctttccatgaaagcagcaaggattcttgtaaaaatggctccagtatgacaaagtgcagttgtacgttgacatctcccccgggactgtggactggaaccacatctactttgaaagatttggacacctcccacactgagtccccaaccccccatgactcaaattcacaccgccctcaactgcaggcgtttataacagaagcaaagctaaatctaccgacaaggacaatgaccagacaagatggggaaactggagatggagccaaagaaaatattgtttacctctaattgtgttgtcatttttccaaacaaaacaaaacactggcacttttgggagaaactttttgtctccattccttatgtatgtgtgattgtctgtgtccaaattgctttaagaataatatttaatatttcctggaagctcatttttttggcatgagtctaattaaattattgaaagccaccctgtttgtataatctttaacttatcaaatctaatttcagatttctggaggagaaactaacttgaataagcaggactattttaaaagttgttttgacgctagagtaaaattccatgtcacattttctacccaatcatctggatttcaagattccttttaagatctcaatgaagcaatttggatttaaagagtggtattcacaaggggtgaactttcacagtcagggcagttgcctcagtgcccacataggcagaggaggatgtgggaaagggtttttctcagctagtttttgtgtgctcatttcttctgggagcattaaaagtggtgatctgttacagtcactattcaactgggcacgtgttgtgattggtcagtcactgagccagggatacagtccggacttgcttagtacctaagcctaatgctggtggggtttcaagacatggttcagcatcatcttttaacaaggcccagaggcccagagcccccatcaagtcattttgatgtaaatagtgaactttgttagagccctcacttctatcaatcagctgtcctgtccctgccagcacctggagcaccaactaccactccctggaaagaacccttccctgcagttttttaaggacaaaactgcccactcctcattaagtttgctgcctggatacacttttccacaaaggaaaactggcatatcctgccttccgagtagtatgggtctctgtgtgagaaaccaggagatattttcatcttgttcggaaatacttgtatgtattttggtgtcaataaatatcttgtacctcatta

SEQ ID NO: 32484 - DNA, 790 bp, Homo Sapiens
atggaggaacctgtcccggtcggccgaagcgccgcgggcgcctttccacttacggcgggcctgcccagcctcccgcccagcccgggcccgggtcccgccgaggcagggtttcgctttcgctttcctgccgatgtcgttgaggaaaatgaaagcggtcgtggccaggactggcgcagctgccgtttcaggcgaggggcgcagaatgcagcggccgccagcctggagcgcgggccctggggccgcaacccgcgccgggcgaggtggcagcacaccctgggccccccactccccgccgcaagtcctgaggatggccagcagagaaacaagaaaatggactccctggctgctggagagttgaatgccagccaccagccatgggtgccagagtttgtagcctattggaggaaaacacaccaagatcacctctgcagcctgcacagccgggcctttggactcctggatgctagagtgacctgggcgctgaggagggcccccgagccagtaccaggaaaggatagactcctgcttgcagcattcccagcagaggcatcgcctgtggacaccgcgtctgtgtctgtatatggcagagctcccagatatatgcacaagggagtgaaaaaatgtgtttgcaccccagtctctaaaaattcaacagcctggttacttctgggtggtatatcgtaggtggctttaatacgtgttatttgctcatctgtatttcttactctttgcacaattaaaccatgttccttttacttatgtacatttttaataaaagaaagttgttaat

SEQ ID NO: 32485 - DNA, 4723 bp, Homo Sapiens
gatgccgtggcgtgctcgctttggccatccatgtccctcgtgttggacactagagctgtccccgatgtacccatactgacctggtcacgaatcgccttgagaggctggaaactcacccgcctcctttcccggactagggggaagtggggtgaaggaggcgtgcagggaggaacctgggggagggggtggcccgtctcccaggctgggcgtgggccgggcgaggtccccagcccaccgggccgtgccaacaatggcctgttgtagaaggaggcgggaaggaatgcggcctggggagctgggcggcggcggggcggggcccggccaagcggctgccttttacctggccaggtagctcgcatttcccggcaagcggcggcgcccgcagcacctgttgcccggtgcgcgggcggggaggacggcgggggacatggcctggtagagtcccctggggaaaccgtgctgagttcagtccggggcagggcagggcgagggagggaaggtccttccctggcgcccgcgcgggctgcggcagcatgaaaaagaagcagacggtgcagggcaccttcagcaaactcttcgggaagaagcacaccacgacccccagcacctccctctacgccaccaatccgccctggatcttcacccaggaggccccggaggaggggaccgggggcttcgatggcatctattatggagacaatcggtttaacacagtgagcgagtcaggaacagccacgctgaaagctcggccaagagtccggcccctgctgaccttccttccgctgaatgcccaggaaaaccatgggctggctgtgcccaccccctcggttccagatgattttgcagacaaagaagtgacaggtaccagctcactagtcaatggcaacctccgactgtacagctctaaggcagcccatccacctgctgggtttacaaaaacccctaaatccagctctcctgctctcaaacccaaacccaacccccccagcccagagaacacagcgtcttcagcacctgtggactggagggaccccagccagatggaaaagctgcggaacgagctggcagcctatctctgtggctccaggagagaggaccgattcctcagtcacaggccaggcccaacagtggcccctcagagcaaggagggcaagaagggcccccgcctgcctgagaaggagactctcctgagcctgccagcaaaggacactcccccaggtgttcctgaaaagagtcttggcggcagcagcctgacagagacagaggctgcccccagcctgaccctgccctctgtggactacattccccaagactctccaactcccagtgtgcggcagatccggaatgagctggaggcccggctctcctcagcagcagagaaggaggctaagcccagcataggatctctgccccctaagcctcggctagaagggggaagaatttgtgaaaacggggctgatgatgacaaactctccaagcctgtggccaagaatctgccacctcaatccaccaccctgctgccaactacatcactccagcccaaggctatgttgggaccagccataccacccaaggccacacctgagccagccataccacccaaggctacactttggccagccacaccacccaaggccacacttgggccagccacaccactcaaggccacatctgggccaaccacaccactcaaggccacatctggccctgccatagcatctacagccacaactctgcccaccaccacatcccaactgatggcagagaaggactcaggcccagctggccagccagagaagccagcatctcaagaagtttccactccctcccaggcaaggggagaggggtccccctcagaggccactaggctgcccacacagggagcccgctcatctgcagccttcccaccaaagacatctcctggtggaggagaggtgccatgtctctacaagccccactgccaccagagcagcctcagccgtgaggttgctgtggtgatgcccaccctggccagaggaggggctgcagggccaggggagcccgtggaggtgaaggagcccccagggctgccagccaagcctcctgcctcggcccagcccactgatgaactcctcaggcacccggtgactggggaggtggtggagcggggctcgccgatggccctgctcctggcggccaggcagagggctcagaagggaaggtctgtaggggctgccctgggtcggtcctctctgccaggaagtctccgtgaccacagccaccaagccgaggccagctctgacagcatcttccacagccagggcacgcccaactccttcactgtggtgcccaagttacccaaggaggctgagaaggactccccgctgacgaccgaaatacccaataagtgggggccgcggctgggaagagacgcagagggcacagagctgagccgcaggcacaactggacaaagccagagccccaggcccctgtggcctgggaaagagtagctccctccaacctcccccagggccacccgctgcccaagtccttctcctccccaccttctccttcgaacaagagggaggaggaggaggaggagttcaacttcgaggtcatcccaccgccgccagagttcagcaatgaccctgagcccccggccccggccctccagtatctgggccgccagagctcccctccccggaacaactactcagacttgaggcagctcccgaacgctggccccggggcgcccccggctctcggcttctcgcgctttcccgcgggcgcgcgctacgccggggctgggggcctggagcgcttctcgggagggggccgctcgctcataaagaagcgcctgtacgtcggggagccgcaccgaggcccagggctaccccacggtggcaccggccgcagcctgagctctcccaactgcttcgggccgcagcccggaggccccgagatgcggcgcgtgaactcggcgggtcgcgcgccccccggaggcctgcacgcgccgaggctgtccctggagggcgccgcccggggcgccgcggaggccaagcacaaagcgcccggcagcgccgactacggcttcgccccagctgccggcaggtctccctacaccaccacccgctatggaagccccatcaacacgttcaccgtgaggcctgggacccgccatcccatctcctatgtctgctcaggggcccatcggaaagccacctcctgagccaggggttctcttagctctactccaacaaactgtgtctttaaggatctgggcacttgtttcttgtggggggtgggaggtacacagcaggtgttgggcgacctgactcagacacagaggagtctttgatccccaaagaccaacgatgagaagcagtggcccaggaagaccgagagtgggcttctgtttcccaaagcgctggtgtgactgtggactgtttacacgtggggggtgggaggggaaggagggtagagagaaggaaccattaaggacctgggcgctgagtttctgctctctggtactatctgctttagcaagagttatttaaaacagttttacaagcacggcctactgagcaggttctgaaagcaaggggtggggcactgactgaactggaacccatcgagatagctgtgattgcctgtcaggcccttgcaaagggctgaggcccagctctgtctggtgggtgtgcagggcaccgaagggagatctttagcctccatcacctgccatcccaagcaagagtggacacctggggttcctagccgcattgaggtgggaccaggaatgtgtatgtataacatgtggagaaggaccatgtgtggggtggggagtgaagctcccacatgtggaatggaagccctttgcattggccaagggcagaggtgggagattgatggttcatttttccttggccctagcccttagctacagggaggcctagagagaggacacttggcaagtttaggatgggaaacaaggttaagcctggctttgctattcagacctgtgcagccctgattttggggactgggcccaaggagccatgagtcttaggcttgacactaggggccttacatggccaggtctcatatgggatttggagaaggcatttttcctaacactgatactacaagtcaccaatactcttgatgccttaagatgctagaaagccttggagagtggaggcagcagagatgggaatggaggtctgaagaagcttgctgctgttggggaatgtgtttgggaaagtcaagagtggtaggattggttggctgggcgcggtggctcacacctgtaatcccagcactttgggaggccgaggccggtggatcacttgaggtcagaagttcgagaccagcctgcccaaatggtgaaaccccatctctactaaaaatacggaaaaaaaaaaaaaaagagtgctaggattgggccagttaagagcaggggagacctggctgggcatggtggctcacacctgtaattctagcactttgggaggctgaggcgggtggatcatgaggtcaagagattaagaccatcctggcctacatggcgaaaccctgtctctactaaaaataaaaaaatgacctgggcatggtggtgggcgcctgtagtcccagctactcggggcgctgaggcaggagaatcgctcgaacccaggaggtggaggttgcagtgagccgagattgcacaattgcactccagcctggcgacagagcgagactcgtctc

SEQ ID NO: 32486 - DNA, 3096 bp, Homo Sapiens
atgctgccctttctgctggccacactgggcaccacagccctcaacaacagcaaccccaaggactactgctacagcgcccgcatccgcagcactgtcctgcagggcctgccctttgggggcgtccccaccgtgctggctctcgacttcatgtgcttccttgcactgctgttcttattctctatcctccggaaggtggcctgggactatgggcggctggccttggtgacagatgcagacagtgtggcttcagctatgcacggggacagccatgaccggtatgagcgtctcacctctgtctccagctccgttgactttgaccaaagggacaatggtttctgttcctggctgacagccatcttcaggataaaggatgatgagatccgggacaaatgtgggggcgatgccgtgcactacctgtcctttcagcggcacatcatcgggctgctggtggttgtgggcgtcctctccgtaggcatcgtgctgcctgtcaacttctcaggggacctgctggagaacaatgcctacagctttgggagaaccaccattgccaacttgaaatcagggaacaacctgctatggctgcacacctccttcgccttcctgtatctgctgctcaccgtctacagcatgcgtagacacacctccaagatgcgctacaaggaggatgatctggtgaagcggaccctcttcatcaatggaatctccaaatatgcagagtcagaaaagatcaagaagcattttgaggaagcctaccccaactgcacagttctcgaagcccgcccgtgttacaacgtggctcgcctaatgttcctcgatgcagagaggaagaaggccgagcggggaaagctgtacttcacaaacctccagagcaaggagaacgtgcctaccatgatcaaccccaagccctgtggccacctctgctgctgtgtggtgcgaggctgtgagcaggtggaggccattgagtactacacaaagctggagcagaagctgaaggaagactacaagcgggagaaggagaaggtgaatgagaagcctcttggcatggcctttgtcaccttccacaatgagactatcaccgccatcatcctgaaggacttcaacgtgtgtaaatgccagggctgcacctgccgtggggagccacgcccctcatcctgcagcgagtccctgcacatctccaactggaccgtgtcctatgcccctgaccctcagaacatctactgggagcacctctccatccgaggcttcatctggtggctgcgctgcctggtcatcaatgtcgtcctcttcatcctcctcttcttcctcaccactccagccatcatcatcaccaccatggacaagttcaacgtcaccaagcctgtggagtacctcaacaaccccatcatcacccagttcttccccaccctgctgctgtggtgcttctcggccctccttcccaccatcgtctactactcagccttctttgaagcccactggacacgctctggggagaacaggacaaccatgcacaagtgctacactttcctcatcttcatggtgctgctcctaccctcgctgggactgagcagcctggacctcttcttccgctggctctttgataagaaattcttggctgaggcagctattcggtttgagtgtgtgttcctgcccgacaacggcgccttcttcgtgaactacgtcattgcctcagcctttatcggcaacgccatggacctgctgcgcatcccaggcctgctcatgtacatgatccggctctgcctggcgcgctcggccgccgagaggcgcaacgtgaagcggcatcaggcctacgagttccagtttggcgcagcctacgcctggatgatgtgcgtcttcacggtggtcatgacctacagtatcacctgccccatcatcgtgcccttcgggctcatgtacatgctgctgaagcacctggtagacaggtacaatctctactacgcctacctgccggccaagctggacaagaagatccactcgggggctgtgaaccaggtggtggccgcgcccatcctctgcctcttctggctgctcttcttttccaccatgcgcacggggttcctagctcccacgtctatgttcacatttgtggtcctggtcatcaccatcgtcatctgtctctgccacgtctgctttggacacttcaaatacctcagtgcccacaactacaagattgagcacacggagacagatactgtggaccccagaagcaatggacggccccccactgctgctgctgtccccaaatctgcgaaatacatcgctcaggtgctgcaggactcagaggtggacggggatggggatggggctcctgggagctcaggggatgagcccccatcatcctcatcccaagatgaggagttgctgatgccacccgacgccctcacggacacagacttccagtcttgcgaggacagcctcatagagaatgagattcaccagtaaggggagggaggggccctggaggccacatcctgccccaccccacccccactcccacggacactaaaacgctaataatttattagatctaaagccccttcctccccagcccctgctttcattaaggtatttaaacttgggggtttcactgctctcccccatgatggagggagggagccccccaacctcagtgaggagagccccgagccggccccggggcaaagaggggtgcagagggagttcccccagatcagtaccccccacccctccccagctagtagcatgaccaggagagggttaatgagagccaagaggagtacctggtgcacctggtgccggtggctggagacctggggggcaggtggatctggggctgttcccccccctccgttttttccaccccacagttcctcctgggatctggccctccagggaagtggagcctccagcccctaggggatgcatgaggggggagggggtgctgagtgggaggaagagtcaggctcacagctggggtggcctgggggtgggggtgggcaaggctgacactggaaaatgggtttttgcactgttttttttttggtttttttgttcttttttgtttttttcctttaaaataaaaacaaagaaaagctctga

SEQ ID NO: 32487 - DNA, 5798 bp, Homo Sapiens
cttcctctacatccccgttcccgattcctgtagtagcggctgtattgcagccgcctgccgaactgacccgggtctggggactggcccctctggcgccgttcggtttctcttattgccttcactgaggatgagtccctttgtggctctatgtggaccctgcggaatccaccggcgcagtttcatctagcgactggtcacccttgcaattatggatatttaaaagggtcagacagtgtggagggggagttcccctcctcactcccccttggtgcttgactccaggaataatttataaactgtggaatttttttaaatgaagaacttgtatttgatatgaactttatagagctatttataatttttttgatttaagtgccaaaaaattgtataaagatatatagttttatactattgtcaggaggatttaaattatcctaaaaaggtaatttattctctgtaacttcctcaatagcacctttgtgtcctggctttttcattttttaaaattagttttcacgattctgaagtaagtggtataaaaacagttaggatgagttcacccatgcctgactgcacatcaaagtgtcgatccctgaagcatgctttggatgtcctttctgtggtaacaaaggggagcgaaaaccagattaaggcctttctctccagtcattgttacaatgctgcaactatcaaggatgtttttggcaggaatgccctccaccttgtttcctcctgtggaaagaaaggagtgttagattggcttattcagaaaggagtggatctgttggtgaaagacaaagagtctggatggacagcattgcacagaagcattttttatggacatattgattgtgtttggtctctattgaagcatggtgttagtctgtatattcaagataaagaaggcttgtcagctttggatcttgtaatgaaggatagaccaactcatgtagtattcaagaatactgatcctacagatgtttatacttggggcgataatacaaattttaccctgggtcatggaagccagaatagcaaacatcatccagagttggtggatctgttctccaggagtgggatttatatcaagcaggtggtgctttgtaaatttcactccgtgtttctgtctcagaaagggcaggtttatacctgtggtcatggtcctggagggcgattaggacatggagatgaacagacatgcttggtccctcggcttgtggaaggactgaatggtcataattgttcccaagtggcagctgctaaggatcatactgttgtattaactgaagatggatgtgtttatacatttggtctaaacatttttcatcaattaggaattattccaccgccttccagttgtaatgtacccagacagatacaggcaaaatatctgaaaggaaggacaatcattggcgttgcagcaggcaggtttcatacagtcctatggactagagaagctgtttacactatgggactaaatggtggacaactgggttgtttgctagatcccaatggagaaaagtgtgtaactgctcctcgtcaggtctctgcccttcaccataaagacattgctctgtctttggttgctgcaagtgatggagctacagtctgtgttaccacaaggggagatatttacttacttgcagactatcagtgcaagaagatggcttctaaacagttgaacttgaaaaaagttcttgtgtctgggggtcatatggaatacaaggttgatcctgaacatttgaaagaaaatgggggtcaaaaaatttgcattcttgcaatggatggagctggaagggtgttttgctggagatcagtcaacagttctctgaagcagtgtcgatgggcctatccacgtcaggtcttcatttctgatattgctttaaatagaaatgaaattctatttgttacgcaagatggagaaggatttagagggagatggtttgaagagaaaagaaagagttctgaaaagaaagagattttatcaaaccttcacaattcctcatcagatgtgtcttatgtctctgatataaatagtgtgtatgaaagaattcgacttgagaaacttacctttgcacatagagctgttagtgtcagcacagatccaagtggatgcaactttgcaatcctgcagtcagatcctaaaacaagcctttatgaaattccagctgtgtcctcatcatccttttttgaagagtttggcaaactgttgagggaagcagatgaaatggacagcattcatgatgtgacatttcaagttggcaatagactcttccctgcacataaatatattttggcagtgcattctgatttttttcagaaattgtttctttcagatggtaatacttcagaatttacagatatttaccagaaagatgaagattctgcagggtgccatctctttgtggtagagaaggttcatcctgacatgtttgaataccttttacaatttatatacacagatacttgtgactttttaactcatggcttcaaaccaagaatacacttaaacaaaaacccagaagaatatcagggaactctgaattctcatttgaataaagtgaatttccatgaagatgataaccagaagtctgcatttgaagtttacaaaagtaatcaagctcaaacagttagtgagaggcagaagagcaaacctaaatcttgtaaaaaaggaaaaaatattagggaagatgatcctgtaagaatgttgcaaactgttgcaaagaaattcgacttcagtaatttgagtagtaggttagatggagtcagatttgaaaatgaaaaaattaatgttattgccaagaacactggtaataaactgaagctaagtcagaaaaaatgttcatttctgtgtgacgtgaccatgaaatcagtggatggaaaggaatttccttgtcataaatgtgttctttgtgctagacttgaatattttcatagtatgctgagtagctcatggattgaggcttccagttgtgcagctctggaaatgccaatacattctgatatattaaaagttattttggactacctctatactgatgaagctgtggtgataaaagaatctcaaaatgtagattttatttgtagtgttcttgtggtggctgatcaacttctcataacccggttgaaagagatttgtgaagtagcattaactgaaaaacttaccctgaagaatgctgctatgctactggaatttgcagcaatgtatagtgcaaaacagttgaaactgtcttgtttacagtttataggattgaatatggcagctttacttgaagcaaggtctcttgatgttttaagcgatggtgttttgaaggatctttctgagttttaccggaaaatgattccagcaatggatagaagagtcattacaccatatcaagatggaccagatattagctatttggaagtagaagatggagatatcttcttgaaagaagaaataaatatggaacaaaatcattcggaaactatgttcaagaaagcaaaaacaaaagctaaaaagaagccacgtaaacgttcagatagttctggaggttataacctttcagatattattcagagtccatcatctacaggattattaaagtctggtaagaccaattctgtggaatctcttccagaactgttgacatcagactctgaaggaagctatgcaggagtgggtagtcctagagatttacagtcccctgatttcacaacaggatttcattcagataagattgaggcgaaagtcaaaccgtatgttaatggtacatctcctgtgtattctagggaagatttaaaaccatgggaaaagtcaccaatacttaaaatatctgctccacagcctattcccagtaacagaattgatactaccagctctgccagttgggttgctggttctttcagtcctgtcagccctcctgttgtggatctcagaactatcatggaaatagaagaaagtagacaaaaatgtggagctacaccaaagtcacatttaggcaaaacagtttctcatggagttaaactttctcagaagcaacgaaaaatgattgcattgactaccaaggaaaacaattcaggaatgaatagcatggaaacagttttattcactccttcaaaagcccccaaaccagtgaatgcatgggcatcttctctgcattcagtttcatccaagtcattccgggatttcttactagaagaaaaaaagtctgttactagccatagttcaggcgatcatgtcaaaaaagtttcttttaaaggaattgaaaattctcaggcaccaaaaattgtcagatgctctacccatggtaccccaggaccagaaggcaaccatatttcagatttaccacttctagacagtcccaatccctggctatcttcttcagtgactgctccatccatggtagccccagtcacttttgcatctattgtagaagaagaactacaacaagaagcagctcttattagaagtcgagaaaaaccgttggctctgattcagattgaggagcatgccatacaagatttattggttttctatgaggcatttggcaaccctgaagagtttgtcattgttgaaaggacaccgcagggaccactggcagtacctatgtggaataagcatggatgctagttcactgtggagttgagatgcattttacataattatgagtttgttcatataaagaaaagctgtggaaaagagtcttagagattttgtaatatcattctaaatagattaagaaaagatataatttctttactgcagttaaatcatataatgtttgtatgattaaaaataaatttctcagaattgtgattttagtaactttatataaaatgtgtgagacaaaaacttattaaggttaaatagaattgtttcttctgaataatctaacaaaggaaaatataagtgattgaatcataagatataaggggggtaaagtattaaaaataacttttttgtttgataacttgagaatttagaagattttgccaagtatgtgttgttgcttgacttcttaaatatggcattgatgaatttaaagtaggagcatcagttattacttctgattcattaatggccagaattttgtgtttggtgtaatagttgtgtcaccattcttgttgctttttaaaaatcaggctaatcatgtggtccatgtctcttcaaagcttgacctgcacaaatgccatatttctatttggaccacatattctccattttgcattgagcagtagagtacagtggaaagggaataagaatactgattattctgaacagtttagtcccaagagaatagcgttttaaaaaagaaaaacaagatttggagtcattgtgggttatttttggtgggatggaggatcttaaaaatgcctaattgtgagagaatcaattgctgaaagtgttaaaatttctgaaaataaatgcttaattacatatacaggaattaaatagtttggaagagggttggattatcattacctttacaatactgtataatcagaagttctctgaacctcaattgtatatctagacataaaaattgttttctgtataggatgttgtttggtttgtttctgagtgtttaaattttgcaaaaacaaatgttaaatttgtgcttcagtacctagataaattggaaaggttaatgttctagtttctggaaggtaagcctgggagacacataagcaattcactgctataatttagttgatgtaaaatgacggaaactgactcaatatgtcaggtttaactctgcccaaaagcagcagacatgtaagcagatgtgcaataaaaaatgatcttgatccatttc

SEQ ID NO: 32488 - DNA, 3206 bp, Homo Sapiens
agtgagactgtagggtgggcggtgcgagcggcggttagctcccagttcggcctctgaggaaaacgggcgttcgcctgcggttggtccgactgttagcaacatgagcggcctggatggggtcaagaggaccactcccctccaaacccacagcatcattatttctgaccaagtcccgagcgaccaggacgcacaccagtacctgaggctccgcgaccaaagcgaggcgacacaggtgatggcggagccgggtgagggaggctcggagaccgtcgcgctcccgcctccaccgccttcagaggaggggggcgtaccccaggatgccgcgggccgtggcggtactccccagatccgagttgttgggggtcgcggtcatgtggcgatcaaagccgggcaggaagagggccagcctcccgccgaaggcctggcagccgcttctgtggtgatggcagccgaccgcagcctgaaaaagggcgttcagggtggagagaaggccctagaaatctgtggcgcccagagatccgcgtctgagctgacggcgggggcggaggctgaggcggaggaggtgaagacaggaaagtgcgccaccgtctcagcagccgtggctgagagggagagcgctgaggtggtgaaggaaggcctggcggagaaggaggtaatggaggagcagatggaggtagaggagcagccgccagaaggtgaagaaatagaagtggcggaggaggatagattggaggaggaggcgagggaggaagaagggccctggcctttgcatgaggctctccgcatggaccctctggaggccatccagctggaactggacactgtgaatgctcaggccgacagggccttccaacagctggagcacaagtttgggcggatgcgtcgacactacctggagcggaggaactacatcattcagaatatcccgggcttctggatgactgcttttcgaaaccacccccagttgtccgccatgattaggggccaagatgcagagatgttaaggtacataaccaatttagaggtgaaggaactcagacaccctagaaccggttgcaagttcaagttcttctttagaagaaacccctacttcagaaacaagctgattgtcaaggaatatgaggtaagatcctccggccgagtggtgtctctttctactccaattatatggcgcagggggcatgaaccccagtccttcattcgcagaaaccaagacctcatctgcagcttcttcacttggttttcagaccacagccttccagagtccgacaaaattgctgagattattaaagaggatctgtggccaaatccactgcaatactacctgttgcgtgaaggagtccgtagagcccgacgtcgcccgctaagggagcctgtagagatccccaggccctttgggttccagtctggttaacatttgcccttgggaatactcctgcacaaggtctcctaccaccttctgctggacctgtgcttgggcatcagcaatgagtatgccttctattgtgctttgtttttgctgacttttctgcaccctgtttcctttggatattcagttctctcaacctcaagattgagacggtggtgggtatgcttctccacttccatatgaccttcatgctgttctggaatatcacatgctacgaggtcatccttcacactacttgtaagccaagcaaatgatactgtagattgtactgcctttatctgcactgcttggaccctgtttattcccagggcctctgaactggttgctgtcacttggatttctagctttgggagcctgttccacctactcagctctgcattgagcagtatgggcacatgccctgtggacagttactggacgttaatgaactcagaggagaaaagcagtgagccacttgttctgtgtgatttatggtacttcattgctcttccttcacctctagtcactttctattgctacctgccctacattggctcctgccaaggtccctctctctccctgttttccttttttttttttttttttttttttttgagacggaggacggagtcttgctctgtcgcccaggttggagtgcagtggcgcgatctcggctcactgcaacctccacctcccgggttcaagcgattctcctgcctcagcctcccgagtagctgggactacaggcgcgcgccgccacgcccggctaatttttatatttttagtagagacggggtttcaccatgctggccaggctggtctcgaaccccgatctcgtgatccgccctccttagcctcccaatcctctcttaaaaaagtgatagctcagaaacatttgtaaaagcaaggtttttatttcattttggctctgtcattttcagaggcaaagaagttggcctgtaaaatagagtgctagagctcttacgcccctccccttcttcccaacttcctacttcctagcccttttatcaactcctagaatagttaaagagagacacatctagatgggatgaaaggtgccctaagcaggagaaactgaacaaaaggctagaggcatgggccaggtaaaaattgggcctagagtgaagactgtgctgtcgttaagagctttcgaggaaggagtacttactccccaatgatgatgaatggaaaaatacttttcagggagaattgaaggggttaaagtgttaaatatgttgcctagacaagggttctttaaagaaagacagcgcaactttgaatgctttcttacttgttttgtgacctaatttatgtggaagattgttatttcattaggatttagtaaaatttttttttctgattctaaacttattgtgaaaattgagctgtacagatattcttttgatttcaattgggaacatttggaagaacaacagtcttacttgcctgtacaatatagagacatatgaatagtcataacagttttcaacttgttcttgtttctgttaaactatattcctagaaacatagtttgaacaacttggtctttgttaggcttgtcaaattgccttcatggaaaaataatctacaaaagtatggtttaattgattgtcttacatgataattttccctggtaacaacttagtaagtgatatatcttttttcctaaattgcttaaatactgtgaaattgctctgacaaattggaagtgtaccattggcatatttgtcttcctttttatgcatgatggtaaaataaaagcatgttgttctgctag

SEQ ID NO: 32489 - DNA, 5141 bp, Homo Sapiens
cgcatggagcggcgcgggccgggggccgccacggcgaggggccgggccaggccgggcggagccagagcagctgagttccagataaaaactgtcagacccggcctgtaggctgctccattgccaatgaactccatgaaccccatgaaacctgccctgccccctgcgccacacggtgatggttcattcgcatatgagtctgtgccttggcaacaaagcgccactcagccggctggatcgctgtctgtggtcactactgtgtggggagttggcaacgcgacacagagccaggttttggggaaccccatgggccctgcagggagtccctctggcagctccatgatgcctggtgtggcagggggcagctccgccttgacctccccacagtgcctgggacagcaggcgtttgctgaaggcggcgccaacaagggctacgtgcagcaaggcgtgtacagccgcgggggctaccctggggcccccggcttcaccaccgggtatgcaggcggcccggggggcctgggcctcccctcacatgctgcaagaccctccactgacttcacgcaagcggcagctgctgcagctgtggctgctgcggcagccactgccaccgccacagccacagccaccgtggctgctctccaggagaagcagagccaggagctgagccagtatggagcgatgggggccggacagtcttttaacagccagtttctgcagcatggaggtccccgggggcctagtgtccccgctggcatgaaccctactggcataggaggggtaatgggcccctctggcctctcccccttggctatgaaccccacccgggcagcaggaatgacacccttgtatgcagggcagcgtctgccccaacatgggtatcctgggcctccccaggcccagccactgccccgacagggggtcaagagaacctactctgaggtgtatccagggcagcagtatctgcaaggaggccagtatgcacccagcaccgcccagtttgcgcccagccctgggcagccccctgccccctccccttcctaccctgggcacaggctgcccctgcagcagggcatgacccagtccctgtccgtgcctggccccacgggactgcattataagcccacagagcagttcaacgggcagggcgccagcttcaacgggggcagcgtcagctacagccaacctggcctgagtgggcctacccgttccatcccgggctatcccagttccccactgccagggaaccccacgccacccatgaccccaagcagcagcgtcccttacatgtcaccaaaccaagaggtcaagtctcccttcttgcctgatctcaagcccaacctcaactccttgcactcatcgccctctggaagcgggccttgtgacgagttgcggctgaccttccctgtgcgcgatggggtggtcctggagcccttccgcctgcagcacaacctggctgtaagcaaccatgtcttccagctgcgagactcagtctacaagaccctgataatgaggcctgacctggagctgcaattcaagtgctaccaccacgaggaccggcagatgaacaccaactggccagcctcggtgcaggtcagcgtcaatgccacgccgctcaccatcgagcgtggcgacaacaagacctcgcacaagccactctacctgaagcatgtgtgccagccaggccgcaacaccatccagatcaccgtcaccgcctgctgctgctcccacctcttcgtgctgcagctagtgcaccgcccatccgtccgctcggtgctgcagggcctcctcaaaaagcgcctcctgcctgctgagcactgcatcaccaagataaagcggaacttcagcagcggcaccatccctggcacccctgggcccaacggagaggacggggtggagcagacagctatcaaggtgtccctgaagtgccccatcaccttccgcaggatccagctccctgcccgaggtcatgactgtcgccacatacagtgctttgacctggagtcgtacctgcagctcaactgtgagcgggggacttggaggtgtcctgtgtgcaacaagacagctttgctggagggcctggaggtggaccagtacatgctgggcatcctgatttacattcagaactctgactatgaggagatcaccatcgaccccacgtgcagctggaagccagtgcccgtgaagcctgacatgcacatcaaggaggagccggatgggccagcactgaagcgctgccgcaccgtgagccccgcccacgtgctcatgcccagcgtgatggagatgatcgccgccctgggccccggcgctgccccctttgcccccctgcagcccccctcagtccctgcccccagcgactaccctggccagggttccagcttcctggggcctggaactttccctgagtccttcccacccaccacgcccagcaccccaacccttgctgagttcaccccgggaccaccccccatctcctaccagtctgacattcccagcagcctcctgacttcagagaagtctaccgcctgcctcccaagccagatggcaccagcaggtcacctggaccccactcacaatcctgggacaccaggactacacacctccaaccttggggcccctccaggtccccagctgcaccattcaaaccctcccccagcgtcccggcagtccttgggccaagcgagcttaggacctacgggtgaactggccttcagtcctgccacaggcgtgatggggccccccagcatgtctggagccggggaggccccagaaccagctctggacctgctcccggaactgaccaaccctgatgagctactgtcctacttgggcccacccgacctccctacgaacaacaatgacgacctgctttctctgtttgagaacaactgatcctgtgtttaccccaagcccggcggggacacgctcacagatgtcaccacagccctgcccttcatgcccagccccatgggacacccggtggtctttcccaaacctcccccaaaacacacctggagccagagccttctgccgccagccctgcccctgaattggaagcagccctgtgctcgatgggaggggctcccaggccggcagcccttgccacctccctctgccaagcctgctgctgcagaacggtttttgctgaggtgcccctgcccagccctgtccagccttgtccacacacacatctcacgcccctggtctcacagcctcacaccttgtccttccacccctgcctgcccccacccagcctgcttcttgtccagcattgatccttctgtttcaacaactcctccactgggcagagctgggcatctggcagggctggctctgtcccctgggcctttggctccagtggcccctgtgcccagcagtccagctcttggaacctcgctgaatggcagcctcttgggggcctggagctctggcagcccagccgtgtgtggtgtcaggttcctctccccaccccagcttcaagcagaggcctcggggtgggggagctacaaagcacaacaatgtacatagtgtagaaacactaacagctgggagaggggagccagctgtccagccagcatgttcctgttgtacagcccggtctccctgcgcgctctgctccttcccatgtgcagacagatcagggaggaacctccaatgggtgggggacagtgagcttcggcctggccgaggtgggtgggtgggctctcagattcagctctgtgtaaagattctctagcgggctgcgctcccaagttccccttctctgtgaaagtgaagaattagtacagctgtgttttttaaagccacctctctgtctccaccccatgggcccacacccaggtgggggaggaggaagccactgcatctgttggctcagggccccagcctgtgcgagcagggcgcctgggctgttgtgtctcctgtctgtgccgatctctattaaaggactccctcttggtgggcctggccgagtccctcctttgtgctcccagggactattttctcctcgtaagccagcgacctgcctaaagcttgggctgtgcctgcaaagcttgtgcaggacctgggggccaggtcgaccttcaagtggcttttggggccccaggttgagctctggatgtttcaagccaaggctcggctattcccgccccatagtaaatttccttttccctggaattttccaagttggcttcagctgaagagctgttttgtgaagcatcccaggcttgcccaggagagacatttgccactatgtcaccttatctgggcttgccctggggcactgagacagttgtttggcagccccagcccagccaggggctcatccttctcagctcttgtccctgggaggcctctgcttgtcacttcccagagattgcagaggtgtgtcctgcctaccatctgcctgtccagcttggtgggggtccgggtcaccatttcctccagtcctgggccccatccttgagggccttcccagccagccagcaggagaggcaagaactgggggaacacaggaacctaggggaggaggggagcgctgggcatcctcaggctggcggccaaggcctgcccctggaggcactagaggagggcatctgtctgtgggagcccagaggctgcagggaggaggaggagggaggtatctggtgtgagcgttgcccctgcgacatttgggaccacacaggtgggcttccttattccctgacaaagcctctgtttccagctcttccgccctctctggatgagggaacagaagtggaggaaacaaaagaagcagcagcacgcacagtcctgtcgctgggtgcggagacagcctggcaaagtcccactcagccatggcctgatgcaggccccaggccctcctttcttgggtgtcaaatgactgtgtcctggacatctgatgcaccacctgccctgcctgttgcaaacgtgatgctcccggatggagtggagaaactaggagactgggacaagcaaaaggctgcaaacaacccagaagcccatcctcagaagactggagaaatgattgaggaatgcatgggcaccgtggccctgtgctccatcacaaacacctctcagaaacaacgtgggatgaaaaagcaagacagttcatacagtatgatgccatttttataaagctcaaaacc

SEQ ID NO: 32490 - DNA, 7339 bp, Homo Sapiens
ggccctagagttaatcccatcagccgagatgaacctctagtcttgctttgaaaaaatcattctgtgtaactcttgactgtgactaagttcctaatacacctgttgggacgatcactgacaccgtataccatttgagaggtacttttcttgacccaatactggtgattagagaagagaggtatcttggtttttggtttttttctttgatcattatgaacattggcttttcacccctgaagtgaaaatgttgaaaactgagtcttcaggtgaacgaaccactctcagaagtgcctctcctcacaggaatgcatatcgaactgagtttcaggcactgaaaagtacctttgacaaacccaagtcagatggggaacaaaaaacaaaagaaggtgagggctcccagcagagcagggggaggaaatatggctccaatgtcaacagaattaaaaacctatttatgcagatgggtatggaacccaacgagaatgctgcagtcattgccaaaacaagggggaaaggtggacattcatctcctcagagaagaatgaagcccaaagaatttctggaaaaaacagatggctcagttgttaagttggagtcttctgtttctgaacgaattagtagatttgacactatgtacgatggcccttcatattccaagttcactgagactcgaaagatgtttgagagaagtgtgcatgaatcaggacagaacaaccgctattccccaaagaaagagaaagctggagggagtgaacctcaggatgaatggggaggttccaagtccaacagaggcagtactgattccttggacagccttagctcccgaactgaggctgtctccccaactgtgagtcaactgagtgcagtatttgagaacactgattctcccagtgccatcatttctgagaaggctgaaaacaatgaatactcagtgactgggcattatcccttgaatttaccatctgttactgttacaaatcttgacacatttggtcacctgaaggattctaattcctggcctccttcaaacaagcgaggtgttgatacagaggatgctcacaagagtaatgcaactccagtaccagaagtggcttctaaaagtacctctctagcttcgatacctggtgaagagatccagcagagcaaggaacccgaggactccacatctaatcaacagactcccgacagcattgacaaagatggtcctgaagaaccttgtgctgaaagtaaggcaatgccaaagtccgaaatcccttcaccacaaagccaactgttagaagatgctgaagctaatttggttggaagggaggcagcaaagcaacagaggaaagaacttgcaggtggtgatttcacctctcctgatgcttctgcatccagttgtggaaaagaagtacctgaagattcaaataattttgatggttcccatgtgtacatgcacagtgactataatgtgtatagggtgagatccaggtataattcagactggggagagacaggcactgagcaggatgaggaggaagatagtgatgagaacagttactatcagcctgatatggagtactcggaaattgttggattgccagaagaagaagaaatcccagcaaataggaaaattaagtttagtagtgctcctattaaggttttcaacacatactccaatgaagactatgacaggagaaatgacgaagttgaccctgtggctgcttcagctgagtatgaacttgaaaaacgtgtagaaaagctggaacttttcccagtggagctagagaaagatgaggatggtcttggtataagtattattggaatgggtgttggagcagatgctggacttgaaaagctgggaatattcgtcaagacagtaacagaaggtggtgctgctcaacgggatggcagaatacaagtcaatgaccagattgtggaagtggatggaatcagcttggtgggtgtgacacagaattttgcagcaacagttctcagaaacaccaagggcaacgtcagatttgttattgggcgggaaaaaccaggacaagtgagcgaggttgcccagttgataagccagacactggaacaggagaggcgccagagagagctgctggaacagcactatgcccagtatgatgccgacgatgacgagacaggagaatatgccacagatgaagaagaagatgaggtaggacctgtccttcctggcagcgacatggccattgaagtctttgagctgcctgagaatgaggacatgttttccccatcagaactggacacaagcaagctcagtcacaagttcaaagagttgcaaatcaaacatgcagttacagaagcagagattcaaaaattgaagaccaagctgcaggcagcagaaaatgagaaagtgaggtgggaactagaaaaaacccaactccaacaaaacatagaagagaataaggaaagaatgttgaagttggaaagctactggattgaggcccaaacattatgccacacagtgaatgagcatctcaaagagactcaaagccagtatcaggccttggaaaagaaatacaacaaggcaaagaagttgatcaaggattttcaacaaaaagagcttgatttcatcaaaagacaggaagcagaaagaaagaaaatagaagatttggaaaaagctcatcttgtggaagtgcaaggcctccaagtgcggattagagatttggaagctgaggtattcaggctactgaagcaaaatgggactcaagttaacaataataacaacatctttgagagaagaacatctcttggtgaagtctctaaaggggataccatggagaacttggatggcaagcagacatcttgccaagatggcctaagtcaagacttgaatgaagcagtcccagagacagagcgcctggattcaaaagcactgaaaactcgagcccagctctctgtgaagaacagacgccagagaccctctaggacaagactgtatgatagtgttagttccacagatggggaggacagtctagagagaaagccatcaaacagtttctataaccacatgcatattaccaaattacttccacctaagggtttgagaacgtcttctccagaatcagattctggtgttccacccctcaccccggtggatagcaatgtgcccttctcgtctgaccacatagctgaatttcaagaagaaccactggacccagaaatggggcctctctcctctatgtggggagacacttcactgttttctacttcaaagtctgatcatgatgtggaagaatctccttgccatcaccaaaccaccaacaagaaaatattacgagaaaaagatgatgccaaagatcccaaatcactaagggcatccagttcattggcggtgcaaggaggaaaaattaagcggaagtttgtggatctgggggcgcctttgcgaaggaattccagcaagggaaagaagtggaaagaaaaagaaaaagaagccagtaggttttctgcaggtagcaggatcttcagaggcagactggaaaactggacacccaagccatgttcaacagctcagacctccactcgttccccttgcatgcctttctcatggtttaatgacagccggaaaggatcctattccttcaggaacctgcctgcgcctacaagttcccttcagccttctcctgagactctaatttcagataaaaaggggtccaagaattttaccttcaatgatgacttcagtcccagcagtaccagttcagcagacctcagcggcttaggagcagaacctaaaacaccagggctctctcagtccttagcactgtcatcagatgagagcctggatatgatagatgacgagatccttgatgatggacagtctcccaaacacagtcagtgtcagaatcgggccgttcaggaatggagtgtgcagcaggtttctcactggttaatgagcctaaatctggagcagtatgtatctgaattcagtgcccaaaacatcactggagaacagctcctgcagttggatggaaataaacttaaggctcttggaatgacagcatcccaggaccgagcagtggtcaaaaagaaactcaaggaaatgaagatgtctctagagaaggctcggaaggcccaagagaaaatggaaaaacaaagagaaaagctaaggagaaaggagcaagagcaaatgcagaggaagtccaaaaagacagaaaagatgacgtcaactacagccgagggtgctggtgagcagtaacacataccctcttacagatgatggagatgctccaagagaagtccccacctcttcctgccctgctctcctccagaggatgaaaaagaaactaaatgataagggtaatgcggctctaggccggctgaggaactgtgtgttgaataactgcattttctgcaatagaatgcactcttaattttaactactaaaataatcccaagccacctttggttcattaacaaaccagagatttcatttaagtagctgtgttttgctcttctctaacttaccaacatcttgtgttgtgttgggtgtgttttgtcacttggagaactagtgtgaccccacccaagagcatgacacaccctggtgttgttaatggagcgccgtgaattttcagtgtgggatcctgaaatggcaattgcacatgtctgcatggcagagagcaccctgccatgagatctgagaccagtacttaacttctaggactgcaacacctactccaatgtgtgggaaagatttgctcttaattctcagtctggacagtgagaccaccccgctgtggaaacatgggtgctctgctctgtagttacctactaagggaaaaggcaagcaagtcattctgcttgctaggcatcaaaaagaaagaaaataaattatagctatttgttaaccactgaaaaaagcaaaagccttaagaatgtggatgtgggtattaccttggggttctgagggtaatatttatcctctagatacggctgaacaagaaagaaaaaaatcagacattaatgcagccatgggatattgggatctgttgaccttgctactgctgtgtgttcagcatttcagcaacactggcaaacacaacacagttcctcttccccctacctaacccaagaaattgaacaggaaattgatttttaaggaaaccaccattttcaggtttcctctcctggggaacattctggctggtcttcagcctgcctatgtcacaatcaggaactcatcacatattttctactcaagatttcccaggtgggctcagttagtattttaacaaatgtacttttaagaaaaatagaaataccagttagaggaaactgtcagttaacattttagagagattttgaatggtttttccgaaccattcctttccatacttcaaagattctcaattttacagaaaaagtttgtttaaggcagtgcataggtatactttagtagtggaggaacttatactaattttaagccagcattaaggatttccatgtttcaccaaactaagtcaagtgcaggagactggggcagaagaaggagaaaataaactcgttttgagaaatttcatgtgatgagggttttttgttttttatgctcatgtatctggttctctttgctgcgttgactctaaaaatgaggttatccactttccaaaggacaagtttcagaataagacttgaggccacatgaattcttggacagtattttacttcttttactttatgggaatctctgctctgttcccagcatctcgtatcttccactagaagtattccatatttagagcctcggcaaggcttttgagtgtaacagattaagggaactcccttgtagccccatcttgtattttaataacagtgtgatttttttttatctgaaaatctgaattcagaaattatctaaactggacatttttaattctgttttacccccaaggcctgttttcttttcattgccagagtattgtcggttatgcgtcagctcttttgtcattaggtacagacccttcattcaatcctcagaaacgttgacatgaagtaacattgtgttttacagttatcaaagtcaccattatgtttttctgtctgtcttcattaggggtatgataatgaaactgccgtattggatactctattaatgtcttgagatgtctggtgctttgttattttttcacatcatgagaaataagaagccactattaatgagtgatacaatttggcaaaacttttcaaatactaaaacactaaattagtaaaaatctggtaatattagtgcttgctattgtaaatttttgccatttttgcttatctttgggaaaaaagtgacctggatcacactggaagtttcactgtattcaagagtagaaatagaaggatgattatcttaagttatgtttacactttggtaatatttgaaaatggatgtatatactggaaatgtctgtaagtgtcttgtttttgcacctaatttatgatctattatattgcattttcttaaatatcttagaagtatttttctttataactttgtatattgaatgtttagataaatgtccaactgacaatgttataaatcaaattcttattcctaaaatcatttagtattataagtattttgattttttaagttaaattatagtaattttaggccgaagtgagttattttaacattaccacttaaaacggatgaaattgtaaaagtcatttggtttgattgccccacaaagcataagatgtaaactgattaagggtatgaaagcaaagtgaaagacctcagatcttgtgcacattttgttttcctattatttcttttattgactgtagtgcatgatacctaatcaaggctccaatgtcttgcacaattcctactttaatgctagtggttttcagtgtccttacaatttaacacagaattgttatttcatcaaccttaaaaactgcagtttttattatcagaaaatgaacaaaaagggaatatctggttgctatgaactgattccctaaaggagagctcagtatgattctaacaatagccaaaagtgttttggggtataggttatgctttgttgggagggaatgtgtggtgaggaggccaagctgcagacagaaagcattgtatgagctgtatctgggtcagggtttcccattaaaggatgttagttttataacagattactttgtttaagaccatctcccttcaagtaactcacagtttatgtaatactaatctcattctttttttacctgaatcaggaattttctgcagaatgttaagttagggaagaaacctcatttcatccattctaacactcctgatgaagtccccctttagtttcatgacaataaagctgttctgtggctatcatccttt

SEQ ID NO: 32491 - DNA, 6237 bp, Homo Sapiens
ctaagatggcgacgcctttggcggtaaattcggctgctagtctatggggtccttacaaagacatttggcataaagtgggaaatgctctttggagaagacaacctgaagctgttcaccttcttgataagattttgaagaaacacaaacctgacttcatctcattgttcaaaaatccgccaaaaaatgttcaacagcatgagaaggttcagaaagccagtacagagggagtcgccattcagggtcaacagggaactcgacttcttcctgaacagctcattaaagaagcctttattctcagtgacctttttgatattggagaattggcagctgttgagcttcttcttgctggagagcatcaacagccacattttcctggccttaccagaggattagtagctgttcttctgtactgggatggaaagcgatgcattgcgaattccttgaaagccttgatacagtctagacggggaaagacatggaccctagaactcagtccagagctggcttccatgacaacacgctttacagatgagctgatggagcaaggattgacttataaagttcttacgctggtgtcacagattgatgtgaataatgagtttgagaaactacagcgagagagaggtttgggcagtgaaaaacatcgcaaagaggtttctgatctcattaaggagtgcaggcagtctcttgcagaaagcctttttgcctgggcttgccagtcacctttaggcaaagaagacactctcctcctcattggacatttggaaagagtgacagttgaggctaatggctcactggatgcagtgaatctggctcttcttatggcgcttctatactgttttgatatcagttttatagagcaaagcacagaggaacgagatgatatgattcatcaacttccactgttgacagaaaaacagtacattgcaacaattcactctcgtcttcaggactcacagctttggaaactgcctgggctccaagccactgttagacttgcctgggcgctggcattgaggggaatatcccagctacctgatgtgacagctctggcagaattcacagaggcagatgaagcaatggcagaactcgcaattgctgacaacgttttcctgttcctcatggaatctgtagtggtatcagaatacttttatcaggaagaattttatattcgcagagtccataatctcatcacagatttccttgcacttatgccaatgaaggtgaaacagctgaggaatcgggcagatgaagatgctcgaatgattcacatgagtatgcagatgggtaatgaaccccccatttcacttagaagggacctggaacacttaatgcttttgattggcgagctatataaaaagaacccttttcatctggagcttgctctagaatattggtgtcccacagagcctcttcagactccgactatcatgggctcttatctaggggtggctcatcagcggccccctcaacgccaggttgtcttgtcaaagtttgttaggcaaatgggtgacctgttgcctccaactatttatattccttatttgaagatgctccagggattggccaatgggcctcagtgtgcccactactgtttcagcctgctcaaagtcaatggtagtagtcatgttgaaaatattcagggagcaggtggcagtcctgtttcctgggaacatttctttcactccttgatgctttaccacgaacaccttcggaaggatcttccaagtgcagatagtgtccagtaccgtcaccttccttcccgtggcatcacccagaaggagcaagatggattgattgcttttttgcagctcacgtctaccatcattacttggagtgaaaatgctcgcttggcactctgtgaacaccctcagtggacccctgttgtggtgattctgggactcctccaatgcagtattccccctgtcctaaaagctgagctactgaagacactcgcagcttttggaaaatctcctgaaattgctgcttccctctggcagtcattggaatacactcagatactgcagaccgtgaggattccaagccaaaggcaagctattggtattgaggttgaactaaatgaaatagaatcccggtgtgaagaatacccattgactcgggccttttgccagcttattagtactctggtggagagctcatttccttctaatttgggtgctggactgcggccccctggctttgacccttatttgcagttccttagagactctgtgtttctacgattccgtacaagagcttaccggagagcagctgaaaagtgggaagttgctgaggtggttttggaggtgttttataaattgctcagagattatgagcctcagcttgaagattttgtagaccagtttgtggaactacaaggagaagaaatcatagcctataagccacctggatttagtctgatgtatcatctgctgaatgagtcaccaatgttggagcttgctctcagtttactggaagaaggagttaagcagcttgacacctatgccccctttcctgggaaaaaacacctggagaaagcagtacagcattgccttgcacttctcaatcttactctgcaaaaggaaaatctttttatggaccttctaagagagagtcaactggctctaatagtctgtcctttagaacagcttttgcagggaattaatcccagaactaagaaggcagataatgtggtaaacattgccagatacctatatcatggcaatactaatccagaattggcttttgaaagtgccaagatcctctgttgtatctcttgcaactctaatattcagataaagttggttggagatttcacacatgaccagagtataagtcagaaactaatggctggatttgtggagtgtttggattgtgaagatgcagaagaatttgtacgtctggaagagggatcagaacttgaaaagaaattagttgcaattcgtcatgaaacaagaatccacatcttgaatcttctcattacctctctggaatgcaatccacccaatcttgctctctacctgttgggctttgaattgaaaaaacctgtcagtactacaaacctacaagatccaggagtgttaggttgccctcggacatgccttcacgccattctaaacatcttggagaaaggaacggaagggagaacaggcccagtggcggtgcgagaatctcctcagctggctgagctatgttaccaggtcatatatcagttatgtgcatgctctgatacatctggtcctactatgaggtacttgagaaccagccaggatttcttattttcccagttgcagtatctaccattttctaacaaagaatatgaaatatctatgctgaaccagatgtcatggcttatgaaaactgcctcaatagagctaagggtaacctctctgaatcgtcagcggtcacatacccagaggctcctacacctcttactggatgacatgccagtgaaaccatactcagatggtgaaggaggaatagaagatgaaaacaggtctgtttctgggttccttcactttgacactgctacaaaagtacgtcgaaaaattctaaatattcttgactcgattgacttcagtcaggagatccctgagcctttgcagttggatttttttgatcgggcccagattgaacaagttattgctaactgtgaacacaagaatttacggggacagacagtctgcaatgtcaagcttcttcatagggttcttgtagctgaagtaaatgcccttcagggtatggcagccataggacagagacctctactaatggaggaaatcagcactgtacttcagtatgtggtaggaagaaataaattgctgcagtgtcttcatgcaaaacgtcatgctctggagtcgtggaggcaactagtagaaattatactgacagcttgtccccaggacctcattcaggcagaggatcgacaactgattattcgtgatattttacaagatgtgcatgataagatactggatgatgaagctgcgcaagagttaatgcctgtggtcgccggggcagtgttcacactgactgctcacctaagccaggccgtcctcactgaacagaaggaaacatcagtcttgggaccagcagaggcccattacgcttttatgcttgatagttgcttcacctcacctcctcctgaagagaacccattagtgggttttgcttctattggagattcttcactttacatcatattgaagaaactgttagacttcattttgaagacaggtggtggattccaacgagtgaggactcacttgtatggctctctgctttattacttacagattgcccagagacctgatgaaccagacaccttagaagcagccaagaaaaccatgtgggaaaggctgacagcccctgaagatgtatttagcaaattacagcgagaaaacatagccattattgaaagttatggcgccgccctcatggaagtggtctgtcgagatgcttgtgatggtcatgagattggaaggatgctggccctggctctacttgatagaattgtctccgtggataaacagcagcagtggcttttgtatctttctaacagtggctacttgaaggtcctcgtagacagcttggtagaagatgaccgtactttgcagagcttactcaccccacagcctccccttttaaaagcactttatacttatgaatctaaaatggcatttctcacaagagtggcaaagatacagcagggtgcattagagctgctaagatcaggggtgattgtgagactagctcaatgccaagtctatgacatgcgcccagaaacggacccgcagagcatgtttggcatgagagaccctccaatgttcatccctaccccagtggatcgctaccgccagattctcctcccagctctccagctgtgccaggtcatcctcacatctagtatggcccagcacttgcaggcagcagggcaggtattgcagtttcttatttcacattctgataccatacaagcaattctgcgctgtcaggatgttagtgctgggtctttgcaggaattggctctgctgacaggaattataagtaaagcagcacttcctggaatattaagtgaacttgacgttgatgtaaatgaagggtctctaatggagctacagggacatattggaagattccagcgccagtgcttaggactactaagtcgctttggtggctctgacagactgcgtcagtttaaatttcaagacgataatgtggagggagataaagtaagcaagaaagatgagattgaactggctatgcagcagatttgtgccaatgtaatggaatattgccagtcactcatgttacagagttcccctaccttccagcatgctgtgtgtctcttcactcctagcctttcagaaacagttaatagagatggaccgcggcaagatacccaagctccagtggttccatactggcgcctgcctggtttaggcattatcatctacctgctgaaacagagtgctaatgatttcttcagctattatgacagtcatcgacagagtgtcagcaagctacaaaatgtagagcagcttcccccagatgagataaaagagttgtgtcagtctgtgatgcctgctggtgttgataaaatctccactgctcagaaatatgttctagcaagacggcgcttggtgaaggtgatcaacaatcgagctaaactgctttccctttgttcttttatcatagagacctgcctatttattctttggcgccatctggagtactacttgttacattgcatgcccacggattctcaagattccttatttgcctcgagaaccttgtttaaaagcagaagactgcaagattccttcgcctcagaaaccaatctagattttagaagtgggctggctatagtgagccaacatgatttagaccagcttcaggctgatgcaatcaacgcttttggagaatcactacaaaagaaacttctggacattgaaggattatattcaaaagttcgatctcgatatagtttcatacaggctcttgtcagacgtatccgtggcctcttgaggatatcaaggaactgagagcccgtgcttatgctcttctatgagagagatgaattggggagaattgtctccattttatagattagtttctttctaaattatgaccaaaaatattttgctatttctttctttgtatatggacatcttttctgtaaacttcttcccctagttccatcctcactagtaaaaaataaatactttttaaaaaaac

SEQ ID NO: 32492 - DNA, 6707 bp, Homo Sapiens
ccactctgtctgggtggtcttataattgatttatttaccttctggaaacctttctttactcatgtcataaatgagagaaaatggactgaacagccccctctgtttccagtatcctacggttctgtgggaaaaactgtaaatatgccctccccacccccacacatacacagcttaggtaaaaacagtgcccaagtttaggaatatttgcagatattgtcctgatggtaattctgtcaatttctcgtttccagctagctgtttaacttctgacggtgattcatggatatttatgatgagctctctccggaacagcacaacctttctttatactccatggagctcgtgctgaagaaaagcactgggcacagcgctgcacaagtggccttaacagaaactgctcccggctcccagcacagcagtcctctccatgtcacagccccgccgtctgccactacttttgatacagccttttttaaccaaggaaaacagaccaaaagtacagcagatcccagcatctttgtggcaacttacgtgtcagtgacgagtaaagaggtggccgtcaatgacgatgagatggataactttctgccagatactcactggaccactccacggatggtttctccaatacagtatatcacagtcagcccaccagggctgcccagggaagcattagaacctatgctcactccatcattacccatggtttctttacaagatgaagaagtgacatcgggctggcagaacacaacgcgacaaccagcggcatatgctgagtccgccagtcatttccacacctttcggtcagcttttcgcacctctgagggcatcgttccaactcctggcaggaatttggtgctttatcctactgatgcttacagtcatttatcaagcaggactctgccagagattgtggcttccctaacagagggtgtggaaaccaccctttttttaagctcccggtctttaatgccacagccgttaggcgacggcattactataccgttgccctccttgggggaggtctcacagcctccagaggaggtttgggccacaagtgcagacagatacactgatgtgaccactgtgttgagtcaaagcctagaagaaaccatctctccaagaacataccccactgtgactgcatcgcacgcagcccttgcattcagcaggacacattctccattgctttcaactcctcttgcatttgcgtcctctgcttcaccaactgatgtttcatctaacccctttctccctagcgactccagcaaaacatccgaattgcatagcaattcagccctccccggtcctgtggacaacactcatatcctgagcccggtgtcctcattcagaccatacacttggtgtgcggcctgcactgtgccttcacctcagcaagttctggccacgagcctcatggagaaagacgtgggatcaggggatggtgccgagactctgtgcatgaccgtgctggaagaaagcagcatctctctaatgagtagcgtcgtagcagacttctctgaatttgaggaagatcctcaagtatttaatacgcttttcccctccagacctatcgtcccactttcttctagatccatggaaatctcagagacgagtgttggcatttctgccgaggtggatatgagtagtgttacaaccacacaggttccccctgcccacggccgcctctctgtgccggcgtcacttgatcctactgctggctccttgtctgttgctgaaacccaagtgacgccatccagcgtgaccactgcatttttctcggtcatcaccagcattctccttgactcatctttctctgtcatagcaaacaaaaacacaccgtcgcttgccgtcagagacccgagtgtttttacgccttatagtctggttccttcagtggagtcttcacttttctctgaccaagaacgttccagtttttctgagcataaacccagaggtgctttggattttgcatccagctttttctcaacacccccgctggaactcagcggctccatctcttcgccttcggaagcacctgcgtctctgtctctgatgccgagtgacttgtcccccttcacatctcagtctttttctcccttggttgagacatttacattgtttgactctagtgatctgcagtcatctcagctgtctcttcccagttccacaaatcttgagttttcgcagctccagccaagttccgagctgcctttaaacaccatcatgttgctacctagccgttctgaggtgtcaccatggtcaagcttcccttctgattctctcgagtttgttgaagcgtctacggtttcactgacggattcagaagctcattttacctcagctttcattgaaactacctcctatcttgagtcttcactcatttcccatgaatccgcagtcactgcactggtgccccccggctctgagtcttttgacattttgactgccgggattcaagcaacatcaccattgaccactgtccacacaacgcccattttaactgagtcttctttgttctcaactctgacacctcctgacgaccaaatcagtgctctagacggtcacgtgtctgtcctggcctctttctccaaagccattcccactggtacggtgttgatcactgacgcgtacctgccatcaggatcctcgtttgtttctgaagcaacccccttccctctgcccacagagctgaccgtcgtgggcccatcactcacacccacagaggtgccactgaacacctccacggaagtgagcacaaccagcaccggtgctgccactggtggtcccctcgactccaccctgatgggtgacgccgcaagtcagagccccccagagagtagtgctgctcctcccctgccatccctgcgtcccgtgactgccttcactctcgaagcaacagtcgacacaccaacactggctactgccaagccgccatatgtttgtgatatcacagtccccgatgcctatctgatcacaactgtgctggccagaagagctgtgcaggagtacatcattacagcaatcaaagaagtactgaggattcacttcaaccgtgcagtggaactgaaggtttacgaactatttactgacttcacttttctggtaacatccggtcctttcgtttacacggcaatatccgtcataaatgtgcttataaacagtaagcttgtccgtgaccagactcctttaatcctgtctgtgaaaccttctttccttgtgccagagtccaggttccaagttcaaacagtacttcagtttgtgcctccgagtgtggatactggcttctgcaacttcacccagcgcattgagaaaggcctaatgacagctctctttgaagtgagaaaacaccaccagggaacgtataacctcacggtgcagatcttgaatatcaccatcagttcctcaagggtgactcctcggcggggcccggtgaatatcatctttgcggttaaaagcacacagggatttttgaatgggtcggaagtgagcgagctgctcagaaacttgagtgtggtggagttcagtttctatctgggatacccagtgctgcagatcgcagagcccttccagtatccacagctcaacttatctcagttgctgaagtcctcttgggtcagaacagttctcctgggcgtcatggagaagcaactccagaatgaagtgtttcaagccgagatggaacgcaagctggcccagctgctcagcgaggtttccaccagaaggcggatgtggagaagggccactgtagctgcagggaacagtgtggtgcaggtggtaaatgtgtcgaggctggagggagatgacaatccggtacagctcatctactttgtggaggatcaagatggagaaagactcagtgcagtcaagtcttcggacctgattaacaaaatggacctccagagagcagccatcatcttgggttaccgaattcaaggtgtcattgcccagcctgtcgacagggtgaagaggccgtctccggaatcccagagcaacaacttgtgggtcattgttggcgtggtcatcccagtgctggtggtgatggtgattgttgtcatcctctactggaaactatgccgcacagacaagctagactttcagcctgacactgtggccaacattcagcagcgtcagaagctgcagatccctagtgtgaagggcttcgattttgctaagcagcatctgggtcagcacaataaagacgacatattgattattcatgagccagcgccactgccaggacctctgaaggaccacaccacgccctcggaaaatggagacgtgccaagccccaagtcaaagatcccttccaagaatgttcgtcacagaggaagagtttctccctcagatgctgactctacggtcagtgaagagtccagcgagagggacgcaggagataagacgccgggagccgtcaacgatggcaggtcccacagagctccgcagagcgggccaccactgcccagttcgggaaatgagcagcactcatcagcctccatcttcgagcacgtggacaggatctcccgccccccggaggctagccggcgggtccccagtaagatccagcttatcgccatgcagccgatcccggcacctcccgtccagcgcccctccccagccgaccgagtggcggaaagcaataaaatcaacaaagagattcagaccgcgctgcggcacaagtctgagatcgagcaccatcgcaacaagatccgcctgcgcgccaagcgccgcgggcactacgagttcccggtggtagacgacctgtcctcgggcgacactaaggagcgacaccgggtgtaccgcagggcacagatgcagatcgacaagatcctggaccccacggccagcgtgccctccgtgttcatagagcccaggaagagctcacggataaaacgttctcccaagcctcgccggaaacaccaggtcaacggctgtcctgccgacgctgagaaggaccggctcatcaccacagacagcgatggcacctacaggaggccccccggcgtccacaactcagcctacatcggatgcccatcggatcctgacctcccagccgatgtgcagacaccatcctcggtggaactggggaggtatccagcccttcccttcccggcctcccagtacatcccaccccagccgtccatcgaggaggcacgccagaccatgcactccctcctggacgacgcctttgccctcgtggcccccagcagccagcctgccagcaccgcaggtgtaggccccggagtcccacccggcctgcccgcaaacagcaccccttcccaggaagagaggcgagccacccagtgggggtccttctacagcccagcccagacggccaacaatccctgcagtagatacgaagactatggaatgactcccccgacgggtccattgccaagaccaggttttggccccggtttgctgcagtctacagagctggtgccccctgaccctcagcagccacaggcctccgccgaagccccatttgctgccagagggatctactcggaggagatgccgtcggtggcccggcctcggcctgtcgggggtaccacaggctcccagatccagcacctgacacaggtggggattgccagcagaattggagctcagccagtggaaatcccgccaagcagaggcagccagtatggggggccaggctggccttcgtacggggaggacgaagcggggcgaagagaggccgtgccaaggacttcaggcagggagccctcagctccttccgggaacctcccccaccggggactgcagggccctgggctgggttaccccaccagctccacggaagacctccagcctggccactcctcggcctctctcatcaaagcaatccgcgaggagctcctccggctctcccagaaacagagcaccgtgcagaacttccacagctgatcggcctcgcctcgcagatttgccaagtatccgcttcctgtggaagcaagaccaaaaggaaatcaactgagtgggtgtttggaagaggaaggagcaactctcgggcagcctgcccaagggagggagcaagttgcaatttagaagatgccatacgtcgtgtgacagctcatgagcctttcactgggctggcaattgtctgaacacttgggttcagttgaaatatatgtattttggccaaaagccagcagcacttcacaaaaacaaaacacaaacctaagctaacaaaatgactgcattcgtctcttttttaaaggtagagattaaactgtatagacagcatagggatgaaaggaaccaagcgtttctgtgggattgagactggtacgtgtacgatgaacctgctgctttgttttctgagaagaggtttgaagacattttattaacagcttaatttttctcttttactccataggaacttattttaatagtaacattaacaacaagaatactaagactgtttgggaattttaaaaagctactagtgagaaaccaaatgataggttgtagagcctgatgactccaaacaaagccatcacccgcattcttcctccttcttctggtgctacagctccaagggcccttcaccttcatgtctgaaatggaactttggctttttcagtggaagaatatgttgaaggtttcattttgttctagaaaaaaaaaatccctcccaaagtggggcaaaaagctttatatttatttgattatccaaaatacagatcaaagtttagatctac

SEQ ID NO: 32493 - DNA, 2013 bp, Homo Sapiens
atgcggctggagaagtccactgttcggagggacttagagcagggtcccttccctgagggcctcgcccccgaggacgtggcgccggagccgtgcgacccattggcttcagcggacttagacaaaaaaagacatgcagagctgaagatggatcaggctttgctactcatccataatgaacttctctggaccaacttgaccgtctactggaaatctgaatgctgttatcactgcttgtttcaggttctggtaaacgttcctcagagtccaaaagcagggaagcctagtgctgcagctgcctctgtcagcacccagcacggatctatcctgcagctgaacgacaccttggaagagaaagaagtttgtaggttggaatacagatttggagaatttggaaactattctctcttggtaaagaacatccataatggagttagtgaaattgcctgtgacctggctgtgaacgaggatccagttgatagtaaccttcctgtgagcattgcattccttattggtcttgctgtcatcattgtgatatcctttctgaggctcttgttgagtttggatgactttaacaattggatttctaaagccataagttctcgagaaactgatcgcctcatcaattctgagctgggatctcccagcaggacagaccctctcgatggtgatgttcagccagcaacgtggcgtctatctgccctgccgccccgcctccgcagcgtggacaccttcagggggattgctcttatactcatggtctttgtcaattatggaggaggaaaatattggtacttcaaacatgcaagttggaatgggctgacagtggctgacctcgtgttcccgtggtttgtatttattatgggatcttccatttttctatcgatgacttctatactgcaacgggggtgttcaaaattcagattgctggggaagattgcatggaggagtttcctgttaatctgcataggaattatcattgtgaatcccaattattgccttggtccattgtcttgggacaaggtgcgcattcctggtgtgctgcagcgattgggagtgacatactttgtggttgctgtgttggagctcctctttgctaaacctgtgcctgaacattgtgcctcggagaggagctgcctttctcttcgagacatcacgtccagctggccccagtggctgctcatcctggtgctggaaggcctgtggctgggcttgacattcctcctgccagtccctgggtgccctactggttatcttggtcctgggggcattggagattttggcaagtatccaaattgcactggaggagctgcaggctacatcgaccgcctgctgctgggagacgatcacctttaccagcacccatcttctgctgtactttaccacaccgaggtggcctatgaccccgagggcatcctgggcaccatcaactccatcgtgatggcctttttaggagttcagtgctgcccagactgggtcaccaaacaggcctgtctgacggaacccttgtcacctttgtggagaattctctttgggccctgcctggaagtaagagccacggagcctgcccaggcaggaaaaatactattgtattacaaggctcggaccaaagacatcctgattcgattcactgcttggtgttgtattcttgggctcatttctgttgctctgacgaaggtttctgaaaatgaaggctttattccagtaaacaaaaatctctggtccctttcgtatgtcactacgctcagttcttttgccttcttcatcctgctggtcctgtacccagttgtggatgtgaaggggctgtggacaggaaccccattcttttatccaggaatgaattccattctggtatatgtcggccacgaggtgtttgagaactacttcccctttcagtggaagctgaaggacaaccagtcccacaaggagcacctgactcagaacatcgtcgccactgccctctgggtgctcattgcctacatcctctatagaaagaagattttttggaaaatctga

SEQ ID NO: 32494 - DNA, 7506 bp, Homo Sapiens
atgggggcaggggggcctgccaaggagagccttgaagacccctggacccagcagacacacgacgtgaagcagcgtccccaggaagctgagcagacaagccacctgacactgtgtcctgagcacggtccctcgggacagctgagctgcaatgctgcttcctggagccctggctctctgcactcggccagtgaggtgatggacagaggtggacctcagcaggctctgcataaccagccgtgtgtgatgagtggccacaccttgcctcctcttcccgtcccaggcaccaacagcacagagcaggccagtgtacccagagccatggcagccacgctgggagccggcacgccccccaggccccaggccaggagcatagctggggtgtatgtggaggcctcgggccaggcccagagtgtctacgccgccatggagcagggcctcctgcctgctgggctcgggcaggctctgctagaggcccaggcagccactgggggcctggtggacctcgcccggggccagctgctccctgtgtccaaggccctgcagcagggtctggtggggctggagctgaaggagaagctgctggccgctgagcgtgccactacgggctatcctgacccctacggcggtgagaagctggccctctttcaggccatcgggaaggaggttgtggacagggccctggggcagagctggctggaggtccaactggccactgggggcctggtggaccccgcccagggagtgctcgtggcccctgagccagcctgccaccagggcctcctggaccgggagacatggcacaagctgtcagagcttgagcctggcacaggtgacctgcgcttcctcgaccccaacacgctggagcggctgacataccaccagctgctggaaaggtgtgtgcgtgcccccggctcggggctagccttgctgcccctcaagatcaccttccgctccatgggcggggcggtgagtgcagctgagctgctggaggtgggcatcctggacgagcaggctgtgcagggtctgcgggagggcaggctggccgcagtggacgtgagtgcacgtgccgaggtgcggcgctacctggagggtaccggcagcgtggccggggttgtcctgctgcccgaaggccacaagaagagctttttccaggctgccaccgagcacctgctcccaatgggcaccgcgctgccactcctagaggcccaggctgccacccacaccctggtggaccccatcacaggccagcggctgtgggtagacgaggcagtcagggcgggcctggtcagcccagagctccatgagcagctcctggtggccgagcaggccgtgacagggcaccacgaccccttcagtggctcccaaatcccccttttccaggccatgaagaaggggctagtggacaggccactggcactgcggctcttggatgcccagctggccacaggcgggctggtctgtccagcacgcaggctccggctgcccctggaggccgccctgcgctgcggctgcctggatgaagacactcagcggcagctctcgcaggctggcagcttctcagacggcacgcacggcggcctgcgctatgaacagctgctggccctctgtgtcaccgacccagagaccgggcttgccttcctgccactctcagggggaccccggggaggggagccccagggacccccattcatcaagtacagcactcggcaggccctgagcacggccacagccaccgtctctgtggggaagttccggggccggcccgtgtccctctgggagctgctcttctctgaggccatctcctcagagcagagggcgatgctggcccagcagtaccaggaagggaccctctccgtggagaagctggccgctaagctgagcgccaccctcgagcaggctgcagccactgccagggtcaccttttctgggctgagggacaccgtgacaccaggagagctgctgaaagccgagatcatcgaccaggacctgtacgagcggctggagcatggacaggccacagccaaggatgtgggcagcctggcctcggtgcagaggtacctgcagggtacgggctgcattgctggcctgctgctccctggctcccaggaacgcctgagcatctatgaggcccgatgcaaggggctcctccggcccggcactgccctcatccttctggaggcacaagctgccacaggcttcatcatcgacccaaaagcaaacaaggggcactccgttgaggaggcactgagggctgctgtcattgggcctgatgtgttcgcgaagctgctgtcggctgagcgcgctgtcactggctacactgacccctacaccgggcagcagatctccctcttccaggccatgcagaagggcctcatcgtccgggagcacggcatccgcctgctggaggcccagatcgccacgggcggcgtcatcgaccccgtgcacagccaccgcgtgcccgtggacgtggcctaccggcgcggctacttcgatcagatgctgaacttgatcctgttggacccttctgacgacaccaagggcttcttcgaccccaacacgcacgagaacctcacgtacctgcagcttctggagcgctgtgtgcgtgaccccgagacgggcctgtacctcctgccactcagcagcacgcagtccccgctggtggacagtgccacccagcaggccttccagaacctgctgctctccgtgaagtatggacggtttcaggggcagagggtctccgcgtgggagctgatcaactctgagtacttcagcgagggccgcaggaggcagctgctgcgtcgctaccggcagcgcgaggtcacgctggggcaggtggcaaagctgctggaggcggagacgcagagacaggcggacatcatgctgcccgcactgcggagccgggtcaccgtccaccagctcctggaggccggtatcattgaccagcagctgttggaccaagtgctggccgggacaatcagcccggaggccctcctactcatggacggcgtccgcaggtacctgtgcggcctgggagctgtgggcggtgtgcggctgctgccctctggccagcggctcagcctctaccaggccatgaggcagaagctgctggggcccagggtggccctggccctgctggaggcccaggcggccaccggaaccatcatggaccctcacagcccagagagcctctcggtggatgaggccgtgcgcaggggtgtggtggggccggagctgtatggcaggctgaagcgggctgagggtgccattgctggcttcagagaccccttctctgggaagcaggtgtctgtgttccaggccatgaagaaaggtctcatcccttgggagcaagctgcccgcctcctggaggctcaagtggccacaggagggatcattgaccccaccagccaccaccacctccccatgccagtggccattcagcgtggctatgttgaccaggagatggagacagccttgtccagctcctccgaaaccttccccacaccggacggccaggggcgcacgagctatgcccagctcctggaggagtgccccagggatgagacttctggccttcacctcctgcccctgccagaaagtgctcctgccctccccaccgaggagcaggtccagaggagcctgcaggccgtgccgggggccaaggatggcacatccctctgggacctgctcagctcctgccacttcaccgaggagcaacggaggggcctgctggaggacgtgcaggaggggaggaccactgtgccacagctgctagcctctgtgcagaggtgggtacaggagaccaagctcctggcccaggcccgcgtcatggtgcccggcccacggggtgaggtacccgctgtctggctgctggatgctggcatcatcacccaggagacccttgaggccctggctcagggcacgcagtcgcccgcccaggtcgccgagcagccggcggtgaaggcctgcctgtggggcacaggctgcgtggccggtgtgctgctacagccctctggggccaaggccagcatcgcccaggccgtgagggatggcctcctgcccacaggcctgggccagaggctgctggaagcccaggtggcatctggcttccttgttgaccccctgaacaaccagagactgtcagtggaggacgcggttaaggtcggcctggtgggcagggagctgagtgagcagctcgggcaggccgagagggcggcggccgggtacccagatccctactctagggcctccctctctctgtggcaggccatggagaaggggctcgtgccacagaacgagggcttgcccctcctgcaggtgcagctggccacagggggtgtggtggaccctgtccacggggtgcacctgccccaggcggcagcctgcagactcggccttctggacacacagacgagccaggtgctgactgcagttgacaaggacaacaagttcttctttgaccccagtgcgcgggaccaggtgacctaccagcagctcagggagcgctgcgtgtgcgactccgagaccggattgttgctgttgccactgccctcagacacagtgcttgaggtggacgaccacaccgcggtggctctgagggccatgaaggtgcccgtcagcacagggaggtttaaggggtgtagcgtgtcactctgggacctgctgctctccgaatacgttggcgctgacaagcggcgggagctggtggcactctgtcggtctgggagggctgcggccctgcggcaggtggtcagcgcagtcaccaccctggtcgaggctgcagagaggcagcccctgcaggccaccttcagagggctccggaagcaggtgtcagccagggacctgttcagggcgcagctgatcagcaggaagacgctggacgagctgagccaggggacaacgactgtgaaggaggtggcggagatggacagcgtgaagcggtccctggagggaggcaacttcattgccggggtccttatccagggcacccaggagaggatgagcatcccagaggccctgaggaggcacatcctgcggcctggcacagccctggtgctgctggaggcacaggcagctaccggcttcatcatcgaccccgtggagaaccggaagctgaccgtggaggaggcgttcaaagcaggaatgttcgggaaagaaacctacgtgaagctgctgtcggccgagcgcgccgtcaccggctacaccgacccctataccgggcagcagatctccctcttccaggccatgcagaaggacctcatcgtccgggagcacggcatccgcctgctggaggcccagatcgccacgggcggcatcatcgaccccgtgcacagccaccgcgtgcccgtggacgtggcctaccgctgcggctacttcgacgaggagatgaaccgcatcctggcggaccccagcgacgacaccaagggcttcttcgaccccaacacgcacgagaacctcacgtacctgcagcttctggagcgctgtgtggaggaccccgagacgggcctgtacctgctacaaatcataaagaaaggagaaaactacgtgtacatcaatgaggccacgagacacgtgttgcaatccagaactgcaaaaatgcgcgtggggaggtttgctgaccaggtggtctctttctgggacctgctgtcctctccatacttcacagaggacaggaagcgggagctcatccaggagtatggagcccagagtgggggcctggagaaattgctggaaatcatcaccacgacaattgaagaaacagagacgcaaaaccaaggcatcaaagtggcggccatcagaggggaggtgacagctgcagacctgttcaactccagggtcatcgatcagaagaccctgcacacacttcgtgtggggaggactgggggacaggcactcagcacgctggagtgtgtgaagccctatctggaaggcagcggctgcattgcgggggtcacggtgccctccaccagggaggtcatgagcctccatgaggccagcaggaaggagctcatccctgcagcatttgcgacttggctgctggaggcgcaggccgccaccgggttcctcctggacccctgcacccgccagaagctctctgtggatgaggctgtggatgtgggcctggtgaacgaggagctgcgggagaggctcctgaaggctgaaagagctgccacgggctacagggatccggccacaggagacacgatcccgctgttccaggccatgcagaagcagctcatcgagaaggcggaggcactgaggctgctggaggtgcaggtggccacggggggtgtcatcgacccacagcaccaccaccggctcccactggaaacagcctacagacggggctgtctgcacaaggacatctatgcgctcatttccgaccagaagcacatgaggaaacggtttgtggacccgaacacgcaagagaaggtctcgtaccgagagctgcaggagaggtgccgcccacaagaggacacgggctggctgctgttcccagtgaacaaggctgcacgggactccgagcacatcgatgacgagacgagaagggccctggaggcagagcaagtggaaatcacagtgggaaggttcagaggccagaaaccaacactgtgggcactactgaattccgaatacgtgacagaggagaagaagctccagctggtgaggatgtatagaacacacaccagacgggcactgcagacggtagcgcagctcatcttagagttgatcgagaagcaggaaaccagcaacaaacacctgtggttccaaggaattagacgacagatcacagcttctgaactcctcagctcagccataatcacggaggaaatgctccaggacctggaaacgggacggagcacgacgcaagagctcatggaggacgaccgcgtcaagcgctacctggagggcaccagctgcatcgcgggcgtcctggtgcccgccaaggaccagcccggccgccaggagaagatgagcatctaccaggccatgtggaagggcgtgctgcggcccggcacggccctggtgctgctggaggcgcaggcggccaccggcttcgtcatcgaccccgtgcgcaacctgaggctgtcggtggaggaggccgtggctgcgggcgtggtgggcggcgagatccaggagaagctgctgtcggccgagcgcgccgtcaccggctacaccgacccctacaccgggcagcagatctccctcttccaggccatgcagaaggacctcatcgtccgggagcacggcatccgcctgctggaggcccagatcgccacgggcggcgtcatcgaccccgtgcacagccaccgcgtgcccgtggacgtggcctaccggcgcggctacttcgacgaggagatgaaccgcgtcctggccgaccccagcgacgacaccaagggcttcttcgaccccaacacgcacgagaacctcacgtacctgcagcttctgcagagggccaccctggaccctgagacggggctcctatttctttctctctctctacagtga

SEQ ID NO: 32495 - DNA, 1385 bp, Homo Sapiens
atgggaccgatgtggcgcatgcgtggtggcgccactaggcgcgggagttgctgcggcggggacggtgctgcggacggccgagggccaggccgctccggccgggctcgtggtgggggcagccccagcggcggcggcggcggcgtgggctggcgaggccgcgcggacggcgcccgacagcagctggaggagcggtttgccgacctggcggcgagccacttggaggccatccgtgcgcgggacgagtgggaccggcagaacgcgcggctgcgtcaggagaacgcccggctgcggctcgagaaccggcggctgaagcgcgagaaccgcagcctcttccgtcaggctttgcggctccccggcgaaggcggcaacgggacgcccgcggaggcacgccgggtccctgaagaggccagcacgaaccggagggctagagacagcggccgagaggacgagccgggcagccccagggccctgagggcccgacttgagaagctggaagccatgtaccgccgggccctgctgcagctgcacctcgagcagcggggaccacgtccgagcggggacaaggaggagcagcctctacaggaacccgactccggcctccgctcccgggactcggagccctctgggccctggctgtagccgaggccgcagccggtgagaggcggagcctcgagcgggcccctcctcctccgttcccagctacccccgacctcgcgcacgccctggcccgctccctgcccgcggataccttggactacggtgccttcccgcccccaccagtggacacttccgggtggcgcttggccatccgcttggtggaggtcgagtgggtgcaagggccctcaggacctcccacatgtacagttcccctgcctcttgccccggctagtttccctggagagaggcctagccaacaacgaagggacggattttaaaacagcgagaactgggtgccaagaaacacttcatattccctgaacttttctggatgttgtgcgaacctgttgtatttttttttttcctgtattttggttctgagggatgagtaatgtgtttttagttggttgagtttatccattcttcaatcccctaaagccttcagctattctttcatatgtggccaacattttaagtacagtgtttgcttttataagtcggtgttacttggatgtcctataaaatacccactttttataaagatgatatttataacctaggaactcatgcctgtcttggctgcagtccctgtacatctaatatatactgatttgtttgcccccagagaatttttaaggtatctgcctatatcgtgatcttttgaaatggtaaataaatctggtgcattaaaaattaaaaaaaaaaaaaacaaaaaaaaaaaaacaaaa

SEQ ID NO: 32496 - DNA, 5840 bp, Homo Sapiens
atgtacaccttcctgcccgacaacttctcacctgccaagcccaagccttccaaagacctgaagccgctgctgggctccgcggttctggggctgctgcttgtgctggccgcggtggtggcctggtgctactacagcgtctccctacgcaaggcggagcgacttcgcgcggagctgctggacctgaaagctggcggcttctccatccgcaatcagaagggagagcaggtcttccgcctggccttccgctccggcgcgctggaccttgactcctgcagccgcgatggcgccctgctgggctgctcgctcacggccgacgggctgccgctgcacttcttcatccagactgtgcggcccaaggacacggtcatgtgctaccgcgtgcgctgggaggaggcagcgccgggccgggccgtggagcacgccatgttcttgggcgacgcggcggcccactggtatggtggcgccgagatgaggacgcaacactggcccatccgcctggatggccagcaggagccccagccgttcgtcaccagcgatgtctactcctccgacgccgcgtttgggggcatcctcgagcgctactggctatcttcgcgcgcggccgccatcaaagtcaatgactcagtgcccttccacctgggctggaacagcacggagcgctcgctgcggcttcaggcgcgctaccacgacacgccctacaagccacccgccggccgcgccgcagcgccagagctgagctaccgagtgtgcgtgggctcagacgtcacctccatccacaagtacatggtgcgtcgctacttcaacaagccgtcaagggtgccagcacccgaggccttccgagaccccatttggtccacatgggcgctgtacgggcgcgccgtggaccaggacaaggtgctgcgttttgcccaacagatccgcctgcaccacttcaacagcagccacctggaaatcgacgacatgtacacacctgcttatggcgacttcgacttcgatgaggtcaaattccccaacgccagcgacatgttccgccgcctgcgcgacgccggcttccgcgtcacgctctgggtgcacccttttgtcaactacaactcgtcgcgcttcggcgagggcgtggagcgcgagctgttcgtgcgcgaacccacgggccggttacctgcgctggtgcgctggtggaacggcatcggcgcggtgctagacttcacgcacccaaaggcccgcgactggttccagggacacctgcggcggctgcgctctcgctactccgtggcttccttcaagttcgacgcgggcgaggtcagctacctgccgcgggacttcagcacctaccggccgctgccggaccccagcgtctggagccggcgctacactgagatggcgctgcccttcttctcgctggcggaggtgcgcgtaggctaccagtcacagaacatctcctgcttcttccgcctggtggatcgcgactctgtgtggggctacgacctggggttgcgctcactcatccccgcggtgctcaccgtcagcatgctgggctacccattcatcctacccgatatggtgggcggcaacgccgtgccccagcggacagccggcggcgatgtgcccgagcgcgagctctacattcgctggctggaagtggccgcctttatgccggccatgcagttctctatcccgccctggcgctacgacgcggaagtggtggccatcgcgcagaagttcgccgccctgcgggcctcgcttgtggcaccgctgttgcttgagctggcgggcgaggtcaccgacacgggtgaccctatcgtgcgccccctttggtggattgcgcccggcgacgagacagctcaccgtatcgactcgcagttccttattggggacacgctgcttgtggccccggtgctggagccaggcaagcaggagcgcgacgtctatttgcccgccggcaagtggcgcagctacaagggtgagcttttcgacaagacgccggtgctgctcaccgattacccggtcgacctggatgagatcgcctactttacctgggcgtcctgacccagcccagggcccggtaaccgcaaagcccccagtcttcatgcagaccttgaaccctccgtcacacccgcaccatgtactcccaggaacctcccacctctataccacccattaagtggctgctgacttaaatgtgctggaaccagctgctgaaggtggggcctagggagggggcactgaagcaatctcctgctccaacgcacaatccttactgtgccctttccacccccacactcacaccaatctgcagaaacctcttccctggggtggaagccagagagcttagaggaaaaaggtcagctctcttcctgttatacatggttatacatggttggggtttaaaagcacaaagagaaacctccccctcctggctttcgtggccatctttgtccatcttaggtggggacttgatcttatttaaggtctccaaatagcccccaccacacttagaacgtgtgttttcttagtgttagaagccaggccctgagtccccagcactcacctgaactgtggctgatttggtcccagtccagctggggaggtgtttggctgacaaggaggcaagagatcccctcccagggaacaggaggactgggcttagcacagagccatcatcatgttcccaatttgtgaagagactcctaacactgcactaacccatttgtgtacatacatgggctcagccctgggccaaatgtgcctgatgggaacagacttgcagggccatgcaggccagacttcgtgccttaactgaagagtgtgcgtgtgtgtgtgtgagagagagagagagagagaaacacgcatcatgggtccctgatctatgaaatgaacacaacctctctgaggctggatgatctggaggaagggggcatggagcaaatttgaggctctgattgctgagccagcctcctcccaggcggtttccccaggactctcgtaggaaataaatagccctttcaagattcctcagctgcctcaccccctgcacatgtgcctggggtgtggcctagaagggagtgatgttcttactctggtggtctgtgcttctgaacacaggctacatgcacacactgacaactaccaataaacagacaggggaaggtctttcatctcagccattttctcttccccccgcccccccttagatggagtcttgctctgtcacccaggttggagtgcagtggcacaatcagctcactgcaacccctcctcctaggttcaagcgattgagtagctgagattacaggcatgcatcactatgcctggctttttgtattttttagtagagatggggtttaccatgttggccaggctagtctcaaactcctgacctagtgatgcacccaccttggcctcccaaagtgttgggattacaggcatgagccaccacgccagccattttctctttctaagaagagcaacctcagccggagtgagttttttctgactttgcagctgagtctggagaaaagtggcatgccagagcgggtcggtgggaaacagggtgaactttagcttccatcaacagctctggtagcaaaaccagtcccctaccccctagagaatgcatccgtttccccacctgatatggtttggctgtgtccccacctaaaactcatcttgaattgtagctcccataattgccatgtgttgtgggaaggacccagtgggagataattgaaatatgggggcagtttccgccatactgttctggtgatagtgaatagatctcatgagagctgatgattttataagaggtttccccttttgcttagttctcattctctcttgcctgccgccatgtaagacgtgcctttctgtcatgcttgtgaggcctccccagccacgtggagctgtgagttcattaaacctctttttctttataaattacccagtcttggttatgtctttatcagcactgtgaaaatgaacctatacagtaaattggtaccagtagagtggggcgctgctgtaaatacccaaaaatgtggaagcaactttggaactgggtaacaggcagaggttggaacagtttggagggatcagaagacaggaaaatgtgggaaagtttgggacttcctagagacttgttaaatggctttgaccaaaatgctgataatgattgggacatgaaatccaggctgagttggtctcagatagcgatgaggaacttgtttggtactggagtaaaggtgactcttgctatattttagcaaagagactggctgcattttgcccctgccctagagatttgtggaactttgaactcgagggagatgatttagggtatctggcagaagaaatttctaagcagcaaagcattcatgaggtgacttgggtgctgttaaaagcattcagttttaaaagggaaacagactataaaagtttggaaaatttgcagcctgatgatgagatagaaaagaaaaacccattttctgaggataaattcaagccccctgcagaaatttgcataagtaacaaggagccaaatgttaatcactaagacatggggaaaatgtctgcagggcatgtcagagacctttgcagcagtgcctcccatcacaggcctggaggcctaggagggaaaaaatggttttgtgggccaggcccaaggtccccttgctgtgtgcagcccagggacttggtaccatgcatcccagctgctctagtcatggctaaaaggggccaagatacagctcaggccttggcttcagagggtgcaagccccaagtcttggcatcttccacgtagtgttgagcctgcaggtgcacagaagtcaagaactgaggtttgggaacctctgcctagatttcagagaatgtatggaaatgcatgtatgtccaggcagaagtttgctacaggagtgaggccctcatggagaacctctgttaaggcaatgtggaaggggaagcccccacacagagaccccactgggacactgcctagtagagctgtcagaagaaggccaccgtcctccagacatcagaatggtatatccactgacagcttgcaccatgcacctggaaaagccacagacactcaacgccagcctgtaaaagcaaccgagaagtaggctgtaccctgcaatgccataggggtggagctgcccaagaccatgggaacccacctcctgcatcagtgtgacctggatgtgagacatggagtcaaaggagaccattttggagctttaagatttaactgccctgctggatttcagacttgcatggggcctttagccacttcgttttggccaacttctcccacttgaaatgggtgtatttagccaatgcctgtacctccgttgtatctaggaagtaactaactagcctttgattttacaggctcataggtggaagggacttgccttgtttcagatgagactttggagtatggacttttgagttaatgctgaaatgagttaagactttgggggactgttgggaaggcatgattgatttttaaatgagaggacatgagatttgggaggggccagggagagaatgatatggtttggctgtgtccccatccaaatatcaccttaaattgtagctcccataattgtgggagggacctggtgggagataattgaatcataggggcagtttctcccatactgttctggtggtagtgaataagtctcacgagatctgatggtttaataaggggtttccccttttgcttggctctcattctctcttgtctgctgccatgtaagatgtgccttttgccttccaccatgattgtgaggcctcccagccacatggaactgtgagttcattaaacctctttttcttcat

SEQ ID NO: 32497 - DNA, 4939 bp, Homo Sapiens
aagtggggccgaaggaaaacacggagagggagcccggccgggacaggaagaggctggggaccgcggcgaaggtggtgagtgctcttgggcgccttctcccaacgtccctgccagactcgcctccgggctgattctccagttggtttcctggactccagagtagctgtccggcctggccccggaggtgcaaagtaagaaaattgaagtcaaagaccatgggagatacagcaaaaccttatttcgtgaagcgcactaaagaccgggggactatggatgatgatgacttcagaaggggtcacccccaacaagattatttaataatagatgaccatgctaaaggccatggcagtaaaatggaaaagggccttcaaaaaaagaagataacaccagggaactatgggaatacccccagaaaaggaccatgtgctgtttccagcaatccatatgcatttaaaaacccaatctacagtcaacccgcttggatgaatgacagccacaaagatcagagtaagagatggctgtctgatgaacatactggtaattcagacaactggagagaattcaaacctggacctagaattcctgttataaaccgacaaagaaaagactcctttcaagaaaatgaagatggttataggtggcaagacacaagaggctgcagaactgtaagacgactgtttcataaagacctaacaagcctagaaaccacgtcagaaatggaagcaggaagtcctgaaaacaagaagcagaggtccagacctaggaagccacggaagactagaaatgaggaaaatgagcaggatggagacttggaaggccctgtgatcgatgagtctgtactttcaacgaaggagctgctaggcttacagcaggctgaggagagactgaagagagactgcattgacaggctaaaaaggcgaccacgaaactaccctacagcaaagtacacctgcagactctgtgatgttttaattgaatccattgcatttgcccataagcatatcaaggaaaagaggcacaagaaaaacattaaggagaagcaagaggaagagttgctcactacgttacccccaccaacaccctcccagataaatgcagttggcattgccattgacaaagtggtacaggaatttggcttacacaatgagaacttggaacagaggctggaaattaaacgtatcatggaaaatgtgttccaacacaagttaccagattgttccctaagattatatgggtcatcctgtagcagattgggtttcaaaaattcggatgtaaacattgacatccagtttccagccattattgaaggattctcattaagcaaactagggaatttcaaccttcaagacattgaaaaagatgttgtgatctgggaacatactgacagtgctgcaggggacacaggcataacaaaagaagaggcaccaagagaaacgccgattaaaaggggacaggtgtcattaatattggatgtgaaacaccagccttcagtaccagttgggcagctctgggtggaattgctgcggttctatgctttagaatttaatttggctgatttagtgataagtattcgtgtcaaagaattggtatctcgggaattgaaggattggcccaaaaagcgcattgccattgaagatccctactctgttaaaagaaatgtggcaagaaccctaaatagtcaacctgtgtttgaatatatacttcattgtttaaggacaacatacaagtattttgctcttccacacaaaattacaaaatccagccttctaaagcctctgaatgcaattacatgtatttcagaacattctaaagaagtaataaatcatcatccagatgtacaaacaaaagatgataagctcaaaaactcagttttggcccaaggtcctggtgctaccagttcagctgcaaatacctgtaaggtacagccacttactcttaaagagactgctgaaagttttggaagcccaccaaaagaagaaatgggaaatgaacacatcagtgtccaccctgaaaactcagactgtatccaagcagatgttaactctgatgattacaagggtgataaagtataccatccagaaacaggaaggaaaaacgagaaagagaaagttggaaggaagggcaagcatctgttgactgttgatcagaaacgtggagagcatgttgtctgtggcagcacacgtaataatgagtcagagagcactttggatttagaaggcttccaaaatcccacagctaaagagtgtgagggacttgccactttagataacaaggctgatcttgatggagaaagtacagaaggtactgaggaactagaagactctctaaaccactttacccactcagtacagggccagacatcagaaatgattccctctgatgaagaggaggaggacgacgaagaagaggaggaggaagaagaacctaggctcaccattaaccaaagggaagatgaagatggcatggctaatgaagatgagttagacaacacctacactgggtcaggggatgaggacgccctatctgaagaggatgatgagttaggcgaagctgctaagtatgaagacgtgaaagaatgtggaaaacatgtagaaagagctctcctagtggaacttaataaaataagtctcaaggaagaaaatgtatgtgaagaaaaaaattcacctgtggatcagtctgattttttttatgaattcagtaaacttatcttcaccaaaggcaagggattggactgtgtcagaactattgaagaattagcaagagtcctcagaaaacattcaggtctgagaaacatcttacctattacaacagcaaaggtgccaattgtgaagttcttccatttgagaagtggtctggaagtagatatcagtttgtataacacattggcccttcataacacaaggcttttatctgcttattccgccattgatcccagagtgaagtatttgtgctataccatgaaagtatttacaaagatgtgtgatattggtgatgcatctagaggcagcttatcatcgtatgcatatactcttatggtgctatattttctccagcagaggaatccaccagtcattcctgtccttcaagagatatacaaaggtgaaaagaaacctgaaatatttgttgatggctggaatatttatttttttgatcaaatagatgaactgcctacctattggtcagaatgtggaaaaaatacagaatctgttgggcagttatggttgggccttcttcgtttctacacagaggaatttgattttaaagaacatgttattagcatcaggagaaaaagtctgcttacaacttttaagaaacagtggacctcaaaatacattgttattgaagatccctttgatttgaatcataatcttggagctggattatcaaggaaaatgacaaattttataatgaaggcttttatcaatggtagaagagtatttggtattcctgtcaagggatttccaaaggactacccctcaaaaatggaatacttttttgatccagatgtgttaactgaaggagagctggccccaaatgatagatgttgtcgaatttgtggaaaaatcggacacttcatgaaggactgtcctatgaggagaaaagtaagacggcggcgagatcaggaagatgccctgaaccaaagataccctgagaacaaggaaaaaagaagcaaagaggacaaagaaattcacaacaagtacacagaaagggaggtgtcaacaaaagaagataagcccatacagtgcacacctcagaaagccaagccaatgcgggcagctgctgacctggggagggagaagatcctcaggccaccagtagaaaaatggaagagacaggatgacaaagacttaagagaaaaacgttgttttatttgtggaagagaagggcacattaaaaaggaatgcccacagtttaaaggctcttcaggtagcctttccagtaaatatatgactcagggaaaagcctcagcgaagaggacccagcaggaatcatgagggaaggaaaatgcagcactctaaatggccactcaggcgttcctattcactcggaaaattaggttcatttcacaggacacagcagtgtagatcaggcttcaacttaacatttaagggaaatgtcagatttttttttaatttaatgaaattgttaatgaggaaaaatttttaatatagtcttatctaccacacatccccatagatttaaggattttaatagaaagacatgatgtatgtatttaagccacgttaaaagaaaaaatataactatggaccggtattcagtgaatacagtttcatggtttttaattctttcaaagcacattaaaaatggtgtgctgataaaccccaagtaaattaaccctttttccgtataaatccattttttgttttgaagaggggaaattatatttattgttgtttactgaatcctggtgtgaaagcatatcagatatgtatgaactgctactgctgtacttccgatttacggacatcattttattgctatttgtagacgtgataacatgaacatgagtacctatttatgtgggccttcagtggatgggcagtgccactcaggtctctggggtttccctctctaattttaagtaaattgacatataactactatgcttataaaaatgaagtaaggaaaacaagtagtcctgtttgccactaaaaacattttcaaaggaaaaataaaatgaaagtactttttactttttatgatactcagaaattaggatgaagaacttttaaaattgctgaagatcaaagaggttatctctgccagtcacaagtgtggctggtgtcattctgggtctgactggagccctcctggactgtttctttaatttcaaaagccctgcagacatagtacctggtcagaactatgcctcggtttatttatcattttgaaataaaatcagaatttcaacctgtaa

SEQ ID NO: 32498 - DNA, 7273 bp, Homo Sapiens
atggccggccggtcccacccgggcccgctgcggccgctgctgccgctccttgtggtggccgcgtgcgtcctgcccggagccggcgggacatgcccggagcgcgcgctggagcggcgcgaggaggaggcgaacgtggtgctcaccgggacggtggaggagatcctcaacgtggacccggtgcagcacacgtactcctgcaaggttcgggtctggcggtacttgaagggcaaagacctggtggcccgggagagcctgctggacggcggcaacaaggtggtgatcagcggctttggagaccccctcatctgtgacaaccaggtgtccactggggacaccaggatcttctttgtgaaccctgcacccccatacctgtggccagcccacaagaacgagctgatgctcaactccagcctcatgcggatcaccctgcggaacctggaggaggtggagttctgtgtggaagataaacccgggacccacttcactccagtgcctccgacgcctcctgatgcgtgccggggaatgctgtgcggcttcggcgccgtgtgcgagcccaacgcggaggggccgggccgggcgtcctgcgtctgcaagaagagcccgtgccccagcgtggtggcgcctgtgtgtgggtcggacgcctccacctacagcaacgaatgcgagctgcagcgggcgcagtgcagccagcagcgccgcatccgcctgctcagccgcgggccgtgcggctcgcgggacccctgctccaacgtgacctgcagcttcggcagcacctgtgcgcgctcggccgacgggctgacggcctcgtgcctgtgccccgcgacctgccgtggcgcccccgaggggaccgtctgcggcagcgacggcgccgactaccccggcgagtgccagctcctgcgccgcgcctgcgcccgccaggagaatgtcttcaagaagttcgacggcccttgtgacccctgtcagggcgccctccctgacccgagccgcagctgccgtgtgaacccgcgcacgcggcgccctgagatgctcctacggcccgagagctgccctgcccggcaggcgccagtgtgtggggacgacggagtcacctacgaaaacgactgtgtcatgggccgatcgggggccgcccggggtctcctcctgcagaaagtgcgctccggccagtgccagggtcgagaccagtgcccggagccctgccggttcaatgccgtgtgcctgtcccgccgtggccgtccccgctgctcctgcgaccgcgtcacctgtgacggggcctacaggcccgtgtgtgcccaggacgggcgcacgtatgacagtgattgctggcggcagcaggctgagtgccggcagcagcgtgccatccccagcaagcaccagggcccgtgtgaccaggccccgtccccatgcctcggggtgcagtgtgcatttggggcgacgtgtgctgtgaagaacgggcaggcagcgtgtgaatgcctgcaggcgtgctcgagcctctacgatcctgtgtgcggcagcgacggcgtcacatacggcagcgcgtgcgagctggaggccacggcctgtaccctcgggcgggagatccaggtggcgcgcaaaggaccctgtgaccgctgcgggcagtgccgctttggagccctgtgcgaggccgagaccgggcgctgcgtgtgcccctctgaatgcgtggctttggcccagcccgtgtgtggctccgacgggcacacgtaccccagcgagtgcatgctgcacgtgcacgcctgcacacaccagatcagcctgcacgtggcctcagctggaccctgtgagacctgtggagatgccgtgtgtgcttttggggctgtgtgctccgcagggcagtgtgtgtgtccccggtgtgagcaccccccgcccggccccgtgtgtggcagcgacggtgtcacctacggcagtgcctgcgagctacgggaagccgcctgcctccagcagacacagatcgaggaggcccgggcagggccgtgcgagcaggccgagtgcggttccggaggctctggctctggggaggacggtgactgtgagcaggagctgtgccggcagcgcggtggcatctgggacgaggactcggaggacgggccgtgtgtctgtgacttcagctgccagagtgtcccaggcagcccggtgtgcggctcagatggggtcacctacagcaccgagtgtgagctgaagaaggccaggtgtgagtcacagcgagggctctacgtagcggcccagggagcctgccgaggccccaccttcgccccgctgccgcctgtggcccccttacactgtgcccagacgccctacggctgctgccaggacaatatcaccgcagcccggggcgtgggcctggctggctgccccagtgcctgccagtgcaacccccatggctcttacggcggcacctgtgacccagccacaggccagtgctcctgccgcccaggtgtggggggcctcaggtgtgaccgctgtgagcctggcttctggaactttcgaggcatcgtcaccgatggccggagtggctgtacaccctgcagctgtgatccccaaggcgccgtgcgggatgactgtgagcagatgacggggctgtgctcgtgtaagcccggggtggctggacccaagtgtgggcagtgtccagacggccgtgccctgggccccgcgggctgtgaagctgacgcttctgcgcctgcgacctgtgcggagatgcgctgtgagttcggtgcgcggtgcgtggaggagtctggctcagcccactgtgtctgcccgatgctcacctgtccagaggccaacgctaccaaggtctgtgggtcagatggagtcacatacggcaacgagtgtcagctgaagaccatcgcctgccgccagggcctgcaaatctctatccagagcctgggcccgtgccaggaggctgttgctcccagcactcacccgacatctgcctccgtgactgtgaccaccccagggctcctcctgagccaggcactgccggccccccccggcgccctccccctggctcccagcagtaccgcacacagccagaccacccctccgccctcatcacgacctcggaccactgccagcgtccccaggaccaccgtgtggcccgtgctgacggtgccccccacggcaccctcccctgcacccagcctggtggcgtccgcctttggtgaatctggcagcactgatggaagcagcgatgaggaactgagcggggaccaggaggccagtgggggtggctctggggggctcgagcccttggagggcagcagcgtggccacccctgggccacctgtcgagagggcttcctgctacaactccgcgttgggctgctgctctgatgggaagacgccctcgctggacgcagagggctccaactgccccgccaccaaggtgttccagggcgtcctggagctggagggcgtcgagggccaggagctgttctacacgcccgagatggctgaccccaagtcagaactgttcggggagacagccaggagcattgagagcaccctggacgacctcttccggaattcagacgtcaagaaggattttcggagtgtccgcttgcgggacctggggcccggcaaatccgtccgcgccattgtggatgtgcactttgaccccaccacagccttcagggcacccgacgtggcccgggccctgctccggcagatccaggtgtccaggcgccggtccttgggggtgaggcggccgctgcaggagcacgtgcgatttatggactttgactggtttcctgcgtttatcacgggggccacgtcaggagccattgctgcgggagccacggccagagccaccactgcatcgcgcctgccgtcctctgctgtgacccctcgggccccgcaccccagtcacacaagccagcccgttgccaagaccacggcagcccccaccacacgtcggccccccaccactgcccccagccgtgtgcccggacgtcggcccccggccccccagcagcctccaaagccctgtgactcacagccctgcttccacggggggacctgccaggactgggcattgggcgggggcttcacctgcagctgcccggcaggcaggggaggcgccgtctgtgagaaggtgcttggcgcccctgtgccggccttcgagggccgctccttcctggccttccccactctccgcgcctaccacacgctgcgcctggcactggaattccgggcgctggagcctcaggggctgctgctgtacaatggcaacgcccggggcaaggacttcctggcattggcgctgctagatggccgcgtgcagctcaggtttgacacaggttcggggccggcggtgctgaccagtgccgtgccggtagagccgggccagtggcaccgcctggagctgtcccggcactggcgccggggcaccctctcggtggatggtgagacccctgttctgggcgagagtcccagtggcaccgacggcctcaacctggacacagacctctttgtgggcggcgtacccgaggaccaggctgccgtggcgctggagcggaccttcgtgggcgccggcctgagggggtgcatccgtttgctggacgtcaacaaccagcgcctggagcttggcattgggccgggggctgccacccgaggctctggcgtgggcgagtgcggggaccacccctgcctgcccaacccctgccatggcggggccccatgccagaacctggaggctggaaggttccattgccagtgcccgcccggccgcgtcggaccaacctgtgccgatgagaagagcccctgccagcccaacccctgccatggggcggcgccctgccgtgtgctgcccgagggtggtgctcagtgcgagtgccccctggggcgtgagggcaccttctgccagacagcctcggggcaggacggctctgggcccttcctggctgacttcaacggcttctcccacctggagctgagaggcctgcacacctttgcacgggacctgggggagaagatggcgctggaggtcgtgttcctggcacgaggccccagcggcctcctgctctacaacgggcagaagacggacggcaagggggacttcgtgtcgctggcactgcgggaccgccgcctggagttccgctacgacctgggcaagggggcagcggtcatcaggagcagggagccagtcaccctgggagcctggaccagggtctcactggagcgaaacggccgcaagggtgccctgcgtgtgggcgacggcccccgtgtgttgggggagtccccggttccgcacaccgtcctcaacctgaaggagccgctctacgtagggggcgctcccgacttcagcaagctggcccgtgctgctgccgtgtcctctggcttcgacggtgccatccagctggtctccctcggaggccgccagctgctgaccccggagcacgtgctgcggcaggtggacgtcacgtcctttgcaggtcacccctgcacccgggcctcaggccacccctgcctcaatggggcctcctgcgtcccgagggaggctgcctatgtgtgcctgtgtcccgggggattctcaggaccgcactgcgagaaggggctggtggagaagtcagcgggggacgtggataccttggcctttgacgggcggacctttgtcgagtacctcaacgctgtgaccgagagcgagaaggcactgcagagcaaccactttgaactgagcctgcgcactgaggccacgcaggggctggtgctctggagtggcaaggccacggagcgggcagactatgtggcactggccattgtggacgggcacctgcaactgagctacaacctgggctcccagcccgtggtgctgcgttccaccgtgcccgtcaacaccaaccgctggttgcgggtcgtggcacatagggagcagagggaaggttccctgcaggtgggcaatgaggcccctgtgaccggctcctccccgctgggcgccacgcagctggacactgatggagccctgtggcttgggggcctgccggagctgcccgtgggcccagcactgcccaaggcctacggcacaggctttgtgggctgcttgcgggacgtggtggtgggccggcacccgctgcacctgctggaggacgccgtcaccaagccagagctgcggccctgccccaccccatgagctggcaccagagccccgcgcccgctgtaattattttctatttttgtaaacttgttgctttttgatatgattttcttgcctgagtgttggccggagggactgctggcccggcctcccttccgtccaggcagccgtgctgcagacagacctagtgccgagggatggacaggcgaggtggcagcgtggagggctcggcgtggatggcagcctcaggacacacacccctgcctcaaggtgctgagcccccgccttgcactgcgcctgccccacggtgtccccgccgggaagcagccccggctcctgaatcaccctcgctccgtcaggcgggactcgtgtcccagagaggaaggggctgctgaggtctgatggggcccttcctccgggtgaccccacagggcctttccaagcccccatttgagctgctccttcctgtgtgtgctctgggccctgcctcggcctcctgcgccaatactgtgacttccaaacaatgttactgctgggcacagctctgcgttgctcccgtgctgcctgcgccagccccaggctgctgaggagcagaggccagaccagggccgatctgggtgtcctgaccctcagctggccctgcccagccaccctggacgtgaccgtatccctctgccacaccccaggccctgcgaggggctatcgagaggagctcactgtgggatggggttgacctctgccgcctgcctgggtatctgggcctggccatggctgtgttcttcatgtgttgattttatttgacccctggagtggtgggtctcatctttcccatctcgcctgagagcggctgagggctgcctcactgcaaatcctccccacagcgtcagtgaaagtcgtccttgtctcagaatgaccaggggccagccagtgtctgaccaaggtcaaggggcaggtgcagaggtggcagggatggctccgaagccagaaatgccttaaactgcaacgtcccgtcccttccccacccccatcccatccccacccccagccccagcccagtcctcctaggagcaggacccgatgaagcgggcggcggtggggctgggtgccgtgttactaactctagtatgtttctgtgtcaatcgctgtgaaataaagtctgaaaactttaaaa

SEQ ID NO: 32499 - DNA, 4316 bp, Homo Sapiens
atgattgaagccaatggacaattgagtggaggctctgacatgctctgctcctgggctgtcctgaagaatctaggaagctgtttgcagatgggccttgcactgtttattcgtggagagctttatatgtgcagcccactgaaggaagtccgacattttaggcctgcagttaggatgttctacgcatccagtggaaattattatttcatcccatacatcgtgacaccgtgcgctgattatttttgctgcgagagtgatgcccagagacgagcctccgagtacatgcagcccaactgggacaacatcctgggcccgctgtgcatgcctttggtggacaggttcattagcctccttaaggacatccacgtgacctcatgtgtttattacaaagaaaccttgttaaatgacatccggaaagccagagagaaataccaaggtgaggaactggcgaaggagctagctcggatcaagctccgcatggataatactgaggttctgacctcagacatcatcattaacttactcctgtcctaccgtgatatccaggactatgatgcgatggtgaagctggtggaaacactggagatgctgcctacgtgtgatttggccgatcagcataacattaaattccactatgcgtttgcactgaataggagaaacagcacaggtgaccgtgagaaggctctgcagatcatgctccaggttctgcagagctgtgatcacccgggccccgacatgttctgcctgtgtgggaggatctacaaggacatcttcttggattcagactgcaaagatgacaccagccgcgacagcgccattgagtggtatcgcaaagggtttgaactccagtcatccctctattcgggaattaatcttgcagttttgctgattgttgctggacaacaatttgaaacttccttggaactaaggaaaataggtgtccggctgaacagtttgttgggaagaaaagggagcttggagaaaatgaacaattactgggatgtgggtcagttcttcagcgtcagcatgctggcccatgatgtcgggaaagccgtccaggcagcagagaggttgttcaaactgaaacctccagtctggtacctgcgatcattagttcagaacttgttactaattcggcgcttcaagaaaaccattattgaacactcgcccaggcaagagcggctgaacttctggttagatataatttttgaggcaacaaatgaagtcactaatggactcagatttccagttctggtcatagagccaaccaaagtgtaccagccttcttatgtttccataaacaatgaagccgaggagagaacagtttctttatggcatgtctcacccacagaaatgaaacagatgcacgaatggaattttacagcctcttccataaagggaataagcctatcaaagtttgatgaaaggtgttgttttctttatgtccatgataattctgatgactttcaaatctacttttccaccgaagagcagtgcagtagatttttctctttggtcaaagagatgataaccaatacagcaggcagtacggtggagctggagggagagaccgatggagacaccttggagtatgagtatgaccatgatgcaaatggtgagagagttgtcttggggaaaggcacgtatgggattgtgtatgctggccgagatctgagcaatcaagtgcgaatagccatcaaagaaatcccggagagagatagcaggcaagtccaggcgggccttccgcatttcgggtattctcagcctctgcacgaggagatagccctgcacaagtaccttaagcaccgcaatatcgttcagtacctgggctctgtttcagagaacggctacattaagatatttatggagcaggtgcctggaggaagcctttctgctcttctgcgatccaaatgggggccgatgaaggaaccgacaatcaagttttacaccaaacagatcctggagggccttaagtatcttcatgaaaaccagatcgtgcacagagacataaagggcgataatgttctggtgaacacctacagcggagtggtgaaaatctccgattttggaacctcgaaacgtcttgcgggtgtgaacccctgcacagagacttttactggcaccctgcagtacatggcacctgagataattgaccaagggcctcgcggatatggtgccccagccgatatctggtccctgggctgcaccatcattgagatggccaccagcaagcctccgttccatgagcttggtgagccgcaggcagccatgttcaaagtgggcatgtttaagatccaccctgagattccagaagccctttcagctgaagcccgagccttcattttatcctgtttcgagcctgacccccacaaacgtgccaccactgctgagctactgagagagggtttcttaaggcaggtgaacaagggcaagaagaaccgaattgccttcaagccctcagaaggtccccgcggtgtcgtcctggccctgcccacacagggagagcccatggccaccagcagcagcgagcacggctctgtctccccagactccgacgcccagcctgacgcactctttgagaggacccgggcgcccaggcaccaccttggccacctcctcagtgttccagacgagagctcagccttggaagaccggggcttggcctcgtccccggaggacagggaccagggcctcttcctgctacgcaaggacagtgagcgccgtgccatcctgtacaaaatcctctgggaggagcagaaccaggtggcttccaacctgcaggagtgtgtggcccagagttccgaagagttgcatctctcagttggacacatcaagcaaatcattgggatcctgagggacttcatccgctccccagagcaccgggtgatggcgaccacaatatcaaagctcaaggtggacctggactttgacagctcgtccatcagtcagattcacctggtgctgttcggatttcaggatgccgtaaataaaattttgaggaaccacttaattaggccccactggatgttcgcgatggacaacatcatccgccgagcggtgcaggccgcggtcaccattctcatcccagagctccgagcccactttgagcctacctgtgagactgaaggggtagataaggacatggatgaagcggaagagggctatcccccagccaccggacctggccaggaggcccagccccaccagcagcacctgagcctccagctgggtgagctcagacaggagaccaacagacttttggaacacctagttgaaaaagagagagagtaccagaatcttctgcggcaaactctagaacagaaaactcaagaattgtatcaccttcagttaaaattaaaatcgaattgtattacagagaacccagcaggcccctacgggcagagaacagataaagagcttatagactggttgcggctgcaaggagctgatgcaaagacaattgaaaagattgttgaagagggttatacactttcggatattcttaatgagatcactaaggaagatctaagataccttcgactacggggtggtctcctctgcagactctggagtgcggtctcccagtacagaagggctcaggaggcctcagaaaccaaagacaaggcttgataccaatcagctaagctgtggcagagtgtcccaccacgctacatgttttgttaaagcttctgttagtgtatacacgaattccgctgtgtttacatatttaaaaatgccattgttcaattaatagtttaagaacttgttttaaatactgtcctgagtttcttttgaaacctgttatttataaacatagaactgtgtgtattgtgaaaacagtgagccttggttttgacctcccggaatattaggaaattcacttgtagtcccagctatgcaggaggctgaggtgggaggattgcttgagcccaggaggtgtggaggctgcagtgagccatgatcacaccactgcactccagcctgggcaacagagcccgaccctgtctcaaaaaaagtacacccttcagcacttgctggaatggtgaaacaaacaaggggtatttaacaaacatggaagctgggacactgcctcagaactggtatggtacttcaatttgagaaacacaaaactgatacgaatgtgccttgtagttaatgtttgatatgaacagaaaatagcttcatatttatactgaatgtgtaagtagagaaaactaagttatgtggcctttgaaatgattacaaaattggaatgattacaaaagtcttattttaaaatggaactgtcctcttgcctgataataaatattgtatcttgt

SEQ ID NO: 32500 - DNA, 2828 bp, Homo Sapiens
atggcgcgtacggcccctgtggagcccccgctgcggcattccgcgcccccctcgccggccgcgggtgagccccgcacctcggtcgaggcggcggtggccccgcggagggtgctgttcgccgacgaggccttggggctgccgctggcgcagttgcgccgctaccggccgtggggcgggcccggggcgggcaagatggcggcggcggccgggcaagatggcggcggcggcggcggggccgacgaggacgacgatggcgaggatggggatgaaggggaggaggaagaggaggcttgccccgagccctcaccgctgtgccccgtccccgctggcggggggttttacctggtccccacattttcgctgccgcccgcgccgggccgtctggagcgcttggggcgcgtcatggtggagctggaggcgctgctgccgcctcccggagcggtccccgggggtgccggggtgtgggtgcctgggggccgcccgccggtgctgcgcgggttggtacgcgtgctgaaccgctccttcgagaaggcggtgcacgtgcgggcctcacacgacggctgggcttccttttgcgaccacccagcgcgctacgtcccgcgcagcccgccgtgggcaggagcgggaggaacaggagcaggagatcccatcctggatccggggctcggcctgggtcccggccaggcatccgcctcctcgcccgacgacggcggccgcaccgaccgctttgccttccagctgccctttgctgagggcgcgggcgatggggcgcgcctcgacttcgtggtgcgctatgagacccctgagggcactttctgggccaacaaccacggccgcaactacacagtcctgctccggatcgcacccgctcccacacccactgatgccgaagggctgccccagcagcagcagctgccgcagctggagccacagcccgagtgccagggtcccgtggaggctgaggccaggcagctgaagagctgcatgaagccggtgaggcgcaggcctgccgaggaggaactgaagacgaagaacatggatgataacacctttgccatggcagagcatcctgatgtccaggagtcagtgggtccactggtagcccccacccctctccgtccatggccccagatgacacttcaggtttctgacgttccgatgactggcaaccccgcagaagaaggtgatgtccccagaagcagtccacctgtggcttttacagaggtcctccaggcaccggccatcaggattcccccctcctcccctctctgtggcctgggtggctcccccagagaccaggcctcagggcccgatgcgagcgagggggccaccgggcctttcctggagcccagtcagcagcaggcagaggccacatggggagtatcgagtgagaatggaggggggctggaggctgtgagtgggtcagaggagctgctcggtgaggacaccatcgaccaggagctggagcagctctacctgtctcacctgagccgcctacgggctgctgtggctgcgggtggggcagggggtggtggggagggctccacagatggagggatgtcccccagccatcccctgggcatactgacggaccgcgacctgatcttgaagtggcctggccctgagcgggccctgaacagcgccctggctgaggagatcacgctgcactatgcccggctggggcgtggcgtggagctcatcaaggacaccgaagaccctgatgatgaaggggagggtgaagaggggctctctgtcacaccctccagcccagaaggggacagccccaaggaatcgcctccagaaatcctctccggggcccgttctgtggtagccacgatgggagatgtgtggctcccatgggcagagggctcaggatgtgacggccctgtggttctgggtacagagggtcagttcattggggatcctgagaaagggatgggcaaggacaccagctctttgcacatgaatagggtgatagctggggtgactgagtccctgggggaggccgggacagaagcccagatagaggtcaccagtgagtgggcaggcagcttggatcccatatctggcaaggagccagcctctcccgtccttctgcaggggcaaaatcccaccctcctcagtcccttgggggccgaagtctgtctctctagtgtagccaggcctcatgtgagctcccaggatgaaaaggatgcaggcccaagccttgaacccccaaagaagtctcccaccctagcagtccctgcagaatgtgtgtgtgcactgcctcctcagctccgggggcccttgacccagactctgggggtcctggccgggctagtggtggtccctgtggctctgaacagcggtgtgtccctcctggtgcttgcgctgtgcctctctctggcttggttctcataggctctgcttgtgggatcagcagaggcttaagatgggatacatggcctgtgcagtgaggggacctgggtcctttgcttctgagaatgctcaactgaaagagaggccttctcatccccaagctctccagtcaacacagggctccctgtggtgacaccagtggagatgagggaacgggtagatggtgtgagtgaggggaacttttagagtggaactgggcatgtcctccgcctaccccccgagcctgtatttatttttgtataattctctggatgagggagagtggtcgtgagctggtcttggggcacaattacccagagatatatttattaacagccaacctgtgcaacctgctggagctttatttttaatttaatttatatagagtacctattattatatgccacaatagagctctatgagaaacagtg

SEQ ID NO: 32501 - DNA, 2493 bp, Homo Sapiens
agtgccaccgccgggagccccgggtctcggcttcagccccgggctgaacaagcagggaggggagaggcacttaggcctcgcctccccgcggccttcctcccccagccggggcggaggagacccaggaagctgcgcccggctcccgggggtggagggcctaggcctcggcccgcccgaggcggagcccgggaggtcggggcggggtcccgggccggtcacccacctgggttgccagtcattccagctccgcgaatagttggtgccgttggtgccgccgccgccgctcagccgagaccccggggctctgcggctcattaccttccccgacacgacatggccaagcgccgccgcccagagaagcgcgagtcgccgcccgaaccggccgccgccaacaccccgctccggcccggggctgaggaggaagccgagaaggaggagaaggaggaggcggcggcgggcgggggaagaggacgaccgttccgggttccgcctgagcccgcagcacaggacgaggaggcgggagcggcgcggtgagagagaggtggatgaaggggaggcgacgtctcttccagggccgtgcgcggcccacgtcgccggggccgcggaggacgaggacgacgaggagcaggcggtggcggcagctcctcacgctcacaaggccactgctaacccgcctcccggctccgctggccgcgccgccgctatcgcacgggattcgcagaggcatttttggaacatctttggaaaaaattgcaggatccaagtaatcctgccatcatcaggcaggctgctggaaattatattggaagctttttggcaagagctaaatttattcctcttattactgtaaaaccatgcctagatcttttggttaactggctgcacatataccttaataaccaggattcgggaacaaaggcattctgcaatgttgctctccatggaccattttactcagcctgccaagctgtgttctacacctttgtttttagacacaagcagcttttgagcggaaacctgaaagaaggtttgcagtatcttcagagtctgaattttgagcggatagtgatgagccagctaaatcccctgaagatttgcctgccctcagtggttaacttttttgctgcaatcacaaataagtaccagctcgtcttctgctacaccatcatcgagaggaacaatcgccagatgctgccagtcattaggagtaccactggaggagactcagtgcagacctgcacaaacccactggacaccttcgtcccctttgatccctgtgtgctgaagaggtgaggtctgtgcagaccctgggtgaggggcgagttggctatggcctgtttaactccacctgtgcagactgcagctcagcctcgtccatgcttcgtgactcagccttgtcctcagggaagctggggctggtgcaactttcagaagtggtcccagtgccgttggtggttgcctgacgaaaagctgcacttaatagaaatcactgtggatgcaggagatggacggtgatgagctcaggaccagccagcaaccccatcaggcggtaatgcctaccatggtcacccatgacttcctctcgccactgctcggagctcctgcaaagccacaggcaacaacacatttctgctccgtacgagaagctcctattgtaagtcggtgacatggctggggttttctctcagcaaatattgagcaaacactgactgtgccaggtgatgtgctgggtcccaaacccttcccagacccagccctggcactcacggagatccagctaggaagtccgggaaaaggtcatcggggaaataaacaaagtcaagcacagtggatgaacgcgctgctgccgctccccacacctcttgtggtggacatcacttacgcttcctcatggtgcatgtcacttatgcttcctggtgccctcccagatgacccccccttgggccactacacacagctgcacccggcaagagcagacaaggatggtctactcactgagcctgcaaggctggtgtgcaggacaggccagctacactccccaggtgtgtgcaagaccggggacgagtcagtcattgggaggtgaggtgctcgggcagtgtgggatggaggaggagggagggaaactgagtgtgggctcttcgtattggagaggaggggacggccatggcacaaagactcagatgggaaagtgtgagaaagcagagatttcaaaggagctacggtggagacccacagaagaggaatgctgaggcttttctgtctgaaatgctgaatagactctagcacacgcaaaacagcccaccacagcgagctgcaggattcttccgggcttttaacagtggtcttgtaaaaaaaattagccgggcatggttgtcccagctactcaggaggcagagaggggaggatggcttgcgcccaggaggttgaggctgcagtgagccatgatcgcaccactgcactccagcctgggtgacagaatgagacccctgactc

SEQ ID NO: 32502 - DNA, 4189 bp, Homo Sapiens
agtgccgagtgacaaaagcggagagcgccgccgccaccaccaccgccaccgccaccgccgccgcgggacgggcccaaggccgagccggagccggggcccgggcccgcgtccgctcccgcgcccggcctgggttctgaggaaaacgcaatggtggccatggacttgggctctccctcgctccctaagaagagcctgcctgtccctggggccctggagcaggtggccagtcggctgagcagcaaagtggctgcagaggttcctcatggcagcaaacaggagctgcaggacctcaaggcccagagcctgaccacctgcgaggtctgcggtgcctgctttgagacccgaaagggcctgtccagccacgcgcgctcccacctgcggcagctgggagtggcagagtcggaaagcagcggcgcacccatcgacctcctctacgagcttgtgaagcagaagggtctgcctgacgcccaccttgggctgcccccaggcctggctaagaagtccagctcactgaaggaggtggtcgccggggccccccggcccggcttgctcagcctggccaagcccttggatgcccctgctgtcaacaaagccatcaagtcgcctcccggcttctcggccaagggcctgggccacccgcccagctctccactcctcaaaaagacaccactggccctggcgggctcccctacccctaagaatcctgaggacaagagcccccagctgtccctgagcccccggccggcctccccaaaggcacagtggcctcagtctgaggatgaggggcccttgaacctcacctcaggcccagagccagcacgagacatccgctgcgagttctgtggtgagttcttcgagaaccgcaagggcctctcgagccacgcgcgctcccatctgcggcaaatgggcgtgaccgagtggtacgtcaatggctcgcccatcgacacgctgcgggagatcctgaagagacggacccagtctcggcctggtggacctcccaacccaccagggccaagcccaaaagccctggccaagatgatgggcggcgcaggtcctggcagctcactggaagcccgcagcccctcggaccttcacatctcacccttggccaagaagttgccaccaccaccgggcagccccctgggccactcaccaactgcctctcctcctcctacggcccgaaagatgttcccaggcctggctgcaccctccttgcccaagaagctgaagcctgaacaaatacgggtggagatcaagcgggagatgctgccgggggcccttcatggggaactgcacccatctgagggtccctggggggcaccacgggaagacatgacacccctgaacctgtcgtcccgggcagagccggtgcgcgacatccgctgtgagttctgcggcgagttcttcgagaaccgcaagggcctgtcgagtcacgcgcgctcacacctgcggcagatgggtgtgaccgagtggtccgtcaatggttcgcccatcgacacactgcgagagatcctcaagaagaagtccaagccgtgcctcatcaagaaggagccaccggctggagacctggcccctgccctggctgaggacgggcctcccaccgtggcccctgggcccgtgcagtccccactgccgctgtcgcccctggctggccggccaggcaaaccaggtgcagggccggcccaggttcctcgtgagctcagcctgacgcccatcactggggccaagccctcagccactggctacctgggctcagtggcagccaagcggcccctgcaggaggaccgcctcctcccagcagaggtcaaggccaagacctacatccagactgaactgcccttcaaggcaaagacccttcatgagaagacctcccactcctccaccgaggcctgctgcgagctgtgtggcctttactttgaaaaccgcaaggccctggccagccacgcacgggcacacctgcggcagttcggcgtgaccgagtggtgcgtcaatggctcgcccatcgagacactgagcgagtggatcaaacaccggccccagaaggtgggcgcctaccgcagctacatccagggcggccgccccttcaccaagaagttccgcagtgccggccatggccgtgacagtgacaagcggccgtccctggggctggcacccgggggcctggccgtggtcggccgcagtgccggaggggagccagggcccgaggctggccgggcagccgacggtggtgagcggcctctggcagccagcccgccaggcaccgtgaaggctgaggagcaccagcggcagaacatcaacaaatttgaacgccgacaagcccgccctccagatgcctccgcagcccggggaggcgaggacaccaatgacctacagcagaagctggaggaggtgcggcaacccccaccccgagtccggccagtcccctccctggtgccccggcccccccagacatcacttgtcaagttcgtgggcaacatctacaccctcaaatgcaggttctgtgaggtggaattccagggccccctctccatccaggaagagtgggtgcggcacttacagcggcacatcctggagatgaacttctccaaagcggaccccccacctgaggagtcccaggccccgcaggcacagacagcggcggcagaggctccctaacacaaaagcattccagatcccctctcgtgccacctctgtctcctcttcttcctcctctgtgtccttgtccctcttcctctttctttccgtttccaaaggagcaagccaaaacctcaaaccggcgccccttgggggccgggcacactacagccagggcgccgggagccagctagctgcccttcccccagcccgaggactctggggccacagggtgtcttccttcagcccatgcccacctggtccagcaggggcagcagccaggtctctgatggcagccggtctggtcacaggggaggacagcactcccccgtctagcagccaggcagggcgatgtctgccatccgtggccatttgcaaagaccccaaagacccctgttctggttccctctctcccccatgaatatcctctcacacacatgtacatgcgaacacacacaacacgcacctcgtgagacccgggacctgccccggacccccagttcctgggttgaacgaccacatcatgccacggtgcttgctcaggggaagccacgctccctctgtggggcctgctggggcctgggagccccccactgagcccacaatgccacggaaatccttgttggctgcccccgagaggggccttcccagctgggaagagctcagagctgacagctgcctcctgccatgtcaaggccccccaaagagcctcaggggctctggggccctggagggtggggttggggggtgggactctcctcccccactcctgctccctctcccttttcactgttgctttctatgtatagctccctagacctttcacttttttaaaaacgcgttttgtgtagagaataaggaacgtggatctttttattttgcaatcctgggccagctagaagccaggagctgattgaccttttaacttttttcagtggccacattttggttatcgatgtacctagaagtatgtaaattagattaaatttctcttctggaaacaccctggggcaggcggccagcgtgtgtttttctgtcaagtggacaggctggcattggctggcagccggggctgggatcggggcctcctctgtccagagcgccatggaggccctgggttttccagttggccgccaagccgaccagacgcagctggggatgagcccaagttcccagctgttggctctttaggccatggctgggagggggtctctggctggctggcaaagcggctccagtgagcagatgaaccagggttctgggcagcctgtctgggaagggagccaggatcaagaagcagttgaggctagaggagcttatcaaaggcaggagctaccagcgagggtgtcagggacccgttgggagcatttgggtgggggccagtggggttgtagagagctggaactcacctgcttttaatacatgtgacttctagtgagacacatgcacccctgacccaaggaacatgcggggaaaagaggagccactggctcctttgcgatgttatttattttctcgctctgcaaatgtttattgaacatttctgagattttaa

SEQ ID NO: 32503 - DNA, 528 bp, Homo Sapiens
atgaggctctccaggagaccagagacctttctgctggcctttgtgttgctctgcaccctcctgggtcttgggagagaggggtggccgtgggtggggtgggagggcaaggagttggtgcacacctacaagggctgcatcaggtcccaggactgctactccggcgttatatccaccaccatgggccccaaggaccacatggtaaccagctccttctgctgccagagcgacggctgcaacagtgcctttttgtctgttcccttgaccaatcttactgagaatggcctgatgtgccccgcctgcactgcgagcttcagggacaaatgcatggggcccatgacccactgtactggaaaggaaaaccactgcgtctccttatctggacacgtgcaggctggtattttcaaacccagatttgctatgcggggctgtgctacagagagtatgtgctttaccaagcctggtgctgaagtacccacaggcaccaatgtcctcttcctccatcatatagagtgcactcactccccctga

SEQ ID NO: 32504 - DNA, 4680 bp, Homo Sapiens
atgcgtgtgaagccccagggcctggtggtgacttccagtgccgtgtgcagctctcctgactacctccgggaacccaacccacctgacaaggccttctccacccacgccttctccgagaacccacgcccacccccacgccgggaccccagcacccggcgcccaccagtccttgccaagggggacgacccgctgcccccacgggcagcccgtcctgtctcacaggcccgctgccccacaccggtcggagacggcagcagctcccgacgctgctgggacaacgggcgggtgaacctgcgaccagtggtgcagctgattgacatcatgaaggacctgacacgcctctcccaggacctgcagcacagtggtgtacacctggactgtggtgggctccgactgagccgcccgcctgcaccgccacccggcgacctacagtacagcttcttctcctcacccagtttggccaacagcatccgtagccctgaggagcgggccaccccacacgccaagtcggagcggcccagccatcccctctacgagcctgagcctgagcctagggacagtccccagcctggccaaggccatagtcccggagccacggctgcggccacgggtctgcccccagagcctgagccagacagcactgattactcagaacttgctgacgccgacatccttagtgagctggcctccctcacttgcccagaggcccagctgctagaggcccaggccctcgagccaccatcgcccgagccggagcctcagctcctggacccccagccccgcttcctggacccgcaggcactagagccgctcggggaagctctggagctgccacccctgcaacctcttgctgatcctctggggctgccgggcctggctctccaggccctggacaccctgcctgactccttggagtcgcagctgcttgacccccaggcactcgaccccctgcccaagctgcttgacgtcccaggtcgccgtctggagccccagcagcccctggggcactgcccactggccgagcccttgcgcctggacttgtgctcaccgcacggcccccccgggcctgagggtcaccccaagtacgccttgcggcgcactgataggccaaagatcctgtgtcgccggcggaaagccggacggggacgcaaggcagacgccggacccgagggccgcctactgcccctgcctatgcccacggggctggtggctgccctggccgaacccccaccaccaccgcctcctccaccccctgccctgccaggcccaggcccggtctcagtcccagagttgaagccggaatcttcccagaccccagtggtctctacccgcaaaggcaagtgccggggcgtgcggcgcatggtggtgaagatggccaagatccccgtatcgctggggcggcggaacaagaccacatacaaagtgtcttccttgagcagcagcctgagcgtggagggcaaggagctgggcctgcgcgtgtcggctgagcccaccccgctgctgaagatgaagaacaatgggcggaacgtggtagtggtcttcccacccggtgagatgcccattattctcaaacgtaagcgcggccgccctcctaagaacctgctgctgggtcccggcaagcccaaggagccagctgtggtggcggccgaggcagccactgtggcagcggccaccatggccatgccagaggtaaaaaaacgacggcggcggaagcagaagctggcatctccccagccatcctatgcagcagacgccaacgacagcaaggccgagtactcagacgtcctggccaagctggccttcctgaaccgccagagccagtgcgctggacggtgctcaccgccccgctgctggacacccagtgagccggagtcggtgcaccaggcccccgacacccagagcatctcccacttcctgcatcgtgtgcagggcttccggcggcgtgggggcaaagcaggcggttttggtggccggggtgggggccatgcggccaagtcagcccgatgctccttcagtgacttctttgagggcatcggcaagaaaaagaaggtggtggccgtggcagccgctggggtcgggggcccgggccttactgagttggggcacccacgcaaacggggccggggggaggtagacgctgtgactgggaagccaaagcgcaagagacggtcccggaagaatgggactctgttcccagagcaggtgcccagtggcccaggctttggggaggcaggtgctgagtgggccggggataagggtggtggctgggcccctcaccatgggcacccaggcggacaagctggccgaaactgtgggtttcaggggaccgaggcccgggcctttgcctccactgggctggagagtggagcctcaggccgtggcagctactacagcacgggtgcaccctcaggccagaccgagctcagccaggagcgccaaaacctcttcaccggctactttcgctcgctgctcgattcggatgactcctccgatctcttggactttgccctctcagcctctcgcccagagtcccggaaggcatcgggcacctatgcagggccacccaccagtgccctgcctgcccagcggggcctggccaccttccctagccggggagccaaggccagcccagtggcagtgggtagcagcggggctggggcggacccctcctttcagcctgtcctgtccgcgcgccagaccttcccaccaggacgagcagcaagctatgggctaactccagccgcttcagactgccgggcagccgagaccttccccaagctggtgcccccgccctcagccatggcccgctcacctaccacccacccgcctgccaacacctacctgccccagtacggcggctatggggccggacaaagcgtattcgccccaactaagccctttacaggccaggactgcgctaacagcaaggactgcagcttcgcctatggcagtggcaacagcctccctgcctcacccagcagcgcccacagcgccggctatgccccaccgcctaccgggggcccctgcctgccaccaagcaaggcctccttcttcagcagctctgagggggcccccttctctggttcagcccccacgcccctgcgctgtgacagccgggccagcacagtctcgcccggtggctacatgccctcgcccgagaactgtcggcagtttgcgggggcttctcagtggcctttccggcagggctatggaggcctggactgggcctcagaggcctttagtcagctctacaatcccagttttgactgccacgtcagcgagcccaacgtgatcctggacatctccaactacacaccgcagaaggtgaagcagcagacggctgtgtcggagaccttctctgagtcatcctccgacagcacccagttcaatcagccggttggtggcggggggtttcggcgtgccaacagcgaggcctcaagtagtgagggccagtcgagcctgtccagcctggagaaactgatgatggactggaacgaggcatcatctgcccccggctacaactggaaccagagtgtcctctttcagagtagctccaagccgggccgtggacggcggaagaaggtggacctgttcgaggcctcacatctgggcttcccgacatccgcctctgccgctgcctcaggctacccatccaaacggagcactgggccccggcagccgcgaggtggacggggcggtggggcctgctcagccaagaaggagcggggtggcgcagcggccaaagccaagttcatccccaagccacagccagtcaacccactgttccaggacagtcctgacctcggcctggactactatagcggggacagcagcatgtcaccactgccctcacagtcgagggccttcggcgtgggagagcgagacccctgtgacttcataggaccctactccatgaacccgtccacgccttccgatggcacctttggccaaggcttccactgcgactcgcccagcctgggtgctcccgagcttgatggcaagcatttcccaccgctggcccacccacccacggtgtttgacgccggcctgcagaaggcatactcgcccacctgctcgcctacactgggcttcaaggaagagctgcggccaccgcccacaaagctggctgcctgcgagcccctcaagcatggactccagggggccagcctgggccacgcagctgcagcccaggcccacctgagctgccgggacctgccgctgggccagccccactacgattcccccagctgcaagggcacagcctattggtaccctccaggctcagctgcccgcagcccgccctatgaaggcaaggtgggtacagggctgctggctgacttcctgggcaggacggaggccgcgtgcctcagtgcccctcacctggctagcccaccagccacgcccaaggccgacaaggagccactggaaatggcccggccccctggcccaccccgtggccctgctgcagccgctgctggctatggctgcccactccttagtgacttgaccctgtcccccgtgccgagggactcgctgctgcccctgcaggacaccgcctacaggtacccaggctttatgccccaggcgcatcctggcctgggtgggggccccaagagcggcttcctggggcccatggcggaacctcaccccgaggacacattcaccgtcacatccctgtag

SEQ ID NO: 32505 - DNA, 4701 bp, Homo Sapiens
gtagaaggagtggagccgtgctctcaccctgtcttagaggacccggaagcgccaagtgactgagggccgaagacactcacctgtggagcctgtgcacgtaggtagaggcggcggctctgagtccaggagctccagtgggcagctccccagcaccagccatgaactacgtggggcagctggcggagacggtgtttgggacggtgaaggagctgtaccggggcctgaacccagccacactgagcggcggcattgacgtgctggtggtgaagcaggtggacggctcgttccggtgctcacccttccacgtgcgttttggcaagctgggcgtcctgcggtcgcgggagaaggtggtagacattgagctcaatggggagcctgtggacttgcacatgaagcttggggacagcggggaggccttctttgttcaggagctggagagcgatgatgaacatgtgcctcccggcctgtgcacctcacccatcccttgggggggtctgtctggcttcccctcggactcccagctgggcactgccagtgagcctgagggcctcgtcatggcaggcacggcctccactgggcggaggaagaggcgtcgcaggaggaaacccaagcagaaagaggatgcagtggcaactgattctagtccagaggaactggaggcaggcgctgagacagtgtccagttggaagagaagtcttcactgcagcccaaagacatctacccctactcggatggcgagtggcccccccaggccagcctctcagcaggtgagctaacatcccctaagagcgactcggagctggaggtgcggaccccggagcccagtcccctaagagccgagtcccacatgcagtgggcctgggggaggctgcctaaggtggccagagctgagcggcccgagtcctcagtggtccttgaaggcagagctggggcaacctctcctcctcggggaggacccagcactccctctacctctgtggctggcggcgtggaccctttgggactcccaatccagcaaacagaggctggtgccgaccttcagcctgacacagaggatcccactctagtgggtccccctctccacaccccagagacagaggaaagcaagactcagagctctggggacatgggcctccctcctgcctccaagtcatggagctgggccactctggaggttccagttcccaccgggcagccagagagggtctccagggggaaaggctccccaaagagaagccagcacctgggccccagtgacatctacctggatgacttgccctccctggactctgagaatgcagcgctttacttcccccaaagtgactctgggctgggggccagaagatggagtgaacccagcagtcagaagtccctgagggaccccaaccctgaacatgaacctgaacccactctggacacagtggatacaatagcactgtccctctgtggtggactggctgacagccgggacatctccctaggtatgttcgaccatggccaagcccttttgagggctggtgctgagcccagaggatggggagggcagggaagactgtgagggtggggcagtagaggtgagaggctgggcttccctgcagctctctgccctgtgcagtccacactccgccagcaggggctggaccttcccaagtccccatgaagcaaaatgcttgacgctaagttgtgagttatcctgtgaatcctggggtgggaacaggtgtaaaaaccacaggtagggaggagcactgccaggttacaaagccaaccgacaggaggtgagcagcagagtggggagcaccagggggctggggcagcgggtcacatgggatgtgccagcctcacccctcactctgcctctgtgcccagagaaattcaaccagcacagcgtctcttaccaggacctcaccaaaaaccccggacttttggatgacccaaacctagtggtgaaaatcaatggaaagcattataactgggctgtggctgcccccatgatcctctccctgcaagccttccagaaaaacttgcccaagagcaccatggacaagctggagagggagaagatgccccggaagggtgggcgatggtggttttcctggcgacgcagggacttcctggccgaggagcgcagtgcccagaaggagaagactgcagccaaggagcagcagggggagaagacagaagtcctgagcagtgatgacgatgccccagacagccctgtgatcctggagatcccctccttgccaccctccactccaccctccactcctacctacaagaagtccctccgcctctcctccgatcagatccggcgcctgaacctgcaagaaggtgccaatgatgtggtcttcagcgtgaccactcagtaccagggcacctgccgctgcaaggccaccatctacctgtggaaatgggacgacaaggtggtcatctctgacatcgacggcaccatcaccaagtcagatgctctgggccatatcctgccccagctggggaaagactggacacaccagggcatcaccagtctctatcacaaaatccaactaaatgggtacaagttcctgtactgctcggcgcgggccattggcatggcggacctcaccaaggggtacctgcagtggagaggtgatcgagaagaaaccagaggtgttcaaggtcgcctgcctgagtgacatccagcagctgtttctgccccacggacagcccttctatgctgcctttgggaataggcccaatgatgtctttgcctaccggcaggtgggcctgcctgagtcacgcatcttcacagtcaacccccggggagagctcatccaggagctcataaagaaccacaaatccacgtatgagcggcttggtgaagtggtcgagctcctcttcccacctgtggcccgtggccccagcacagacctggccaaccctgaatacagtaacttctgctactggcgggagccactgcctgctgtggaccttgataccctggactgaacctgccctggctggctcctcctccctggcccggcccaggactggctaggtgtcctggggtataggagggtgggaattggagtgtcatggggcaaacccactgaaggggaaggaggaggctgcaggttggttggcagctagagagactcccccatcttccccgtcatatttttgccagctaagctgcagctgctccaggcgtcagtgtggcactgtcctggggcaattagcttgtcatctgggcccttgcagggttctttttttttttttttttttttttttcctgagacagggtcttgttctgttgcccaggctggagtgcagtggcatgatctctcggctcactgcaacctccgcctcccgggttcaagcgattcacctgcctcagcctcccaagtagctgggattacaggcgtgtaccaccacgcctggctaattttcgtgtttttagtagagatgggttttcaccacattggccaggctggtctcgaactcctgacctcaagtgatttgcccacctcggcctcccaaagtgctgggattacaggcatgagctaccatgccaggcctccttgcagggttttctatgcccttgatatctgtctccctgtcaacctgggaccttgctgtaagtcttgataggacagggagaagagggaggccctaccgaggctcgaggcttcagtgaagggtgacagcagtgggagtgtggtacagcctctggaaggacacagtgttctccccgccccttgtctgggagccaggactgtaccctccgaagccagacatcactgccaacatatcccccttgctggtgccctggcatctcagcacatgacacacacccacacctgcaggctgtggttccggcttggcctgctccccgtccggctgctgccgctgcctctctccagacctcgcttaaggacagtcccaaactcagctggggcaggtgttggcctgaaagtcctcccccagcctctgctggccagcttggtgctcacagctgctgggtaagctcttgcctaaggagctgtgggaagcagggctgatgccccagcaacctctcctcccactgtctttgaagaaagtagctttagaccggctaaaagctttaatccagagcctgccctactctgatagtaccagagtggagggcagaataccaaatgtccaggaaccaaaggcagggctgtggggacctgaagagcagcacagtggggcccgtgctgctgtgggggaaactgaggctgggagcctcagcagagaccggtgtcaagagtctctgggaactgcataggcctgaggaacatgcattttcaagttgtccattgatggtttcgtacctgaatttctcaccttttgtgaacatcttgggagggtgggggttttgcaggggtgttaaaagcaaggcttggagcccctttcctccagctggtggctccttctcagggcctggcctcattcaggccactttgtagagaaatgccctgacctcgcaggaaggatttccccacccccaagtggaaggaagaggacagtgtgggcaccagagggccctggaaacatcttaggggaaggaaaggaaaaggataaatttggagtggggggtctctaaacagattgcctggattccgttctttcctggggttctacagctgcctaagccctcaccttgggggaggatcaaagggaataaagagaactcttggctgagtc

SEQ ID NO: 32506 - DNA, 2829 bp, Homo Sapiens
atggctgcgaagggcgcgcacggctcctacctgaaggtggagagcgagctggagcgctgccgcgccgagggccactgggaccgcatgccggagctggtccggcagctgcagacgctgagcatgcccggcggcggaggtaacaggcgaggcagcccgagcgcagcgttcacctttccggacaccgatgactttgggaaattgctgctggctgaggccctcctggagcagtgtttgaaggagaaccatgccaaaataaaagactccatgcctttgctggagaagaatgagccgaagatgagcgaagccaaaaattatctaagcagtatccttaaccatgggaggctctcgccacagtacatgtgtgaggccatgctgatcctgggcaaactgcattacgtggagggctcataccgagatgccatcagcatgtacgcacgggccgggattgatgacatgtccatggagaacaagcccctgtatcagatgcggctgctgtcggaggcttttgtcatcaaaggcctctctctggaacgcctacccaactccatcgcctcccgcttccgcctgacagagagggaggaggaagtgatcacctgttttgagagggcctcctggatcgctcaggtgttcctgcaggaattggagaagaccacaaataacagcacgtcgaggcatctgaaaggctgtcacccgcttgactatgagctcacctacttcctggaagctgccctccagagcgcctatgtgaaaaacctgaagaaggggaacatcgtgaagggcatgagagagctccgggaggtgctgcggactgtggagaccaaagcaactcagaacttcaaagtgatggcggccaagcacctggcgggggtcctgctgcactccctgagtgaggagtgctactggagccccctgtcccaccctctgcctgagttcatgggcaaggaggagagttctttcgccactcaggccctgcggaaacctcacctctatgaaggagacaacctctactgccccaaggacaacatcgaggaagccctcctgctcctcctcatcagcgaatccatggctgactccagagctcagccttgccgggatttccgggcatcccggcaccctctcctgggccatctaagtccatgggggcatgggcagcactcaccaactgtggcaacagggcagccatcagaacccctggccaccagtctctcagtgactgagctgtcccccagggcaactcgagatgtggtgctgagccgggtgccggagcaggaggaggaccggacagtgagcttgcagaatgccgcagccatctatgacctcctgagcatcacgttgggcagaaggggacagtacgtcatgctctcggagtgcctggagcgagccatgaagtttgcgtttggagaatttcacctttggtaccaggtggccctctccatggtggcttgtgggaagtcagcctacgctgtgtccctgctgcgggagtgtgtgaagttgcggccctcggaccccaccgtgcccctgatggccgcgaaggtctgcatcgggtcccttcgctggctagaggaagcagagcactttgccatgatggtgatcagcctcggagaggaagccggggagttcctccccaagggctacctggctctgggtctcacctatagcctgcaggccaccgacgccaccctgaagtccaagcaagatgaattgcaccggaaggcactgcagacgctggagagggctcagcagctggcgcccagtgacccccaggtcatcctctatgtctcgctgcagctggccctcgtccgacagatctccagtgccatggagcagctgcaggaggccctgaaggtacgcaaggatgatgcccacgccctccacctgctggcactgctcttctctgcccagaagcaccaccagcatgccctggatgttgtcaacatggccatcaccgagcaccctgagaacttcaaacgacagcacatagttctgcttgtggcctttgccagcgtgccgagcactgctgttgatggcttccttctccccaaagctaaagaaagcctgatgttcaccaaggtgaagctggagcaggtgctgaaaggcccagaggaagccctcgtgacctgcagacaagtgctgaggctgtggcagaccctgtacagcttctcccagctgggaggcctagaaaaggatggcagcttcggtgagggcctcaccatgaagaagcagagtggcatgcacctgactttgcctgatgcccatgatgcagactctggctcccggcgggcttcgtccatcgccgcctcccggctggaggaggccatgtcagagctgactatgccctcttcggtcctgaagcagggccccatgcagctgtggaccacgctggaacagatctggctgcaggctgctgagctgttcatggagcagcagcacctcaaggaagcaggtttctgcatccaggaggcggcgggcctcttccccacttctcactcagtactctatatgcggggccggctggctgaggtgaagggcaacctggaggaggccaagcagctgtacaaggaggcgctcacggtgaacccagatggcgtgcgcatcatgcatagcctgggtctgatgctgagtcggctgggccacaagagcttggcccagaaggtgcttcgtgatgccgtggagaggcagagtacgtgccacgaggcgtggcagggcctgggcgaggtgctgcaggcccagggccagaacgaggctgccgttgactgcttcctcaccgcccttgagctggaggccagcagccctgtactgcccttctccatcatccccagagagctctga

SEQ ID NO: 32507 - DNA, 759 bp, Homo Sapiens
  misc_feature (107)..(107): n is a, c, g, or t
  misc_feature (127)..(127): n is a, c, g, or t
atggccacacccggaggctccaggggcctcgaggccacctgcctgcggcagccatgtcatctggggctcaacccaaagcccctgcatggggaggggtcctggaatanccatgtgaccatggatctcngcctcctcttccctgctcccctgcacagatggcctgaaagccccacctcctccccagggtactctgacatcaaaaaggctgtgacgggaaggccacacctccacaggacctgcaggctgggccctgtgtccaacacgccagctgaggtggcccacgggggacccagacctggttctgccctcgagggctctgggattggagagggcagctgggcagagagtcccacaagttctcaaaaaacagaagaggcttcccagggcccacgagaagccagcacagtcagggagggcttccaggaggcgacccagagcttcgaggagcgagcagagggctggggtatggggcacccggagaagccccgcctgggcctcagcaccccctctggcccccaggcctgtaactgtgaccagtacctaaaggtctccagggacatgatgaagcagctcatgtggctcagcagtcaccaggaggggcccaggagctcaggggaggaggaggaacttgagctgctggtgtcctgtgcccaggaagagtttaatatttcgagctccctcagggctgcttccatctgctgcaagcgggggccgctcatattcattagggaccactggggccgggctgagtgcagctga

SEQ ID NO: 32508 - DNA, 474 bp, Homo Sapiens
atggtagacatgtgggctctcatgaatccacacatgggcagtaagactctaccatcatggagggacagcagtcagacccctcccccatgtcttatccgtagacttgaccacatcgtgatgacggtgaagagcatcaaagacaccaccatgttttattccaagatcctgggcatggaggtcatgacttttaaggaagaccggaaagcactgtgttttggagaccagaaatttaacctccacgaggtgggaaaggaatttgaacccaaagccgctcacccagttcctggctccctggacatatgtctgatcacagaggtgcctttggaggaaatgatccagcacctcaaggcttgtgatgtccctattgaggaggggccagtccccagaacaggggcaaaagggcctatcatgtccatctacttccgagaccccgacagaaatctgattgaggtgtccaactacatctcctcgtga

SEQ ID NO: 32509 - DNA, 3304 bp, Homo Sapiens
agctcccgctgctgaatagctgagaggcgcacccgggcggccagctgggctcggagtgcagcggggttaggatggacgaggacgtgttgcaccctgaagagcctcatcatcggtgagagtggggtgggcaagtccagcctgctcttgaggttcacagatgatacctttgatccagaacttgcagcaacaatagacaatgcaggaatcacatgaacctgtccatccacagataaagtggtaaagaaactgccgtattagatacatgatggtatactcttcagccataaagcttcgggaaaccctgtcatccgcaaccacgtggagaaacctgtccatccacagatgaagggatcaggaagctctggtatatatactgaagggaaatgctttttggctaccaaaataatgaaattttgttgtttggagcaacacagatgaacctgtccatccacaaatgaagacatcaagaaactctagtatgtacacaaggcaaaacacttcagctatcaaaatcatgacattatgtcacttggagcaacacagttgacccgccaaggcagcctcttcctccatagatggatgaacgctgtggccgctgctcctgcctgggccatgccctgatgctgccaacaccactgctcctctatttataagtcttagtagagttgctgacccagcaataactgaacagctgatatgtacctcacactaagccaggcgcttcatatgtatctaacttgaaaaatgctgagctagttaccttaacaccattaacttttacttaaaagtttgtttttcttttttaatcccagtgagctccaaacaagttttaggaggctccccaaaaccagtgaagactttaactaaaagtagaatttcaaagtattagaaaccaaaccccaaaattaaatgtgaagatcagtgtctgtactgagctggcccatctggtggacacaggatttgcgttatcgactgcaatgttacccaggattcacgatttctagcatctgtcagggttaagaaaattggattgagtaccaaatacagcagagcaaacccggctttgaggcaagggccccatcaagtagtcatgcagtacttttgttagggttctgggtgcaaatcttcctcgtccctcccaccttctcctggcctccttgtaaacccaaaccgccaggtacctcaattttcttcaagaccaggctgttcttaatgttggtaaattggtcaaggaaatgggtgagccactgcttgctctgcacatcgtcctcagagtgctcggtcttcaggcagtacagcagctgcatggctttggcctgcaggagtaagtggcccattcctaggctgtccccaaagatgtgtcctctgaagaagctggtcaggtagagggggtgtccactatggttatagatggggaaggagatgctgcccaggtcgagcgttttgtccacctgccaggtgtacaggagtgggttgggggcaccacgcagagcatcttgtacctcgcgcacacctgctggtactggagctggcttgcgtttccctgtgccacacgcagatcctgcactgtactgtccagtcaactgacttcagcaaagatgtctgggttcagcagcgagttgctgtgtgaggccaccagaatggaggtgatatcggcctcagtgctcatcctggaggtggagaagtggtcagagtcctctgtggtgaaatggccctacaccaaagtgggagacattcagaatcgaggcgaaattggcctcagtgctcctcttggaggcagagaagcagtaggagtcggtggtgaaatggccctgtgtgaatgtggaagaccagcagattggaggtggaattggcctcagtgcttgtcctggaggtggagaagcggtcagagtccttggtggtgaagtggccctgcacaaaacgttgctcccccttggccggtgaaagaataaaagaaagctggccacttgcatttccgtttcagtttatagaatacatgttttggaaatagtatcttctagatctgtctttttctcttctgatttaacttagtaaagctaagttttatctcttcatagtcttgcttttgtttcaaaagcttttatgagatttgtttactgtctgtggctatatggcagacaatttgttcaagtggcatgcctcctctttctcacattgacctcctcaggaggagtttttcaagggcaatgagtcttctctctgagataagaatagtagccagaattaagagggtaaagtgcattgtggaattaagtactgattccagtggaaactcactttatggccttagacaaatatttacccttctgatcctcagttttctgtcaaagaacttctgctcatatccaattcctataaagtgggagtactctaacctgatattaccaacattaggttagattttatcctaatgttaggtattagaatatatcctaacattactagttcttcactcttactaaagtgcatgttagatttcttcaatgatttttttaaattggcatggttgatacaaagcatccttctatccaaatactgtgctcagtcgcctaagtgatagtttagaaccatactatctctctgtggaaagaatgctggggctcctggctacacactttgagtagaagggaaaatacccctcttgtatttatgatgttttttctttctacttgattaagaagaaagtacaaaaaggtgcttattgaagcattgtcaatttgggaacaagattctcaggaatgaaatatttgtgactgttctcagcatgaaaggtagagagaagattacttgatcattatgtgcttatttgaaagtcactttcctcccatgcctcaacatctcactttttagaatgcacactgaatgcctggaatctctttgttttagaaaagacaaaggatgcattgttaaaaaaataatatttctggggaaaaggctcagtgctcaacggttactctataaagagatttaaaaagaaagtcaagggaagataaggaaggtagcatggctaacaacctcgtgggttctactagcattatttcatgcaaaatgtcattaacctttatataggagagaataagtctgggaatcaactggcatctaaactccatttcttgttttgtcactgcttccctggttgactatggaaaatacatttggtcttttgataccttggtttcaacaactataacatgacttaagaacttttatgcatggactttgtaatagttatctatttctgcatacaaattacttcaaaacttaaatcgtcgtttgaaacaac

SEQ ID NO: 32510 - DNA, 742 bp, Homo Sapiens
agtcagcacatggaaggggaactggaggagaacattaagctgagaggaggtcctggtgggctggggccaactccccaggagcagaggaagcagccagcagcctggatgggcagaggtgagaccagggctccgactccctctctcccagaagctgcccgccccctcttcccccctgcttttgcaaagttttctgagttccatctgcagtactctgacctgagggcacctctacagctgggcccagagggactgaagctgctactagcatggcacggtcctgggagctttgaggacacccacagagacagacggtgcacaccgagggttccgctgctcaggaacaggcatggagaagaaagttgcacttagaagcccaacaggagttttgcaagacaaaagtttaatgaaaggagagaagagcacagaaactgaagttgaccacctgcactcctccttggccaacctcgacagaaatctagaattcaaggaaccattgctgtgatccatcaagtcagccccaggaaagagagcagagctgagagggctggagagagaatctggaggagcaaacggaaaatacctgactgggtaccaacatccaggagaggatccctgtgtgtcaaggatcctcagagggacaactaatgcataacaacagataatgggtccacactcctttctgcctcctcctgatcgcaaaacccactacacacatgtaaatgcaccacacacacacatgccc

SEQ ID NO: 32511 - DNA, 1541 bp, Homo Sapiens
atggcgcccgagcgctaccacagcaaccgccgtccgccgcgaagcctcacgggaagcggagttcctaaggccgcctgcggcccggcaattaccccctgggtcctctcacacttagcagtgggtgtcagatggtggaagggaacgctcagggaggccccgggcggtgagttgtccctcgggcggggacgccctcgtgggcagtgcggcgtggacggcgcaaggaagaacccggagagatcccaagccacgaggcaccgcttccggcgcattgtgaggtcccacctttcccgccgcctgaggtcgcggcggctgctctttcccggagcagcgtccctggaggcgctgccagggggtgaggcacccacgcgtgcaccgtatgtaccccccagcgcggcgcttagaacgactcgcatgagtcgctgccttgggttggaaccggttactccgccgcttcgtactggactgcaaagtaacaagtacttcgccgggcagcggtgccgaccccgtgtgctacggcgagaggtgcttagcctagagccgacgaaaacatgtccccaggactccctttccctcccagactgcgtcccaccagatggagctttccgtctgttttaaccaccagtgtattcctgatgcctgacccaggcgctgaaatatttgttgaacgaataaatgtgtaggttaggactgacgacagtccgcgaattctggaacacgggctgattttacttttgaacaaatgatgcactggaacttcctgacagagctgaccttttataggaacatcaatggcagtcaccgctggcattttagcaaaggttgtcttggtcataatttccccttgactgtgtttccagcccttaatctatatcgggtgggacctggaagtctaccttctcgccacccctcggcaaaagtttgagaaagtgtttgaggcagagcctcctctctcatatgccctccatctgcgaattagaacgaattataagttctacggtgtcacatagggggttagcggagaggaagagggaaagaatcaaatacaggacgctgccttaaccaaagttctaaactctaaatgtaataatgtgcatttgtgagtcctcaggaagtttcacaaaggctttcccttttttcacagaatgtctagtaggactggtgactccgaatgggaaaaacacaggacctagacctgccctgtccattagtgtagccccttggccacttagggccactgagcacttgaaatgaggctagttcgtttaggaggcactggaagtgcaaaatacgcacgggtgtcagttcgacgaatgtgaaatacctcactgatcactttttatattgattgcacgttgaaatattttggatatattgcagtaaagaaaatgtaagccgggcacggtgtctcacacctgtgatccagcactttaggaggctgaggtgggaggatcgcttgggcaggagttagagaccagcctgggcaatatagggaaacccccgtctatacaaaaagttaaaaaaaaaaaaaaaaaaagaaaaaa

SEQ ID NO: 32512 - DNA, 301 bp, Homo Sapiens
aaggggtggggacacgttgcatccatggtgctgtttgtgcaggtggcctccaggagggcagtttccagagatgaatttccttccccttgcccagcccaccactgcccagccctgtgggctctgaggctgacggagagagacctgccacaccccgggacactctggatcgaagccacccagcgtcagagcttggacgatcaaggtggacctacccgctcagaaagacagtggcgcttctgtcaagggagacctcaacgaccttcctctgaaaagaaaaatgtccttgcaagtaggtaaatga

SEQ ID NO: 32513 - DNA, 647 bp, Homo Sapiens
atgctcatttcaatgatccatgtcatcccggtccctattaccataaataacgaagcattagctgtacgtggcagtggctgtctggagcagcaaagagccgatcccacgctgctgccgggggtcctgggaccgcgggatgggaactcccacgcagcgtcccacaggctcctggccgccgcgagcccgcgcgactcgcacgagcatgtccacccgcagcgaggggccggtcactgctacggagcccgccagaaggcaaagccccagacagcaaatagggaggcggctggcacccagggaggccgaggcgggaggatcgctggagcccaggagttcgagacctgccttggcaacatactccctccagcgtgccaaatgctgctaatggacagccgctcctgccgctctgatgttgctagacctcctcagcactcagcccaaggcagccaggaagaatgaacgaatggtgattcagagggaaaggaggaagctgcgtggcatttcagagatacttattttaaaactgctggtggccatgtcttcttttcatatcagagctaatgagttttgatatgtgaacatttcttctccttcataggtaatgtgttgatttggcactttaatcttagaataatcatttctaaaaccaa

SEQ ID NO: 32514 - DNA, 641 bp, Homo Sapiens
atgaaggagcgcgacgcggccccggccgagcggggcaagccggccacctacaccggggacaagaaggcgaagatggcggccaagaccaacaagaaccggtgggcgccgggacctcggggggagccgctggcccgccccccggcggctccaacgccactggcccgtctgggacttcgggggcggcggcggcggggcccaacaccactgggtcgtcccgccgcgaggcgccgcgcgacgttcccccactgcaggcggcgcgaccggcgcctccggagccccctgcggacagccccccggccgggccgctcgagcggcctcgggggccggacgaggacgaagaggaaacggcggcggcgcccgggagtcgttgaagccctccgcgctgggggccgccgggaaccattctccccaagcccagaggcaggacttcgcagcaggatggggtggagagcccgcgggagtgacccccacgagagtgaacgcccctcacactcccaccatcgccggctggccccggagcgggaggcccgcagccagatcttcagccaagggaccacgattcgccggggggctgggggtttgctgcccaggaccgtgctgcaccagggccctgagccgtagggggatggggggaggggtgg

SEQ ID NO: 32515 - DNA, 744 bp, Homo Sapiens
atgcagatgaatagagctagattgagagtagtaatgagagcaagaaagggcacaaggaaatactccattgggatccagatgtggagttgggggattgtgaggagtgatttctttccagattatcgagactcaagactttccagaacgtggcaaagagccctggaagaaatgtcccaggaacgccgcggtcaggaccgaggctccccggggccaggttcagggttcgaggtcccagcctcgcaactgctggcgtctggagggcgggagagtggccgggcccgaagctgcggctccgacgtacagttgcgagtctggggcggtgggccccgcagagctccgggggaagggagccgccgccgctgcggggaattggcttgggcaacgccgctgagtgttcaaacgtcgctgctcccgggccttgggcagcctctcctacctgacccaaattctgggctgcaaagcccgggcgaagttgtcgctttcactccgaatacgcccagtcgcaccgtcaacttcataggctgggcccggcagaggcctttcgcctccgcccagcggtctccgctgcggcccctcagcctctggagagccggggggcggccctcgccccggcagaaagcaacctgtggcggcactgcgtccccgcgagctacaaccagacgcggccgcgctcacctgggcgttgcgctcccccgagccccggagagtttagaagccgtaaaagcccggggagctggagcttaa

SEQ ID NO: 32516 - DNA, 635 bp, Homo Sapiens
gggaggcggtggcggaaagatgcgcgcgcagtcagccgtcatgggagggggaactgtggggcgttcgccatcttgtctccctctccttacctgcgtcctcgggggcgtgcgcaccaccccccctcccgcctaggaggggggagggccccctcttggccaccgccttcgcggcctttaaactcccctggagactgcggctactgccaccgccttgcctccactgcctcttcgcgcagcacacagatgcggacggtgggtgggaaaaagggcagacgctactcccagcgaaccgccgctgccgctcccgaggcctcaccaaaatggccgccgccgtctcggccgccaccaccaccactaccaccaccactcgctcggaatcgctatcgccggcgcggcccgtcttctcgcgagagacaatcacccagtaagctgcagcaagttagcagtggaacctgggcctcccgattcccatggcagcccacttctgtagcgctgcttcgttttacgcgaggatggtttcctgatagctttcaaacacctttgccatctcttcgcaaactttctagattaagaatccctttgagaatctgatacctttaccccagaatagaacaataaataacagctaccttcta

SEQ ID NO: 32517 - DNA, 1226 bp, Homo Sapiens
atgactgcccctctgcgccggcagcagcaggtgggcgagagacaggcctcagacgtctgcacgtctccgcctcgccttccttctaccgaccccccgccggacggcgagggagaagacactggttcctggaactaccgggtctcggcgccagaggggcggggaggggcggggtctcgatcgcgctattgtcatggagacgggaagctggctgcagcggcggcggggaccgtggggccgaggtggctgccagccggccaatgtctaagcgaggcggagcggcccaggcggcccgagcctgggggagcgcgcagccggccagtggcggcctcgccggcggcctcttcccgggctcgcagtaggcccgagtcgtcgccgggagctcctgggagcagcgtccccgccctgctcccctcgctcccgcctcttgcggccccacggcccctcagcgcccgcccccggctccgcccgccgcagccgcagcccctggcgctaacggtcggtaacggcccgcgcgcgccgcccgccgggggctcgcgccagccacgagggagcgtccgcggcccgcgcgcccgcgcggcggaggagaggtgttaagtgtgatgcttccataatacatttggatgctgtcagctaagttcacttctgaactaaggggttcctccaaatgttggctgaaattcatcccaaggctggtctgcaaagtctgcaattcataatggagctactgtactggctattggaaggaggagattctgaagataaggaggtaaaacctgtttagaaattaaaaatgagttacgatttaaagaaaattcagatgactcattgtgagtgctagttctcttgtaggatgccactggaaatgttgaaatgaaaaatattcagccgttggtctttgaaatttcctgtgatgtgtttcaatctagatgcaaagaacatggaaaaatcaaagtgctcgagtggtttaaatatgttttgggtattcctgtttatagactataatacttttccaattaaaatcctcagttgtcacgcagaagaaggttaagctgtatttgattgccagttttactgaaaatgcttagtattttacagtatcaccaaatatattttgtttagccaaggtataggaaaaataaaataaattgtataggttgacttttttctaaaatgtctttattggattgaatgaatgtttatacctgaaaaaaaaaggttcaaaaaaa

SEQ ID NO: 32518 - DNA, 700 bp, Homo Sapiens
atgctgctgttggcctctttccgagggagtgccatccactccctgtcccaccgctgtccgcggtggaatcagaggtttctggctgactcggtgggtgctttgaaccaggaaaggacaagaaagagatggaacttcccctcggggtccaactgtgagtcactgtggttcctgtccctgcagcgggctccatctccaggcctcccacttcaccctgggacattatggtcgctggtcagacctcatgactcacttggactcttgagccacctctgggggtggagtctctctcctggcatctggacccttggtgctatcgacgaagcttggctggcgctcttagctgctatgtgcaagacgtgtgtcccagggaaagcccctctctctctgcagaggtcaagtgaaagccacggccgcagccaacagagttcaaaatgcaggcttggaaagtccagggggctctgtggaggagattagtcctgagagactgacaccagagccacctgacgaatgtgggtgctcagagccttggactcgatgacctacctctcctgcctcccacctgactcctgaagtaggggagtgtattaacagtcacaggcctcagtttacctgctttcagcctctgcccttcccgagagggttgaagctgacttgctgcatcgcagttttgtcctttagttcatcagctctggaactttcc

SEQ ID NO: 32519 - DNA, 1460 bp, Homo Sapiens
aaagggaactgggcgtttgccgcagggaaaagtaaggtgtttctgctctcgcgccatatgcagttcccgcgggatctcgttgagggcggggcacccagttccttacgaaagggatggagggggtggtacttctaaagttggcggtgtttcgtaccggccgcgggatttcgcggactggggcgctgaggttctttgagcggcgtgtggacctgaattccctggaaacaggctggggccgcgaggggcctccgctccgggcggggtccccagatagccccgcctcgaataaaaatgacgagcacgggtcctctctcgggcccgcagtgggtggactgcgtcgcagacccgtagtggaggcgcccagctcgccggggagattcgagtggaaaccctcacggccgccggtggtgggccccggcgcggcgctgggctccggcgggtctgcgctggggagggccagggcccctgaagccggcgtccctcttaggggacgcgcctgggtgtgtcttcaccgtttgcctggtgagttggagacagggtctcgctccgtcgcccaggctggagtgcagtggtaggatcagggttcattgtagcctccgcctcagcctctggagtagctgggacctcaggcgcgcgccaccacgcccggctaattttttaaatttttttgtagagacggggttgggggaggcgggggttagggttgtcctggctggtcttgaactgcggggcctcaggtgatccgcctgccttggcctcccaaagtgctgggattacaggcatgagccactgtgcccggcaagcagctgttataaataaaatacatgctgagcctgcaatttgctcttaatgaaggccacttgtcagtagacggtgctgctaatgcgtgtcctgcagcaaagataacccagacgggatcattttttaattgcccagcagaactttaaccagttgtgcatcttaacctgctttttgtttgttcgtttgtttgttttgagacagtctggccctgtcgcccaggctggagtgccatggcgcgatctcggttcactgcagcctccacctcccgagcacaggcgatcctcccgcctcagcctccagagcacctgggaccacaggtgtccacgcgcagccactaaccgctttcttatctgacactttaagtgcttcttcgtacccagctcctctaacgccttttgaagcagctccatcatctttgaagggcagttcatgctgttgagaatcatgtttttaactttgggaaaattgtatttccacgagcgccagctctgtccttttttttttttttttttttttttttttttgacggagtcttgctcggttcgctgaggcaggagagtcgcttgaacctgggaggtggaggctgcagtgagctgaggtcaagccactgcactccagcctgggtgacagagtgagacttgtctcaaaaaaaaaaaaaa

SEQ ID NO: 32520 - DNA, 544 bp, Homo Sapiens
  misc_feature (338)..(338): n is a, c, g, or t
gggtggggattggagtcgacctttgagacctgcttattcatggctgtttcacggatgtcgaagtggaggctcagcagggttggaggttcccggagtctcccagctgaaatggaagtgcttggtgaggtttggtgtgtccgagccgaagagcagccaatgacaggcctggggatcgtctggcacagcccacttgacaaggccttggaaacttggtctctgcagcagcaaccggatttcagcctgggcctcggacacctcggcctgggactgtacatcttggcctcttacctactgtgtccgcgtcagcctccctcacagcctgatggcccctgcggcanccccaacccggtttcaggggctaagaaaactacagttgcatgaacgggtggaggtgagtgggaggcagaagcggcggggagaaccagtctgttccgagatctctggaccaaccagtggatcctgatggtcagccttgtctagagccccttccagcgtgcaggccagtcctcctggcattcttctaattacaccgagctgtgagtta

SEQ ID NO: 32521 - DNA, 1297 bp, Homo Sapiens
atgggaaactctaaggaggaagacctgaggagatacagggcagaaaaagcctttaaaacatatttttctccctcaagtatttgttttcaggcaaaagcaagcctccaaaagccccttggttcttctctgtgtgtctcgccccttctgccttgtacaccagactgccggcaagcaagcggggaggtggcgaacagctgggatcctccagtgaaaagtttgctcagcgcgagagatgtcaagaggctgggattgtcgcctatcgggagaagaattccacagatgaattggttctgccctgtatctttgaatggtttttattttctgatgtccagtgtggcagcctggcagagacatttagttgaaagaacacggggctctggaaacaaccagtcctccttggttcatattctcgtgttgtcacttattaaccgagtgacattggaggtgatatgctgcagtttatcactgaggtcctgagatggtccatactctaagctttgtgtctactgtggggggcaaagggaaaacttcccccttgctctctgaagagtcattgaaaatcaactgacaaaagaatctaaaatattcctggaaatggagagtcctgacatgatggccccatgatgaaaagaacccaggttcctgagtcacgacgtggacatgaggcaccaaggagaaaacacgtgaaccttaataagtttgggggtacacctccttgccatgtgttaccttctgtcatgttatgatgcagcaagaaggccctaatcagtggtagtccctcagtcctggacttctcagcctccagaactagctttgacattcttctgtcaagtcaccttgcaagtctcatgctttctggattcactgcagattagagtacccagaattagccaagaccttcaacatttaatgactagccatggagaagaaataagatgaactgcttgtcccagaaagcgatagaactttgaaagcagctatatatttcctagctacctctaaaaaatggagctgtcttcatgagacctgtaagaagccaacagttttcctcactgccaccatgtgaagaaggatgtgtttgtttcccttccttcatgattatcaaatggaggttcccatgattttctttttcctcatggaaacatgtttggtcagaagggaaacaaaccaattaaggtgataccaaaggatgatccttgatacagttgtattttggtggagcgttgagattcgccagtgaactctaacagtgaggatggcactggaataaaaagagaagaaacatgtactagaagcc

SEQ ID NO: 32522 - DNA, 702 bp, Homo Sapiens
atggcgtgcccccagctgccgccacttctgcttttggtgctggtggtgctgctgaaagctggtgtgaattacaatactccctttacaggccacgctggtccgccaaccctccgaggaaggctgggttttcccccagaaacaaacggagcagctgtgaggacagatgaggcaccgctgctcccaagccctggggctgtgggtcctgcaactccaggcctggggggctacatagagatctggggagggtggcatgtggacccagccccctctcagggccagtgttgtgtgttatttccgcatttctgctgcctaggttccgaatccctgaccccgcactggagccccacttcccacagccccggaacggagcccttgacctccactgaccagaccttggagccccctggcccagctccaggtgacactgggccccgtgagttacacaggaacccgagtgtggtggtggtcgtgtgtttgctggtgtctcttttgctcatcgggtctgtggtcatggctgtgagattctgtcaccggaatgagtccaagtttgagaacctggacgaggtgtccatgggatccgtgaatgacagattgtcctttgcccaccacctccaggagtgagccctgaggagccaacagagatgggggcatggatggggctggggttcctggggaggagcagaacctgaggaaataaagccc

SEQ ID NO: 32523 - DNA, 1965 bp, Homo Sapiens
atgctgtgcagaagccctctgcactgtttcctcagcaactgggggtgggaggcggggcgccggggaaacgcagtaggaggagtgacgggaaccgggagccggctccatgcgcctggagcgcgcgggtcccagcgcccatcggcccggggtccgaggggcccgctgcccgggctcgctgcgtggtgctaccgcccccgggcccgctgcgccgcgtcggagccccagcagactttgagaggcgtgtgcgacagtgcgcgtcctctcctgcctctggatgtttccttggagcctctggccttcgggaagaccggtaaacgtccctgtggagccagccagccagccacctctgacccccgggctcaagcagccagccgcgtgctccctcctcccacttggtacccggacagaacagtccctaccttgctcttctcccgccggctcgtcactttaggctccctccagattccgcgttccttgagcaaatggctcacccctgacgaatccggccttaaaaaagtcccggccttgaaaggggtggagactggcgggcgggagcgaaaggaggtcagacccatggctggggtcgcacacgcatcacctgaggtcggagaggaggggagcctcacttcctctgacccactgagcctggtggcagcgtgcggagagatgtcaccatcccggactaaatgaaatccaactttccctgacgcaccttgtgggatcaaagaggggtgttcccatgctcacctttcgccacttcctccctggggtatctccacctctccaacacaagctcaatgccagttctctttgggatgtttttgtgcagggggtgtgacctccctcataaaggaacccccactcccaagttttcccctcttgtcagtggaacctgtgaccaacggttccttcctgtccttttcctccctgaaagtagcccgggggcattcgaacatggctctagacccctgaatagggtttggagcggagatgtgcctggggagaagagatcgcagtgctgtgtatgaagctttgggcacgtgctcacaagagcacacacagcaacctgagcaggtcattccttttgataaggatgacaaatacacataccaaaccctgttcccctcacccaccccaaaccagtacccccaggatgattccagatcagctctggagcatttgcatcaagggcctgcagactcacaggacctactagagcaaaatatcagtgtctcagaccccagttttggcctcaaatactgggtttttctgccaggagaagtagctgctagtctaggaaatgctgggacttgtccagaaagatgaggtttgtgaatacggggtgtggggttgggtggggaattaaggctgatgtatctggaggaactttggttgggctggaggcaacttctgccctgttctattcaacagttccctcccctccactaccccatttaatctggccacagctcagctacctgtgtataaaatcttgatctctctcctatttcctttctaccttccgtgtttttacttactcgaaaactgttcccctctcctgtgtgtatttttttaattgaaatataccaggcatttaggaaaggaacacgaaacctaagtgtacaggtcaacaaatgatgacacagtgaacacccccatatgaccaccatccagatctagaacgagatcattattggcatcccagataccctccttctatccgctcctggtgactatgccacactccttctcaaaagtaacgtttatctaacactacaggttagttttgcttacttctgaactttatatacatggaaccattcagtaggtattattttgtgtctggcttctctcactcaatactatgtttatgaaactcatccaaaacattgtggtagcagtagcttatttgttttcattgccgtacggtatgccattaaataaatataccacaatttatctgtt

SEQ ID NO: 32524 - DNA, 892 bp, Homo Sapiens
atggtgctgtccatcctgccggacctggaccactgggagcaggaggcagagttctcagagggctgtgaggacgccacttgcagcatcaacacattacataatctggcactggacagcgatcccaccacccattcacccggcccactggctctgaaagaagactgcatgggtgacgctcggagcttgggaggagcccaggccctggagagtggcgacggcgaggagcaactgcacgcgacttgggaccttgccctgccccgcggcccgcgtcaccatggcaactgcaggcagccagcaccgacggcgggaaaacgaggaccggagccgcgttacagccttggccttcgagcagcccagggagagtctctgcgtcctccagcccccgcttcccttcatgtcggaggtcctaagcccgcagcgaagtccgcaaagagctttccccgacgcctacgagaccggaagtgcctgggcccaggtggaggaaggacccgcgtggccgcctccgcgctctccctggggtccgtgccccttccggcgtttctcccgcgtccttcaccatggcaactcgggcgtcgggagcgtgggctgcgagccgagtgggtgggggagccgccgggctctatccgccagcccacgagaagtgacgcaggagcaccattgaaggagaattagacaaactggagtctactgagatgaggctgttgggaatggccctggtaccacatcctgagcagggatggccgatggaatggggagaagactcaggtggggcttgagtgtgtcctctgatgactgaagagccttgggagcaagcatccttcctgctactgtgtgtttgctggttccaatgatacataatttgtgcttttcgtaattaaagtattatcctgta

SEQ ID NO: 32525 - DNA, 727 bp, Homo Sapiens
gaatagcagatgcatagaaatgcaggtttccaaaaattcacccaatttagtaactaattttgattctgatgcctgatagtagggtgtgaaaagctgtaaaacccaaatgtttcctgtgttctttcacaaggacaagggaagaggatgctctgccaaactgcccctgctgcgtcatagtggaccagtttcaatgatccagactgtcagtcaccccatccagcctcatcctcatctggacccatttctcaccacccaatcagtttcaatgatccagactgtcagtcaccccatccagcctcatcctcatctggacccatttctcaccacccaatcagtttcaatgatccagactgtcagtcaccccatccagccacatcctcatctggaccagtttctgaccacccaatcagtttcaatgatccagactgtcagtcaccccatccagccacatcctcatctggaccagtttctgaccacccaatcagtttcaatgatccaaactgtcagtcaccccacccagcctcatctggaccagtttctgacgacccaatcagtttcaatgatccagactgtcagtcaccccatccagcctcatcctcatctggacccgtttctgaccaaccacccaatcagtttcaatgatccagactgtcagtcaccccatccagcctcagcctcatcctcatctggacccgtttctgaccaaccacccaatcagtttcaatga

SEQ ID NO: 32526 - DNA, 492 bp, Homo Sapiens
atggggacctggaactggcggctcaccccgggcaaaatcatggtcctcttgctcctgcctctggggttctccgctgtgctgtgggctctcagccgctggccacagacaggcccttcaccttggtggcggagcagcccggggccgcgggcgctgttctccttcctgtgccgagtgtggtttgctatcaagcggtggcagttcagccacaatcaggggcagggggagggagaggccccccgaagaggcagaggccctgcctcggccgccctgagcctggaaggtgattggctagagcgactcccggccgggagcggaatgaatggcggggaccggggcctctgggtggtgcgagcatcatgttgccttttaatatggagcatgtgccatagctctccaggagaacccctctgtgtcacagcgaacctcagtcactgacactcaaaagaaggaattatttcaactcaataataaacaaataaccctattttaaaa

SEQ ID NO: 32527 - DNA, 934 bp, Homo Sapiens
atggacttgtggaggagaccatcatttgatgcagttggccacactgaagctcagacacgccaacgtggtaatgaggcagaacgtggattccactccatccttttaagattaaagacatgctcagcaacagcaagatgggaaaggaaggcagctgcagccccagctggagagcagggccctgaggctgggctcttcctgggcacaagcctctgcccagagcttcctggcggggccctcagctcctcttctccaaggcctggaaacgagctccatggggctgagaatcatctctgtgtgtgggagacacatggtcaatctgagtaagcggaaaaaatggtatcaatataaaagtaagatataaacacaactcctcaacaaaattaaaacccacagaaagggaacctcacatttcactcccacctgtctgttctcccctctccttgagaagtaaaaacaaccactgtcttgcagtgtgttgctgcagaacttttcttacaaagttacctaaatacggtggcttcgaaaaacgtgcttagatttatgttttttacttaaatggaaacgtattttgcacacggttgtacaacttttttttgcatatttaatattcagaaatatgtcttggcgttgagtttcgagatggcttgtggcgagccacgccgtttgccctagggctgcttggttaccatttgttgcagggctctgtggttaccaggagcctgtgtgaccactgacttcacatctgcccttcgctgaacgtgtatttctagaaaaatccagtgtcaaacttgtcccacactccagtgccagaggtgctgagggttctcttgggcaggaccgttcagcaaagtccacagagcaaaatgggagcttggccttaaaaggggtgagcaagcaggaggcgggcctcctctcatgagcaggcacggaggtg

SEQ ID NO: 32528 - DNA, 448 bp, Homo Sapiens
catagtaaatattttctttaaattagatgaaaaatatggatccccatccatgtacctttgctcaactgtcctcagaccagatccagaattcaccctgctgtttctccatgagtctgacctgcatcaactgcctcccttattctgggattccagttgtggagctcaaggacaagtccattctgggctggctgtatccaacttctttagtccaactatatccccactggaagccaggctctttccaacagctgtcacccatgcctctttctatgtttgttatctgtctctaggttctggtaactacttccttcccttgccccttctggcctagggtgctaccaatccctcctccaaatccaactgtcactagcctcaaagtacttgtagcttcctcaccttactttcaccttaataaatggtccccctactatctctcttcaaagcaccc

SEQ ID NO: 32529 - DNA, 636 bp, Homo Sapiens
agagagtgaaaagaccgcttacccaatttgaaattggtgagatgttccttgggctggttggtctgaggacctgaggtcataggtggatctcttcacggagtgaagaacaggtggagaggtatgaagaacgaggaacactgcccggggagtttcttcctctgcaaaataagggagtgtgtactgaattaccgtttccagctccaacatccaggatttcagcactacctgcagagtagtgggaggagagatagaggaagaagtgaagataagaaaccactcgaagccggtgtctggtgctgggaccgtggtggctgggacggcagcagtcgtgctgtccatctgctcttccgaggggtggcacatcctagcctctatcttttccccagagaagatccccctcgtctgctcttcccccgtctcagccttttagtgtgtgaacagttctggtgttactcagcaacgcttttgttagcgcctttaccagcaagtacttgttaaacacttaaatcttacaagtggaaagaaaattccgtggtaaatttaagtacaaaagtcaaccaaaattctgagtctcggacaagactggttaaaaatcgttctacaatgaaactaataaattaaatcatataaaacttt

SEQ ID NO: 32530 - DNA, 864 bp, Homo Sapiens
caactggagggtttttctgagagagaagtgagcatcaaatacattcctcatcttgccctctctagatgaaggttgcttgagcaggaaatccacccatggcccaaagaggaaagatccgctttaaatgcctgggcatatacttccaagaaccagatgtggcctgttccttacacctccctgggcttagatgacagcttgaactctgcggctgatggaattgagcagatgggaatgacctggaatctaacactctacaattcagacacaccactgtccacttgtccctcccttcctgccactggccctgccagcgtaccttgtgtacttcgcaaaggtcactggctcctgttttatgtaatgactgacagacgatctcgcccagctcagcaatgtgaacagacaccttgcatggtgccggtggtgggtgcggttgtttctggatgtcatggaagaggctggggcataccagggctttccccaattgtgcctaaaataaattggctcttgggagattctgatgtgccacagggttttggcaaattaagtaagggtgtaggagaaggtactctggagcagtttccaggaatttggtgccatgttggcttagagaataacgccaaaaggggccttgtgagaattctgtattccacatttttttctgactccagttccagaatccacatatttgtgtttctggctccagttctaacagtcaaggcagagggcgcgtgtcagtgtgtgatgagtgtgcagcaactgtccctggaaggcactgagaaacacccagtaggactctttaaggacaagcaaagtatcttcttcatcttcacattccctcctggccagtacattgctaagacttaa

SEQ ID NO: 32531 - DNA, 1142 bp, Homo Sapiens
agatggaaatgcggaaatcaccgtcttctgtgtcgctcaggctgggagctgtagaccggagctgttcctattcggccatcttggctcctctccctctttaaagtgattgctcactgatgccttatctagttctcttggtgaggtcatgttttcctggatggtcttggtgtttgtggatgttcatcaatgtcagggcattgagaagttagaatgtgattttgaagaaaggaggaaagatgtgaaaagtgattggtcagccacattcatggtgttgagaaaagaatttgcttttctggaacatagcctgtgatagcagaacaacacctggcaagaaacaggttatgtttggctggagagtcattggcactatcaagaaatattaaagtgtagatttgagagaggaggagaaagacccaagcaaaattgaaaaccaggtgggacccagacagcagcaaagcaatggaagcatgtattttggtcaatatagagttaatacacaattttgcccctcttcttctgatcatgggactcatattaccagtcttcacatttcctttaaattcaggaatcaggaagaatttccagagtttgcagatggacacatttgctgcttccattctaaacataagttagaagaacctttcaactggattccaactttaatatgtcacaaacataaaaaagaaagctatttcctggacttttcttcattagaaattaatagattgtcaattggcatagggaaaagataatcaacagatgccaaccccaagttaacagaaatgctaaaattataagacaaagacttcaaaatagctattttaattttgcctagtgaggtaaatgcaaacatgctcactatgaatgaaaacaggtaatctcagcagtcatgtaaactataaaaataagcaaatataaattttagaattaaaacacaatatctaaaaataaattcacctgatattctcaatagaaaaaatggtaatgcagagaaaaatgtatgaaaatatggcaatttgaagaagagagaagagatcaataaaataaataagtatatccttggagacctgtggatgttttttgaaaagtgaatcatgtaagtaattgaagtcccagaagaaaagaaaagaagaggatgagca

SEQ ID NO: 32532 - DNA, 1203 bp, Homo Sapiens
ctcctctttcgcctcctccgctttgggagccccgggctactctttcacagcccctgttgccctgtgatctgtaggtccttggggacgcacagttaagatgacaggacatcctggaagctgggaaatggctgaatgctatcccagtgaatatacgtgccctgtttgttgaatctactcatccttaaaggctggacatggtggctgatgcctgtaatcccagtgctgtgggaggccaaggcgggtggatcatgaggtcaggagatcgagaccatcctggacaacatatgtattcatttcctaccaccgtagtggaagagatactatccctatctttacaactgatagcatttccaacagtaagctgtgagattctgcttgaaatcacctctcaaacaaataaaaaacagacctgggagacatgctacgctcattctgctgaagaaataggcatcatagctgggaaacggattcacaagacccaggctgttccctacatatgtttcctcctccgacatcagttcatcagtcaatcaagccatgtgagagtggaggccttgtattccctattattcttgggcactctactccaagtaggaaaaggccaggaggtcctgttaaaggatgcactcagagcccgggctccctaacatatgagagtgctaaccagcaggtgtagacttttcaggagtgaagaatgaggcaggcattccaaacctggaccttcatcaccttttgtttcatctcaagacaattctgagggactgttttggagcgtgtctggaaggtgaaccttgaagaagagtgtgggttttgatgtgactcagttgagatctttcatggggaggcaggaattcaatgcccagaatctgggctggtgtctttgaggtcagtaggttgcgtctttgtatccaagtccattgttactaggttggaggctggagattctaaatggcttccagaccatctctctgattctctttgggagatggggtctgaaagacaatgtcagtagttttgggaaattctagaaagtgtgcttggaaacgtgggaagagctcttgcctagtgcctaaatgctccatttgcagctctagccaagtagatacttggtaggtatagagccgggtttgcgtttatattagcaaaacctatgtcagagttgaagaagtagtcaggaaaaagcgtcttggtcgcaggccgggg

SEQ ID NO: 32533 - DNA, 1896 bp, Homo Sapiens
atgctccccgagctcgaggagcagcggccatttgcgggactgctctcggtggagagcctccgccgcgtcctcaacctctctcccttttgcgtcccgggaccctgcgagcacccgggccgagggcgcagccgagtcttgcgggagtcgccccgaaagcgtcgggtttgtgtggggttagcgggggccgccgcgccacctgcgcctcgcccgccgccgcctcggggaaaacccgaagaggaggcggaccaggagaagagcaaagaaaagcagcccgtctggatttgtttgcccaggactggcgccgcgcacgcggatccccgaggggagtgcggtcggagtcaccgcgcccccgcctccccgcccgggcgactgaggccggggggttggagcactgcccccgcgcacagtccccgaacgcccgacgtctccgcgcaggttattgaagcagctgggcctggggcgcccactaatgtggccctgagggccggagcccgcaccgacgggagcgggagccggagcagctgcgggcgccgagtggccggtacgcccggcctagcgcgcctgcgtgcgtggccacctcgctccccgcttctgcctggctttccggcttaattttcctcggcgggattaaagttggaaattgaccggagaattgagttgccggggaacagagccccggccgccgccagcgcgatgttcccgcagagccggcacccgacgccgcaccaggctgcaggccagcccttcaagttcagtatcgcggagtccctggaccggattaaagaggaattccagttcctgcaggcgcagtatcacagccttaaattggaatgtgagtaaccggcaagtgaaaagacagaaatgcagaggcactatgtgatgtattacgaaatgccatatggattaaacattgaaatgcacaaacagactgaaatcgccaagagattgaatacgatttgtgcacaagtcatcccatttctgtctcaggaacatcaacaacaggtggcccaggctgtcgaacgtgccaaacaggtgaccatggcagagttgaatgccatcatcgggcagcagcagttgcaagctcagcatctttcttatggccacggacccccagttccccttacgcctcacccttcgggacttcagcctcctggaatcccgcccctcgggggcagtgccggtcttcttgcactgtctagtgctctgagtgggcaatctcacttggcaataaaagatgacaagaagcatcaagatgcagagcaccacagagatgagaggcccggcaagccagattaggactttgtcctcatactcttacagtgctgcaaagttgtgtggatcgctaaagagagccccaacctatacagaaagcaaacaatgagataagaggaactgtctcaaagctttccactgaaacacaggtcaccctggaagtttgcagggtttgctgtgggcatctgtagatttctcgatctcgttagattgcaggcatcttgacatcttggcaactgcctagttaatgccagtggcctgtaccatattatggaaaactgttaactgcttaattgggtaattttcaaagaaagtaatgttgttaaatggggtgaaataagaagttaaatttgaaagtgaatgtgttcaaatgaaaggtttgataattgcatctgttactacttagtttcataggctttaattctagtatgcattaaatattgggcaaaattgcacttgactaattttttgaagaaaagtaatttattctgtcaagaaataaaaaaataggctttgtgtatggttaaactaaatcttatgtttacaaaatactgtaattttcaggaaatcactgtattaggaatgtgcaatgacttatataaatgaaagccatttttaaaactg

SEQ ID NO: 32534 - DNA, 4448 bp, Homo Sapiens
gactagccttgcagtgttttagactgttttgaaattctgttctttagaagagattttttttttcttcttaatatcaaacaaagaactgctgctattcctttgggctggcgcagcaggggccggtgaaatgcaggctgacgacggcgcgccaggggctgagctcgccccggtcggcgacgcgcacacaccttgagtgacagcgacctcttctctacaggttttccccgcgggagcgtggccctagcgggcgttcggttttctttggaaatcgcggagggggctggccgggcgcagcgatccccaccccgggactccagccccggccgtgcgcgtcgccgcggacgggctctgcgggccacggggaaggtgcgaggaggcgcgagcaggctgtgagccgctgggcgctcccgcgagcccgctcctctccgtcgggagcagggcaaaggcgccaggaacagggcagaggcacagcgcccaccgcctctgcggccgcctgatgtgcgagcagcccgcgacgaggcagtgcacgctcagacgccccgctcctcccgccagcgcgcggcctcgctcctcctagaggacgctctctgcgcgggccctcggaggaggcggcggcggggcgagctgcagcgccgggacaggaggtttgtccccgcccgcgcgccgtaccgcggcggagatgggcgagaccatgtcaaagaggctgaagctccacctgggaggggaggcagaaatggaggaacgggcgttcgtcaaccccttcccggactacgaggccgccgccggggcgctgctcgcctccggagcggccgaagagacaggctgtgttcgtcccccggcgaccacggatgagcccggcctcccttttcatcaggacgggaagatcattcataatttcataagacggatccagaccaaaattaaagatcttctgcagcaaatggaagaagggctgaagacagctgatccccatgactgctctgcttatactggctggacaggcatagcccttttgtacctgcagttgtaccgggtcacatgtgaccaaacctacctgctccgatccctggattacgtaaaaagaacacttcggaatctgaatggccgcagggtcaccttcctctgtggggatgctggccccctggctgttggagctgtgatttatcacaaactcagaagtgactgtgagtcccaggaatgtgtcacaaaacttttgcagctccagagatcggttgtctgccaagaatcagaccttcctgatgagctgctttatggacgggcaggttatctgtatgccttactgtacctgaacacagagataggtccaggcaccgtgtgtgagtcagctattaaagaggtagtcaatgctattattgaatcgggtaagactttgtcaagggaagaaagaaaaacggagcgctgcccgctgttgtaccagtggcaccggaagcagtacgttggagcagcccatggcatggctggaatttactatatgttaatgcagccggcagcaaaagtggaccaagaaaccttgacagaaatggtgaaacccagtattgattatgtgcgccacaaaaaattccgatctgggaattacccatcatcattaagcaatgaaacagaccggctggtgcactggtgccacggcgccccgggggtcatccacatgctcatgcaggcgtacaaggtctttaaggaggagaagtacttgaaagaggccatggagtgtagcgatgtgatttggcagcgaggtttgctgcggaagggctacgggatatgccatgggactgctggcaacggctattccttcctgtccctttaccgtctcacgcaggataagaagtacctctaccgagcttgcaagtttgcagagtggtgtctagattacggagcacacgggtgccgcattcctgacagaccctattcgctctttgaaggcatggctggcgctattcactttctctctgatgtcctgggaccagagacatcacggtttccagcatttgaacttgactcttcgaagagggattaaaaggtgcaaaaagacaactaaaatacccatttggaccaaaagccaccagattgcttagtgcctgacacagaaacaactgggaatcctgaaagagaagcagacaccgtcacaggcccctctggttagactagcatgagtgaccgaagccatccatcaacattttctaacagcaccctcatcaatataaaatatgacttcttcacatacagattctctgtagtgtttgcatgtttcttggtgtttgttgtctccaggtgtaagctgttttaaatggaaggcccttctattcctgagggctcagagctgaccatgcatgaatgtatggcagtgtccacttttctgtataaaatgtataaagtggggtttcttccatattgacaaatgagggaacaggtggtgtctatcttgtatatcagaaagattatctagggtctatcctagtgataatacattgtcagccttttctgtggcaccttccagatgagaatgagggagcgaccactccaaggacggacaggaccagcagttctgcaggggcgtgctggggtggtttgggagtgcacagctgaacgcttcccgtttggattttacactcaccttcgtgttttaaagaagcctcagagtgcattgcagctctgtcagggccccattcccagcagaggcttcaggtgctttgtgtagagtccagggcagctggagctttgttggggagacttctggacccaaagggagctttcccaagaagcctttgatggccacactgtaggcagcagtgactaagcactggcagttccagaacatttacccaggtatatgttactaaaacaggctccacctcagtttatcaacattataagttactgttctaagaaaagtaaatacagttccagatgggttattgcagattaacagaaagacactcaactggactcatgtccctgcaattaaacttacttcaaccttttggaaagttatcaaaatctaaatttggaatgaatgcatttcctattttttgtctacttttgggtgataaaaagtactagcccttatttatagatatgagaaacataatgttctaaccaacaacattatggtatttgtgtgacttttatttgaaaaaatgtgagcagtaatttgggttagcctaccttcattaattctatcacatagatttcagtttttagaagggtttctgtcatcatggaagaggtggtctgggactaggtacttctcgtcttgtgagctaaggcttgtgtcatgaaagacaagaggcctctcttaacagcccagtccttgtctgcagggggaggcctgagcatttcccagccccagtgtccacacctctcagaaaagagaaaaaagaatgtcagtttaggagaaaagcttcctttttacttgtgtggttatgtgtggggctggcacccgaaatgtgtgacattcagcttctaaacgatgcctggagagtctgtttgctgcagacacccttgctcctgagtcattattttctttcatgttagattgatgacttctgtgaatagaaatcatcctgatcctattttacctggcctccagggcctgttgatgggctttgcaggcagtccagcagcccacacctgcaggcaggatgctgtcgtcaatgagctgagggtagctgctttgctgaagacctcacacgatgtccaatctcatccaaataacattgttcccatcctccccacccaccacatcaaaacataacacatcacagcactcagtagaggtcctgcctccccatttctcaagggaagccagtaggcaacacagccagcacggtgctctccagggcagcccctctcagacgaggaggcagcgggtgcagccaggtgtctgcagagcagccacaaaggtggcctaggatgcgggtgtctccccaggtgagtccatccacacacgtttgaaaaacactattagtctttctaacacactgagggaaagattaaaatctgtggaataaaggaggagattttatttacagatttttttaaaagccacctgggttgacaccttcctacttatccactagatgtcatcagaggtgctgttccgtggttctgcattaacccctgcctcatgtctgtaacatgtgacagtaattccagctcggtccctccaggcaaaggagaaacgggacttacttcacaggacagaggattgacagaagtcagtttaagataagtgtttgaatcagatttcagtacatctcattcatttcttagatttgtattcacaattgtgttctctaaaatgtgtctaaattttaaaaatatgtacatgcataatgtcattttaaaatctgaaggaaagaatttgaagtccacaaaaagtgtttgaggttctttggttttgttagtaaaagccagttctgtggtgatgacct

SEQ ID NO: 32535 - DNA, 2650 bp, Homo Sapiens
atggacagaacggagactaggttccgtaagaggggacagattacgggaaagatcacgaccagccgtcaaccgcacccccagaatgagcagagtccccagcggagcacctcggggtaccccctccaggaggtggtggatgatgaaatgttgggaccatcagcccctggggtagatcccagccccccatgtaggtcccttggctggaaaaggaagagggagtggtcagatgaatctgaggaggagccggagaaggagctcgcccctgagcctgaggagacctgggtagtggagatgctgtgtgggctcaagatgaagctgaagcaacagcgagtgtcatccatcctccctgagcaccacaaggacttcaacagtcagcttgcccctggggtagatcccagccccccgcataggtccttttgctggaaaaggaagatggagtggtgggacgaatctgaggagtcgttggaggaggagccacggaaggtgctcgcccctgagcctgaggagatctgggtggcggagatgctgtgtggcctcaagatgaagctgaagcgacggcgagtgtcgctcgtgctccctgagcaccacgaggccttcaacaggctgcttgaggatcctgtcattaaaagattcttggcctgggacaaagatctgagggtgtcggacaagtatctcctggctatggtcatagcgtatttcagccgggctggcttcccctcctggcaataccaacgcattcatttcttcctggctctctacctggccaatgacatggaggaggacgacgaggactccaaacaaaacatcttccacttcctgtataggaagaaccgctctcgcatacccttgctccgtaagccgtcggttccagttataccgttccacgaacccgagggccaggaagaaccgctctcgcatacccttgctccgtaagcatcggttccagttataccgttccatgaactcgagggccaggaagaaccgctctcagatagtcctgttccagaaacgacggttccacttcttctgttccatgagctgcagggcttgggtttccccagaggagttggaggagatccaggcttatgacccagagcactgggtgtgggcgcgagatcgcgctcacctttcctagagctccagggaccggggaggcctgaggtcatcggcctgagagaagaacaccggacccaggggagatgtggattttcagcaggaactttattccaatgctaatggcagacaccaggcaggaggagaggaaccatttgtgcagatcatctagaagaacctggaccattcttgatggagctgaatacagtgatcacgttgtcctcctaggagcaggggtggggggaggggggtggggtccttctaggagtccttggagaaaagtaagaaaccaggagcgtttccagttccaccctttcctgcggcaccaccaccctttttatattgctgaattccaacctccctggggcggaacctggaggtcctgtttcttacggacttgcagtccaggaggatttgaaggcacaatgcaggggctcagattgggacagaattcttttgtgaaatatcagtgccacagattgtaacagatagcttcatgcacactctgcattttattggtttgtttggaaaatgtcggccattgaattattcatagatttatttcaaatagtttggaaattgttgtacttttgaaaacatgctgttcctgtagttttttgatgagagttatagttgttatatatacataaagctaattttcttttcatttttaagagacaattcttttatcctaaatattttattatctttaaatttgtttctgtattattatatgtgctcctgaagcgagcactctttttatctatgatacttccataataatctcttctatttatagctattggtagttccccaccagaaaaatacataattctggtgatagaaatttttatttgctgtttaggtttgtgactgaattgtgagaattcagttgtgatttttaacatgtctcagatatatatactaacacgtctaatatatactatctattttattggtttattttgaaaaacatgggtatagaattatttaaatattattttatttatttaaatatttattaaatatatttatttatttaaatattatttttacattaaatattattttaaatattttggaaatactggtatttttgaatagatgctgtttctacaaagctgtgtgatgggtattataactgttatatacacatacatataattttgttttcctttttaagagaggattcttttcatcctaaatcttttacctttcaatctttgtatctattattacacgtgctgctgaagggagcatggattttatctatgatacttagttaacatatatattacatttatagctatgtagtagttcccctaaattcttgtaaaaataaatttttatttgatatttcatatatgtttgaaatgtgagaattcagatgtaattttttaccttgttttggcatgtttgtatattactttaaagagaatgtgtgttctaaaggaggacatgagctgtgtgttttcaagagaacaatagagtgggtctcttggggaaacataataaaaatgaacttttctcaccttca

SEQ ID NO: 32536 - DNA, 1734 bp, Homo Sapiens
atggctcttcgcctggtcgccgacttcgacctcgggaaggacgtgctcccgtggttgcgggcgcagcgggcagtgtcggaggccagcggggccggaagcggcggcgcagatgttttagaaaacgattatgagagcttacatgtattaaatgttgaaagaaatggaaatattatttatacctataaggatgataagggaaatgtcgtctttggattatatgattgtcaaaccagacaaaatgagcttctatatacctttgagaaagacttgcaagttttcagttgctctgtcaacagtgaaaggactttgcttgctgcaagtttagttcagtctactaaagaaggaaaaaggaacgaacttcaaccaggatcaaagtgcttgactttgttggttgaaatccaccctgttaacaatgtgaaggttctaaaggctgtggatagctatatttgggttcagtttctctacccacatattgaaagtcatcctcttccagagaaccatctgttactgatttcagaagagaaatatattgaacaatttcgtatccatgtcgcccaagaagatggaaatagagtggtgattaaaaattctggccatctcccaagagacagaatagctgaggatttcgtttgggctcagtgggatatgtcagaacagagattatattacattgacctgaagaaatcaaggagtatcttaaaatgtatccagttttatgctgatgagagctataacttaatgtttgaagtacccttggacatatcattaagcaactcaggatttaaacttgtcaactttggatgtgattatcatcaataccgagataaattttccaaacacctgactctgtgtgtttttaccaaccatacaggaagtttgtgtgtatgttacagcccgaagtgtgcctcttggggacaaatcacatattcagtgttttacattcataaaggacacagcaagaccttcaccacttctcttgagaatgttgggtcacacatgacaaagggcattacttttctcaaccttgactattatgtggctgtttacttacctggtcatttcttccacctacttaatgttcaacatccagacctgatctgccacaatctctttctgacaggaaataatgaaatgattgatatgctacctcattgccctttacagtcattgtcagggtccctggtattggattgttgttctggaaagctctatagagcactgctcagccagtcgtctttattacagcttctgcagaacacttgcttagactgtgagaagatggctgcgttgcactgcgcgctctactgcggtcaaggtgcgcagttcctggaagcccagtggaggcagagagcagatttaaataccaacagagttctgtctgactttttaaagattattcagtggatttctgagaatgtctctgcctgccattcatttgacctcattcaggaatttataattgcttcttcatactggagtgtatattcagagacaagtaacatggacaaactattgccacattcctcagtgctcacttggaatacagaaattcctggaataactcttgtgacagaagacattgcattgcctcttatgaaggtgctcagctttaagggctactgggaaaaactgaactccaacctagaatatgttaagtacgccaagccacacttccactataacaacagtgtggtcaggagagagtggcacaacctgatctctgaagaggtatga

SEQ ID NO: 32537 - DNA, 448 bp, Homo Sapiens
tccaggcaggtcccctggggcagctgcccacccgtgccctggggatgatgactcagttcacccagagttccggccccaggctgctggggtgaccgcggagagaggaatgcagccatccgtgacatttttgggacatggatctctgccccacctcacatcatctctgatagcaccactcagcctgggagccagaaccgcacccccactgcaccctagagagtattgcaggcagagatggcaagttcaagtgtgcacaggcagaggcttgcaggaaactgacccctggccacttatctggtgttccggctctccagcacaaagccgggcatgggctctgcacccccacccattgaggggagctgggacagaaagaagcccatgagtaacccaggtgtatttgtctgttctcatgctgctaataaacacatacccgagactgggtaattta

SEQ ID NO: 32538 - DNA, 909 bp, Homo Sapiens
gccctcctggtgagatcccatcacgtcccctggcctccagtgtcatctgctctgcatgatatctccagggggacctctctgctgggctccaggccgcatggctgtgggtgaccagcatcatgtcccaccgggtcccctgcagtcccagtgcacctgcctgctcatccagggacctgtcctcactgcctgctgcctgcactgtgtggaaggacagaggctaaacgacgaagcctcgagctctggtctcatggaaatggcagcctgcccaccacccacgcttgcccagcctttcttcacgcaggaagaatatttctcagccctccgttctcaagacagatgagtgctttagaaagaggactctgcagcggcgaggaggatggaatgacaggcaaagcacgcaggaccaggagatggcttcgctccctcaatcactcatccaaagacgtttaatgagcacctattgtgtgtcaggcattgtaccgggcaatggggatatcgtagtcagtaataagtgaggagagatgagttcatttgtgagaggctctgaccagtggaatcagaggaagggagttcccctgggtgggccaggttcaaagacattttggaagtagaatctgcagaacatgatgatcttttggaaacagggcagggacgtgaatgagcacgtaatgtccccatgggtttgtctttccgaaggtttaaaatcctcaagaataaggaacataggcatgtgtcgtaacggtctccacagtgggggagtattatgttagtgcacctgcatgttaactctgctcatgaaggggccacgtcttcaccaccacaaagcctcaagcatgcatatctggtccctcctaccccctccctattgaggtgcaataaaggcccatgtttctcctagtatgggaacag

SEQ ID NO: 32539 - DNA, 4429 bp, Homo Sapiens
cgagaactataaaataataatgaaatcttggaatagataagttactctatgaggactgaagctgttgttaattcccaaggccagactgattatctcacaaaggattcagaccaggatgtagcactcaaacttgcccaggagcgagctgaaatagttgctaaatatgacagaggacgagaaggtgcagagattgaaccttgggaagatgctgattaccttgtttacaaagtcacagatagatttggctttttacatgaggaggagctcccagatcataatgtggctgtggaacggcaaaagcacctggaaattgaaagaactaccaaatggctgaaaatgctgaaaggatgggaaaaatacaagaacactgaaaagtttcataggcgaatttacaaaggaataccactccagctcagaggtgaagtctgggccctccttcttgagatccctaaaatgaaagaagaaacaagggacctgtatagtaaattaaaacacagagcacggggctgttcacctgacatcagacaaatagacctggatgtcaaccgcacatttcgggaccacattatgtttagagacagatatggtgttaagcaacaatccttattccatgtgcttgctgcctattctatttataacacggaagtcgggtattgtcaggggatgagccagatcacagctttactcctcatgtatatgaacgaggaagatgccttctgggccctggtcaaactcttctcaggccctaaacatgccatgcatggcttttttgtccaaggttttcctaaactcttgaggtttcaagaacatcatgaaaaaatactgaacaaatttctgtccaagcttaagcaacacttggattctcaagaaatctacacaagtttttacacaatgaaatggttttttcagtgtttccttgatcgtactccctttacactaaacctcagaatatgggatatctacatctttgaaggagaacgagttcttactgctatgtcttacaccatcttaaaattacacaaaaaacatctaatgaaattgtccatggaagaacttgtagaattttttcaggagaccctggcaaaggattttttctttgaagatgattttgtgatagagcaacttcagatttctatgacagaactaaagcgggcaaagttagaccttccagaacctggtaaagaggatgaatatccaaagaagcccttggggcagcttccacctgaacttcagtcttggggcgtccatcacttgagcaacggacagaggagcgtgggccggccgagcccgctggccagcggcaggagggagagcggggcgccccacaggaggcacgagcactccccgcacccccagagcaggaccgggacgcccgagagagcacagccgccaagacggaaatcggtggaggaggagagcaaaaagcttaaagatgaggcagattttcaaagaaaactcccatcgggtccacaggacagttccaggcaatataatcacgcagctgccaaccaaaatagcaacgccacttcaaatatcaggaaggagtttgtgcccaaatggaataaaccgtcagacgtctcagctacagagagaactgccaaatacaccatggaaggcaaaggtcgagcagcgcaccccgcgctcgcagttaccgtcccaggtcctgccgaggtgcgggtgtcaaacgtgcggccaaagatgaaggccctggatgctgaggacgggaagcggggctccactgcatcgcagtacgacaacgtgccaggcccggagctggacagcggcgcttccgtggaggaggcgctggaaagggcttactcccagagcccccggcatgccctttaccctcctagcccgagaaagcacgctgagccaagttctagtccatcaaaagtatccaacaagtttacttttaaagtacagcctccaagtcatgcacgatatccgtcccagctagatggggaagcccgagggctagctcatcccccctcctacagcaatccccccgtttaccacggaaactctcccaaacacttccctactgccaacagcagctttgcttctccacagtttagccctgggactcaactgaatccttccaggagacctcatggttctactctttccgtcagtgcttctccggagaaatcttacagccgcccaagcccccttgtactgccgtctagtcgaatagaagtcctccctgttgacactggtgctgggggatattcgggcaattcagggtcaccaaagaatggaaaattgatcattccaccagtggattacttgccagataacagaacatggtcagaagttagttatacatacagacctgagacgcagggacaatcatggacccgagatgctagccgtggcaatttaccaaaatactcagcctttcaactcgcaccctttcaggaccatggcctccctgcagtttctgtagatagtcccgtgagatataaagcttcaccggccgcagaagatgccagtccatctggatatccatattcagggcccccgcctccagcctaccactacaggaatcgggacgggctttccatccaagagtcagtgttgctgtgagatttgacgtgtacttgctaaagacgagagagaaaccacgtgaaacctacattgctatgttcataattgccaaagcagtatttatactattgtaaacaactcgcacatctctcctgtctgttagtagtaagaatacagggaaatgtcttcagccccacgtagatgctgcttaagatgagcgtttcaattgcatcatcactgacctgttagaatttaacccggaaacatcgcaatagcatttagggatgcacgcacagtggtaatttattactcagttccggttatgtttttctccaaaacctgaacatttttactctgttggctcattctattttgactaatgttacaaagtactgaaaaaactgtagaatagatatttttaaggctatatgtagtgtatgtgtcttttaatagatataggcatctgttcatccacatttgaacacagagctaaagaaacgttttttaaaaaactacttttaatccagatccatggaataatatgtaattcttgttttccttgtcttttagtccagtttttctttttccctctcatatatttgtaacctgggtcctaaactgactgaagagtttgtcctgactttattaattgcagtctcacagaatgctcatcattctccttcagctgttgccattttctttcaatctgaaaattaaagacattggagagaaaggctaaccacttaatggtgcttaaaaatcggggcacttaaaataagtttacggccaaaggtgcagcagtgcttatcacatccacatactaagagattggtcttagtgcgtttgtgccctttgttctggtctgactcttgcgaatctcagagcaggagaagttgcagcttactgatccctcagtgctcacagtactcatgtggggcagccacactaactgcattagcagtgtggttacttctttcttctgcctcgactcacatggcttctccccacgaaggtcccagggtggccatttatacaatccatttctgtcctctttatggaatgtagtcgacggatattgctgcacctcatcaggccattacattgtccatgttaaaattataaaaatgatcctagtttttcataggagtctaggattttgatcttttaaaaaatacagtgtgatttcatgcttttgaacatctttttttcattgaaacaaattcaagttcttggcttaaaaaaaaattagtgatgtctttaaaaaatattctgttacactacagataccaaaacactgacaaagatttaggcactccaagagagtatgacttcgtgtttaattggggagcttgttttcaacattgcttatatttgaatagtagaaaacccgacattgatgtttcttcctgttgcaaggtggggctttaaactttcaaggtacaaaagtatgtcttttaaaatggaagtaacgtttgtttagctagtgaatgtgacaatatattttatgtatataatgagtctaatgtaattttgatcaacttggtaatgatgttattaaatagcaaaacaagtgcagtgtattaaagctaaacactacattgaaacgcaaacaaaattctggtgaaataactgggctgttgatgcaggtcaggtggaagctgagaaataaatgtatataaatatgtagctgaggatattaattcccattatataaccataattctgtgacttgtaataaaccaagctgtacaatttagtttataatagcagtatctgagctgctccaaaatatatatatcaacagtggtaaatactgtagatttttatatatatatatatatatatatatatatatgcaaaaaatatatatatacacacaagc

SEQ ID NO: 32540 - DNA, 6757 bp, Homo Sapiens
tgcttggtaacccggagggagagattggaaaccgcggagtttcctttgggaggctgcggccagccggggctgacttgttatgttgggctccggaggccgttaagagccgagagagacatgaggtgtctctgaagcccggtcgcctgggccatgaagaagatttttagtaagaagggcgagtcgcccttgggctccttcgcgcggcggcagaggagcagcgcgggaggcgggggcgagccgggggagggcgcctactcgcagcccggctaccacgtccgagaccgagatctcggcaagatccacaaagctgccagcgcgggtaatgtggcgaaagtgcagcagatccttttgctcaggaagaatggcttgaacgatagagacaagatgaacaggacggctctacatttggcctgtgccaatggtcatccagaagtagtaactctcctggtggacagaaaatgccagctcaatgtctgtgacaacgaaaacaggacagctctgatgaaggctgtacaatgccaggaagagaaatgtgcaactattctgctagaacatggtgctgatccaaatcttgcggatgtccatggcaacactgctcttcactatgctgtctataatgaggacatatcagtagcaacaaagctgcttttgtatgatgcaaatattgaagcaaaaaacaaggatgacctcacaccacttttacttgcagtaagtggaaaaaagcagcaaatggtggaatttttaataaagaaaaaagcaaatgtaaatgcagtagataagttggaaagcagtcaccaactaatttcagaatataaagaagaaaggatacctaaacattcttctcaaaatagtaattcagtggatgaaagctctgaagactccttaagcaggctttctggcaaaccgggtgttgatgattcatggcctacctcagatgacgaagacctcaattttgatactaagaatgtcccaaaaccaagcttagcaaagctaatgactgcttctcagcaatccaggaaaaatttagaagcaacatatggcactgtgagaacaggaaatagaactttgtttgaggatagagattccgatagtcaagatgaagttgtggttgaaagccttcctacaacatcaatcaaagtccagtgcttttctcatcctacctatcaatcacctgaccttcttccaaaaccttcccacaagtcgttagcaaaccctggtcttatgaaggaagaaccaacaaagccaggcattgcaaaaaaagaaaatggtattgatattattgaaagtgctccactagagcaaacaaataatgacaatttgacttatgttgatgaagtgcacaaaaataatagaagtgatatgatgtccgcattaggattaggacaagaggaagatatagaatcaccttgggattctgagagtatctctgagaattttccacagaagtatgttgatcctttagctggggctgcagacggaaaagaaaaaaatataggaaatgaacaagcagaagatgtgttttatataccttcttgcatgagtggatcaagaaactttaagatggctaaactagaggatacaagaaatgtaggcatgccagtagcccacatggagtctcctgagagatatcttcacttgaagcctaccattgaaatgaaagattctgttccaaataaagcaggaggaatgaaggatgtacaaacatccaaagcagctgaacatgacttagaagtagcatcagaagaagagcaagaaagggaagggagtgaaaataaccagccacaggttgaagaagaaaggaaaaaacacagaaataatgaaatggaagtatcagcaaacatacatgatggtgctactgatgatgctgaagatgatgatgatgatgatggattaattcaaaaaagaaagagtggagaaactgatcatcagcaatttcccaggaaggaaaataaagagtatgctagtagtggtcctgccttgcaaatgaaggaagtaaagagcactgaaaaagaaaaacggacctcgaaagaatctgtgaattcaccagtgtttgggaaggccagtttactaactggtggcctgctacaagtggatgatgacagcagtttaagtgaaatagatgaggatgaaggaaggcctactaagaaaacatctaatgaaaagaacaaggtcaaaaaccaaatacagtctatggatgatgttgatgacttaactcagtcatctgaaacagcctcagaggattgtgagctaccccactctagttacaagaattttatgttgctcattgaacaacttggaatggagtgtaaagattctgttagcctattgaaaatccaggatgcagctctttcatgtgaaagattattagaacttaaaaaaaatcactgtgaactacttacagtaaaaattaaaaaaatggaagacaaggttaatgtactacaaagggagctatctgaaacaaaagaaataaaatcacagttagagcatcaaaaagttgaatgggaacgagaactgtgctctttgagatttagcttaaaccaagaagaagagaagagaagaaatgctgatacgttgtatgaaaaaattagggaacagttaagaagaaaagaagagcaatataggaaagaagttgaagtgaaacaacagcttgaactgagtctccaaacactggagatggaattgaggactgtaaaaagtaatttgaatcaggtcgttcaagagcgaaatgacgctcagaggcaactttctcgagaacagaatgccagaatgttacaagatggaattctgaccaatcacctttccaaacaaaaggagattgaaatggctcaaaagaaaatgaattctgagaattctcatagtcatgaagaagaaaaagacctatcgcataaaaatagcatgttgcaggaagaaattgctatgctaagactagaaatagacacaataaaaaatcaaaaccaggaaaaagaaaagaaatgttttgaggaccttaaaattgtaaaagaaaagaatgaagaccttcagaagactataaaacagaatgaggaaacattaacacaaacaatatcccagtataatggacggcttagtgttctgacagctgagaatgcaatgctaaattctaaactggagaatgaaaagcaaagcaaggaaagactggaagcagaagttgaatcataccattctagattggctgctgctatacatgatcgtgatcaaagtgagacatcaaaaagagaactagaacttgctttccagagagcaagagatgaatgttctcgtttacaggacaaaatgaattttgatgtgtctaacctaaaagataacaatgagattctttctcaacaactatttaaaactgaaagtaaactcaatagcctagaaattgagttccatcacacgagagatgccctcagagaaaagactttgggtttagaacgggtacaaaaggacctaagccaaacacagtgtcaaatgaaggaaatggaacaaaagtatcaaaatgaacaagttaaagtgaataaatacattggaaagcaggagtctgtagaggagagattgtctcaactacaaagtgagaatatgttgcttcgacaacaactggatgatgcccacaacaaggctgacaataaagagaagacagtgattaatatccaagaccagtttcatgctattgtgcaaaaacttcaagctgagagtgaaaagcaaagtcttctgctagaagaaagaaataaggagttaatcagtgaatgtaatcacttaaaagaaagacagtatcaatatgaaaatgaaaaggcagaaagagaagttgttgtgagacaacttcaacaagaactagctgataccctaaaaaaacaatctatgtcagaggcttcactggaggttacgtcacgttatcgtattaatttagaagatgagacacaggatttaaagaagaaattaggtcaaatcagaaatcaattgcaagaagcacaggatcgacatacagaagctgtcagatgtgctgagaagatgcaagatcacaagcaaaagcttgaaaaagataatgccaagttaaaagttacagtcaaaaagcaaatggacaaaattgaggagcttcagaaaaacctgttaaatgcaaatttgtctgaagatgaaaaggaacaattaaagaaacttatggaattaaaacagtcactggaatgtaatttggatcaagaaatgaagaaaaatgttgaattagaaagagagataactggatttaagaacctcttaaaaatgacaagaaagaagttaaatgaatatgaaaatggagaatttagtttccatggagatttaaaaactagtcaatttgaaatggatattcagattaataagctaaaacataagattgatgatcttacagcagaactggagactgcaggttcaaaatgtctacatctggatacaaagaaccaaattcttcaagaggagttgttatctatgaaaacagtacaaaagaaatgtgaaaaactacagaagaataaaaagaagttggaacaagaagtgatcaacctgagaagtcatatagaaaggaatatggtagaacttggtcaagtcaaacagtataaacaggagattgaagaaagagcaagacaggaaatagcagaaaaattaaaagaagtcaatctatttttacaggcacaagcagcatctcaagaaaacttagagcagtttagagagaataattttgcttcaatgaaaagtcagatggaactcagaattaaagatctggaatctgaactctccaaaataaaaacttctcaagaagactttaataaaaccgaactggaaaaatataagcaactctatctagaagaattaaaagttagaaaatctttgtcaagtaaactaaccaaaactaatgagaggctagcagaggtcaacaccaaacttcttgtggaaaaacagcagagcagatctttgttcaccactctcactaccaggccagtcatggagccaccttgtgtgggaaatcttaataatagtttagatctcaacagaaaacttattccaagagaaaacttagtgatctctacctcaaatccacgggcttcaaataatagcatggagaactacttgagcaagatgcagcaggagttggaaaaaaatataactagagaactcaaagaagctgctgctgaattggaatctggatcaatagcttcccctctagggtctactgatgagtcaaatctaaatcaagatctagtttggaaagcatcaagagaatatgtacaggttttaaagaaaaattatatgatctgaaagataagattttattactgggctgtttatgtgacattttgtttctcattaaatattaatatatgacatgtaaaaatattaaaggaacgtatttttgtatcatatatgtcagatcaaaatttatatagtattttaaacaatgttacttggcttctttaacttttaagtggattttgccaatgaaaaccaggaatattgagttttacatactcaaactgcccaaatgtgagctgtttaaacagccaaaccactaagttgtcattaatactttagtgcagttaattgatggcttatttgtattttgtaatttttatcactatatgtagtggtagatgtctaattggacttagacatcattttgttgtgcaggaactgtggtcattgttcatgtttggatgtattacaattgttacagtgccatcaaatttacataattttaattttaagcactgatttatatagctgttctcagggagaaacaagatttgcctgattcaccttttctgtttgtttatttatttttaattaaccttttggaaatagccttcagtttagagaaaatttcgaagttttagtacaaagactttctcctccgaacaatttgagagtaaattgctgacattatgtcatcacccctgattactttagtgggcattcctacaagtcaggacattctacataactacagtgcaaaccttgcaatcagaaagtcaacattaatacattctagtttgttacttctctgtaatgtcctttatagcaaaaggatcccattctaatccatggcttgtatttagttgttgtatctgttagatctttcagtctggaacagttcctcagtctttccttgaccttcatgaccttgaatattttgaagagtaaagtctggtaatataagaatgtccctcaattgggtttcatggtgattagatttagattatatgattttttggcaggagtatcacagaagtgacccagtgatcttctcattgcatcttacctgtgaccctacagttttgatttgccctgttactggtaatgttagcattgatcactaacagtggtatctgctgaatttctcctctgtaatgttattttttcaccttgtggttaattagtattttacagggaggtaatttgagactatgtacatatctctactccccatcgaaccctcaatttattcatttgcttgtatcaaataaaccatggattcatggtttattttattcagtgagttataattcattaatattgttattaaaaatttgtttttcttttaagaaatgttatattttgacaacttcagacttacagaaagattataagaggtagtacaaataatttttggatattattccccaaatgttaacattttactgcatttactttatcctttctcccccttctcctcctgtctttctagatgaatatgaatataggtacttaatacagattttttttctaaactgtt

SEQ ID NO: 32541 - DNA, 3711 bp, Homo Sapiens
cttccctggccagattcctgcctgtctcccagcagcctagacaggcccaggtcttgcctcacactggcctctctacatccagctcatgcctcacggtggcctctccaggctcaactcctgtcccaggacgtcatctccgggcccaaaacttaaagtcagactctctagtcccaactgctgcctcctggtggattatgaaggcccaaaatctcctcaagttgacctctacaggcccagctcctgcctcctgtcagcgtctacaggcccaacctctgccttatgggggcttctccaggcccacctcttcctcttggctgggtctacaggcacaactgctgcctcacaacagccttttttggcccagttcctgcccagctcccagcggccctggtagacccacaacttcccgaagccaagctccccaggcccaggtcaggcctcacggtggcctctccaagctcagctcctgccctccaatggcatctgcaggccccaaatggtctccagtcggtgggctcctccacgccaagcttgggcctcttggcgacctctgcaggcccaagttgtcctgaagtcggcctctcccggccctgcctcccagcaagtaagcaagctcttttggctcaactactgccgagctcccaaccgcctttctaggccccgaactttctccagccaagctcttcgggcctacttcctgcctcccggtggcctgtacaggcccagcactggttggagaacagcctctgcaggccccactcttgcctcccaggggcctctccaggcccagctcttgcccccacggcggcctcccggggccaagtccctgcctgcctcccagcagcccgcatgcggcccagctccttctcacagtggcctgttgatgcccaactcatgcctctggcaccctgcccagagacatgagcccctgcctctcactggctcctcccacgctgagacaggtcagcgtgagcccttgcctcacaccggcccctcccacgctgagaggtcagcgtgagcccttgcctcacaccggcccctcccacgctgagagaggtcagcgtgagcccttgccttacaccggcccctcccacgctgacagaggtcagcctgagccccttgcctcacaccggcccctcccacgctgacagaggtcagcctgagccccttgcgtcacaccggcccctccctcgctgacagaggtcagcgtgagcccctagcctcacaccggcccctcccaggctgacagaggtcagcgtgagccccttgcctcacaccggcccctcccacgctgacagaagtcagcctgagccccttgcctcacaccggcccctccctcgctgacagaagtcagcgtgagccccttgcctcacaccggcccctcccacgctgacagaggtcagcgggagccccttgcctcacaccggcccctcccacgctgacagaggtcagcctgagccccttgcctcacaccggcccctcccacgctgacagaggtcagcctgagccccttgcgtcacaccggcccctcccacgctgacagaggtcagcctgagccccttgcctcacaccggcccctcccacgctgacagaggtcagcaggagcccctagcctcacaccggcccctcccacgctgacagaggtcagcaggagccccttgcctcacaccggctcctcccacgctgacagaggtcagcctgagccccttgcctcacaccggcccctcccacgctgacagaggtcagcgggagccccttgcctcacaccggcccctcccaggctgacagaggtccgcgggagcccctagcctcacaccggcccctccgacactgacagaggtccgcgggagccccttgcctcacaccggcccctcccatgctgacagaggtcagcgtgagccccttgcctcacaccggcccctcccacgctgacagaggtcagcctgagccccttgcctcacaccggcccctcccacgctgacaggtcagcctcagctcctagcctcacaccggcccctcccaggctgacagaggtccgcgggagcccctagcctcacaccggcccctcccacgctgagagaggtcaacgtgagccccttgcctcacaccggcccctcccacgctgacagaggtcagcgggagcccctagcctcacgccagcccctcccacgctgacagaggtcagcgggagccccttgcctcacaccggccccttccacgctgagagacgtcagcgtgagcccttgcctcacatcggccccttccacgctgagagaggtcagcgtgagcccctgcctcaacaggccaccgtgagggaggagcaggcttgcacgcgggctgctgggaggcaggcagggacttgggcctgggaggtcacagtggggcgagagctgggcctggagacacccctgggaggcaacagcggggcctgcagatgctcttctccagccggagctgggactgttcaggctactggtggcgggatgtgggcctgagagcttggttgcagaaacttcggggtctacaaaggccggcgggagctgagccaaaagagcttgtttgctgggaggcaggagctgggccgggagatgcagccaggaggaacagctgggcctgaagaggcccccatgtgggaggcagaggccgggcctcctcaagtcggcctctccagacccacttgcagcctcccagcgtcctctccgggcccagctcttcctcccggctgcgtctccaggcccgactctggcctcccaacaacgtctttggactcagctcctgcccagctcccagcggccctggtagacccacaacttcctgaagccaagctccccaggcccagctcaggcctcacggtggcctctccaggctcagctcctgccctccgatggcatctgcaggccccaaatggcctccggtcggtgggctcctctaggcccagcttgggcctcccggcggcctctgcaggcccaaaacgtcccgaagttggcctctccaggcccagctccggcctcctggcggcctttgcaggcccaagtcgtcctcaagtcggcctggaattaggcctggaagagcagcaagtcagcctctccgggcccagctccatcctctcggcggcctctccaggtgcaaaacttcctcgagtcagcctctccaggcccagctcctcctgcctcccagtggcctctttcagcccagcccagcccagctcatggctctcggcagccttcccaggccccgcttttgacttttggcggcctcttcaggcccagaacttgccctccagtggacctttgcaggcccggcctcggcctcggcctcacagcggactctccacgcccagctagctctcacctcactgcggcctccccagtccaaagctcctgcctttcggccgcttcggcaggtccagctcctgcctgccagtggcctctttaggcccagctcattcctcacaatggtcttcccaggccccgtttttcccttctggcagcctcttggcctctaatttgtttatcttttgtgtataaatcccaaaatatggaattttggaatatttccaccattatatgaatattttggtaggtaatttatttggagttagtttctgcaccatgcccgaattttttattttattttccttattatttggtgttaaacagatttaatgacggtcatggcaactttttggcacaatgaaaaatatcgcccatg

SEQ ID NO: 32542 - DNA, 2198 bp, Homo Sapiens
cgcgctgtgaggtgggcaggcgaggagcgggaagaccatctctgcaagtgcagcatagcctcggcctaggacagcgggagtgcgtggccaaagctgtgagcagaggcacaggtggtggcagacagtagaggcgccccatggggaacatactgacctgtcgtgtgcaccctagcgtcagcctcgagtttgaccagcagcaggggtcggtgtgtccctctgaatctgagatctatgaggcaggagctgaggacaggatggcaggagcgcccatggctgctgctgtacagcctgctgaggtgactgttgaagttggtgaggacctccacatgcaccaggttcgtgaccgggagatgcctgaagctttggagtttaacctttctgccaatccagaggcaagcacaatattccagaggaactctcaaacagatgctttggagtttaacccttctgccaatccagaggcaagcacaatattccagaggaactctcaaacagatgttgtagaaataagaagaagcaactgtacaaaccatgtatctactgtgcgtttcagtcaacaatacagcttgtgttcgacaatattccttgatgacagcacagccatccagcattatcttacaatgacaataatatctgtgaccttggagatacctcatcatatcacacaaagagatgcagatagatctttgagcatacctgatgaacagttacactcatttgcggtttccaccgtgcacattatgaagaaaagaaatggaggtgggagtttaaataactattcctcctccattccaccgactcccagcaccagccaggaggaccctcagttcagtgttcctcccactgccaacacacccacgcccgtttgcaagcggtccatgcgctggtccaacctgtttacatctgagaaagggagtgacccagacaaagagaggaaagccccggagaatcatgctgacaccatcgggagcggcagagccatccccattaaacagggcatgctcttaaagcgaagtgggaaatggctgaagacatggaaaaagaaatacgtcaccctgtgttccaatggcgtgctcacctattattcaagcttaggtgattatatgaagaatattcataaaaaagagattgaccttcagacatctaccatcaaagtcccaggaaagtggccatccctagccacatcggcctgcgcacccatctccagctctaaaagcaatggcctatccaaggacatggacatcgggctgggtgactccatatgcttcagccccagtatctccagcaccaccagccccaagctcaacccacccccctcccctcatgccaataaaaagaaacacctaaagaagaaaagcaccaacaactttatgattgtgtctgccactggccaaacgtggcactttgaagccacgacgtatgaggagcgggatgcatgggtccaagccatccagagccagatcctggccagcctgcagtcatgcgagagcagtaaaagcaagtcccagctgaccagccagagcgaggccatggccctgcagtcgatccaaaacatgcgtgggaacgcccactgtgtggactgtgagacccagaatcctaagtgggccagtttgaacttgggagtcctcatgtgtattgaatgctcaggtatccaccgcagtcttggcacccgcctttcccgtgtgcgatctctggagctggatgactggccagttgagctcaggaaggttatgtcatctattggcaatgacctagccaacagcatctgggaagggagcagccaggggcagacaaaaccctcagaaaagtccacgagggaagagaaagaacggtggatccgttccaaatatgaggagaagctctttctggccccactaccctgcactgagctgtccctgggccagcagctgctgcgggccaccgctgatgaggacctgcagacagccatcctgctgctggcacatggctcccgtgaggaggtgaacgagacctgtggggagggagacggctgcacggcgctccatctggcctgccgcaaggggaatgtggtcctggcgcagctcctgatctggtacggggtggacgtcatggcccgagatgcccacgggaacacagcgctgacctacgcccggcaggcctccagccaggagtgcatcaacgtgcttctgcagtacggctgccccgacgagtgcgtgtag

SEQ ID NO: 32543 - DNA, 10325 bp, Homo Sapiens
tcagattgcctcctccttttctgtgtgtctaatctccctctgcttctcagacagctgtaatgacatttagggcccacaagataatccaggacaatctcatctcagaatctttaatgacatctgccaaaatttcccataaaagataacattcgcagcttccaaaggttaggacccagtatcttcaaggtagcatttttgaacctgccactcaagggaagaaaatgcttcaaggattcaattgatcagcaatgtcaggtgtttctgaaagattaaatgtgaatttaaaaagtccaatcagtagcctcagagagtggaagccagattgagaggtgttaggagttaataaggtgttttgtagctagacgttgcaagatttcttgattgctttttctctgtgagatggaattattggagattgaaattttgaaaagaatggagaaaattttgtgttggagagaatggaaagtaattttaacaaagagggcattattgtatactcattgtatactgttgataccatgcatgaaatgatagctgaatcgtctgtcctcttgtgttactttgtccatttgcacttggatatagctatggagaaagcagcttgctgggttcatctggggttggtattttgcaagacaggaatctaaggagtttgatatgttggtttgcagtagtttgaatcctctactgcttaccccgtgaacatttttggtgtacctccactctgtcccatttagccaggatttacttaaggaatgcaaatgaaatagttggtaaaatagaacaatatcagagtaaacaaagatcacatattttcactcttaattatgggtcccctctgtaaccacaagaagcaacgatagttggtcacttctgaaaattgttataatacagtccagatgtgacttagaaagtctagggtaacagatttgctttttctatatgcatttttaaacctgcacagattttgtcagctacttttgtttttagtgctatttataactccctgttgcctttattcctaaagagctactgctgtttaagatggttgccagattggccatctgctgtttcccactagtcatcgatttttcatcaggtacataaccaaagcatttcttcttttcagtccttttggggagtttcacatcagtccactgtatagaagctgatagaatattttggtggtggcattctcagcatacatttctgaactggcagactgttttcttaccaggatctcattgttgatatactgcctagcttcctaatgctgcaagattaatcttcttgagtaatttaaattcaaaatgtatttttaaaatatcttctataagcaaggctacaggctgaatacttttagaaatttaaaaaaattaattaaaaattttctaccttccaaatgcatatagttcttggggagacagtgtgtttgtcaatatgcccaaaccatataattagaattacaaagagacaaggaaaggtaaaatgctgtataagaattcaggaattctagataagattgtgatgtgattgtgcatatctcgcattctgtcttcctctttgtccaccgaaatccaggtagagtcagtaaacaaaatctaagtagatgctttctaaaagaaaatcatctaaaacaaagtgatacagaagggttaaaagttttttaaaaaaatccgtgaatgcttgaaaaagattgtgcaatttcaaaagaaaccaagaattgtaataatataagatgcggcagaattcaaggcagaaaacattaaacagaaaggatcattttttaatagatcatagtgggagattttaaccattgtctctgagagtaaagtattcggagaataagcaagaccataggagatactaagagatctagataaacttggcaggaacttccggtttcattgcttgacccaatacttctgtgaattacccactttatttctttattgttaaccctctctctcaactattgggtaccttctcaatttggttaatgagtcacttggcatacagttctcgggttctttgacattttctggtagaaagtgaatcctaagtattttgcgaaataaatttcagggttcttgtagagtcataaagaggcaaatgaatgaaatgaattaggcacatttcttttgagtccaagatctaattctgttcacacacacacacctttgcctatcaagcctaaccatgaagaaaatgatacgtaaacttctaagtgatatggtacacatttctgcttccaaaatgggatagatatacttttccatagttttacctattattcttgctaagtagagctaaaatccctggacattacatttaaaaacaaacataagaaaacagaaaaatggagagaactgggtggatctgctcaggacccagataatatcacagtaaaagtcctgagttttcttattaccttatgtatttcagaatggtgcagaaaagctggcaatccagaaatgttgggcacagacaaaagccccaggaaaaaaatgatgctctttagctggggaccaggaaaagggtagcctagcaagacagaaaataaccacttcagccaaagaacatagaagagtcaccctgattagcaaagaccaagtgaggacctagactttcacagtgtttaggctgtaacaagacaactcctcactccatagtggcagcagagccaatatgggaagcagtaaccataggcagggagcctgaactcccacgtatgcttaatatgagtcccgtcttcccttcacccccaagttctttggtatacaaaagcctgtgggcggcaagccacccaggcaccgaggcaagagacaggggacacgagctgttccagtataataaaatataaaacaagaatagttataccagatatagatcttagatatgattatatatgaatatcattaatcattagtttgtagcaattactttttattccaatattatgataatcctcactctataatcatagtctaggaaaaaccaggccatacagagataggagctgaggggacatagtgaggtgtgaccagaagacaagagtgcaagccttctgttatgcccggacagggccaccagagggctccttggtctggcagtgacgccagcgtctgggaagacgcccgttaccaggcggatcgtggtccagcagtagcaaaaggtgtcaaggaacaacacccgctccttagcagactgggaagcaggggggagggtctccctttccccgggggagtttagagaagactttgctcctccacctcttgtggagggcctgacatcagtcaggctctcccacagttatccggaggcctaaccgtctccctgtgatgctgtgcttcagtggtcccactcctagtctgccttcatgttccatcctgtacacctggctctgccttccagatagcagtagtaaattagtgaaaatactgatagtccctgatatgcagaaataatggcgtaagctgtctttctctgtctcctctccctctctgtctcctctccctctctgcctcagctgccaggcagggaagggccccctgtccagtggacatgtgacccacgtgaccttacctatcattggaggtgactcacattctttaccctgccccttctgccttgtatccaacaaataacagtgcagccagacattcggggccactaccggtctccgcgcattggtggtagtggtcccccgggcccagctgctttttctcttgtctctttgtcttgtgtctttatttctacactctctcgttgccgcacacagggagggacccaccgaccctgtggggctggtccctacaaaagcctagtgagaaacctgcacttccaccccccactaggcattttttccaccagagcaatgtcaaaggaagcttactataatggaatattaaaagtagatccagtcacctaatgtaataacccaaatatccaggtttcaatgaaaaaaacctctcataccaagaagcaggaaagtgtcagctcaaattagaaaagacagttaatacatgctgacactgaaataacacagatactagaattatttgacaagaatttttttattgtactttaagttttgggatacatgtgcagaatgtgcaggtttgttacataggtatacacgtggcatggtggtttgctgcacccatcatcccgtcatctacattaggtatttctcctaatgctatctctgccctagctccccaccccgcaacaggccccggtgtgtgatgttcccctccctgtgtccatgtgttctcattgttcacctcccacataagagtgagaacatgtggtggttggttttctattcctatgttagtttgctgagaatgatggtttccagattcatccatgtccctgcaaaggacatgaactcatcctttttgatggctgcatagtattctatggtatatatgtgccactttttatttatccagtctgtcattgatgggcatttgggttggttcccagtctttgctgttgtgaacagtgctgcagtaaacatacatgtgcatgtggctttatagtagaatgatttataagcctttgggtatatacccagtaatgggattgctgggtcaaatggtgtttctggttctacatccttgaggaatcgccaactgtcttccacaatagttgaactaatttacactcccactaacagtgtaaaagtgttcctatttctccacatcctctccagcatctgttgtttcctgactttaatgttcgccattctaactggcgtgaaatggtatcttgtggttttgatttgcatttctctaatgaccagtgatgatgagcttttcttcatgtgtttgttggctgcataaatgtcttcttttgagaagtgtctgttcatatgtttcacccactttttgatggggttgttttttcttgtaaatttgtttaagttctttgtagattctggatattagccctttgtcagatggatagattgcaaaaattttctcccgttctgtaggttgtctattcactctgatgatagtttcttttgctttgcagaagctctttagtttaattagatcccatttgtcaattttggtttttgttgccattgcttttggtgttttagtcatgaaatctttgcccatgcctatgtcctcaatggtattgcctaggttttcttctaggatttttatgtgttatgtcttacatttaagtctttaatccatcctgagttaatttttgtataaggtgtaaggaaggggtccagtttcagttttctgcatatgactagccagttttcccaacaccatttgttaagtagggaatcctttccccattgcttgcttttgtcaggtttgtcaaagatcagatcgttgtagatgtgtggtgttatttctgaggcctctgttctgttccattggtctatatatctgttttggtaccagtaccatgctgttttggttactgtagctttgtagtatagtttgaagtcaggtagtgtgatgcctcgagctttgttctttctgcttaggattgtcttggctatacgggctcttttttgggcatgtgcaaagacactcataggctcaaaataaagggatggaggaatatttaccaagcaaatggaaagcaaaaaaaaaaaaaagcaggggttgcgattctagtctctgataaaacagactttaaaccaacaaagataaaaagacaaagaagggcattatataatggtaaagggatcaatgcaacaagaagagctaactctcctaaatatatatgcacccaatacagaagcacccagattcataaagcaagttcttagagacctacaaagagacttagacccccgtacaataatagtgggcgacttaatacccaactgtcaatatcagacagatcgagacagaaaattaacaaggatatccaggagttgaactcagctctggaccaagcggacctaatagacatcgatagaactctccaccccaaatcaacagaatatacactcttctcagcaccacatcacacttattctaaaattgaccacataattggaagtaaaacactcctcagcaaatgcaaaagagcagaaatcataacagtctctcagaccacagtgcaaacaaattagaactcaggattaagaaactcgctcaaaaccacacaactacatggaaaccgaacaacttgctcctgaatgactactgggtaaataatgaaattaaggcagaagtaaataagttctttgaaaccaatgagaacaaagacacaatgtatcagaatctctgggacacagctaaagcagtgtttagaaggaaatttatagcactaaatgcccacaggagaaagcaggaaagatctaaaatcgacaccctaacatcacaattaaaagaactagagaagcaagacgaaacaagttcaaaagctagcagaagacaagaaataactaagatcagagcagaactgaaggagatacagacacggaaaacccctcaaaaaatcagtgaatccaggagctggttgtttgaaaagattaacaaaatagactgctagtcagactaataaagaagaaaagataaaagaatcaaatagacaaaataaaaaatgataaaggtgatatcaccactgatcccacagaaatacaaactaccgtcagagaatactataaacacctctatgcaaataaactagaaaatctagaagaaatggggaaattcctggacacatatagcctcccaagactaaaccaggaaaaagttgaatccctgaatagaccaataacaagttctgaaattgaggcagtacttaatagcctgctaaccaaaaaaaagcccaggaccagacggattcacagccgaattctaccagaggtacaaagaggagctggtaccattccttctgaaactactccaaacaatagaaaaagagagacttctccgtaactcattttatgaggccagcattatcctgataccaaaacctggcagagacacaacaaaaaaagaaaatttcaggccaatatccctgatgaacattgatgcgaaaatcctcagtaaaatcctggcaaaccaaatccagcagcacatcaaaaagcttatccaccatgatcaagtctgcttcatccctgggatgcaaggctgtttcaacagatgcaaatcaataaacataatccatcacataaatagaaccaatgacaaaaaccacatgattatctcaatagatgcagaaaaggcctttgacaaaattcaatagcccctcatgctaaaaactcaacaaactaagtattgatggaacttatctcaaaatagtaaaagctgtttatgacaaacccacagccaatatcatactgaatgggcaaaagctagaagcattccctttgaaaaccagcacaaggcaaggatgtcctctctcactactcctattcaatatagtattggaagttctggccagggcaatcaggcaagagaaataaataagggttattcaaataggaagataggaagtcaaattgtctctgtttgcagatgacatggttgtatatttagaaaaccccatcgtctcagcccaaaatctccttaagctgataagcaacatcagcaaagtcttagcatacaaaatcaatgtgcaaaaatcacaagcattcccatacaccagtaatagacaaacagagaaccaaatcatgagtgaactcccattcacaattggtacaaagagaataaaatacctaggaatacatcttacaagggatgtgaaggacctcttcaaggagaactgccagccactgctcaaggaagtaagaggggacacagacaaatggaaaaacattccatgcttatggatagaagaatcaatatcatgaaaatgaccatactgctctaagtaatttatagattcaatgctatccccatcaagccaccattgactttcttcacagaattagaaaaaataactttgaattttttttttttttttttgagacagagtctcactctgtcacccaggctggagtgcagtggcatgtgatcatagctcacagcaatctcaaactcctgggcttgaatgattgtcccgcctcagcctcctgaggtctcgctatggtgcccaggctggtctcaaactgctgggctaagcgatcctcctgccttagcctcccaaagtgttgggattgtacccatgagtcatggcacctcgccctgacacaaattttaaaggagtcatcaagacagtgcttcaacaagcagttatgaacatgcttgaaataaattaaaaaaaaaggaagttttcagcatagcaaataaataggtaaagaaaaaccaattggaaactttataactgaaaaatacagtaaccaaaataaaatcttaatgggtaaaactgtagcaaaactgacacaaaaaaaagaagacacaaatcatcaggagtaaaataagagatacaggttgagtatccttcatctgagatgcttgggtccaaaaatgtttcggatttcagattttttcagattttagaatatttgcattggttgagcatcccgaattcaaaaacccaaaatctaaaaatgctccagtgagcatttgctttgagtgtcttgttggtactcttaaagtttcagattttggagcatttcggatttcagattatcagatttgggatgctccaccactctggagcctgtggacatgaaaaggatactatttttaaaaatctacagaaataaatttgacaactttgatgaaataaactaagttttcagaaagtacaacatactgcaagtcactcagtatggcatagataatttgaatagtgctacaacttaatagaactttataattttaaaatgaaaataggcccgaatgatttcattggagaattctagcaaaggcttaaagaagaatttacactatttctgtgtagtctctgccagaaaataagggaatacttcctaattcatttatgaaatcagtattattttgctaccaaaagcaaagacaataccaaaaaaaaaaacctaccaataaagaccaactcctttttaagtatagatgtagataatccttaacaaaatgttaatcagtataatccaacggtatataaatagaattaaacacaatgaccaatggatcatagattctaaatgtaaaccctacaaccataaaacttaaaacatggaaaaaaaaatctctgggacatttgtgattcatttgtatcatggaatcctactcagcaataagaagggaatgtgatgtatatgcaactaatcagaactcttaaagacattatgctgagtgaagaaaagtcagctcgaaaagtcacatatgtatgactgcatttatagaacattcttgaaatgacaaaattatagacatggaggacaaataacagattagttgttgccagggattagggatggggttatgggaacagagagggaagtgaatgtgactataaagcaggtagtctttgtggcgatggaacagttttgtatcttgattgtgattggtggtagtgacacaaatctgcacctgtgataaagcgatacatagctatacacacacactgtactaatgtcagtttcctagttttgattttatattatagtaagatgtaaccatgggagaaactgggtgcagggtacaggggacctcttttgctatctttggaacttcctttgaatctaaaattatttcaaaattaaaaaaaaatttttttaaattatcctagctaaagcatcaagtgaaagttcttaagagaaaaaaagaaaacaagggaagggaaggtacaggatgtctgggaaattgtctgtgacatttaaactggtttttgcccagggggcatttgccaaatctggtttcctttcctcagcatcagagagcattgaggaacctgaggaaataataaggtctttctttctgggatgatgaatctgatacgttcttcctcttcaccttaaagctgagactcagctaaactggaaaccaccaccaatcccaccatccttcaagattgcagggaaagttgattttctgcatgcttcttagtttttaatgtgcatcagaatcacatggaggacttgttaaaacaaagattgctgggcaacatccccagagtgtaagattcagtaggtctggggtgagacttttaaaatttgtacctctaataagtttccagatgatagtgattttgctggtcgggaaccacactgcaaaaattatttgtatagctaaaaccttgtcggagtgaatatgggggcaagatcactgctgagaattttaagcaaccagctgacccttgtataatttgcagtgcgaatttaacgctgtgtaggtgatctaaaaaaaaaa

SEQ ID NO: 32544 - DNA, 3321 bp, Homo Sapiens
atggcggccccaacggccgtccaggacgtggagcgaaatgagctcgggcgctgacggcggcggtggcgctgcggtggcggcgcggtcggacaagggcagtcccggggaggacggtttcgtcccgtcggcgctggggacccgcgagcattgggatgctgtctatgagagagaactgcaaactttccgagaatatggagatacaggtgaaatctggtttggagaagagagtatgaatcgactaataaggtggatgcagaaacacaagattccactggatgcttcagtgcttgatattggaactggaaatggtgttttcctggttgaacttgcaaaatttggtttctctaatattactggaattgattactctccttctgcaattcagctttctggaagtattatagaaaaagaaggtttatctaacattaagttaaaggtagaagactttttgaatctctccacacagctgtctggatttcatatttgtattgacaaagggacttttgatgccataagccttaatcctgacaatgcaattgagaagaggaagcaatatgtgaaatctctctccagggtgttgaaagtaaaaggcttttttctaataacgtcatgtaattggaccaaggaagagttgctaaatgaattcagtgaaggatttgaacttctcgaagagctaccaacacccaagttcagctttggaggcagatctggaaacagtgtagcagcattggttttccaaaaaatgtgagactttttcttggacgaattcaggtagctacacagaatctacacagcaaagttaacctgacacagaaaatccttgtgcaaataaatgcttagtaagtacacaggatgcacatgttgaatagagtatactggattggtgaaagaaaataataataatgagcatctaagtggttgggttttagagatcaatcaagaataattttaattttcttttgtatttgaaatgtaaatagttttcttttcgattaaaaaaatttcctataactgctaaacagttaaaaactttaaagtagtaaatgagtttatagaaagcatgtattcttgatttttgtgccttggtaaagttgataactatttatgaatatttgaccaaattattccagcatcagaataataagcaaaataactttgttagtgttttgttagactgtttatgaaatataacaagaaatactattttgtgttggatggcggttatttttaaacttaattaatacctgtgaaaaggcctcttacctttatgtatataattaaacaaaatcagagaaatgtatcagttgctcaagttatcaagcctgcattttgcagctatggtcttctacacactgtaagggtagtagaaggaaagagaactaaggaatgttattatttgctagcgctatgttaagttgtcttattaagtaattgagtcctttcaatgtcttcttgaggtatgtattgcttgttcttgtttctacgtataaggaaaatgaagctgagagaagtgaagtcacttttatgaggttcaacagtacaggatggagccaggatttttatctgggtctgtctgactttaaaacacatactcttctcctagcatattctgcctcacaggtgcttagtctttgcctttgtagcatttacagtacagctggagacccatgatgattacatataaagttcagttagaaaagatgggtagttactttattagtgttcatctgtggagtatcagaatagcagtcagccaactctgtctcatatcatccttcattacttttccccatctccctactcaaagacttgcctctattaagaattttgtcattcttctgtgaaagggtagtgtaagttatataagccctcagcgatacatgcacaaagatgttctagttaggggctaatttggcaagagaaacagtttattaatgtttttgaaaagataagtcatattcatacttaataccattttgtatttgtggtaatattttaatattggagctaaatacaaatttttgcataattttttgatgattttcagctttgtgggcctattgggttacataagtgactttttgtttggcaaatgttactcctgtattgagtaagtctaacattacgtcccttttctttttggggaggggtagccagaggagtgagtttttcatttagatcaacattgatcaaccattaagacaagatagttgaagacatgtatgtggactgtcaacaaaaataacattttttgaaaagcttttattttcaacatgtaaaaagtgagaaattacttcaaaatatatgcaatttaaattttttagaagattgtgttgattttaccaagacaggagatcttaaactgtagaaacttttatagtttttgagatcgggtctttgttttttttcacattaatattctttgatttcaaatataacatagataagtactcttagaattttgagttaagtatatgctattttaatgtgctaatcctacaaactaggctttctgtgtgactagactgagatgttgagtttgattcacaaaaagcttagaatggttctttgttgaaaagcttttcgagtcactatttggggcatgttagtgccatttgcaaaggtgaaggttttctttttttttttttttttaaccatagagcttttgataaggttaggaaaaggaagttgtcatctcttcttattactctaatcctgctggaagctagcttcttagggactaaaaccagaacaaatggaaggtccaaaaatgctaataagaaattagtattttcacataataccaaactgtaaaaaccaggccagcaagtgtcaccaggttcctgaaacaaaccataaatacattatttaacttagtattgttaaattgtataaatatgtgggtaactgtgacagaaattatgcacttataaaaagcagtaagttacatagtgaatgctgttttctgtggataagaagctggaattgtgatttcatttaatcgaaagacgcttactttgaggaaacttgtttgaaatgcaaacgcgatttctctgtggagccttcacggaattgctgcttttcactatgattattgctgcataacaggccacttctgtgtgtaggaagtgcgtgtgcaagtccaaagggaattgaggcctgaatgggtgggttatcccaattaacaaatacaaagttttcagtacattttgttttaagccaggtgcacaagttagagttgctttttgggactggcatttatgtatgtgagaatcaaacctgatatcactcttggcagcctgactaaagccatttaaaaat

SEQ ID NO: 32545 - DNA, 3128 bp, Homo Sapiens
ggctgagggtccgcgccgccgcccgcccgctccttcccgctcggccgcggcctcagggacggatactccagcgcgcggttccaaccgaggcccgtggtttagccccacgaagatgaactgggcacccgcaacgtgctgggctctgctactggcggccgccttcctctgcgacagcggcgcagccaagggcggccgcggaggtgcgcggggcagtgcccggggaggggtccgcgggggtgcgcgcggggcctcgagggtgcgcgtgaggccggcgcagcgctacggtgccccgggctcctccctgcgcgtggctgccgccggggcggcagccggggcggcggcgggagcggccgcgggcctggcggcgggctcgggctggagaagggccgcgggacccggggaacgcggcctggaggacgaggaggacggggtgcccggaggcaacgggacaggccccggcatctacagctaccgggcgtggacttcgggcgctggacccacgcgcggcccgcgtctctgtctcgtgctgggcggcgccctcggagccctggggctgctgcggccctaggcctggctgggctcggggaccacatctggcccccggcccgcgccatcccccaggatcctccggcctgggctcccccttcctcccttgcccacggtcttggagccccactgggtgcaggagctgctggctgtccctgtggacccgccatccaccgtcctgcccacgccgcctcagcctgccacctcccacctagaggagaccatgggccctgccccacccactccaggatgttagggtcccctcagccaaaaaggcagctgcctgtggctcctgtaccaaccgcccagccacgctccatcgccgcccaaagggaggtgccaaggccaggaacccaagccaccccggctcccctcgcctgcccaggggccgtggtgactcacgggcagggaggcgacatcaggctggttctgccactgagcccctgaggaatctgaccctccccaaaagaagcagtgaaatggaccaaaggacttaagaatttggggggaagtgagggaaaaacgttaggtgctaaccacctgcccagaagagtggatctcacagcccaggaacattcccaagcaggaaaaccgtccgtccgaggaacgtccatcctggctctctgcggctggtgggaaaacacaccctgccctgaggggctgtccaggccttctcccccacaccctcaggccgagatccgtgagagacccactttgctccaacaacttgaaacaagtcactttaccctccttaggacccattttgggggggaaaaaccaacacattccagagctttccaagtcctttgaacttcaggttcacattcagggatcacacagttctgcctgttctcagggcacagcaactgccaatcccgctgaagaggcctccctgggcacagcacaggctgcacggtgcacgcatttccctgaaggcagccccttcttcggaagcagctgttccaggcctcggaacagggcctgggtatccgcgtggtgggctggcagctgacggcctgctcagtggagccaggagctaactcagaccccaaagcaagcagggggccagtggcggggcccagcgcccagcaggacacccatgcaagaggctgagccccccaacatccaaggacaggagagacatggagtggcgctggacagtcacgacaaggacttgcctccagcactggacacacctgtgttaagaccagccctctgcttcccagtcccgccagcctggggcatcctccatgggctcagcactgagaggtcttgggtctgccacgttctctagctctccagtcacccactcatccagggtaggaggggttctccctgccccccgccgtggccttgggatctcaccctctccatgtcctggggacagcctcgccctcagccggactgcatccctcctgggcctgagcctcgggactcagtggacaccaaagtcaagaccagcacccaccacgggccctgccagcctctgccttccccagctggcctgggttctggcctgggtgaggatctggaagctgttggcaggactcaaccaagcactgctctctagctccagggcactaagccacaggaggcagcgccctgcagcctcccgtccacactgccagcaatgcccctggcccagtgagcccagacgctcctccaccccttccagaccaagctcaacgcctccaagaccagcaggccaaggccaagccctgccccagatcctcataggcagagaagcccttctgacatttcccccaggaggcagggggtggtctgagtctcctcacagcagagagacccaccggagccccctcaactttgcagatgcccacctggaaaatgggctgagctgcaccagaccctcacacaccacagcactgcaagctgatggaatgttccagttatgatggacacttcgtgatctgcaatgactgttgattcagcacattagcatctgacacagccaacctgaatacttcctgccccaggcggtcagggttatggcacgatgcaggtggcactcaggggctaacttcaggctgatgagtgtgtggggtatggggcagcagaggcagccagccagcaaagaggggccactgagcaccagggccctggtggaggctgctgtgggacggtcaggccaccaccgcaaagaggcagccggagcttctgcacaggatgtccctggccccaggtcctgcagcaccttagtccatactaccagccccacccaccttccttcctcttccctcttctaggacacaggctgtggaccccttcaggtgcactataatggggctggaggggcccccacatctctcagccccactaatgcagaatcccactacccgtgagctagaaggtgctcagaggccaggggtctctactgcccatgccgggcggccttccagtcattgcacagcaaagccatgtgcagggcgtccccctcaaccctgccctgaacatgccccagggcactgaggggcgaagccagtgcttgggctctgctgctgggagtctctggtctgtgtctgtgtgtgcctgtaagtgtgaaataaacctctctgatggca

SEQ ID NO: 32546 - DNA, 2855 bp, Homo Sapiens
aggagcacccgccgctggcagccactctcctggccgccaaaccccagctggaactccggccacagccagcatgcagggcgaagagagcctccggatcctggtggagcccgaaggggacagcttcccgctgatggagatcagcacctgtgagaccgaggcctccgagcagtgggactatgtcctcgtggcccaacgtcacacccagagagacccccggcaggcgcggcagcaacagttcctggaggagctcaggagaaagggcttccacattaaggtgatccgggaccagaaacaggtcttctttgggatccgtgctgacaacagtgtctttggcctgtaccgcactttcctcctggagcctgaggggcctgccccccacgccgagctggccgcgccgaccaccatcccggtcaccacgagtctcagaatccgaatcgtgaacttcgttgtcatgaacaacaagacctcggctggtgagaccttcgaggatctgatgaaggacggggtctttgaggccaggttccccctgcacaagggggagggacgcctgaagaagacgtgggcgcggtggagacacatgttccgggagcagccagttgatgaaatcaggaactactttggggaaaaggtggccctgtacttcgtctggctgggctggtacacctacatgctggtgccggccgccctgacgggcctcttagtctttctgagcggattctcgctgtttgaggccagccagatcagcaaggagatctgtgaggcccacgacatcctcatgtgtcccctcggcgaccacagccgcaggtaccagcggctctcggaaacctgcacttttgccaagctcacccacctctttgacaatgatggcacggtggtgttcgccatcttcatggctctctgggccacggtgttcctggagatctggaagcggcagcgcgcccgcgtggtcctgcactgggacctgtacgtgtgggacgaggaacaggaggaaatggcacttcagctcattaactgccccgactacaagctccggccataccagcactcctacctacgcagcaccgtcatcctcgtcctgaccctgctcatgatctgcctcatgatcggcatggcccacgtcctggtggtctaccgcgtcctggcctccgcgctcttcagcagctcggccgtgcccttcctggaggagcaggtgaccacggccgtggtggtgaccggggctctggtgcactatgtgaccatcatcatcatgaccaagatcaacaggtgcgtggccctgaagctttgtgacttcgagatgcccaggaccttctcggagcgagagagcaggttcaccatccgcttcttcacactgcagttcttcacccatttctcgtctctcatctacatcgccttcatcctgggcaggatcaacggccaccccgggaagtccacgcgcctggcgggcttgtggaagctggaagagtgccacgccagcggctgcatgatggacctcttcgtgcagatggccatcatcatgggcctgaagcagacgctcagcaactgcgtcgagtacctggtcccgtgggtgacccacaagtgccgctctctgcgggcctccgagtccgggcacctgccccgggaccccgagctcagggactggcggcgcaactaccttctgaacccggtcaacaccttcagcctgttcgacgagttcatggagatgatgatccagtacggcttcaccaccatcttcgtggccgccttcccgctggcgccgctgctcgcgctcttcagcaacctcgtggagatccgcctggacgccatcaagatggtctggttgcagcggcgcctggtgccgcgcaaggccaaggacatcgggacctggctgcaggtgctggagaccatcggtgtgctggcggtcattgccaatgggatggtcattgccttcacatctgagttcatcccccgagtggtctacaagtaccgctatagcccatgcctgaaagaaggcaactctactgtcgactgcctcaagggctacgtcaaccacagcctgtccgtcttccacaccaaggacttccaggaccctgatgggattgagggctcagaaaacgtgactctgtgcagatacagggactaccgcaatccccccgattacaacttctccgagcagttctggttcctcctggccatccgcctggccttcgtcatcctctttgagcacgtggccttgtgcatcaagctcatcgccgcctggttcgtgcccgacatccctcagtcggtgaagaacaaggttctggaggtgaagtaccagaggctgcgtgagaagatgtggcatggaaggcagaggctgggtggggtgggggcaggctctcggcccccaatgcctgcccatcccaccccagcatccatcttcagtgccaggagcacagacgtgtagggccagagcccgtccagaggccaccaggagctgagacagtgccaccaccagcacctcccacaagcccaccgctgtgcgtgttgaggggtgctgtgagaaggctgtgcccatgtggggccgcaggaatcccctgtatgttcagggctgtgagctgccaccctattccgcctgctccgtctttgtgggggctctcaggcttggcacagccctgacttgaactctgggtgaccctgggcacccacagaactgggagtgagggctcctcaggcagccacaaggcaggaaaactggcgcaaatttcctgggcctccctctgacttctgggcgccagatcctgccgtgcccccatcctggctgttgggggtgtcctgagcccacctcgctggcctgttcccttcagccaacccgtttctgcagtaaaattaagcctgtctgt

SEQ ID NO: 32547 - DNA, 6522 bp, Homo Sapiens
atggggtcgcaggtgttgcagatcctgcgccagggggtgtgggcctcgctcaccggcggttggttcttcgacccgcaccagagcaccttctccaactgcttccacctctatgtgtggatcttcctgctcatctttcccttcttactgtacatggtcctgcctcccagcttgatggtggccggcgtgtactgcctcgtggtggctgtcatctttgctactatcaagactgtcaattatcggcttcatgccatgtttgaccagggcgagatcgtggagaagcgcagctctaccatgggggagctggaggaagagcctgcccagggggacagcaatccacccagggaccccggagtggagatgacagtgttccggaaagtcagttccacacccccggtgcgctgcagctcccagcactctgtgtttggcttcaaccaggtctcggagctgctgccccgaatggaggactctgggccccttagagacatcaaggagctggtgcgggagcagggcagcaacaatgtgatcgtgacttctgccgaccgagagatgctgaagctcagctcgcaggagaaactgattggagaccttccccagacgcctccaggggctgtcccagacccctctcttgccagtacagactcttcagagccttctcccctggctggagatggagcgccctggagtgggagcagcatggctgacactcccatgagccccctgctgaaggggagcctcagccaggagctgagcaagagcttcctgaccctgacccagcctgaccgggccctggtgaggaccagcagtcgacgggaacaacgcaggggggcaggtggctatcagccccttgaccggcggggctcaggggagcccacgccccagaaagccggctcctcagactcctgcttcagcggcactgacagggagacattgagcagcttcaagagtgagaagaccaactccacccatctggacagccccccaggggggccagcccctgagggcagcgacacagacccaccctctgaggctgagctgcctgcctcaccagacgccggggtcccctcagatgacacgctgcgttcctttgacacggtcattggagcagggacgccaccgggcctggctgagccgctcctggtcgtgcggcccaaggacttggccctgctacggcctagcaaacggcagccacccctgcgaagacactctccacctggccgtgcccctcgacggcccctgcttgaaggtgggggcttctttgaggatgaagacactagtgagggcagtgaactgagcccggcctccagtctccgatcgcagcgccgctacagtactgacagctcctcttctacttcctgctactcccctgagagctcccggggtgcagcagggggaccccggaagcggagggccccccatggggctgaggagggaactgctgtgccccccaagcggccatatgggacccagcggacgcctagtaccgccagcgctaaaacacatgcccgtgtgctgagcatggatggggctgggggtgatgttctgaggcccccactggctggctgcaaggcagagctggaggcccaggttggggtggagcaggctgctagtgagcctgttgtgctgcctgctgaggcgcgaaggggacccgctgccaaccagcccggctggcggggggagctgcaggaggaaggtgctgtggggggagcggccgaggagactggcaggcgggaccgctcaagcagtgtgaggcggacccaggccattcggagacgccacaatgcaggcagcaaccccacccctccagcctctgtcatgggctcgccgcccagcagcctgcaggaagctcagcggggccgggctgcctcccactcccgggcgctgacgctgccctctgcgctgcatttcgcctcttcactgttgctcacccgggccggtgccaatgtgcatgaggcctgcacctttgatgacacttctgagggtgctgtgcactatttctacgatgagagcggtgtgcggcgttcctacacctttggcctggctggaggcggctacgagaaccctgtagggcagcaaggggagcagacagctaatggagcctgggaccgacactcgcattcctccagcttccactcggctgatgtccctgaggctacaggcggcctgaacctgctgcagccgaggcctgtggttctgcagggcatgcaggtgcgccgggtgcccctggagatcccggagtttgacctgctggaccaggactccctgcacgaatcccaggagcagacactgatggaagaagcgccaccccgggcccagcatagttacaagtactggcttctccctggccgctggacctctgtgcgctatgagcggcttgccctgctggctctgctggaccggacgcggggagtgctggagaacatcttcggcgtgggcctgagcagccttgtggccttcctgggctacctgctgctgctcaagggcttcttcactgacatctgggtcttccagttctgcctggtcatcgcctcctgccagtactccttgctgaagagcgtgcagcctgatgcggcgtcccccatgcacggccacaactgggtgatcgcgtacagccgtcctgtctacttctgcatctgctgtctgctcatctggctgctggacgccctgggctcagctcagcccttcccacctgtctccctctacggcctcacgctcttctctgcctccttcttcttctgtgcccgagacgtggccactgtgttcaccctgtgcttccccttcgtcttcctcctgggcctcctgccccaggtcaacacctgcctcatgtacctgctggagcaaatagatatgcacggcttcgggggcacagctgccaccagcccgctcacggcagtcttcagcctctcccgcagcctgctggctgctgccctgctctacggtttctgccttggggccatcaagactccgtggccagagcagcacgtccctgtcctcttctcagtcttctgtggcctcctggtggcactgtcctaccacctgagccggcagagcagcgaccccaccgtgctctggtctctgatccggagcaagctgttccctgagctggaggagcgcagcttggagacagcccgggccgagcccccggaccccttgccggacaagatgcgccagtcggtgcgtgaggtcttgcactccgacctggtgatgtgtgtggtgatcgccgtgctcaccttcgccatcagcgccagcaccgtctttattgccctgaagtcggtgctgggtttcgtgttgtacgcactggctggggccgtgggcttcttcacacattacctgctgccacaactccgcaaacagctgccctggttctgcctgtcacagcccgtgctgaagccgctggagtacagccagtatgaagtgcgcgggaaggcaggcatgtggaagccaggtgcagagtcctggcctctccacacaggtgccgcccaggtgatgtggtttgagaagctgtatgctggcctgcagtgcgtagagaagtacctcatctaccccgccgtggtgctcaacgccctcacggtggacgcccacacagtcgtcagccacccggacaagtactgcttctactgccgggcgctgctgatgaccgtggctgggctgaagctgctgcgctcagccttctgctgccccccacagcagtacctgacgttggccttcaccgtcctgctcttccactttgactacccgcgcctctcccagggctttctgcttgactacttcctcatgtccctgctttgcagcaagctgtgggacttgctgtacaagctgcgtttcgtgctgacctacatcgcgccctggcagatcacctggggctcggctttccacgcttttgcccagccgtttgccgtgccacactcggccatgctgttcgtccaggccctgctctcggggctcttctccacgcctctcaacccactgctaggcagtgccgtcttcatcatgtcctacgctcggcccctcaagttctgggagcgcgactacaacactaaacgtgtggatcattccaacacccgcctggtcacacagctggacaggaaccctggcgctgatgacaacaacctcaactccatcttctatgagcacttgacacgttcgctgcagcacacactgtgtggggacctggtgctgggccgctggggcaactatggccctggtgactgcttcgtcctggcctctgactacctcaacgccctggtgcacctcatcgaggttggcaatggcctcgtcaccttccagctgcgtggccttgagttccggggcacttactgccagcagcgcgaggtggaggctatcaccgagggtgtggaggaggacgagggctgttgctgctgtgaacctggccacctgccacgggtcctgtccttcaatgctgcctttgggcagcgctggctggcttgggaggtaacagccagcaagtacgtgctggagggctatagcattagtgacaataatgctgcctccatgctgcaggttttcgacctccgcaagatcctcatcacctactatgtcaagagcatcatctactacgtgagccgctcaccaaagctggaggtgtggctcagccatgagggcatcacggcagccctgaggcctgtgcgggtgcccggctatgccgactcggatcccaccttctcgctgagtgtggatgaggactatgacctccgcctgtctggcctctcgctgccctccttttgtgctgtgcacctcgagtggatccagtactgcgcctcccggcgcagccagcccgtggaccaggattggaactccccgctggtcacgctgtgttttggcctgtgtgtgctgggccgccgggccctggggacagcctctcacagcatgtctgcaagcctggagcccttcctctacggcctgcacgccctgttcaagggggattttcgcatcacctccccacgtgacgagtgggtctttgccgacatggacctgcttcaccgcgttgtggcgcctggggttcgcatggccctcaagcttcaccaggaccacttcacgtccccagatgaatatgaggagccagcagccctatacgatgccattgcggccaacgaggagcggctggtcatctcacatgagggtgacccagcatggcgcagcgccatcctcagcaacacgccctccctgctggcgctgcgccatgtcctggatgatgcctccgacgagtacaagatcatcatgctcaaccggcgccacctcagcttccgagtcatcaaggtgaaccgggagtgcgtgcgcggcctgtgggccgggcagcagcaggagctggtgttcctgcgcaaccgcaaccccgagcgtggcagcatccagaacgccaagcaggcgcttcgcaacatgatcaactcctcctgtgaccagccgctgggctaccccatctacgtgtcgcctctcaccacctcgctggctggcagccacccccagctacgggcactgtggggtggccccatcagcctgggtgccattgcccactggctcctgcgcacctgggagaggcttcacaagggctgtggcgccggctgcaatagtggcgggaacgtggatgattcagactgtagtgggggcggtggcctgacctccctcagcaataacccccccgtggcacaccccacacctgagaacacggcaggcaatggtgaccaacccctcccaccaggccctggctgggggccgcggtcctccctgagtggctctggtgatgggcggcccccacctctgctgcagtggcctccccctcggctccctggaccaccccctgcatcgcctatccccacagagggtccccggacctcacggccccctggcccgggtctcctcagttctgagggccccagtggaaagtggagcctggggggccggaaggggctgggaggatctgacggggagccagcctcagggagccccaaaggaggtacccccaaatctcaggcgcctctagacctcagcctcagcctcagcctcagcctcagccccgatgtcagcactgaggcctcaccccccagagcttcccaggacattccttgcttggacagcagtgcccctgagagtggcacacctatgggtgccctgggcgactggcctgcccctattgaggagcgtgagagcccggcagcccagcccctgctggaacaccagtactgagctacctggcgcccactggaccacctcctaggattcagtaacggacctgctctgctgcctctctgctggaccacagaactgagtggctttggcctacatgtctgaaccctgacctttggctgccttggccagagtaccaaaactgagtgacccagacctctgaccttgacccctgatctctctcatccccagtccagggcctgggctccccagatggaggcagtcagcctcccagccaggccctaagagccaaaccatgggctggtcccacttggagcctgtggccaggaccacctcagcccctgggcctgcactgcctgcaggtgt

SEQ ID NO: 32548 - DNA, 4652 bp, Homo Sapiens
ggcggcgcaggcggccgaccgggagcgcggacaacgcggctgcggctaacccgccgcccggccggctgagaccctcgcgcccctgctcctggggcccccgccccctcgccgtctccgcctccttcctcacacacccccgggccgcccgggccgcccgggccccaagccttcccggtgctcctccctcgtctcctcacactcgctctctggctggggtccgcctgccgcccgctggcctgctccctccggggcaagtcttgcttcttaagcgctcctttcacacacgcgcgcgctcgctgggccgtcccctcctctccggccctcctcctcctcctggtccttgctaacgctgccgtcggggaggattgatgtcccttcagcatcatgcagccgccgccgaggaaggtgaaagttacacaagaactgaaaaacattcaagttgagcagatgacaaaacttcaagccaaacatcaagcagaatgtgatttgcttgaagatatgaggacattcagtcagaagaaggctgctattgaaagagagtatgcacagggtatgcagaagttggctagtcaatacctgaagagagattggcctggagtaaaagctgatgatcggaatgattacaggagcatgtatcccgtttggaaatcttttctcgagggaacaatgcaggtagcccagtctcggatgaatatatgtgaaaactataaaaacttcatttctgagcctgcaaggacagtgagaagcttaaaagaacagcaactaaaaaggtgtgtggaccagttgacaaagatccaaactgaattacaagagacagtgaaagatttagctaaaggcaaaaagaaatactttgagactgaacagatggctcatgcagtacgagagaaagctgacatcgaggcaaaatctaaacttagtctttttcaatcaagaatcagtttacagaaggcaagtgtaaagttaaaagcccggcgatctgagtgtaattccaaagctacccacgcaaggaatgattatcttcttaccctagcggcagcaaatgcacatcaggatcgctactatcaaacagatttagttaacattatgaaggctcttgatggaaatgtgtatgatcatctcaaggattatttaatagccttcagccggactgagctagaaacatgccaagctgtgcagaacacattccagtttttattagaaaactccagcaaggtggtccgggactacaatcttcagctgtttttgcaagaaaacgctgtatttcacaaaccccagcccttccagttccagccttgtgacagtgatactagccgacagttagaatcagaaactgggaccacagaggagcacagtctaaataaggaagctcgaaaatgggccacacgtgtggcacgtgagcataaaaacattgttcaccaacaacgggttctaaatgatctggagtgtcatggagctgctgtatcagaacaaagccgagcagagctagaacagaaaatagatgaagctagagaaaatattcgtaaagcagagataattaaattgaaagctgaagcccggttggacctgctaaagcagattggtgtttctgtggacacatggctaaagagtgccatgaaccaagtaatggaagaactggaaaatgagcgatgggcccgccctcctgcagtgaccagtaatggcactttacactcgcttaatgcagataccgaaagagaagaaggcgaagagtttgaagataacatggatgttttcgatgacagcagttccagcccttctggcaccttaagaaattatccactcacctgcaaagttgtttattcctacaaggcttctcaaccagatgagttgaccattgaggaacatgaggtgttagaagtgattgaagatggagatatggaagactgggtaaaggctcgaaataaagttggccaagtgggttatgtgccagaaaagtacctacagtttcccacctcgaacagcctcctgagcatgctgcagtccctggccgctttggacagtcggtcacacacgtccagcaattccacggaagcagaactcgtttcaggcagcctcaacggagatgccagtgtatgttttgtgaaagcactttatgattatgagggccagacagatgatgagttatcttttcctgagggagcaataatccgtatcttgaacaaagaaaaccaagatgatgatggcttctgggaaggggaattcaatgggcgtattggagttttcccatcggtgctagtggaagaactttcagcctcagaaaatggtgacactccatggatgagagagattcagatctctccttcccccaagccacacgcctccctgcctccactgccgttgtacgaccagcctcccagcagcccctaccccagcccagataagaggagctccctgtactttccccggtctccttcagcaaacgaaaaaagccttcatgctgagtcaccaggattctcacaggcatcaaggcatactcctgagacctcatatggcaaactgcgacctgtccgggcagctccccctccacctacacagaatcaccgaaggccagcagagaagattgaagatgtggaaatcacactggtgtgatgatgggcttgcccatccattactgctacaatcaaggccaggcttggagtttggccagtcttgttttttaggcacctttgcatgatgatgactcttgaacagagcaaaaaacaaggaggattatgtgtgactgggtggcctggtagactcctcccacgttttgaatatttcgtgccttttttttttgttgtcattttctatgtcatttctcctaccatagcacaaatcctagcggaccctaggagcaaagaggggggcagccctcatgcctaacagtggtctgtttttatatgagactcaagaacaggcctcattccagggcacagtccctaaattactgatcatgtgcactcgtacagtatattactgtgaccacaaggatgtggcaaagattctcatctttcttcaagtggcttttgctcatctgattgagaattaatcagatcatgttggctacataaggaaacagaaggagggatttcaggagaggctggctcctccccaaggttagtccccagactgagaaagtgaaaccttattgggaaaaattggactgccctgaatttagcaccaattgcattaacgcacatctcttccacaactaacagacttaaaataacagtgtccttcgtattaatatctgtgccattcatttagaattagcagagctaatatggaggggctgaactagtagccacatcttgttcatcacatagactaatagaaaggaggctgtggctaaagcagaaatggaacttccggatctgaaattagccaatataatgttcttttgtatttgggtatttttcatcttaatttttacagcatatactcttcttaccagtatccttagaatccaaatgtctagataagttgaggacacatacctgcattgttgagcttctctactggggacgccccggcattattttattcccaagccagcagaccggcccagacagccaggctgtggctggtccagaccaactgctatggtggaaaatgcagcttccaggtcccactaccctgacatttccgtggaaggaagaacctggtggctcgtggaggaaaccagctttctatgagaaaggactgaaggattgcgcaccctgcacaagtacagattgaccaggaaaagacaagtgtcttctgtgtgtcacagggaaagccaggagtggccttctctgcaggccagcaagcctgcagcagcaggtgcccccacgtcaggtgctgactgtctgctgtccgctcctgtagaaggtagggagcacaatacctagggactaagggatgttcgccggttgtggtttgttttttttttttttccttggttaagaaatcaaatttgcagaatttaatctacaagttgtattatgctttgaaaactccatccctcctaagaatcttaaaaaacttgaaatgctcgccaaatgtccccatgggatttttgaccaaaagtaaggtgataactgaagaaatttttagttctttgatcacttcagtgacaatacccattaatgaatcttctccatgatttggggttttttttcgttgttgttttttacacttcttaacctgttgatctatttgaggtcttttgtgtttatcaaacttattcttaagtttaaaaaagaaattaaaagggtggtttttttaagattttaaagtttgctaacatattaaaaatcttcaaatgcttattaaatagagcagttcttgccacccagtcttgtattctgtctttagctagccaaattgtccttgaatttgggttttccacaacctcaaagggttatttgaaatcttttgttgtattttaaaatattttttggaagagctgctaattttattttaaaaaacaaagttgtgaaaacatgcctcctttttaaaaaataacccctccatccaggatatggaatccagcaccacagtgcacaggtcagggctcggagggagcctctgtgcagatgtgctttctttacagtggctgtaaaaagtttgtatttattatgtataaaatgttgaataataaaaaaaatggaatt

SEQ ID NO: 32549 - DNA, 4767 bp, Homo Sapiens
atgggcactgacaacagtgcacccagccccccaggagaaaagagatggacacgattaaatataggaaaaatcaaattaccgaaaaaggttagacgtcccggccgtcggttgccgcctacactgtctgccgtcgcgtcgcagttactaaggcgtggggaagatagcggcaggcaccgcagtggagcggctccgagatccccggggggctcgcaggcgcgcatccctcctgactgggacgtcgcctccgcagacccctcggaggctgaagcgacgccggaggcaggccaaggacactggttagtggttcagaaaggtaacctcaagaagaagcccaagggtttggttggagcacaagctgaacgtcgggaaagcctgaaggcgacttcttttgagttcaaggggaagaaagagtctcggcgggaaaatcaggtggaccttcctggacatatcctggaccaggcttttctgctgaagcaccactgtgtgaggaagccatcagatctgtgcaccattaatgtgagtggcctgaagttctccaaggccaaggaaaatgacttcaagcattttcattctgtgatttatatcaatgcctcagaaaacctgctgcctctagaggcatttcacacgtttccagccctaaaggaactggatctcgcatttaatggcatcaaaactatctacgtgaaatatggagactttaagttattagaattcttggacctttccttcaacagcctgactgtggaggccatctgtgatttggggattctgccacacctccgtgtcctgctcctcacaggcaatggccttacctccctgccgcccaatttggccgtcgcagaacaggaggcatctgtaacatcgctgacaagcaagaggtacatcctgaggttcccagcgctggagacactgatgctggatgacaacagactctccaaccccagttgctttgccagcctggctgggctcaggagactgaagaagttaagcttggatgaaaacaggattatcaggatcccatacctacagcaagttcagctctatgacgagtcagtagactggaatggaggcaggggaagtccccataaagagccccaattcatgctgcagtccaagccaaggatgcttgaggactcagatgagcaactggattatactgtactgcccatgaaaaaggatgttgaccggacagaggttgtgttttcatcttaccctggattttcaacctcagagatcgcaaaagaggatgctgtcctaccagtagctctcttcccatctctctgcgagttcgtctttcataacaaccctctggtggcccatacacgaggggtccctccactgctgaagagcttcctccaggagcgactgggaatccacttaattcgaaggaagatagtaaagcctaagcatcatgttttgatgtctcggaaggaatcatggaaggtgaaaagcgaaatcccaaaggtgccgaagcagcctctggtgctccatcacccgcgcatgacgacaaccaagtctccctcaaaggatatgctagagccagaggcagagctggctgaagatctgcccactaccaaaagcacttctgtggagtcagagatgcccactgagaacctggaaggccattccccgtcttgccggaccttcgtgccactgcctcccatctgctccaactccactgtgcatagtgaagagaccctgtcccacctgagtgacacaactgtccgcctcagcccagagcgcccatcagatgaggactccaagagcacagagtccatcttcctgacccaggtgagtgaactgccttcctccgtcatccataaggatgatttagagttaaaggagaaagaccaaaagaaaccaccaacggcacccagagaggtgaaagggactcggaggaaactcccaactgccttccttcccagcaagtaccacggctatgaagaactgctgacagccaagcctgatccagccttcattgagccaaagggaatccagaagaatgcacaagccctgcaacaaatgctgaagcacccactcctgtgccactcctccaagcccaagctggacactcttcagaaaccctatgttcacaaagagaaacgggcccagagaatcccgattccacccccaaagaagactagagcccaacttctggatgacatcttcattcgcttgcgggatccccggaacattacagaggctccactaggtgctgtcctgcaccagtggacagaacggcggctggtgaaccacaagcagtacctggaggccaagaggctgttgaaggagttccaggcacgttaccggcagctggtgagtggctctctgcgcacagtgttcgggactaccccgctccccatggcctgcccagcgctgagtgagagccagcccaagttcggccacttcctcgagttcatggatgagttctgccaggagcccacagccagtgactcacaaggctagagctgtgcatgggggctgtgtgcaccacccggcctgtgccccagctctccccgagggctctgtgccctggaccgcacctcaaggttgaccagccggccacaggcctcagagctcagctgggccccacttgctggccacaaggtggcatccccttgtcaggatctcccctccttggcccaggcatgacctggtgcctggcccagcggcaataaagagtgggtgcacagggcaatagactgggtgccacatgcattctttcttggaacccaggccacagcagcattgtcacacttccctctaaaaatggttttccagttcagatgcaacagggatacatttgttctctgttgtatgagaaactgacaccaaggggatcttaacaaattcctgaacaatggctccaaaaaagggtatttttaaaaaccagatcttgtgagtacagccctaatgtgcagggacagtgtcatcctgtatattcgttctttactcagactctttcttggttccttcattaggagcatgaatggttgaatgtgaacatgacagtaaattggagcaaactgtaaactggacataacttatgccaaaagacgtagttgtacaccatggaaaccccatccctgctcctaatctctactgccattctgaatgccaaagcaagacatccaacatggggcatctcccagagcacatacagcaccaaaaatccacacacagcctaagcttaacccatgtttttgtctgagattgttcaccagagacaagactctgactataaacagaacatccactttcatgagtttcctttactgtattctcaacttgggccttgcttcaagcaggcaaacatacattgaagaatgcactttggtactgtttaaataacaacacatcagcccacttgattccatgccatgtccttgctgacagaaacatccccaacagggcatgccctggtccaagtcctctgtctttgtcaaaatgctcttctgatgagttggagaggaggcagccagcagtggcagtccacaaggatccaggtaccttctccaatcctaaagcagacagcaggttgaataaaaccaatacacaacctattttctaggcaggaggggaaaaggcccttaggacaataatatttgtacaaagagttgagagtaaacaaacagtgtatcaggttcaaaaaaaaaaaaactattcgttggcatttaaatttttttcccttgcatagtatctattctctcactaggacttttaagtgctctgctggaggctcagcgttggtaataccatgtttgatgcaaacttgaacccaatgctctcattggtggcacagctttggagggtggtggccccaagaaggggcaatctgcctgctgctatattaatctggaaccagggccaacagctactcttgaactatggtatttgaagagcgagttcattgcctgttttaccttaaatgacaggaaaggaagatgaacaaaccttgctttgccttggcttcaaactagttcttgatttaagacaccagaaagggagagagggagtctgcttagagtttgaggttgcctctcacaagatgacagttaaaagttgccaccttacttaaaaggcattaaggaggcatttactcacaaaggagagagagtaaatttttttcttaagaggaaaaaaatactgataatacatagaacaatctgcacatccagtcttggcactttttccaatttgactgatctctaaactggtgacccttgcatatatcttagtctcttttctacaatcttcttcagaaagctacagcagctaacaatcatgtataaagatgcatttcctagatcatcttcagaagaaaatctcttcagcactttccctagaatctgtctcctgaccaccccgccccagacctgctttctcttttgagaattcataaccaggtatgtttagataccagttcaaaagaccactctatgggttgatgaggaaaaggctgcctgaggacaatttaagaccataatgagtttccaatttttaaagaaaatttggctagctggcttttaattcttaattaaaatcattaaatttaattaaaattattccaatcaaaatatatcactttccaagattccacattcatattacttacttatactatggagactttctctacctgagcatgtattcaggggctataggtacatttaactctaactaactgaaaaaaatcaggaagaaaaaactattaaaataaaataacctcctaaatcatttgggggtatccccatcattgaaaaaaat

SEQ ID NO: 32550 - DNA, 4566 bp, Homo Sapiens
gttgtcaagatggcggctgcagggttgctgccgccccatctgctattgcccggcgaggtcgccgctgcctcagctgccatcgccgctacaggcaccagtgccgctgcgcgggagctagggctgtcgaggccaacccttccgcgcccgtgacgcggggcctgagagacggagtgtagggaggggccgagcaggaggaggaggaagccggagctgccatgagggaggttctgggggcgagcagacaggcggcgctgaagtgaaggatgctggcggggaggcccggaacccggagcgcggtcggggaactgggcactgaatcatcggacaacctcgacagagcccccctcggccctcgggagagcggcgggcatcaccgacctggctcttacctagatatgaaaatccatctggagaaaaatttagaagaagagcgccagatattactgcagcaacaaaaaatatgtcgaaatcgagcacgtaaatattttgtggagtcaaatcggagaaaaaaagcttttgaggagaaacgaaaagaacaggaagaaaaagaacaccaaattagagaacaaatacttcaacaaagaaaacagaagtttgaagaagttactgaaaaattccagcgtgcccatgttcctctttcacagcggaggaaagcagtttcccgaaaaccagttcctccattagaagaggccctcaaacaaattcaggaatccaacttaaaatcagaagtaaaccttcccttttcccgtagaccaacaataaactggagagctatagattctgccttgccttccgcattatcaaaaaatgatcacaagcatcagaaacaactcttatccaaaatcaattgtgagaaagaaatgaatgaaaacatgagggcaaccttggctactagcaaaaatgtgttccagcttaaactggaggaaactcagaaactcctcgaagatcaacatctaagcaatttgcaaaaatttggtgatgaagttaatcagataaccaattctgaaaccctctcaagtatagacagtcttgaggctacagagcatgaagaaatatatttaacacttaataaggagcattccacatccatccagcggaataccatttccctcaaaccagcaaatatgcaatcaactaatctcagctgctttgatgaagataaactggcattctctaaaactcaacatataaataattggcttacaaatttagatgcttcaaatactcagaatgtcacagctttctcagatattttaagtaaatctaatgttctgccttcatgggaatattttaatagtaaagaacaaaatccatctcctttgaatggaacagtggaaagagccacaaatactgctaataattcagtaccctttgtatctagcccacccatgtttgtactagataaaaaatgtgaaaagacctctgaaactagcactatgaggacaactgactccacttctggagcattcaaaagagagagaccattagttactgagagcccaacatttaaatttagcaaatcccaaagcacttcagattctctaacccaggaagtggctacatttccagaccaagagaaatattctgaattaaatcaagaaaatggaactacttcaattcctacttcatgtgtaccagtggcaacgcctttagttttgccatctaatatacagtcagctagaccttcagcaaagaacagtatacacataaaagaaattgatgcagtgcagtgttctgataagttagatgaattgaaagatggtaaagaagaagagataaaatattttaattgcaataaggaagagttgcctttattttcagacagttttcaagatgcctatatacctcacaatcctgattcaaaagatgaaaaacaaaaattagctgaaacatcatccttgtctaatgtaacttctaattatgactttgttggccagcataagaaaatgaaatacaacatccatgagagaaatggtgtgagatttcttaaaagtattttaaagaaagaatctaaatatgaacatggttatcttaaggcattaattataaatcagagctttaagtttggaaatcaaaaagcagcagctatcagagatagtattgaattaacaaaggaaaaaggtgcagaaattccaaagaccattaaaaaactgaggtggtttgatgaaactagcaatatagaaaacaatgctgaaaacagtcattcactgaagaataaaacaggaacaactcaacagcattctcaacaattccacattcaaagtggtgctggaagcaacataattagtgtttctacttgtgctgtaaattctgctgatacaaagaagtccagggaggattctatctctgaaaatgttacgactttaggaggatctggagcagaccatatgcctttgaactgttttataccttcaggttataactttgctaaacatgcctggccagcctcaaaaaaagaagaaagtaaaatccctgtacatgatgattctaaaactaagcaaggtaagccacaaagaggtagagcaaaaataattagaaaaccaggatctgcaaaagtccaatcaggctttatatgtacaaacagaaaaggcgctgtcattcaaccacagtctgcaagcaaagtcaacatatttacacaagctcagggaaaattaattataccttgtcctcctcctcaatctacatcaaatattagaagtggtaaaaatatacaagtgtctcagtgtcaaccagtaactcctgaaaatcctcaaaacattattacacataactcttttaattcaaaacatgtgcttccaacagaacacagtttgaatcagtggaatcaggaaagtagttctccactctcaaatgcttgttctgacctagtcactgtgataccatcactgccatcatattgttcttcagagtgccaaactttcgcaaaaataaatcattcaaatggcactcaagcagttgcccggcaagatgcgacattatattgcacccaaagaagtcctgtttgtgaagaaagttatccgtctgtgactctaagaactgctgaagaagaatcagttcccttatggaaaagaggtcctaatgtcctgcatcaaaataagagggctacagggtctactgttatgagaagaaaacgaattgctgaaactaagcggagaaatattttagagcagaaaagacaaaaccctggatctgtaggacagaagtacagtgagcaaattaataattttggacaaagtgtcctgctaagttcaagtgagccaaaacaaactacaaggggtacttcttatattgaagaagtttcagatagtacttctgagtttttgatggctgaaaacttagtgaaagcatcagtgccggaggatgagattctgactgtcttgaatagcaaacagatacagaaatcaaatctacctttaaataaaactcaacaattcaacatctgcacactgtcagctgaagaacagaagatcctagagtcccttaatgatctcagtgaaagactacattatatacaagaatccatttgcaaaaacccatccatcaaaaatactttacaaataataccacttctggagaagagagaagatagaaccagcagctgcagagacaagagataattccagcagaatccgtctaagaagacctttcatgtacttccctaggactagatgcataccgttttgtgaaaaccagccataggaaaacatgtgagcaacaacccccatgaacatttgtcctaactcagattttgtgagcagtgaagtttaacagagcagtgacatttaacaaagcagtgaagtttaacagagttctgagaataccatgaaagacattatgcctgcctaaacaaaaagcaggacataacctagctctgaatacatgccacaaggatgaagcttgtgagtagagcaaacaaacgtttttccaaagaattcacagtgctcctttgcaatttatagatttcatgttgaaatatatgttaaataaaatttctgtttattgaacctctttattaaacctctaacttactgataagatgtttatgaagtatggcatattttgatttttttaattgtaataaatattcttaaagttaccacatcccacaaaatggcccttggtggcagcaatagagcaaaggttacctttttgtatggtgaagggaggccttcctatggctgtacaattacatcgattcttccaaatttcatatttcatacatggcactttggcataccgaaaaaacatgaaatttttcattaaaatgccatgaatcaagccagggccgttggcttatgcctgtaatcccagcactttgcaggccgaggtagacagatggcttgagctcaggagttcgtgaccagcctgggcaaccctgtctctacaaaaaatacaaaaattaaccaggcatggtggcatgcacctgtagtcccagctacttggggtgctgaggcgggaggattacttgagcccaggaggattacttcaacctgggaggttgaggctgcagtgagctgtgtttcgccactgcacaccagcctgggtgacagtgtgagacccagcctc

SEQ ID NO: 32551 - DNA, 5442 bp, Homo Sapiens
cccttttctccgccttttccgcgctccatcttgccctcctccctccttcgcccccgctcctactctccccttcttcccctctctccctaccccctccctttctggggcaggcgtttctccgaggcgcactgaggctccggggcgagtccgcgcagcgcgagctggggaaagccgtccggggctcccgatgaccctgcactccgccgggaggccgcccttcggaaaagccgtggaaacacacccggattgaaatgcccctggcccgcctgacccgaccctaggagaagcagccgagttacccgacatcgtggtcagcaggagctgggtcggtggctggatgctgcagcagcagggactcagcgcctgggagggctcctggggcagggagagaagcagagatgcaacatttttaaaatttcacaaagcatccggctgcacccaggtccctggaacaggagacaaacagaattaatgttttataccttcgggtataggtttgagttttttccccctcatgccaagtatttaaaacctctagaaacccatgatttgacaatcaatgattgcgcgatactttcaatttgaatattcaaaggcttaacaaaatggactatcttctgcagaaatcctgcacacaggcaccccacagagagtccagagaaacagggagtgagacccctttgggtcctggcccttgcttttattatagtttgagcattttgtcctccttcccacagatagagcagatgtcctcaaagatgctctgtatttcagccttcagggcagctaagaagccatgagtgacttaggctgccctggccatgaacaccggagccagactggctggccagactgattcccgcatcccccatctgtgttttgaggggaaatctcaggttttgaggaatgaacatggcagctagtgggtgtggcacagcaagaagtcgctctgggcccaggtggcaggccagcggcctagcagaggccttcgctctgcacctcctatttttctggctccgcctggctaccagcgggcttccctccccctttcatcccgctcttcctgggcccgacactggggtttctgctcagaatgactgcccattaagaccctttcctcctccccacagagctggggatgccaggagcctcatcctctggagactttctgactctgggtttcaccaccgcactgcgaagtgccctctttgctttttcgccttctagagccacccctgcctttttgctgtaggagcacatgttaggaaacaatgacaagtttggctcctgctcattttaactgaaaggatgtggacttaggttcaagccttctcccattggggtgagaagggggagggacttgggatcaggcttcccccttggtccaggcccaagcccctcactaatgacttgggattctactgggtcatcttctgtgagtacttactgtgcctcttccatgtgatttggaaggtgaggagacaggaatggtccacagagggagagagtgccaggccaagtcctctcatagccacccgccccctccacagaaggggacagcaagagaagagagaggcatggtgaggttccttttgcaaataaccaagatatttccaggattcaagaccagtccatggttttaggcctctgctgtttattctctgagttctcagaaatgcaaaaagtgtagtttagccccagaggcctcaagaaaaagattggggtgcccccaaatgtgtcaaatacagagggaaacacacagagcttagggaaagggcaactgagaatgacaagactgataggaattgcttggcagctgaagccacatctctgggggagaggagcaggcctgggaacacctgaggtggcacctggcagtggagggcaggatggatgtattgaaatctgacagcttctggaacttctttctacaaatgcccctgagcctgtgtcctaggtttccctgatggaccagacctgaggaggggaaggacaatgggggtggagatggcacctcccctccctgcatgccttcttcctcgctgtgcctaggccttgccccctctgaaggaacagtgaaccaagcagcttggaatctagggatggtctcttgtcctcatagcgtcttccattacttcttttcttcgctgctctcctcctttttgttatactcttattttttgatttgcttttaaaaaccttctttgttgcatttttgtttatttctttctgtgtttctttgtctctcttcctgtcattgctttcttccatttcttatctgtactactggttttctccctggcttcacgtgtctctgtgttcccctatgctggggtgtcctcccagtgctttcaggcttcatctccttcctaacctctcctttctattttttttttttttttttttgagatggagtcttgctcagtcgcccaggctggagtgctaacctctcctttcatgtggagatggacagggatggcaggagcactgagtgctcttgacaacaccattgaagatgatgctgacgatcagctaccctgtggagaaggcaggccaggctgggtgagaggggagctccttggaagtcagggggtctgtaaggacagcaaggatctctttgtcccaacctccagcagcctttatgggtgcttctgtgttggccttgtttctgggatggccatctcagtgctgttgctggctagcgatttcagaaaactagatttttctaggcctgagccctgttttgagaaagaagcttccctctggtttgtagctcaacattaatgagttttggttcctgttgtttctataattacaaaaccccagcacaggtatttaagagccaaaggccatgcttgtggaagtaagggaggatctttctaaatggatcctgcaaatcctccttacagatctgagtggatgatcaggcccagagcaaccctgagaccccaggtacccacagcattggctgttcttcataggagactcagagaagacttcataggagactcattattgtttactggacatcaggtgctatattgtatagcattcacattccacaggtgaggaaacaggctcagaggaataagtggcatgccaagatcactgagtatatcagtagcagaattaggattcagactttgttaggcctaactccaaagccctggctttttttttttttgagatggaatcttactctgtcaccgggctggagtgcagtggcatgatctcagctcactgcaatctctgcctcctgggttcaagtgattcccctgccttagcctcctgagtagctgggactacaggcatgcaccaccacgcccagctaatttttgtgtttttagtagagaggaggtttcaccgtgttggccaggatggtctcaatctcttgaccttgtgatctgcctgcctcggcctcccaaagtactgggattataggcatgagccaccatgcccggcctttgctcttaactactgatgttgtcttcctgatcttttctacaagaagcttttaaactttttggactttaacctacaataagaaatccattttacatgttcacatgtatctataacaacatttatatttctaaaacaaacttttcatgaaacaagatatacctacatatgtcaggcactctgatattttctattctagtccaccttttccatttcattctatttatgggaaatatatgttggttgggagtcactgagttaatttaatgacccactaataggctgtgagtggcattggaaaaatacctgcttgtaagatatgcgaacacacgtttcaaggttgtttgtgcatgtggaaatattttggggtgctatctgttttaccatcagtttgtacaaggacactaagacagtgtagcctgctgacttgagaatgttctgtaaggactggaaacactagaatcttgaagaaacgcctggctagaggtgagggtaagctgttaattacactgattacagtttgtgcctctcagactgagaactcttttcttcttgctgggggcattgctatctctaggatgtttgccctgaagtcctgatagtctctttggggttttaataaatggctgaaaaaattgttgtggggtttcaacaggcgttcataggcacccttgcttggcaatataacatggcttttgatgtttgggtgttggaagggatctttgaagtgctgagagggactcagtctttttccaaaatctctgcttgtgtctgtccagcctctggctccactgcttggctgagatcctggcccatagtagaatctgtgtagaggaaacgagagctcactatttgtgaggcagcctgttccactattggactgctttaaatgtagtgatcagtgattatgctataatccaatcatgtattaattgggcaccaactatgcactaggcatggtatcaagtaccaggagtacaaaaataagtaaaccttgatttctgctatcaattactctcttctcctacttctgtactactgcttttctattgtgagtttgtttagttcattaattggtttattcattcattcaacaatcatatactgattagctactctgaccaggtccagtactaactctgaagaagttatgcccatcccatcttcaccccaagccttctccttttgagactcctcatccagtttctttagttcttcatatatcactgtttttcagatctctggctatccttgccattgacctcagaaatcctgtatttgaccttaaccttcttatacccagtccatacccaaagtgatggaaatggaatagatttctttttaaagttttaaacgaatattttgactgaaaaattttggcagtcttgtatgcaaatgacactgcagagcattgttttctcccccccacgtaggagattttattcaactaaggcacaggcatattaaaagactttcagtataaggaaaaggggtagtttattccctccaaatttgactacagctcgaaattgtctttattaatgcaaagttcttttgtcaccttgactttgggacactgttaccaaacctcgtgggaaatatcaagttccagaagattgaatacatgcaggaaacaaatgttttttgggccctagagtgaacatttggtccatatgaaaatgaccaggaagacaattaggtgaaggttttttaatgatttgtgctacgtcagtctcttcccataagacatattcaaagttttaacttttccttaagaggcttccatggggagcaagcatttgataattcatcctttaagaaaaacaccaccgtacactgcttgaagagttcctcttctattacttaaaacgtttttattgtgcaacatttaaggcatacaaaaacatataaagaataccatgatgaaaatctatgactgtattaccaagcttaagaaataaaacagttgagtgatctctc

SEQ ID NO: 32552 - DNA, 5631 bp, Homo Sapiens
ttgcgcgctgcagggcaacaccccggcgtccctggaagctgggggagcgggagaaataactttatttggactgagagctggagaatgagaataggacctgagagtatattgggctaaggaggagaggtgtttgagcccagatgagtcatggctggacgacccctccgcataggagatcagctggttctggaagaagattatgatgagacctacattcctagtgagcaagaaattcttgaatttgcccgggagattggtattgatcccatcaaggaaccagaactgatgtggctggcgcgagagggcatcgtggccccactgcctggagagtggaaaccatgccaggacatcacaggtgacatttactatttcaacttcgccaacgggcagtctatgtgggaccatccatgtgacgaacactatcggagcttggtgatccaagagcgggcaaagctgtcaacttctggggccattaagaagaagaaaaaaaaaaaggaaaagaaagacaagaaggacagagacccccccaaaagttcgctggccttgggttcctcattagccccagttcatgttcctcttgggggcctggctcctttacgaggtcttgtggataccccaccctctgctcttcgtggatctcaaagcgtgagcctggggagctcagtggagtctggacgtcagcttggagaactcatgctgccttcacagggtctcaagacctctgcttatacaaagggtctcttgggctccatatatgaggacaagactgctctcagcctcttgggtttaggagaagaaaccaatgaggaggatgaggaggaaagtgacaaccagagtgtccacagctcaagtgagcctcttaggaacctacacctggacattggggcactggggggtgactttgagtatgaggagtctctgagaacaagccagccagaggagaagaaggatgtttctctggattcagatgctgccggtccccctactccctgcaagccctccagcccaggtgcagacagcagtctgagcagtgctgttggcaaagggcgacagggaagtggagcaagacctggtcttccagaaaaagaggaaaatgagaagagtgaacctaagatttgcaggaatctggtgacccccaaggcagaccctacaggcagtgagcctgccaaagcctctgaaaaggaagcaccagaggacacagtagatgcaggagaggagggttccaggagggaagaggcagccaaggagccaaagaagaaggcttctgctctggaagagggcagttcagacgccagccaagaactggaaattagtgaacacatgaaggaaccacagctctcagactccatagcttctgaccccaagtccttccatggcctggacttcggttttcgcagccggatctcggagcacctgctggatgttgatgtgctttccccagtcctgggtggagcttgtcggcaggcccagcaaccactgggaatagaagacaaggatgacagccagtccagccaagatgagctgcagagcaagcagtccaaaggcctggaggagaggttatctcctccacttccacacgaggagcgggcccagagtccccctcgcagcctggccactgaagaagagcctccccagggccccgaggggcagcccgagtggaaggaggcagaggagcttggggaggactctgcagccagcctcagcctgcagctgtccctccagagggagcaggccccaagcccacctgctgcctgtgagaagggcaaggagcagcattcccaggccgaggagctgggccctgggcaggaagaggcagaggatcctgaggagaaggtggcggtcagccccaccccgccagtctctccagaggtgcgatccacagagcctgtggctcccccagagcagctctcagaggctgcactaaaggccatggaagaggcagtggcccaagtactcgagcaagaccagaggcacctgctggaatccaagcaagagaagatgcagcaactgcgggagaagctgtgccaagaggaggaagaggagatcctccggcttcaccagcagaaagagcaatctctcagttccttgagggagcggctgcagaaagccattgaggaggaggaggcccggatgagagaggaggaaagccagaggctatcctggctccgagctcaggtccagtccagcacacaagcagatgaggaccaaatcagggctgagcaagaggcttccctgcagaaactgagagaagagttggagtctcaacagaaggctgagagggccagcttggaacagaaaaataggcaaatgctggagcagctcaaggaagagatagaggcttcggagaagagcgagcaggctgccctgaatgctgcaaaggagaaggctctgcagcagctgagggagcagctggaaggggagaggaaagaagctgtggcaacgctggagaaggagcacagtgctgagctggagcggctctgctcctcattggaggccaagcaccgggaggtggtctccagcctccagaagaagatacaggaagctcaacagaaagaggaggcccagctgcagaagtgccttgggcaagtggagcacagagttcaccagaagtcttatcacgtggctgggtatgagcacgagctcagcagtctcctgcgagagaagcgccaggaagtggaaggggagcatgagaggaggttggacaagatgaaggaggagcaccagcaagtgatggctaaggccagagagcagtatgaagctgaggagaggaagcagcgggctgagcttctggggcacctgaccggagagctggagcgcctgcagagggcccatgaacgagaactggagactgtgaggcaggagcaacacaagcgtcttgaggacttgcggcgccggcacagggagcaggaaaggaagctccaggatttagagttggaccttgaaaccagagctaaagatgtcaaggccagattggctctgctggaggtccaggaggagaccgcccggagggagaagcagcagctgcttgatgtgcagaggcaggttgctctgaagagtgaggaagccacagccacccatcagcagctggaggaggcacagaaggagcacacccacctgttgcagtcaaaccagcagctccgagaaattcttgatgagctgcaggcccgcaagctgaagctggagtcccaagtggatctgctgcaggctcagagccagcaactgcagaaacacttcagcagcctggaggctgaagctcaaaagaagcagcacctgttgagagaagtgacagttgaggaaaataatgcttccccacattttgagccagatctccatattgaggacctgaggaaatcccttggaacaaaccagaccaaagaggtgtcttcttctctctcccagagcaaggaggacttatacttggacagcctgtcctcccacaatgtctggcacctcctctctgctgagggggtagccctccgtagtgccaaggagttccttgtgcagcagacacgctccatgcggaggcggcagacagctctgaaagctgcccagcagcattggcgccatgagctggccagtgcgcaggaggtggccaaagacccaccaggcatcaaggccctggaagatatgcgcaagaacctggagaaggagaccaggcacctggatgagatgaagtcggccatgcggaaaggccacaacctgctgaagaagaaagaggagaagctgaatcagttggagtcctctctttgggaagaggcctcagatgagggcactctgggaggatcccccaccaagaaggcagtaaccttcgacctcagtgacatggacagcctgagcagtgaaagttctgaatctttttccccgcctcaccgtgagtggtggcggcagcagaggatcgactcaaccccgagtctcacctcccgcaagatccacgggcttagccactccctccggcagatcagcagccagctgagcagtgtcctcagcatcctggacagcctcaaccctcagtcgccgccgccgctcctcgcctccatgccagcccagctccctccccgggaccctaagagcacccccacccccacctactatggctccctggccaggttctcagccttatcatctgctacacccacgtccacccaatgggcctgggattcagggcaggggcccaggctcccctcctctgtggctcaaacggtggacgacttcctgttggagaagtggcgcaagtattttccatctggcatcccgctgctcagcaacagccccaccccgctggagagcaggctgggttacatgtctgccagtgagcagctccggctcctacagcactcccattcgcaagtccctgaggcgggcagcaccacctttcagggcataattgaggccaaccggaggtggctggaacgtgtcaagaatgaccccaggttacctctcttctcgtcaacacccaagccaaaagctactttgagcctcctgcagctgggccttgatgagcacaacagagtgaaggtgtatcgcttctgaggccctgagcaggggcttggggcagcccagcctctcctccacccagaccaagtgcctgaggagctgcctgccttcttccatctgagaaagcaccctccttccccctttgacttgcaggagccaccagggaccagggggttgagtggaacagtaaagccacacattctgtgactatataacctatctcaggctaaaatgtgtggactcgtacgagctcttgtcattgacatggcaagctgatggcgtgcggtggctgcggggtatcagggccgggagccctttgggaggaagggaggcgttagaggagctgccttcggaggctcagggagtccctttggagctggttgtttccttggccctgcagcgcactgctcggggctcccaaggaggttgtgtgtatggttcttaattcatcaggacaaagacccccagcatgtgtgtaccctgggacccgatttctctgggcccacatctatctccaatacctcagcctcagatcagaccctttcttttttgtctttcttctcttaatttttaaatgcctcttttcttgagcattccatctctctttttgaccctctcaggactgggcttagctgtccagagccctgccggagggtgctgggggctgtccctctgcaggcactgtgttttcctcaggggctgtcctcagaacacccctcctgctccctggggctcctcagggagccatttcagctggagtctcaggtctcaaaaacaacttctccaggaggccaaaaaaagactgggttggcttctggtcctcatgatggcttttatcctcctgggacactttgggtatattcatgggcattgtttccatctgtcttttctacctgtgccacccctgccctgattccacggctgcctcaggcaggcaggcaaggagctaggccggtgcccggccctggcagcaaggggtctttgtgcagttggagatgctgccgttgtggcagagcgtcctgcagccccgcttccatcagcaggctctggggtgggggctttgcaggggatgctctctgatgtttgttccgttgtttaaataaaatgcacttatttttgtttttttttttgcaagct

SEQ ID NO: 32553 - DNA, 6049 bp, Homo Sapiens
cggccggccggcggtcagccttcacacaggcccggctgcggagcgcagtcgcccaggtttacggcggcagagggccgaggctcccggagaggaccgcgatgagtccacttcaggtcggggctgagtgtgggcgcgcggttcccggcggcgtgtgacccagtcttcgccggccgctgcccgctgcgtgtgtaagtgtccgtgggccccagggccttgcagcgcccgccccgaggccccgaagaggccttccgcctggggcagtgtgaaggccacagagttttcctccaaagccacacctcagctggaaggggcgagttggagggctctgttagtggtagccatggggagacgcggagctgcagctgtcgctttgcagtgcctgtaggactttgagggcctggagccccggttccctgaacagcacccagatcgccccatatctgagacacagttcatgccccccttccctaactctgaagtaaaatcttgagggctgtcatctggggaagccaccttgtccgttcagccatgaagacagaaacagtgccaccgttccaggaaactccagctggatcgagctgtcacctcaataacctgttgagtagccggaagctgatggctgtgggggtcttgcttggctggctcctggtcatacaccttctggtcaacgtgtggctgctgtgccttctgtcggcattgctagtggtgctgggaggatggctgggctccagcctcgctggagtggcttcaggtcgactgcatctggaacgcttcatcccgttggccacctgtcctccatgccctgaggcagaaaggcagctggaacgggagatcaaccgcaccatccagatgattattcgagattttgtgttatcttggtaccgttccgtgagccaggagccagcctttgaggaagaaatggaggcagccatgaaagggttggtccaggagcttcggagaaggatgagcgtgatggacagtcatgctgttgcccagagtgttctgactctctgcggttgtcacctgcagagctacattcaggcaaaggaggccactgcagggaagaatggtccagttgagccttcccacctctgggaggcttactgccgggcgactgccccacatcctgctgtgcacagccccagtgctgaagtcacctatacgcgtggcgttgtgaatttgttgcttcaagggctggtgcccaagccccacttggagactcgtaccggacgccatgtagtggtcgaactcatcacatgcaatgtaatcttaccactgatcagcaggctgtcagatcctgactggatccaccttgtactcgtgggtatcttttccaaggccagagatccagcaccctgcccagccagtgcccccgaacagccctcagtgccgacatctctgccactgattgctgaggtagagcagcttccagaagggagagcttctccagtagcagccccagtattcctaagttacagtgagccagagggttctgcaggcccctctccagaggttgaagaaggccacgaagctgtagagggagatttgggtgggatgtgtgaagaaagaaaagtaggaaacaactcatctcatttcctacagccaaatgttcgaggtcccctgttcttatgtgaagactcagagctggagtctccgctgtctgaactgggcaaagaaaccatcatgctcatgactccaggcagctttctctctgacaggattcaggatgccctgtgtgccctagagagttcccaggctctggaacccaaagatggtgaggcatctgaaggagcagaggctgaggagggtccagggacagaaacagagacaggcctgccggtctccacactgaattcctgcccagagatccatattgacacagcagacaaggagatagaacaaggagatgttaccgcctctgttacagctttgctggaggggccagaaaagacctgcccctcacggccgtcatgcttagagaaggatctcaccaatgatgtgagctcccttgatcctactctgccaccagttctgctttcctcctctccacctggtcctctcagctcagccaccttcagctttgagcccctaagcagtcccgatggtccagttatcatccagaaccttcgtatcactggcaccattacagcccgagagcacagtggcactggattccacccatacacactctatactgtgaagtacgagacagcccttgacggtgaaaacagcagcggcctgcagcagctggcctaccacactgtgaatcgtcgctatcgggagttcttgaatctgcagacccgtctggaggagaaaccagatctacgaaagttcatcaaaaatgtgaagggtcctaaaaagctctttccagatcttccattgggaaacatggacagtgacagagtagaagcccgtaagagcctcctagaatcattcctaaagcaactctgtgccattccggagatcgctaacagtgaggaggtgcaggagttccttgctctgaacacagatgctcgtattgcctttgtcaagaaaccatttatggtctctagaatagacaagatggtggtgagtgccattgtggacaccttgaagacagcgtttcctcgctctgaaccccagagccccacagaggagctgagtgaggccgagaccgaaagcaagccccagacagaaggcaagaaggctagcaagtctaggctgaggttctcatccagtaaaatttctccagcactaagtgtgactgaagcacaagacaagattctttattgtctccaggaaggcaatgtggagtctgagactctatccatgtctgcgatggaatcttttattgaaaaacagacaaagttactggaaatgcagccaacaaaagccccagaaaaagatcctgaacaacctcccaaaggacgtgtggacagttgcgtgtcagatgcagccgtgccagcccaagaccccagcaacagcgatccaggaacagagacagagttagctgacacagccctggatctgctcctcttgctactaacagaacagtggaaatggctatgtaccgaaaacatgcaaaagtttcttcgtcttatctttgggaccctagttcaaaggtggctagaggtgcaggtagctaatttaacaagtccacagcgctgggtgcagtacctcctgcttcttcaggagtccatctggcctggtggagttttgcctaagtttccacggcccgtaaggacccaagagcagaaactggctgctgagaaacaggctttgcagagcctgatgggagtcctcccagatctcgtagtagaaattcttggggtgaacaaatgccggctgagctggggtctagtcctggagtcactacaacaacccctcatcaacaggcatttgatttactgccttggggacatcatcctggaattcttggatctcagtgcctctgttgaggagtctgctgctaccacctctgcctcagataccccaggcaactctaagaggatgggtgtctcctcttagctggttattcacgccttcttcccaggtcagggaagtagagttactcggccaccagagaccagtcaggaagcccgtgccctcttcaagtaggctacagctaagaaggcctaggttctcggtggctcacttctctcccacttctgctccatttgtagcaggtgacaggggtctgtgtgtcccagttgtatgcacgtttatttccctgttccttttgtgatgttgggattgttgctggtgagtagatcctgtttcctttgggaaaagaagctgtgaggtagaggaatgaaccccttttgcttctccttttgccatcctccctgagattgtttgccagaatcctggccctgtgcacacatgtgcttaatccaccagcacacaagctctagatagaacaggaaaaaaactgtggccagatttccttggaggagaaaacaaccttctcagctctctgttcctacccggaaactaaaaattcattcagggccattctcaaaaaccagactcctgggtctaatctagtttcccaacagttccagaagaagaaggagggaagaaaatttttcaaggaacttcttgctcatgtgttgctgtttcccaacacatcagccttatggaagatgtcatgaggctgcttgcctgggaggctacactttcctttccagaagacttcaaagctgactgccaaagcttctggtaaatccaccccacccttcacaccctttcctgaaaggcatttataccacccattttatttattggctttgctcccaaccccctgccctagagcaattgagtttttgaatttttgaccctctctctgtcttcagcaaaactgcatgacaagctgcatattcagcctcagtttttccaaggagaatggaaagcacttgcctcctgtcttaagaatgcacaaagagtaggactagcaaggctgggggatgaaatctcccttcctaagtctttgacagagaacttttattattctgaacagataagattagcaaacttacaaggaatagcttcttatttcccattccttacggttataatcagtcctttaacaacaccagcatgaaggcaaaggtgttttgtcagactgcaacatctattagaaaggcaaggcaactgggaattgctggagaaggataaatcaggaggaattgctggtagaaaaggctgcagacagtcacagggaagtgctgtatattaaatgcatgtgaatagctggcaaaaagatgtcaaggatgtcactgggagccctttggcttcacactcgcctgttagcgccttgctttcgctgaattaccagagcctaccactcggaggaaggtcttggagttagactgatgagaaggcaatggggtgtcaaaaacaagtgtcaaagttctcttagattctgaagtcggtgatgagcacacaattaaagtggtttgtggaagaaagttgtaaaatctttttacttttttgcccctctggaggcttttaaccctaaattgtgtctgatgtattcgggaggcttaggtgtgcaattcttgcccaaaggcaaggagatgaatgagatgtctcatggcctcttctagccttaaaagttgaccattacagtgactttatggctccaaagttcttgaagcatctccagccctagactttgacaagaaaaggtagctcagcatctctactttccgtgagtacctgcaggagtccagccaatgtattagagctgatcattaagctccttcagtgagggctaagatcctattctcgatgagcatagggggacagccttgttttatgccacttttctctccccatacctaccttcccctcatgtgtacttagccacctgtgttgctttgaatctgctgccagttctggctcaaatgtggcacaaaatcagtacatcagacacaccatgaaatccctgtggctataaattctaaggaatcttttgacacttccagcccaaagaacttatttttatttcgtattatataagagtccccacctctactccacgtaccccaaaaagataagctgtcctcagatcctccttctacccaggagggaaataatggatattgccaagggaacaatcagaactcatctggctttgaaaacgacctgccaagtttggctagcaggttcagacaacaagagagtaacaattggtagagagccacaggtagaaaagatactcccagctgacagggtgataaaaggcagggaagaattgggcctgtgctgatccaggaaggttttattgtttgcttgttttttgtatttactcgtgactaaattttattcatttaagtcagaattttgatatttgaaataagactactttcccttttcttactatctataaaaaagacgaggcagggatgctgtgttctttctgtcaaattctaaatgtgatctttgccattgcttatttgaattcaagaaagctatactttttcatcacatataactcacagtttcatttttgcattgttggattagacttaataaaacctaaatggaaaataaattcctaaatctg

SEQ ID NO: 32554 - DNA, 6205 bp, Homo Sapiens
gtcgggccgggcacggcgggccggggcctttgtgtgaagcggcggcggcgatggtgctcggggcgccgcagagccggattaactgtgctgataaggaggtaatttcataggagctgctaagatgggcatgaggatcaaactgcaaagcaccaaccaccccaacaacctgctgaaggaactcaacaagtgccggctctcagagaccatgtgcgacgtcaccattgtggtggggagccgctccttcccggcccacaaggctgtgctggcctgtgcagctggctacttccagaacctcttcctgaatactgggcttgatgctgccaggacctatgtggtggacttcatcacccctgccaactttgagaaggttctgagctttgtctacacttcagaactcttcacagacctgatcaatgttggggtcatctacgaggtagctgagcgtctgggtatggaggacctcctccaggcctgtcactctacctttcctgatctggagagcactgccagggccaagcccctgaccagcaccagtgagagccactctggtaccctgagttgtccttcggcagaacctgcccatccccttggagaactccgaggtggtggggactaccttggtgctgatagaaactatgtgttgcccagtgatgctggagggagctataaagaggaagagaagaatgttgccagtgacgctaaccatagcctgcatctgccgcaaccgcccccaccaccgccaaagacagaagaccatgacacccctgctcccttcacgtccattcctagcatgatgacccagccactcctaggcactgtcagcacgggcatccagaccagcacgagctcctgccagccatacaaagttcaaagcaatggagacttcagtaaaaacagcttcctcacccctgacaatgcagtagacattaccactgggaccaactcctgtctgagcaatagtgagcactccaaagatcctggctttgggcagatggatgagctccagctcgaggacctgggggatgatgacttgcagtttgaagaccctgctgaggatataggcacaactgaggaggtgattgagctgagtgatgacagtgaggatgagttggcttttggagagaatgacaatcgggagaataaggccatgccctgccaggtgtgcaagaaagttctagagcccaacattcaactgatccggcagcatgctcgggaccatgtggacctgctgacgggcaactgcaaggtctgcgagacccacttccaggaccgaaactcccgggtaactcatgtcctgtcccacattggtattttccttttctcctgcgacatgtgtgaaactaagttctttacccagtggcagctgacccttcaccgacgggatggaatatttgagaacaacatcattgtccaccccaacgatcccctgccagggaagctgggtctcttttcaggggcagcctccccagagctgaaatgcgctgcctgtgggaaagtattggccaaagatttccatgtggtccggggccacatccttgaccatctaaacttgaagggccaggcctgcagtgtctgcgaccagcgtcaccttaacctctgcagcctcatgtggcacacgctgtcccatctcggcatctcagtcttctcctgttctgtctgtgcgaacagctttgtggactggcatcttctagagaagcacatggctgtgcaccaaagtctggaagacgccctcttccactgccgcttgtgcagccagagcttcaagtcagaggctgcctatcgctaccacgtcagccagcacaaatgcaacagtggccttgatgcacggcctggttttgggctgcagcacccagctctccagaagcggaagctgccagcagaggagtttctgggtgaagagctggcgctgcagggccaacctgggaacagcaagtatagctgcaaggtctgtggcaaaagatttgcccacacaagcgaattcaactaccaccggcggatccacacgggggagaagccataccaatgtaaggtgtgccacaagttctttcgaggccgctcgaccatcaagtgccacctaaagacacactcgggggccctcatgtaccgctgcacagtctgtgggcactacagttccacccttaacctcatgagcaaacatgttggtgtgcacaaaggcagcctcccccctgacttcaccatcgagcagaccttcatgtacatcatccattccaaagaggcggataagaacccggacagttgactgggtcccggcagagccacggggagctcccaagcagcagccaggatgctgatatctaagaggtgttggtccctccccagctgaagttataattttgccttggtaggaattctgttctgtgttgtgtttaaagaagaaaagaagaagaaatagcacataagctgttactgttgttgagaagcaacagccctatcacatttacctccatacctgttcttgcccatgcagggctatgtttttcattcttttgaggctggttttgggatctagtcaagcagttggtgtccactagacccccttccccagcctctctagttttagtttactgataggttttatgctgctaagaatccaaccaacagcctcacttaacagaggaggtaaagggaggttttcactgtgggtgttactgcaggcctccaactgggatgaccagcaatgagaaagattttgggaatgtgatcattcagaaaagacaggtcagcagggcagtcccctcaggttccagccctcagcagggacaagacatcagggatgttggtgtctgcttatctacagccctaatctgctgattgaacagtgaaaatcttttggcagctagatccatactaggcacagagctttctatttaggtcagaaagctttgggatgaacccctgccagccagaaggggtgtcctgcagtgccaccagaagtggcagcctggatggacaggagaggtttctcttttctcctcatttccaaagaaacaggattttatggagtgatggcccgggacgtccggccttctgtggggcagagaggatagggaaccactttgatatagtcatctgttttggccacttctgttggccatgagtgtcttggtggagaggtggggatgtatctgacagcagcagccttgccttaatttatatctggtctcccgtccagaagtgtttggcccgtggtgtagatgagctgactccatgaagtggtggagtggcagaccgcgagcccttcaggattaaagggacctgagtaactggtggtgtgtagcagggtgtgcgttctgactgtctgtcctagtcgggtaacctgtttactttgtgctaacagtgccggagctttgtcagctcacctttgacctgctggaatttatcctgatctgtcgttgccatcacctccagggggcgctattggatggcagctggttcaggccctccgtgggtggctgcagagtgtgccggcacagcccacgcagctggttagctccactcttacttggttttctaaggggctttgcccaaagaagtcttgagggatagggccctcgatcttgcatacttgtgaggtgccacctcagtagctcatactacctcaccctgctcaggtgagctctgggagtccctggcctcagccctggcactgcccctggtgggattcagcaacaccccgggctgtttcacaagcaagtggttttcattaactcacaaagcctttttggacattaatatttatttatttttgtttttgtatacacattacccagcatctcttttgtataagagactttaggaaaatgagtttctccccagcaagtagccatattccagagaacagccttgaccagagatgtggagaaccaggggtataactaagggaagacatgtcaagcccttaagcaaattcttcttctccagattgtctctagcataataaacccagggaacactttaggccatgggtgtatgttctataaagttcgggacagttaaattccaggcctttcatcccccttccttcctgtgatggagtagattggggacagggttgaggggaacaagtgacatgaatgacctatttgcacagtttggaagcctcctgtctttatttatattgagatgtcagacaaaccaaagctccatccttgttggacctgctgcttctccccagccctgaactgataaagcctcagagttggagtgcctggctctctggtggggtgaccattagatgaagggacttgtacagtggccagtttaaaggtccacctttgaccatctaaacccaccttgttcagtgtcctctgaggacatcctcatcaggaaagcagtgttgagactcttcattgctgactggcttctccctttcttactcacactgaccattagaatttaagaaggaaatgtgtaacagactacagtcaagtgtctgctacattttcaagcatgagcaatccctcccagactgttggtgaggactgatttttgaaatgctggtgtgagagaggtggtaattacaggaaccagccgagtggctgagagcagataaatgtgctggagaaacctttttccttaacagagggcatcatggatgctgggtggtctgtgtacttaacctgaaactgtgaagttttccctttttgccagtaaaccaaaaagcagatccttgaaacttggcccttgaaacacgaaacagaaaactgcatcccctgatcccccgggggctgatcagattgatcagggtggctcagttggtcccagtcagatacgtcataggatcagtagctcatgagatttgttgaccaaaccctctccctgttggtgacccctgtattcacacctgaacttcccgtttccccccaccccaccaaagtcatgtctgcttcctctgcctccagctcaccctcttctgaatggttttgcttgaaacactatattgtggcagagggcaccctgggatacctggtagaaggtattcattttattttgcatttttaattgttttgactttctgttcatttgattttgttgctccctctctcctggaacctagtttactactctcttctgtgttactctgaagttctgtttaagccttgaacatcctcttctcccattttcttggtatgtactcaggaccagctacatcatttgtggagccctcttattcataaattattaaaaatttcaaggtggtggtcatagagcattaaaccaaatatgaggccattcccaacttgttttccgaggggaaaatggtaatacttgtgtggcacccggggttaaacagcagaggctccatgtggccagaggcagagattagtatcctggcactccagtgacccactgggtgactcactgatgccacagcacccgctaggaagctctgctgaaccttagtatttggtcctaaattttatgactccatggagttcccgtagtccatggctagttaggaagaaaggaggtgggataagggtcaggcccaggtgacccctaagaaccaggagatgggtaaaagtttttttttatattctgcttttctgatctgtgagtacctgtttgtctccaggccaaacctttgggcttaaatatctttttcctagacaggtttttgctagtgttgaattttcttcttcctctggcctccttctgtgcccctttccccaagcccaagactgcttaacttccaaagcaaattctagatagacactgtatttattggtatgggagtgggctctatggggtggtctgcacccatctgggactcttttccctaaatcctgcaccaaatgagtcaggaggcagggtgcacagcattagtttcaatgtggttatgcatcataagcttaacatcagaatgaaaatgaaactcgattttgatgtttctttaaaacccttcccctgtccaatccactcgccgcccccaccttgaatagctaaagtctcttatgaaacagagaagagttgttgacgtctaactccttccattaaattaataagtactgacctcctaatatttaagtgtttactatctattgctgtaaagttttgtatattttgtaaacttttttccccaaatagtagatgtctaaaatcattgtacatctgattcttttatattccattgttcagcacaaagtgtggtttttatttagaataaaaaaagaaatttgaaatg

SEQ ID NO: 32555 - DNA, 5967 bp, Homo Sapiens
aagcttaatactgagcatcaagaaattctttaataaatataagtgatatttattcagacatgtaataaggaaatgttcatgtcttatttttgtgttagatttttttagaatctacttttgttagagttttataaatacagttagtgtttgagatagaaagagaaaagaattagttttcttcctcttctacctgctcatgaacttgatttttttctcccaacaattgaagagccaagaaaaagggagattcttaagagatgggaaatagaatctcatctacccctgtttcccccagaacagtgaaactgaatcttaagggtaagatagaatagtgtgtacttaacttagatggagaagaaaggctgccaaaatgagatctgaagcgctattacaaatatttccatcgttactgtacttcagaatgaattacaaccgtaagtttttttacttcctcattcataaatttgattattccttataccacttctcagctttcatcattctttattgtacttttctatgtaatgtttgcctattatacagcaacttaagagaactgtaagtttggacatttcattttggtgttgataatagaatatctttgaatagttctatagttgatgagtagaaccatgaaccaagtaacttaaagtccttgatgttatttattacagagaactataatagaagctctcccgctaatgtttccatcatgtgtacaaaaagttttcttgttattaaagctagtccgtttaacttacaataagcataaatagctaagctgtgaaagttacctgtgataatgctaattttcccatttattaaaaggcaagttgttttccgatcataagaaatttagaaaagccatccaaagataaattccgagtgatatattcctgctgtttgttatgttttctcaaattaattgagttttattttacaatgacaggagttattaaagtattttatttttattatgattaagattttcaaagtaacatttcttatatgaaagaaattatgttaatgcatgtttttcttacatgggaaatcatatattttaaaaatgattttaaaattcgttttactttaagttgtattatctttctcaaaagtggctagtgcttgaccagaaaaaaagacaccagcataactcagtgtatctttatttacataggaaatggccattttcaagattgcagctctccaaaaagttgtagataatagtgtttctttgtctgaactagaactggctaataaacagtacaatgaactgactgctaagtacagggacatcttgcaaaaagataatatgcttgttcaaagaacaagtaacttggaacacctggagtgtgaaaacatctccttaaaagaacaagtggagtctataaataaagaactggagattaccaaggaaaaacttcacactattgaacaagcctgggaacaggaaactaaattaggtaatgaatctagcatggataaggcaaagaaatcaataaccaacagtgacattgtttccatttcaaaaaaaataactatgctggaaatgaaggaattaaatgaaaggcagcgggctgaacattgtcaaaaaatgtatgaacacttacggacttcgttaaagcaaatggaggaacgtaattttgaattggaaaccaaatttgctgagcttaccaaaatcaatttggatgcacagaaggtggaacagatgttaagagatgaattagctgatagtgtgagcaaggcagtaagtgatgctgataggcaacggattctagaattagagaagaatgaaatggaactaaaagttgaagtgtcaaaactgagagagatttctgatattgccagaagacaagttgaaattttgaatgcacaacaacaatctagggacaaggaagtagagtccctcagaatgcaactgctagactatcaggcacagtctgatgaaaagtcgctcattgccaagttgcaccaacataatgtctctcttcaactgagtgaggctactgctcttggtaagttggagtcaattacatctaaactgcagaagatggaggcctacaacttgcgcttagagcagaaacttgatgaaaaagaacaggctctctattatgctcgtttggagggaagaaacagagcaaaacatctgcgccaaacaattcagtctctacgacgacagtttagtggagctttacccttggcacaacaggaaaagttctccaaaacaatgattcaactacaaaatgacaaacttaagataatgcaagaaatgaaaaattctcaacaagaacatagaaatatggagaacaaaacattggagatggaattaaaattaaagggcctggaagagttaataagcactttaaaggataccaaaggagcccaaaaggtaatcaactggcatatgaaaatagaagaacttcgtcttcaagaacttaaactaaatcgggaattagtcaaggataaagaagaaataaaatatttgaataacataatttctgaatatgaacgtacaatcagcagtcttgaagaagaaattgtgcaacagaacaagtttcatgaagaaagacaaatggcctgggatcaaagagaagttgacctggaacgccaactagacatttttgaccgtcagcaaaatgaaatactaaatgcggcacaaaagtttgaagaagctacaggatcaatccctgaccctagtttgccccttccaaatcaacttgagatcgctctaaggaaaattaaggagaacattcgaataattctagaaacacgggcaacttgcaaatcactagaagagaaactaaaagagaaagaatctgctttaaggttagcagaacaaaatatactgtcaagagacaaagtaatcaatgaactgaggcttcgattgcctgccactgcagaaagagaaaagctcatagctgagctaggcagaaaagagatggaaccaaaatctcaccacacattgaaaattgctcatcaaaccattgcaaacatgcaagcaaggttaaatcaaaaagaagaagtattaaagaagtatcaacgtcttctagaaaaagccagagaggagcaaagagaaattgtgaagaaacatgaggaagaccttcatattcttcatcacagattagaactacaggctgatagttcactaaataaattcaaacaaacggcttgggatttaatgaaacagtctcccactccagttcctaccaacaagcattttattcgtctggctgagatggaacagacagtagcagaacaagatgactctctttcctcactcttggtcaaactaaagaaagtatcacaagatttggagagacaaagagaaatcactgaattaaaagtaaaagaatttgaaaatatcaaattacagcttcaagaaaaccatgaagatgaagtgaaaaaagtaaaagcggaagtagaggatttaaagtatcttctggaccagtcacaaaaggagtcacagtgtttaaaatctgaacttcaggctcaaaaagaagcaaattcaagagctccaacaactacaatgagaaatctagtagaacggctaaagagccaattagccttgaaggagaaacaacagaaagcacttagtcgggcacttttagaactccgggcagaaatgacagcagctgctgaagaacgtattatttctgcaacttctcaaaaagaggcccatctcaatgttcaacaaatcgttgatcgacatactagagagctaaagacacaagttgaagatttaaatgaaaatcttttaaaattgaaagaagcacttaaaacaagtaaaaacagagaaaactcactaactgataatttgaatgacttaaataatgaactgcaaaagaaacaaaaagcctataataaaatacttagagagaaagaggaaattgatcaagagaatgatgaactgaaaaggcaaattaaaagactaaccagtggattacagggcaaacccctgacagataataaacaaagtctaattgaagaactccaaaggaaagttaaaaaactagagaaccaattagagggaaaggtggaggaagtagacctaaaacctatgaaagaaaagaatgctaaagaagaattaattaggtgggaagaaggtaaaaagtggcaagccaaaatagaaggaattcgaaacaagttaaaagagaaagagggggaagtctttactttaacaaagcagttgaatactttgaaggatctttttgccaaagccgataaagagaaacttactttgcagaggaaactaaaaacaactggcatgactgttgatcaggttttgggaatacgagctttggagtcagaaaaagaattggaagaattaaaaaagagaaatcttgacttagaaaatgatatattgtatatgagggcccaccaagctcttcctcgagattctgttgtagaagatttacatttacaaaatagatacctccaagaaaaacttcatgctttagaaaaacagttttcaaaggatacatattctaagccttcaatttcaggaatagagtcagatgatcattgtcagagagaacaggagcttcagaaggaaaacttgaagttgtcatctgaaaatattgaactgaaatttcagcttgaacaagcaaataaagatttgccaagattaaagaatcaagtcagagatttgaaggaaatgtgtgaatttcttaagaaagaaaaagcagaagttcagcggaaacttggccatgttagagggtctggtagaagtggaaagacaatcccagaactggaaaaaaccattggtttaatgaaaaaagtagttgaaaaagtccagagagaaaatgaacagttgaaaaaagcatcaggaatattgactagtgaaaaaatggctaatattgagcaggaaaatgaaaaattgaaggctgaattagaaaaacttaaagctcatcttgggcatcagttgagcatgcactatgaatccaagaccaaaggcacagaaaaaattattgctgaaaatgaaaggcttcgtaaagaacttaaaaaagaaactgatgctgcagagaaattacggatagcaaagaataatttagagatattaaatgagaagatgacagttcaactagaagagactggtaagagattgcagtttgcagaaagcagaggtccacagcttgaaggtgctgacagtaagagctggaaatccattgtggttacaagaatgtatgaaaccaagttaaaagaattggaaactgatattgccaaaaaaaatcaaagcattactgaccttaaacagcttgtaaaagaagcaacagagagagaacaaaaagttaacaaatacaatgaagaccttgaacaacagattaagattcttaaacatgttcctgaaggtgctgagacagagcaaggccttaaacgggagcttcaagttcttagattagctaatcatcagctggataaagagaaagcagaattaatccatcagatagaagctaacaaggaccaaagtggagctgaaagcaccatacctgatgctgatcaactaaaggaaaaaataaaagatctagagacacagctcaaaatgtcagatctagaaaagcagcatttgaaggaggaaataaagaagctgaaaaaagaactggaaaattttgatccttcattttttgaagaaattgaagatcttaagtataattacaaggaagaagtgaagaagaatattctcttagaagagaaggtaaaaaaactttcagaacaattgggagttgaattaactagccctgttgctgcttctgaagagtttgaagatgaagaagaaagtcctgttaatttccccatttactaaaggtcacctataaactttgtttcatttaactatttattaactttataagttaaatatacttggaaataagcagttctccgaactgtagtatttccttctcactaccttgtacctttatacttagattggaattcttaataaataaaattatatgaaattttcaactt

SEQ ID NO: 32556 - DNA, 6821 bp, Homo Sapiens
aatctcccaaggcctaaggaggcaagaggcctgcaaatcgcctcctgctcagcaaacgggttgctcagcaggcccggggtcctggtccaccccaggtccctggtttgcccacctccgatggcggccttcgctggcagggtgggcgcctctggggagccagctccgtcccggcgcctttagagccccatctcttccacgtccctggccttcctccccttccaggcggctgtccccgccggggtccagatggtgtcggagggccggcggttcgacggcgggcccggggttcagcctcccggcctccctccgtccctgactctcctttcttcggagagggcgcgggggccggggccaaagcgccgctcttggggttctcctggactcggagttgccccaggcgggcgcagctctgccccgcggggtgccagcctcgggcgggcaaggtccgtgagtcaccgcctgtaaccgaacaccaggcctccctgccccctcccccagctccggccgccaggctgcggcgacacctacaagaaaatgaaggggcgcccaggcccgcggcggccccggccgtatcgcgagcaggtcccggcggcccccggctcgcggcgctctttcttccccggccccggggctcggccagccgcaaccgccgccccggcgccagcaggaatccaggccgagcgaccggccccggagcccgaggcggcggagggcccgcggtagctgcgactggcgagcccgagagcgcccggggagggggcgcccggcttggaatttcccggtcccttccggcccagcgaggacaaagcactcctggccgccgccgccgccgccgccgtggcctacgccgcgccgcacaaagggcgagtcgcgacacgctcccatccccctcccagctcacggcggccccggccccgggtggctgcagggaggtgggggaagccctggctgcaccgcccctcgctccccctcccctggggccgcgcgagcgccgcccccgccccgtctgcgcgtcctcccggggaggggttggggggcgcggcgccccacataacactccccctcctgcgctgcgagccaccctctcccctccctcctgcaaacaccaccgcctcccctgccaccgccgccacctcgcccgacgctccacagctcgccgcggccggggggcggtgcgcggaccgtgcgcgccgcgggcgccagatgtgcagtccccgccgccgccagtgaccgagccgcagtccgagcggtatcgggccgcctccctgatgctgcgggggcgaccttgagcgtacagcggcttccctcggtggggaccccgacatcccagcgctgtgcccggtcttgccctctgtagcccggctcgccccgcgcttggacatggaaggggccgccgcgcctgtggcgggggaccgccccgacttggggctgggggcgccgggctctccccgagaggcggtggcgggggcgactgcagccctggagcccaggaagccgcacggggtgaagcggcatcaccacaagcacaacttgaagcaccgctacgagctgcaggagaccctgggcaaaggcacctacggcaaagtcaagcgggccaccgagaggttttctggccgagtggttgctataaaatccattcgtaaggacaaaattaaggatgaacaagacatggttcacatcagacgagagattgagatcatgtcatctctcaaccatcctcatatcatcagtatttatgaagtgtttgagaacaaagataagattgtgatcatcatggaatatgccagcaaaggggagctgtacgattacatcagtgagcggcgacgcctcagtgagagggagacccggcacttcttccggcagatcgtctctgctgtgcactattgtcacaagaacggtgtggtccaccgggacttgaagctggaaaatatactgctcgatgacaactgcaatattaagattgctgactttgggctttccaacctgtaccagaaggataagttcttacaaacgttttgtgggagtccactctatgcatctcctgagattgtcaatgggagaccttaccgagggccagaggtggacagctgggccctgggtgtgttgctttacactcttgtttatggaacaatgcccttcgatggtttcgatcacaaaaacctcattcggcaaatcagcagcggagagtaccgggagccaacacagccctcagatgctcgaggactcatacggtggatgctgatggtgaaccccgatcgccgggccactattgaggacattgccaaccactggtgggtgaactggggctataagagcagcgtgtgtgactgtgatgccctccatgactctgagtccccactcctggctcggatcattgactggcaccaccgttccacagggctgcaggctgacaccgaagccaaaatgaagggcctggccaaacccacgacctctgaggtcatgctagagcggcagcggtcgctgaagaaatccaagaaagagaatgactttgctcagtctggtcaggatgcagtgcctgaaagcccatccaagttgagttctaagaggcccaaggggatcctgaagaagcgaagcaacagcgagcatcgctctcacagcactggcttcattgaaggtgtagttggtcctgccttaccctctactttcaagatggagcaggacttgtgcaggactggcgtgctcctcccaagctcaccagaggcagaggtgccgggaaaactcagccccaagcagtcggccacgatgcccaagaaaggcatcttgaaaaagacccagcagagagaatcaggttactactcttccccagagcgcagtgagtcttcggagctgttggacagtaatgatgtgatgggcagcagcatcccctcccccagccccccggacccagccagggtaacctcccacagcctctcctgccggaggaagggcatcttgaaacacagcagcaaatactcagcgggcaccatggacccagccctggtcagccctgaaatgcccacactggaatccctgtcagagcctggtgtccctgccgagggcctctcccggagctacagccgcccttccagtgtcatcagcgatgacagcgtgctgtccagcgactcttttgacttgctggatttgcaggagaatcgccctgcccgccagcgcatccgcagctgcgtctctgcagaaaacttcctccagatccaggactttgaggggctccagaaccggccccggccccagtacctgaagcggtaccggaaccggctggcagacagcagcttctccctcctcacagacatggatgatgtgactcaggtctacaagcaagcgctggagatctgcagcaagctcaactagcattccagggcgcccaggggcgggcgggggtacgagggaggaaggggagcaagacttgggctcacaggctggttacctctttgctggctgtgacaacagactgaaaaaggattggcactgtctcacttggccaagtttgcagccttgagccaacacctaaaagggagaggtgggctcttctgccagttctgtcaattgtcagtcagaatttgggccctgtttggcatttgctttatggcacctcctagaggaccagctgtccaggggaggtggtattgaccggcactcagtgggtggagaggaagcatatgtggaaggagcatttccttagaagtcatccagatgcttctggaggaggggcaggagacacttgggctgtttgccttgggtgagcccaaagaacttgccccttttctccttgtattagcaagctaggtctggctgcgtggagctggcaagtagatttcagcaacttgagcttgagttgacgatcaattaatagtggctgccagttgtgctggcgtaagtggcccacatcatggggaaggagtgctgtgattgactagtaatggctaccacgggaaagggaaggggaagcagtagcactaatgctatgtagttgtcatctttgatctggctaggccctgggaatcgggtttagtcatcctgtgggatctatgttaactctttcatgccactggtgaggcatttgttaatttgctactcaactttgaggaaagacagggccttggtcagagagagaatgctctgaactctgctaaggacatagagtcagcccatggtgatttagctccttgctgttcacctcctctttcctgatgtctgccttgctctacagcacaacctcttgagggtggacagggagaaagatgatggtgtcagaggtcaaaactattatatatgacagggcacaagatggtctgtgatctttgcacagatgaatggaagttgatgcacaccaacaagaggcaacttgtcactttctttctcaatattaactggaatgctgcctcttgggttctcacctgcatggatgctttgagttggacgtgatactgtccatattctccagaggattacctggctgaaccattggctctgttcaccagtgacagatggtttccccatccactgagtgtagcatcctcagaggtaggcaagtttgcttctagggagttagcatgtagatgggatattgggatgaggaaaggaaaatcaggtagatggtgctttttttcccccaaatctaagtattctatgtcatggttttaaactttgccatgaactcctgggctttgggggaagagaaagttccattcatttaaatgaataaggtgttgaaagagtgcagggggttgggaggaagcatgtaagagagggaacatttccttagatgttacccagatggttctgggggagacagaaaagaggtgcggcaggactcttatcttaaaaagtaaacaaaacaaaacaaaacaaaacaaaaaactagatatgtaatttctaaacacccagatcacaatgacaagatgccactccaaccatgggacaccttcatgatactaggtttgtacttcctggtctctgggatgacttcagattctgctggccaaggcaaattgaactcagttcaagatggccaccactggtagacgtgtagatagaaaagaggactggtcttgggaacatctttggaaaaaccaacaaacaatagttctagggagatgagaaaaaaattcaccttacagtgctaagaaagtgcattagaatggaattgccctttccttaaggagacagtttgggctctccccttgccaccggctctggtgttttggcttatgcgttccttcaggttgagctgagcagtgtgttatgggaagctgctcaatttcctttcattcaattccacctccttcctgaactctaatagaggttaaaagggaaaaaaaaaattctgtagatagcaaattgtgtgtgtgggggggggtgggggtgtgggtgcatggaggacaacctgcaactctgagctccctacttcctgcctcatttcatgcagtcttttctgaacagcctatgctgctgccctgctggccccttgtgcacggcagctggccgtgtccgtagctgtcagtatgacttagatctagctcctacctactggttgatgtgttttttccttttgccaagtgattgagtctgtttagtagtttccatcattctagtctttaagtaaaaatgacactattgaggaaagtcagtctactcccttcttcctccccccaaacacgtgttctcttttgtcaggaaactcagccagtggactgtggcagagaaagtcctccactcagaggcagagactgagttaagtcataggtggccttaggcatctgcattgtttgcaggggttaagttttccttccagtgagggctggagggatgaattagctggtacctgaagccccgcttagctctgacactctgccaacatcctctgattctaggtgtggtgttgactgtcctttcaaggaaaaacttgcaatagagggaaaagccattaaagcagctccctgcttcatcattaagtcctgtcatccctaccagccaatcccagtcaaagaagttatgctttattcacttctgtggaattacaagtgagagacacttttaggacctgatggacaaagcaggagattcactgtcagctttcctggtcctctccttacttctgtgggccttgcaccgtcttagtttacacatctgccaaaggggtagaattacacttctttttacaggtaaatgtcaaggcacaatcagttttcaggaagtgcttcaagaccccaggtgaaatgaaaatgctaagtaccctctgaatggccatgcctgttaccaggtgctgcttcttcagatgatggggagcacttttcagggtgaaattcaggcgagttttgcccaggcctgctgtcttgagtacaaatgtgaatgatcgactgactgcttgttgccaaactggaaatgttctgtagggatttactggcatggtatcattcctagaagaaaaaaagagagaaacttgactgcacattaaaaaaaaaaaaaaatccacattgtgacttttatttaatttctattttttttggtaataaaaagttgacttttttatttgaatttgtcttttttatttattggtctgaaaggcatttcaaaggtattataataatatattggtgtaatttaattggtgcaacatgctttatggctcctgtcaaaattggttttcactcatttgattggtttgagcccagaacagcctacaggggaaaaacaagctggataaccacccaaagtgtttgtattttcgttggaaactgatttttgtttcattttggtttttgtttctgtttttatttttaaattaaataaattgcaatgaactg

SEQ ID NO: 32557 - DNA, 5109 bp, Homo Sapiens
aaaaggggacatacagcagctgtaggaggcagaaaggatgtggctgtggaaggaaaccttttgggtttcagcacagagtctggaattcctgcttctgatcatcctaggccacaggcaaggagcgtggcagagtcccccagctatggccctggcctcccgccgtcgcctcctgagaacccacaggcaaagggcagggagggcgtcaggtttccccgtggggcggagcctgaccatctgcttcccgcagtgcctcccgcggaggtggacatggggtgggtaggtggcacccaccagcggggccctccccatctacaggcacacctgccccctactgctggtgacacacaggcaaagctccgggccagtgtccccgagcctaggacgcaggcaggtgaatcccaggagcgtcccctgacacaggcggacctggggaggcaacagagtcaccaggcacaggaggagaccccccagcccggggatgcggggaagagggtggcgccgtcgggctcgaaggttgtgctgaacccagcaaaagagcctcagacatggtgggcacaggatctggccggggacaaagggatggccattggggttgggggcgcctgccagcgcagtgaccaaggtcagcagcatctgcagggaccctgggaggagcgggggcggagcacggcgtggggagagggcaccagggctgccaggaacccagctgtgcctccaggggagcccgaggggccgggaagcccggcagcccaaggacaggcccagaaacaggttcaggaatgggaccggggacaggttcagggacacgctcaagaacaggcccagtggcagacccagatagaggcccaggggcaggcacaggaacaggctcagggtgggacccagggacacagtcagggacaggcccagaaacagtttcagaattgggcccagggacaggctcagggacacgctcaagaacaggcccagtggcagacccagatagaggcccaggggcaggcacaggaaccagctcagggtggggcccagggacaggttcagggacaggcccagaaatgggctcaggggcagattcagggacaggcccagaaacaggttcaaggagaggttcagaaatgggcccaggaagaggctcagggacaggcccagtggcagacccagataaaggcccagaaatgggctcaggaacagacccagaaaggggctcaggaacgggttcagggtcaggcccagaaaggggctcaggaacgggcccaggaacaggctcaggagcagacccagatagaggctcagggtcaggcccagaagggggctcaggaacgggctcgggaacaggcccagaaaggggctcaggaacgggctcgggaacaggcccagaaaggggctcaggaacgggctcgggaacaggcccagaaaggggctcaggagcgggctcgggaacaggcccagaaaggggctcaggaacgggctcgggaacaggcccagaaaggggctcaggaacgggctcgggaacaggcccagaaaggggctcaggaacgggctcaggaacagggtcgggagcagacccacatagaggctcagggtcaggcccagaaaggggctcaggaatgggctcgggatcgggctcgggatcagggctgggagcagacccagatagagactcagaggcagacccagaaaggggctcaggaacgggcttgggaacagggtcgggaacaggccttgacaagtgggatggcgcctcgggcctgggagcagcccattagtggcatagctgagggagtggatgctgctggcaggagtggggggtccagaagcccagcccccagggatggtggacagtcagggggcagtggcctgggggagcccagcgccgggtacccacccccaggaagccgccccctcaggggcaagagcattgccacctctcccctggggctgggaaagagcccaactgagcccaagcctgaggctgggggctgcgggactccccaggccccggcccaggaggggtccccagaccaccctggggctgagagggccctgcaggacaggatggaggcatcggagcccgagcgtcgcgggaggtccaggcacctggccaagtacaaagcccagagcttccgtgaccagagggccttcgatttgtccttcagaccaatgagcgtcagggccagcgacacgtctgagctcccaaagtgaggccccgagtacacaccgtggctcgcccagcactgtgacatccgcccattgagggacttcaggcattttcctgcctccaaatgcgtcttggagcatcccctacagagacgcctgtttccataattttctttcccttcttcacaagctgaccttgggaggattgagctacatgtgggtcgggttcctgtcaccccacagagccacgaggccatgggggtgggaggtgcgggcctgtggcctcaccaggccctcgggattctttgtgtcttcactcgggggcgccggctcacccctctctcacacagcctgcagcgtggagctcacacctcccgcagtggcacggtgtgtgcgtccccttcgatctgcaggatgctggcactttgggacacctccccagctctcacagggccacctcccactgctccctgcccacaccccaccatgccctgctctgacgtggccgcatggcacccaccatccatgggcccaaagtgatgcacaccgccccacccccatgactcgaaagaaagggcagagcttcctccagcctcagacgcccaggtgggtgccgggtgctgtgtggctgctgggccatgtggtggtcaccagagggtgtggggacgctgggatcccaggccgaaaccagctcatccggaggaagaggcctcaggaaatgcccacgttaagttctgagaaagggacagtgcagagccgtgggaagccaggatcccagggaggcttcgtctggaaactgggtgctgggagaacgaacgggagcctgcccgcccttccctgcagtccctgtgggtggtgccactggtgccggtgacctgagagcctcgctgtctgtcctccgtcctcccgaacagcatagaagtgtttcctgccctggcccgagacggcccacgactccggccctgttcaggtactgaggtaatgcatgttcaggctggaatatttgaatgctgtctagaggcacaagaaggaaatcaaagccacctgtggtcacattgcctcgagatggtttttgttgctactctggactattttttaggctcttcctccatgcacctattttaaagcacattcttccccatgatggagccatgcacctccgtgtcgcgatccatcgtcccaggccactcggtggcctctgaaacccggacccgtgaggccacacggctgcctgagtggccccggagcagctggattttcagcgtgaaccgatgcagcctgtcgccctacagccccgcacccttgtttttggtggtgccctccctgtggaaagttaattcctgctttttgaaggtgtcttggcatcttctgcctttgctactgagcggtttcctgaaacagccctaagcgttcgcaaaggcgctttggtgcctgctgcgagcacctgttttctgactcggatgttcctttagaggaaggtgttttccagtgtcggccctgagagggcgttcagcaggcgcgtcctacccacgcggggctgaggtctctccttccagggaaggtccatcccggcagacgccagtggctttggctctgcagcgccaaggaggcggcgtggcgtcatgctccggggagcgcacaggtttccttccagtcgaacaattaacttcagatccagcaggtttgacccaccctcacctgctgggacatgcgagtgctggtgtctggaaggagggccgggctgtgctgagctctggggggccggtccccacagctcccccgacagggcccccggggcctcctctataaatcaggggtccgtgctcccagcccgcttcgaggggtttctgcttggcgtgtgggttctaagtgcgagctgctgtgtgtggaggctcctgagcaccgggtgcccctcgcgcgtgtgggtcccggggcagcccagctgcacacaggatggtccgggggtgcgggtgggggcagagctgagcatggcgtgtacttggccacagaagtcttgctgtggtgccgctggacccctgctaggaggacagggtcccctctctcacgaagcacacggacctccagagtccctgcccctgcagtcctgggagcctgcagttggggctggagttggcctctcggagccacccaaacggagaggcccatgagaggggagctcaggggtccagcagaggctgacagagtggcctctttgtcctgttggcggcccctgctcatgcctggggcgtcctccctggagctgggggagctcagggacccccaggtctgtgtggctgcccctgccactccaggcacagcggcacggccctcactctttacctatttggaattggaggcaatgagtggcaagaacatgatgacagacacgggaggtaaaaatatgttcactggctgttccctttataaataagaagtggtgggacttgcgctgctatttttaaatagaccagagagtacactggagaaggcattgagtggttttattttaagtggtggaaaaaatgatgagaatctcctccagatgacagctccggaagtgtcgtgcctgaacccctctcacagtctggcgggcgcagagtctgtgagcggccaggaggccacctgctcgactggcccgtcctctccatgtgccagatgcagcccagcatgacactgccctcagctcaaaaacagcacagctactctgtgtgcaggaaaaaactgccagtgacttcaccaggatttgagaacggtccgtacgttcacactaagctgagacagcgcaggttagaagatagcgcggggaagtattcacacttcagatacgaccatcacggccacatggctaaggcccacaccctcccggggtgaaataactacagcagaagaatggggcgctaaccacctccacgggcattttaaataaaacccaaagttgttttgtttttttaa

SEQ ID NO: 32558 - DNA, 1220 bp, Homo Sapiens
tgagagcttcagactagaaaagggaaaaagccccacttttgcttcgtcactagaaaccgggtcatctgagtcagccgagccaagtgacgttaggccgacccgggccccgggctagcagagcggaggcgctgccacgaaactcgtacctgcggctaagagcaggaaaaccctttcctgtatgccatctgttttctgtggggccctgagtgatgaggagaggaacaaggattcatggaagtgaggtcaaatttgtcaagatgtccacaatcccgagacactttggcctgaaatacaaagaggaatcgtatatgtttaaagagcttgagaaagttcggcaggaaactaaaaaggattttctccgattcaagcagaagttggcctccaagccggctgtagatgaaagcccagtccacagcctccatgcccccggcccggcccgccccgcgcgcgtttcctgcgccgcagcccggacgtcgagaagatacccttcgcttaaaggccctgcgatgtccgcggccgccctcctgcaggaggtgctcggaggcgcgccgcgtccctcgggcctgggtgaggcggcggctccaggcaagacccggtcgtttcgcccccgggacttttacttgcggagctccgcgttcctacggcaccaggccctgaaaaagcccccagtcatcgcctcggggttcggcacggccagacccgtggtcctgctgcctccgcccgagccacccgtgaagcgcagagcgcgcggggtcttggagagctcgcggcacgcggctcccaggcgggtcttccacttgggaagggagcgcgaacagagccaggaggtagctcctctcgcagggccctgcatggccaaagagaggaaggccagctccgtctccgcagaggacggctacatggaggccagcagcgggcggaggaaagtgaggatccgcagcaacttcgtgagcgagagcggggcccgcgaggcgcgggaagcggcggggttaggagcccagggagaacaggagagctggccgcccagcgacgcgcgggaggccgcctggcaggcgctgctgccctcccgcgtgatccccacgtccatcgaagagatcatcgcctctctgcagtccgaggcccagctggcctccgaccagaccatcaaagagctcatacggagcgtccttggccagaactacgacattacaatggaagtaggtgaaccaaaacaagagtaa

SEQ ID NO: 32559 - DNA, 4119 bp, Homo Sapiens
cgcagaaacttgttgcaacaaacaggcgaccgcgggtgcccctagcagccagcggcagagtgggtgggcgggcgagagggaggggaaggctggcggacgccgcagcgaactggtgggcagacccggagtcgccgcgtaagcggggccggctcagtgcggtgcggcaggcgcggctgtgcggcagcggaagtcctttgttgcagcacagtccctggcagagccagagcctctccgcgcagcccagcccgagcgccgagcgccgcgcgccgccgccactgcagctcgcggccccttcgccttcgcccgcctttcccgcggctgatttgccttaaactccctaaaatctccgcagctctggttcctgttgcggccggtctctaattaacagaagatggcaaagcccagccacagcagctatgtccttcagcagctaaacaaccaaagagaatggggttttctctgtgactgctgtattgcaattgatgacatttactttcaagcacacaaggcagttctagctgcctgtagctcctattttagaatgtttttcatgaaccatcagcatagtactgcacaactgaatctcagcaacatgaaaattagtgcagaatgttttgatctcattttgcagtttatgtatttaggaaaaattatgacagctccctccagttttgagcagtttaaagtggcaatgaactacctacagctatacaatgttcctgactgtttagaagacatccaggatgcagattgttctagttcaaaatgttcctcttctgcttccagcaaacagaacagcaaaatgatatttggggtaagaatgtatgaagatactgtggctcgaaatggcaatgaagccaacaggtggtgtgcagagccaagttcaacggtaaatacaccacataatagagaggctgatgaagagtctttacaattaggtaattttcctgagccactatttgatgtatgtaaaaaaagttccgtgtccaaattatctactccaaaagaacgtgtgtcaagacgctttgggcggagttttacctgtgatagctgtggatttggctttagctgtgaaaaattattagatgagcatgtgctaacctgtactaacagacatttataccaaaacacaagatcttaccatagaatagtagatattagagatggaaaagacagtaacatcaaagctgaatttggtgaaaaagattcttccaaaacattttctgcacagacggacaaatacagaggagacacaagccaggctgctgatgattcagcttcaaccactggaagcagaaaaagtagcacagtggagtctgaaatagcaagcgaagagaaaagcagagctgctgagaggaaaaggattattattaagatggagccagaagatattcctacagatgaactgaaagactttaacattattaaagttactgataaagactgtaatgaatccactgacaatgatgaattagaagatgaacctgaagagccattttatagatactatgttgaagaagatgtcagcataaaaaaaagtggtaggaaaactctaaaacctcgaatgtcagtaagtgctgatgaaagaggtggtttagagaatatgaggccccctaacaacagcagtccagtacaagaggatgctgaaaatgcatcttgtgagctgtgtggacttacaataaccgaggaggacctgtcatctcattacttagccaaacacattgaaaatatctgtgcatgtggtaaatgtggacaaatacttgtaaagggtaggcagcttcaggaacatgctcaacgatgtggcgagccccaagatctgaccatgaatgggttaggaaatactgaggagaaaatggacttggaagagaatcctgatgagcagtccgaaataagagatatgtttgttgaaatgctggatgattttagggacaatcattaccagataaacagtatccaaaaaaagcagttatttaaacattctgcctgcccttttcgatgtcctaattgtggccagcgttttgaaactgaaaatctagtggttgaacatatgtctagctgcttagatcaagatatgtttaagagtgccatcatggaagaaaatgaaagagatcacagacgaaagcatttttgtaatctgtgtggaaaaggattttatcagcggtgtcacttaagagaacactatactgttcatactaaggaaaaacagtttgtttgtcaaacatgtggaaagcagtttttaagagagcgtcagttgcgactgcacaatgatatgcacaaaggcatggccagtggtgaaatagggccttctaaacctgtggagaagtgagagatctgaatttggagaggacatggggaagaatcaatcttcaacagataatctttaagtacagacccaggaatatcagatctgaagtggcaccatcttttctgtcttcctgacaaacttccatcaacccaaaaagttccagttgcaaagatccaagaaaactcagtaaagatcactttggaatcactttgttgtaacaaaattgattcatggtgactctaatatttgtgtaaatctgctgaagaaaagtaactagaaaattcatacaacatcagtggttacagctatactaaaataaaactttatatgctaattatcttcaagggtctttctaaaataaaaggggttgttaggctactgcaaatataaagagacataatcacaaatctatttatatagatataaataattctaaacttaaaatcactagaattatagcttaaatattatgaaatgtacttagtcaacttaaaaacttacaccaaaaatctgtagtttagagtgtaagaagtaatgggtacagagaaaaaaaatttaagaccaatattttaacaggataatttggttattactcactatagtaaaacacttgcccttcttccttttccactgtatatgccagtcacaatcttgatcatttatatgaatgaaactcccttttaaacctgttaacttgaaggagaacagaaatggtattacttcaatagtggtagatttccacaaatcagacacattattttcttctgaacttggcaatataacctaataaggcagaataagtttctgttaaaatacttattctcaatatttatgtataaaccatgcttctcagctttcaaatttcaagataaaatttaagtattcagtaaaatgatggttaacatgttttaaaaaatctttaatggagaagttaaatatttggtgagattttagtctggctataaatgctttgtttgatatatatatgtgcacatatatatattacttaaccatatgaattttatttccttattctgaatatacttgtagttttacttctttctgtttatgtacccaattccttatgattattttgtttcttctgcaatatcaagatgttatttattttgagaaatgcttatttttatgactatttattccaatgttttaacaagaagcacagagatttatagtattcttaatagtatgtgcagaagttacatcatttaaaaaacccttgctgtaaagtaggataacttgaatattcattctaataattagactaagtgaaaatctgagaaagagttaattgcaatgtgatagtgggtagaaaggagagaaaaacccactgaagggttcaaatacatgtgaattctactgctttaagagaaataaaacaaataagcctagggaaatattagagtctaaaaaaccctagagttaatctcttttgggaacataaggaggtatacagaactgcagacctctaaacataagtaggaaaaagaaaaataaaagaatattaccaataattaaaggtgccagatcaaaatagtaataaatcaacaaataatttttgattgactggtggaattagatttactaaataaaaatggcttaaattttgactgtactaactataaatgtaatgaattataataattataaatggtataaatgcattctacaatgtgattattttctgtattttagtatatagtataaaatggaattattgggttaaagtacttttattacatttcttaatccattgtttttacctaataaaatttcctcctctatattccaaagtt

SEQ ID NO: 32560 - DNA, 8685 bp, Homo Sapiens
cccccggcggagccagctgctgctcttcggtgctggccccggtgccggccccgttgcccagggaacaggctcccggcagcccccgcggcccggagtccatcccgcctcctccggcccggcggggccgacgagtccggaggggctgccgcgggagcccccaggtttccctagatgacaaataaacattccttttcctgcgtgaagatagtctgtggaaaccttggccatggcatcgatatcagagcctgttacattcagagagttctgcccgttgtactatctcctcaatgccattccgacaaagatccagaagggtttccgctctatcgtggtctatctcacggccctcgacaccaacggggactacatcgcggtgggcagcagcatcggcatgctctatctgtactgccggcacctcaaccagatgaggaagtacaactttgaggggaagacggaatctatcactgtggtgaagctgctgagctgctttgatgacctggtggcagcaggcacagcctctggcagggttgcagtttttcaacttgtatcttcattgccagggagaaataaacagcttcggagatttgatgtcactggtattcacaaaaatagcattacagctctggcttggagccccaatggaatgaaattgttctctggagatgacaaaggcaaaattgtttattcttctctggatctagaccaggggctctgtaactcccagctggtgttggaggagccatcttccattgtgcagctggattatagccagaaagtgctgctggtctctactctgcaaagaagtctgctcttttacactgaagaaaagtctgtaaggcaaattggaacacaaccaaggaaaagtactgggaaatttggtgcttgttttataccaggactctgtaagcaaagtgatctaaccttgtatgcgtcacggcccgggctccggctatggaaggctgatgtccacgggactgttcaagccacgtttatcttaaaagatgcttttgccgggggagtcaagccttttgaactgcacccgcgtctggaatcccccaacagtggaagttgcagcttacctgagaggcacctggggcttgtttcatgtttctttcaagaaggctgggtgctgagttggaatgaatatagtatctatctcctagacacagtcaaccaggccacagttgctggtttggaaggatccggtgatattgtgtctgtttcgtgcacagaaaatgaaatatttttcttgaaaggagataggaacattataagaatttcaagcaggcctgaaggattaacatcaacagtgagagatggtctggagatgtctggatgctcagagcgtgtccacgtgcagcaagcggagaagctgccaggggccacagtttctgagacgaggctcagaggctcttccatggccagctccgtggccagcgagccaaggagcaggagcagctcgctcaactccaccgacagcggctccgggctcctgccccctgggctccaggccacccctgagctgggcaagggcagccagcccctgtcacagagattcaacgccatcagctcagaggactttgaccaggagcttgtcgtgaagcctatcaaagtgaaaaggaagaagaagaagaagaagacagaaggtggaagcaggagcacctgtcacagctccctggaatcgacaccctgctccgaatttcctggggacagtccccagtccttgaacacagacttgctgtcgatgacctcaagtgtcctgggcagtagcgtggatcagttaagtgcagagtctccagaccaggaaagcagcttcaatggtgaagtgaacggtgtcccacaggaaaatactgaccccgaaacgtttaatgtcctggaggtgtcaggatcaatgcctgattctctggctgaggaagatgacattagaactgaaatgccacactgtcaccatgcacatgggcgggagctgctcaatggagcgagggaagatgtgggaggcagtgatgtcacgggactcggagatgagccgtgtcctgcagatgatggaccaaatagcacacagttacccttccaagaacaggacagctctcctggggcgcatgatggggaagacatccaacccattggcccccaaagcactttttgtgaagtccccctcctgaactcactcactgtgccttccagcctcagctgggccccaagtgctgaacagtggctgcctgggaccagagctgatgaaggcagccccgtggagcccagccaagagcaggacatcctaaccagcatggaggcctctggccacctcagcacaaatctctggcatgctgtcactgatgatgacacaggtcagaaagaaatacccatttctgaacgtgtcttggggagtgtgggaggacagctgactccggtctctgccttggcagccagcactcacaagccctggcttgagcagcctccacgggatcagacattgacgtccagcgatgaggaggacatctatgcccacgggcttccttcttcatcctcagagacgagtgtgacagagctcggacctagttgctcccagcaggacctgagccggctgggtgcagaggacgccgggctgctcaagccagatcagtttgcagaaagctggatgggctactcgggtcccggctatggcatcctcagcttggtggtctccgagaagtatatctggtgcctggactacaaaggcggcctgttctgcagcgcgttgccgggcgccgggctgcgctggcagaagtttgaagatgctgtccagcaggtggcagtctcgccctcaggagcccttctctggaagattgaacagaaatctaaccgggcttttgcttgtgggaaagtcaccatcaaggggaagcggcactggtacgaagccctgccccaggcagtgtttgtggccctgagcgatgacacggcctggatcatcaggaccagtggggacctatacttgcagacaggtctgagcgtggatcgcccttgtgccagagccgtaaaggtggactgtccctacccgctgtcccagatcacagcccggaacaatgtggtgtgggcgctgacagagcagagggccctcctgtaccgggagggcgtgagcagcttctgtccggaaggcgagcagtggaagtgtgacattgtcagcgaaaggcaagctttagaacccgtctgcataacgctcggggatcagcagactctctgggccctggacatccatgggaacctgtggttcagaactggcattatttccaagaagccccaaggagatgacgaccattggtggcaagtgagcatcacggactatgtggtgtttgaccagtgcagcttatttcagacgataatccatgccactcactcggtggccacagcagcccaagcccccgtagaaaaggtggcagataagctgcgcatggcgttttggtcccagcagcttcagtgccagccaagccttctcggggtcaataacagcggtgtctggatctcctcgggcaagaatgaattccacgtcgctaagggaagtctcataggcacctactggaatcatgtggttccccgtgggacagcttctgctacaaaatgggcctttgtgttggcttctgcagctcccacgaaggaaggaagcttcctgtggctgtgccagagcagcaaggacctgtgcagcgtcagcgcccagagcgcacagtcgcggccctccacggtgcagctgcctcccgaagccgagatgcgcgcctatgccgcctgccaggatgcgctgtgggcgctggacagcctcggccaggtgttcatcaggacgctctccaagagctgccccacgggcatgcactggaccaggctggacctctcccagctaggagctgtaaaattgacaagcttggcatgtggaaatcagcacatctgggcctgtgattccaggggtggagtttacttccgtgtagggactcagcctctcaatcccagtctcatgcttccagcctggataatgattgagccacctgtccagcccgccggggtcagcttggtcagcgtccattccagccccaacgaccagatgctgtgggtgcttgacagcaggtggaacgtgcacgtgcggaccgggatcaccgaggagatgcctgtggggaccgcctgggagcatgtgccagggttgcaggcctgccagctggcgctgagcaccaggaccgtgtgggcccgctgtccaaacggagacctcgcccggcggtacggcgtcacagacaagaaccccgccggggactactggaagaaaattcccggcagcgtgtcgtgtttcacagtgactgcgtcagatgagctgtgggctgtgggcccgcccggctacctcctccaacggctgacaaagacgttcagccactcgcacggcacccagaagagcagccaggccgccatgccccaccctgaggacctggaggacgagtgggaggtcatctgaaggagccctggccgagtcacgcggaggggcccggcgtctgtggcgggcacaggggcttcagagtgactccctggtggacgcgctgcctcaacacttgtccagacacctctggccaggttggacccgcacacttactttcatctatgttggtttctgtctcgttccagaacccacagcctccacccgtggctggcgtgattgctgcagcagtggcgcctcctagctcaggacagtggcgactgcccggctgcatgcactccgattacccacgtgctgccgtcctggtctcatccacagatagctccagcttttgttggtgggagtggtctccggaggcctcccagaaccaagggtagccgggcagctggtttggcccagggcctccttccacattagtagccccagggccagatggagccaaaggtcagctctctgcagcgcgggatgtgctcggtgatggctttgtcccatcataggggggtgtccccccagagacaaagctgcagagcacattccatgccagacgctctggccaggaagctgaggccgggcttgagaggagagcgctggccatgccaggagagaacccacgcacatgcacaccacaacacacaacacacctcacctcacaccacagcacacctcaccacaccacaccgcactgcaccatacctcaccacatctcaccacaccacagcacacctcaccacacaacacaccacaccccacaccgcactgcaccgcaccgcaccgcaccgtacctcgccacatctcaccacaccacaccacaccacacctcactgcccacacacggcgcaggctgcccgcctcctggagagcacacttcagctgaaacagtaaagcctgatgggtgcaaatggaacctggatgtgtgcacgtgtgtcccaggtagggacggcacaggagggtgcatggggcgtgggggagctgagcaagggtcgctcacttagaaatgtctttggaatggtgtttaactaatgctgctggcggacatcctaaaaccagatgcatcctcagaggacgagtctactaattattgcctttgttgttgtattacaaatctgcataaaatacctcatttcaaatcaaatcttacaaatttagaagagagatatgttttccgaaaacagtggaagccctttgttccttcccgggtttgtcctgagcctgcactgtcctcgcctgcagcctcagaggggcaggcatccccgcacagacttgactggcagggcggtcacgggacctgcgggctggctccgagtggcagcccatgccttctgcggggtatgggttgacacttgacaggttgaaaccagtgcctctatggacggctgctgtggccccttcagacaatgggcagtgcccaccccgcccactggcatctgcgtgtgagggctaggccgccctgccacacatcccgccccctcccggaggcagcttcaggacaggacaccaggctggctgctttttttagcctgcccctggcccaggcccagtccttggtgtcagggagcccccaggccgcaggtggagggtgataaaatatgttctctgacaggacccagccagccacataggtggaggttttccatgtccaaatgaggtcaagatgccgaaatcccagatctgacttcacacttcccttttctagaaccttttgtaaaagttggtggcagcagaggcagccccaggccgggctgcatctctctgtgtctgttgtgccttgcccggcgcctcacggatggcaaagctctcctcacccatgggactgtagtgcaattaaacccgcgtctaggtgatgcttttaaagttgtagcttcgtgctttgtacagttttctttctggttttaatttttagttgtgctttgagtcagtgcaataaactagactttttccaaacctggccgagtgtggtgcctgagctgtgagaagtgtcctcagccgacactcacgagggcagtgcaagggagaacctgccagcccagccccaccacagggagagtgcgtcagcagacctgtcctggcctggctggtgttgaaatacacaccggtttgcccaagtggctgttatgggggaatggccgctccagagctggctgtaccccatggtagcctctgaggaggacgctgtggggtgaggtccagggctgcctcctcatggagctgtgtgtgagcaggcgttggaggggttcgagcccctggttctgtatcttcagccagcaaacgaaaccatatcgcaaaccagagctgctggaaaccagcacacgcaaaagatgacgcccagcacagcagcaggacacaccatgtgccaggaaatgacctcagcaagaaacctcaggccgtgtgaagagcagcaaagctttccagaaggcataaaaggaaacttgaataaaggaagatatgttccacattcctggatggaggactacacacattatggaaagacctcattctttccaaaggaatttataggtgtagcttgatttcagttcaaatccccactgggattgttttgttggggcaggcagggaggaataatgttagtacccacaaatgcccatgactgtgcccaatgtgcttctcaccagagccctgcaaggggaagtctcattagccccttgagactcagagaggttaggtaacttgctcaaggtcacacagcactgggactggaagccagctctgtagaactgcagacctgtgctgtttgatgcctcctcactgtcccgtcactcctgggaagaagaaacgggtgagaactgctaagtgatgacaggtggagccccagcaggggccactctattgaatggcatggcccagaccctcggagggccaggcaacaggctagcaaggcccacagggagggagcagaatggagagggcatctcagatgcgcttaaggagcggcgggggcggggcatggggggtgtcacaactaatgtggccactgcttcattctctgggcaaaataatattaaatggattaaagaatctaaaaccagtgggaaaactgtctgatttctggatggcaaaggctttctaaactcaaaagtgataggacaagctacagaggaaaataagtacatagatttgatttctccaaaatacagaaatgctgctgggcacagtgatgtgcagttatagtcccagctacttgggaggccaaggcaggaggattacttgagcccaggagtttgaggctgcaatgaactatgatcacaccactgcactccagcctcggcgacagagcaagaccttgtttctcaaaaataaataaatagaaggaaataaatgtaaaaatgctgcaaattaaaaacctcaaagaagggaaataattgcaacaaatgggaattgatgttgaatatttaccttaaaaacctatacaacaataagaggagtgcgcccttcagcagcatgtatacaaaaattgcaacgatacagagattagcatggcccctgcacaaggatgactcgcaaattcataaagctttccataaatatatttattaaaaaccaataggaggagcacttcgagtcgagtgtaagggcccttcacaaaagcagaaggaacactggcccaaacccccagcaccccggaagcagaggtgagatgggagcagcttgggagccccccattggcgccgccctactggggaagccggtccgtacgtaggccttgcatctcgccacctccacttctgtcctcaagaacaagtcctaggtcaagggaaacagcacagcctgtttataattaggaaacacttaaaacagcctggcatttgggaacagccatgttaacgtgagcaaattcctctcatgaaatagcctgcagctattaagaagcacgtgtgtgcaggaagcggaggcgcaggacctcaccgcgccagcgtgaagttcccgggcatggtcatgaaagcgtggttctgtaagaaatcagagggagaaagggagagaagggggagggagacaacccaaacgttggagggtatttgttgtaaacttcaaacttttggcaggtttgaaatttttcataactccggggaggagcaagaggggtgaaaagaaacaagttctctacttgtgatcagcagctggtcatagtggttgcctggagtatatgcctttttgtatcctttgaatttccagccatgtaaatgtattatttattccaaaaataaagcagatttacattttaaaaattc

SEQ ID NO: 32561 - DNA, 1226 bp, Homo Sapiens
atgacttctcagccgtctctccctgcagatgacttcgatatctaccacgtccttgcagagtgcacagattactatgatacccttccagttaaggaggctgatgggaaccagccccattttcagggtgtcactggcttgtggaacttgggcaacacatgctgcgtgaatgccatctcacagtgtctctgcagcatcttgccgctggtggaatactttctcaccgggaagtatatcaccgctctgcaaaagtttcttcttccaagcgattgcagtgaagttgccactgcttttgcctatctgatgacagacatgtggctgggagactcagactgtgtctcaccagaaatattctggtcagctcttggcaacctctacccagcatttacgaaaaagatgcaacaagatgctcaggaattcttgatttgtgtcctaaatgaacttcatgaagctctaaaaaagtaccactactcccggagaagatcatatgagaaaggatctactcagagatgctgcaggaagtggattaccactgagacatccatcatcacccagctgtttgaagagcagctcaattatagcatcgtatgtttaaagtgtgagaaatgcacctacaagaacgaagtcttcactgtcttctcactccccattccatccaaatatgaatgctcccttcgggactgtctccaatgtttttttcaacaagacgcactgacctggaacaacgaaattcactgctccttttgtgaaaccaagcaagaaactgctgtgagggccagtatttccaaagcaccaaaaataattattttccacctaaaaaggtttgacattcagggtacaacaaaaaggaagctgagaacggatattcattacccactcactaacttggacctcactccttatatttgctcaattttccggaaatatcctaaatacaacctctgtgcagtggtgaaccattttggtgatttggatggtggccactacactgctttctgcaagaattcagtcacccaggcctgatatagctttgataacacacgagtcagtgagattccagatacttctgttcaaaatgctatggatctcctgttctatagctgccagcccttttccataccaatacaaaagcgttaagagccaggaaaatggtgtttcctgaacactgcaaaacaagcagtcagcatctggtggtagagttttgcttggtcattaaactcttagaactt

SEQ ID NO: 32562 - DNA, 1448 bp, Homo Sapiens
atgccaactcagaacctaggaaaccatccagtgggtttctgcagcttaggtgtttcaaatcctcatcagcagcttcatcagcaattgaagtggttgatatgtggactctgcaggttatataaccttcctaagcacctggatgttgagatgccagatcaaccactacccatgggtcagaatgggacaacagaagaagtgacttcaaaagaagacgaagaggaagagatggatgaagatatagaagacttagatcactatgagatgaaagaagagcctattagtgagaagaagttggaggatgaaggaactgaaaaagaaaattgggcaatattagagaaaattaggaagactgaaaggcaaggccatttaaatgtgttgaccctgatagtcctttgcacagtgatctttagatcttaaaaagaagcgataggagacattttgcttatctttcaagtgttcctgacagcatctcagaggatggtgtcctctggcttactctctgggaaatgctgctctgttggaaatccggagttctgagtgatccccatgcgttttctgctgcagagcaggacatgctgaagtgattccttcgtgagcagatgttagaggtctccctttgacagcttgttacaaagttgatcacgaatatactattacgtgtgttatggtcctcattatttggatgaataatttgaataataagtcagcttgtgacttagccaaataaatcttctgattcctagtaaagtgtttttcattatacgaaatgccagctatgtaagaggagattaaaagtactaagaactgtaagtactgcattgattatcatatgctaaccatgggccaggcacggtggcacacacctataatcccagcactttgggaggctgaggcgggtggatcacttgaggtcaggagttcaagaccagcctggccaagatggtgaaacccctgtctctaccaaaaatacaaaaaatttgccagatgtggtggtgcatactggtaatcccagctactcaggaggctgagtcaggagaatcgcttgaactcgggaggcagaggttgcagtgagctgagatcgtgccactgcgctccagcctgggtgacaaagataaactccatctgaacaaaaaagaaaaagaaaagctaagcatggacttaatttctctgagatttaaagctgcaaagagttgctcttcatgaagtagatgggatctcagctgggcagtgaaatgtgagtggggtttggtcagctggtggaggttgcaggaaaattatttacataggtgaagagtaagcgcaatcaggtatctaggaaagaatgaggggttcagagtatacgaaaccaatttgagctataacacaaggagggtaggattcatgtagaagagttgtaggaaatattgctgatgtaatattttgtactcaaacagttctgtggattggtg

SEQ ID NO: 32563 - DNA, 1729 bp, Homo Sapiens
gaaaaagaagggtgtcagcaccctttgcgaggagcatgtagaacctgagaccacgctgcctgctagacggacagagaagtcacccagcctcaggaagcaggtgtttggccacttggagttcctcagtggggaaaagaaaaataagaagtcacctctagccatgtcccatgcctctggggtgaaaacctccccagaccctagacagggtgaggaggaaaccagagttggcaagaagctcaaaaaacacaagaaggaaaaaaagggggcccaggaccccacagccttctcggtccaggacccttggttctgtgaggccagggaggccagggatgttggggacacttgctcagtggggaagaaggatgaggaacaggcagccttggggcagaaacggaagcggaagagccccagagaacacaatgggaaggtgaagaagaaaaaaaaaatccaccaggagggagatgccctcccaggccactccaagccctccaggtccatggagagcagccctaggaaaggaagtaaaaagaagccagtcaaagttgaggctccggaatacatccccataagtgatgaccctaaggcctccgcaaagaaaaagatgaagtccaaaaagaaggtagagcagccagtcatcgaggagccagctctgaaaaggaagaaaaagaagaagaggaaagagagtggggtagcaggagacccttggaaggaggaaacagacacggacttagaggtggtgttggaaaaaaaaggcaacatggatgaggcgcacatagaccaggtgaggcgaaaggccttgcaagaagagatcgatcgcgagtcaggcaaaacggaagcttctgaaaccaggaagtggacgggaacccagtttggccagtgggatactgctggttttgagaacgaggaccaaaaactgaaatttctcagacttatgggtggcttcaaaaacctgtccccttcgttcagccgccccgccagcacgattgcaaggcccaacatggccctcggcaagaaggcggctgacagcctgcagcagaatctgcagcgggactacgaccgggccatgagctggaagtacagccggggagccggcctcggcttctccaccgcccccaacaagatcttttacattgacaggaacgcttccaagtcagtcaagctggaagattaaactctagagttttgtccccccaaaactgccacaattgctttgattattccatttatgctggagattacaaattttttttgtgaaaaaatcagatcttggtgaggacctcgagcagtaagatataaataactcccataagcttagcgttccagtaatggaacactaggcataaatggtttattcagttgtgcaaatgaaagccatctgacagttggctcacattgaacacctgtggagattaaggacgaggacaactatattgatgggcttggatgaactggggcagggcagctcatatttcgggagccaggagaacgagtgagtgctaaaacctcctgttttctgtgttaaacattccgtccctgtttgagacatcagtatgtacagttaacttttgttgagtgtttagcaggtactagggacatactagtgttttccttaatgtatttaatcttcataattatgaaatgggtgctattattagccccatcttatagatgaggcaactgaggttcagggataaagtaataaaattgcctggggtcacccagccactaa

SEQ ID NO: 32564 - DNA, 1606 bp, Homo Sapiens
cgcggagcgaggaagcgggtggcgctgggacgcatgctctgggggagatgagtataatgacccgcgtttgtccgccgcccgtgccccgctcaatccccgcatcaatcccgtgaggccgtttctcccgttggctccactgtaccgggggctgaggcccagggaggtctcgcggctccctaggttatccagctagtaagaggcgaagctggaattctcactgtgggcccattccatggcttttgccagagcgccagggacacactcagttcaccttctagcagggaagacccaaagatgcgcgcccctggcagccagggcgtcggaccaggcaattcctactgtccagcatcacctcctccaggcctctcggatgcctctgttgggacagctaagttcctcttcaaagactcaatttcctggtcataagctgtaaacagattctactcccgctttttcttctttgtcgcacgtctaccctatttgggaaagtttaaaccttagccaatcgggatcagctcagattgtgcggtccaaccccccagccaatggggaaaggacacagaaacaggaactgcgttagggttaaaaaccacttccctcctttgttggcgggtgctcttgggattgcaaccagcgcaagcagcacccttctgcagaagtaaagatgccttgctgggaagtcttctgtctcagtgctggtttttcttgactacactgagcacttgttttcaacaaatttgagggtcttctgggatcccattctcctttgggaggggtagcgattacttttcctcgtgagacacgtcccactgccttgttgcagtggcccaaggagcggaggatcgggtccacccaaagtgaggaataaatccggactttcagcaacgtgggcaggaaggagccttaaaattcccaggcaagtgggtaactctgtgcacagaccaagccgccgacgggaccatcacaaaagctttacaaggccttaccaccctggcaaatgaattagccgaaaattctggactagataacccttttatgggtctcatggaaaagtggtttggaaaatggaaaggactcctggcttcaatctttacctctcttgcaattgtaacaagtgtacttatccttgtgggctgccgcatcataccttgtattcgtgggttaactcaaaggctcatagaaacagccctcactaaagccttcctctcttctctccctccatacttggacaagctcttgctcctggataatcaagaagaacaacgaagccaaatcctgttaaaattttttgcagaggaagaagtatcaaatagaagagaggaaattgttgggacagctaagctcttcaaagactcaacttcctggtcataaacttctccccgtttttcttctttttcgccagtctaccctgtttgggaaagtttaaaccttagccagtcgggatcagctcagattgtgcagtccatccccagtcaatggggaaaggacacagaaacaggaactgcgttagggttaaaaagcccttctctcctttgtttggggtgctcttgcgattacaagctgcgcaagtagcaccgttctgaagtaaagatgccttgctgggaaa

SEQ ID NO: 32565 - DNA, 7762 bp, Homo Sapiens
caagagtgcctgaggctggatcagaaatagccacgatcgtccagtttgattgattgattgattgatttagttgtgatggagtctcgctgtatttcccaggctggagtgcagaggcacgatctccgttcactgcagcctccacctccccggttcaagtgattctcctgcctcagccttccgagtagctgggattacaggcacctgccaccacgcccggctgatttttgtgtttttagtagagacagggtttcgccatgttggccaggctggtcttgaactcctgacctcaggtgagccacccgcctcggcctcccaaagtgttgggattacaggcgtgagccactgcccccagccccagcttgatcttgaacctcctgtgtgtgggcagagagacatggccctgctactgcttgaacggcttccggagacagtgacttgtttcctttttccctctgaactatgccgtagggccaggtgagctgctgtgaaggactcattcttggtagccggcagttactggcaacttgtgagcttggtgggctcctactaacgcacctgggacaccaggctgctgggctcccctctaggcagcctcccctccaggcagcctcaccagcagctcccctgagccatggagaccccagaggtccccgtgggctcgctaatcgactttgggcctgaggcacccacctcttctcccctggaggcaccaccccctgtgctgcaggacggcgatggctccctgggggacggtgcatcagagagtgagaccactgagtctgcggacagtgagaatgacatgggcgagtcgccctcgcacccgtcctgggaccaagaccgccgttcctcctccaacgagtccttctcctccaaccagagcaccgagtctacccaggatgaagagaccctggcactcagggacttcatgcgtggctacgtggagaagatcttctctggaggggaggacttggatcaggaggagaaagccaagtttggagagtactgcagcagtgaaaatggaaaaggccgggagtggtttgctcgatacgtgagtgcccagcgctgcaactccaagtgtgtctcagaggcaaccttctaccgcctggtgcagtcttttgcagtggtgctgttcgagtgtcatcagatggatgactttgggcctgccaagaacctcatgaccatgtgcttcacctactaccacatcggaaaaccacagctgctgcccccggagtcccgggagaagcccgcgggcagcatcgactcctacctgaaatccgcaaacagctggctggccgaaaagaaggacatcgccgagcggctgctgaagaacacctcggccaggactgagaatgtcaagggcttcttcggggggctggagaccaagctgaaggggcccctggccaggaggaacgaggaagacgagaacaaaccccaggagaagcggcccagggctgtgaccgcgtacagccccgaggacgaaaagaagggggagaagatctacctgtacacgcacctgaagcaacagcccatctggcacactctgaggttctggaatgcagccttttttgacgctgtccattgtgagaggacaaagcgatctcccactaccagaggggatgctggagaggaggaggagaagagggagaagtggtgccacatgacccaggaggagcgcgacgacagcctccggttcaacgagaacatcaccttcgggcagctgggcacattcacgcacaacatgctggcctttggactgaacaagaagctgtgcaatgacttcctgaagaagcaggctgtgattggcaacctggatgaagagcaatacaagctgcttagtgaccacattgagcaaatggccactgagtaggccccagaggtcgcactccgcaggaggactgaggccatgtgccattctcccgggcccagcgcccggccgtcaccccacccgatgacctgcatgaagccagcagcacccagagccactcctgctgccctagaactagcggttagaagaatccgctgttcctccctcatctcctctgcctgtgtctgcgacccccatccatgtgccaaagtgtcccttgggtcacacagctaaagccgaggtgaccagttgtaccccgagtgccaggcttgtgagatgagaccaagagggaggaggggaaggactccatgggccatcgtgggccaagggctggcgagggtgggggcgggcaagggatgcaggcaggacagccatgaggtggggctgcagccggcacacccagtggtggagggccggcgctgccactcacggtgggtggccgtgggccaccttccctgcaatgggtgcacacgcggctcccatccagccctctcagcgtggggctgtggctggtcctcactattccccagtctcccgctgtggggcaggaacaggaagtgacgggaaccttgaggaggaaacgcctgtgttagggagagagtgggtgcggtgtagaggatgctcttggccggctggagcaagacctggctcccaccagagggacgtgtgtgtgcctgcagacggcccgggagctgtgtgtctccgccagagtcacagcagtgccgaggtgtccgcggcagaccacacagaccgtctgaaatgcgcccgcctggcggacagctcccttctgaagcagagaagcctccatggtcacgaagcagcgttgtgctgtgtgtccctcgcaagaagcacaggaaagagaagtttctttagtagccactagacaaccaccctttctgaaagcaaacagtgctgctctttattccagacaaggcaggaaagtctgagttgggagtgacagtggctggagagaagcagatctgtgcaacgtgcagggcaagccagtggcgtggcctctgcctctaagcgctgagcattgggccccttccccaccagacctttgtagctcctccagcctctgcagagactcccttcacctcgcacttactgcctgggaaccacggcccttctcttctgtgggtctgtaccaggtactccaggccagcccatgggcccggggcctgaccccaacacctgcatgctgggtccagagccttctgtttcaccgtgcgtggacactgctaggccgcctggggtcccctgcctcctgcctgtcgctgccgtggtccctgactgcgaaataggcccgcggggctctccctcctcctgccatcctcccctcccgcccttcctggctacctcctctgacatgcggtcagataagtcccgtcttgtttgtgagtaccacagaaacgcctgagagtcacttacccggccactgcttggaaggtttccctccggggaatgcctccctggaatgttccagagacggaacattctctagagacaacagtctgtgctgcagattggttggatcacagaatgtgtgtctggggcattatctgaaacgtggtgtcatctgatgcatttggaccatatgctgccagactgcagaacgggggagccggggctcagggcccctgactgcatggtgcatgagtgatctcagcctagcgatgccgctggccagaccgtgaccatgctgccagtgtgctcgccatgagctgggtcagggctggggagttgtgcaggctggggtgacccttcccccatcattgggccccaacgggcatgtctccaccgaatccatttagagaaatgtcagagcgagggttgtgtggacacccctcgctctgatgccaactgcagataatacacacctcctgcagcgtccagccacggctccagggcactgctctcctccttgcaccggtgaaactcaggccacactcaagggctgactgtccaggcgctcccttcagccgcctcgtcgtcagcgttcttagtcatgcattattcgtgttagctgaaatgcattcagactttgttctgcggtgcccacaggacttacccctgtatgtacaggatttttgtatgaaagttttgtttgattctgagactctcttgggaacgctggagagcttgtgcacagcctctggaaggaaaggcagcgctgacttcgttgggcttttttccaagcactttaacttcagaaatggtcttgacacttttttctccacatagactcttgaaatagccatttcaggggaggaaagggttggggttttctttgtttgtttgtttgtttccccctttactacctgttcttgtagatctagctcctcagagttggaggaaggctgacagagaaggtctcctctgtgctccatccacacaggatgccggagagacagccccttgtgctgtgagcagagcaggcagtggctctggaggctgcctgtggtctccttccggctgtggctgacagtggctctggccagggttgcttggagaaggctcagtgtgcctgggacagggcttaccacctgccaccaaggtttcctctcttcccccaggacctgggcagagcaggcatgagctgggctgtggtgcagagcaagcagacccagccacactgctcaaaggtccctgcgtggggaggtgtcacaccaggggcacacccagggccacctgggtgtaggagagctctggtggcccctccgtaaactcaggaagtgtcaggtgatttcctagggagaggttcccagtcccagcaggcagaatgcccaaaaccaggagcacgaaggcctgtcatccatggggccattgcaggcactctgccgcccgaccttgagggctgtgccaatcctagtgaaccaaaatgcaaacaactcacacaagtgaaaagctccctgctttgaaaacaggacatgttgacaggcagcatggtatgtttttagcctttgttacagttttagcaacattgatgtctaagaggggccgtggtaatagattgcatctgccctgtgcatgcgcatgtttaaccacaggccagagaactcaattctgatgtcgtaagttctctgtaagtgaaatggggtagactgtatgattttcctattgccaaaagaaagaaagggggccaaacagctctgaaatttccaaaaaatggctagagggagagtccagtttctgagctctgtacccaaattaaaatcctgatgttcaggttaatccaagcaacacgcattgggtttaaaaccagcaccgaggcccagtgggggaatcacagacatcaccaagtctcgtcttctttccttcctgtgagttgaaaccaaacaggcctctcgctcactcctcccagcccagtaatgctgaggagttcagttgtgaggaaagaaggctggagctgtgagattcgcttttccctaggctgttccgcgtgggttaccttatcaccctggagcacttggtattccagacccctgacatgaggaatgcaggttcacactgtaaagagtttgtgaaaggtttcagtctaactggggttccttagctggaagccagggctggaagctacaggcctgaccttcctgggtcccactatctgttggcattttttttttttttttttttttagacggagttttgctcttgttgcccaggctggagtgcagtgacacaatctctactcactgcaacctccacctcccgggttcaagcaattctcctgcctcagcctcctgagtagctgggatgacaggtgcacgccaccacgcccggctaatttttatatttttggtagagatggggtttcaccatgctggccaggctggtctcgaactcctgacctcaggtgatcccccccacctcagcctcccaaagtgctgggattacaggcgtgaggcatcacacctgcctctgttggctttttagttaggaaggatccagctaggcccgtgtggttagatcagctttgttactgaattacctaaaaccagaccacagcacagccagggagcccagtagtgtttccaagaacagtgtggagcttgagaaagagaactttaaaaattagagggtccctttctgcagaggaagggatgctcgcagggtggcagtggcccagccccagcctcagggacggggagggagagccccctctgggcccagcaggcaggtgttctgaggctggtccctcctcagtttccgcagccacaaggcgaaacggccagattctcactcaaggtcgttctcactccttttcctgtcccgtttccagtcccactgagccattcacttctgctgaaccatttttcttaggatgcagccgtctcactcccttgtcctgtaaatcgtgtattcatgttgatgattcttggagataggtttcactttttcccagctgcgtccacaggaaaggggagtcggatgccagctgcaccccgcctggctcgcacaggctaagaccacagacagagcagggcttcccggagccacacaggccacgcaccccaggaacccttgctgccgcgggccaggaacaggaatgtgttggtgcctgagacaccaaatggaagaagcacatcaagactgttctcctgcggccaacactggcccggaagccgccctccatacaggccctcagggggcctgccttctgcgcctcagtcccccgtgcatccctgggcctgggtatcacatgctctccaggaaagggacggaatcaatcctgtgaccgatgggctcgcaaggatgggtgccgccgtgggagccctgcctctggtgctggcaagggattgggtttgtgtgggtgtctctagcctgcagagtgcagtgagtgagagtccttgggagcgcggcgctgcctgtagctgtgcctggggatgcacgtggccacgggatttcagtgggacagcgctcccacaggggctgggggtgggggtggggtttcttagttactgttggaaagggaaaaattcaccatatccaaggggagagacgatgggctgggtttgtttactccaacttcccttctacacccctcctgcaggacagtacgatttggggagaacccagctccccactttatctgcagactctgggacctgacaaaacagtcagagcctgagtgcactgcagcctgaactcccttgagcagcgctataagggactttgcactttaaaaaggggatgcctgtcagtaaatcccctgtgcattgactagaactggggggctgcgcccgctccctccttaatcctagatgatttgctcatgaaatagaggtgggggacgaccgcatgcactctgggaggtgcagccctaaggggtggactccagatctccctgcaagagacagcttggcttggctttggctgttggggaggagtccctgccatcccggtgagcctggggctgttgcttagggtcttctgggtggacacgtggagaaagagaaggcaaacgttggaacactaggaaaagctagaaattcagacaacacacatggatccccttaaaacatgtaaatgtgtcagaacacggttgacctgccgccttcttgaacctggtggcccccgttggaactatcagtggcgtctcccatgcacacgccctctgctttctctttcctagactcgcggtgctcacatccagacattaccttgttggtagcccccaagtggcgtgcagtgacaccagtatcttctctgttgcatttttgcaatcttgtgtcccgctcggtgatgttctacaaactctgttttaaggttgagaaagtttcaagggtgaagatctcaaaacagtgctaaaatcaaaggtgtttgctgtgaagaaaaacatgtgtatatattgcaccttgagttgtcagaaggtagaaactgaaataaactaacttt

SEQ ID NO: 32566 - DNA, 1779 bp, Homo Sapiens
agcaggggtggtcgccatggagactcgtggccctggcctggcggtccgcgctgagagtcgccgactagtcggcatcgggcctcgggcgcccccggggcgggttgggttgcagcccagcgggcggctggaccgccgcggtggggcggggacaatggggtacaaggacaacgacggcgaggaggaggagcgggagggcggcgccgcgggcccgcgggggtctagactgccccccatcacaggcggcgcctccgagctggccaaacggaaggtgaagaagaaaaaaaggaagaagaagaccaaggggtctggcaagggggacgataaacatcagagtcagagcctgaagagccagccgctttcttcctcctttcatgacatcttaagtccttgcaaagagcgtggcccgaaaccagagcacagacagagcaaagtggaaaagaagcacctcccttctgactcctccaccgtcagcctccccgactttgccgaaatagagaaccttgcgaatcggatcaacgaaagtctgcgttgggatggaattcttgctgacccggaggcagagaaggaaaggattcgcatctataaactgaatcggagaaaacggtaccggtgcttggccctcaagggcttccaccccgaccccgaggccctcaagggcttccaccccaaccccgaggccctcaagggcttccaccctgaccccgaggccctcaagggcttccaccccgaccccgaggccctcaagggcttccaccccgaccccgaggccctcaagggcatccaccccgaccccgaggccctcaagggcttccaccccgaccccgaggccctcaagggcttccaccccgaccctgaggccctcaagggtttccacactgaccccgagaccctcaagggtttccacattgaccccgaggccctcaagggcttccaccccgaccccaaggccctcaagggcttccaccccgaccccaaggccctcaagggtttccacactgaccccgaggccctcaagggcttccaccccgaccccaaggccctcaagggcttccaccccgaccccgaggccctcaagggcttccaccccgaccccgaggccctcaagggcttccaccccgaccccgaggccctcaagggcttccacactgaccccaatgccgaggaggcccctgagaacttaccctacctctcggacaaagatggcagctccagccacaggcagcccacgtcgaaagccgagtgccccaatctctgttttgaaggaaaccttaccccaaagcttctacactctgacttagctcctactctgctggagtgaaaatctacccacgacgctcacaaacttataattcctcctcaccacaagtttatgtgttaaaaaccatcatcataaaaggaaatgagacccgtatctgaaggaaacagatgttcggtacacggacgacgccgactctcccatcaccaagctgccctcggttgcccaggagagccacagtgccttgagaacataagcaatttagtgaacagagttcttttcagaatttcctttttcttaagtaagcatctctgttacttaatttctcaccacagctagatgtctataatctgccccaaaaagaaaagaaagcgtgtagatgatttacctcttaagtctcaatctcatggtgaaactcctcacacggtacctgcttctgttggccggaggacgatgccctgaacctcttggagcctttttctgttttaattaaatgcatggcctgcctttatatggcctcaaat

SEQ ID NO: 32567 - DNA, 4424 bp, Homo Sapiens
cccgcctcccagtagccgcgcctcaccctaggccaggaatggttttagggaagactgttgccggatgacaaggctgtcactattgttctgtactacctgacattatgggaccaggccagccagcttcaacctgtgttcatctagcacctaggacccaacttgatgggaggagcgaccccaaagtacttcagacccagaaccagctgcagtttaataggaatgttcctacacattcaagcaacttggcgatccgatattcttgcccacatgccattagaattgaaaaactgaagcactcatacaatgaatcataccattgtaaagatgcagattgtagagttggtcctgacctgggcagttctgtttcattttccgtcatatcccaagagagacttagctatgctgtccacctagccagaagagatgtgaaacgaagacaatttgaaaaacatataaaagaacatcatctcagaagtcagcctcaaagctctcagaagtgtggacatactaagtataaaatacccgaccacagggtggaaaggaaggaatcaaagagtcaagcagcctgtcagtgtagccaccagccatccaaagtagaaatctccagctctggtgccaaagtatacctttactcatctcatccaggccagtcagatcttactgtgccaaattcgccacccacccatgatccgggacttcagcctcatcccaggataggtgaccacaaaaacataagtgaacagaaaagcctgctagaagtccagcgactccagaaagaactgagcagttgtatccacaaaattgaagaggtaactaaaaaagatagactagaagaagctttggatccagatgaagaacgtcgaatccgtatcaggagacaggagcaagctgctcgctctgcccgaatgctctacgtcctccagcagcaggtaaaagaaatccaggaagaattggataaattgagtccacataaaattaaacacactaagaagtcatgggcaatgtctaagctggcggctgcccatcgaggagccattcgggccttacagatgtttgtcactcagtttactgaccgaggggagcatccacttcctgctcggtgtaaggaactgggcagccttattcgccagctttcactttgttctgtcaagctggatgcagacccttctgttcctgatgtggttatagatattctgcaacaaattgaggctttggaatctctcctggaaaagaaactgtcaccaaaaaaggtgaaaaaatgtttcagtgaaattcggagcagatttcctatcggtagccaaaaggccttggagagatggccaagtacatcaccaaagggtgagaggaggcccctcacagcaaaggacacattcccacaggaaacaagtcgaccttctgtagcaaagcagcttcttgccgataagtatcagcccgatacggagcttccggagacccagaggttgcagagtgagcttgatgtattagatgcggatatagttctggaagaaggaccatttattctagaccaaagtgcaagcttcaaagacgaggtgttagccgtggcaaaaacaaaagcagggaaaaagaagcctgtgactgagaatgtgccgtttaggaagaaagatactctggcgccagcaagacagcaaggactccgcaaagctgaaagaggtagacaaagccaacctcacagtaaaagcagagtgcagcagacaacagtttcatccagattaaaaatgaaccggcagcctgtgaaagaccgcaaggcaccatggatacccccaaaccccacatccccaccagcgtctcctaaatgtgctgcatggctaaaggtgaaaactagccccagagatgccacaaaagagcctctccagcaagaagatcctcaagaggaaagtcacctgacaggtgctgttgagcatgaagcagccaggctcgcttggcttgatgctgaaacttccaaaagattgaaggaactagaagagttaaaagccaaggaaattgacagcatgcaaaaacagaggcttgattggcttgatgctgaaacttctagaagaacaaaggaactgaatgagctcaaagctgaagaaatgtatagactccaacaattgagtgtttctgccacccacttagcagacaaggtagaggaggcagttctggatcgtttgaagcctctcttggtcaaggcccagagagtcaattctactacagaagcaaatattcatttgaaagatggctcgtcagtaaacacagcgaaagcccagcctgcacaggaggttgcagctgttgattttgaatccaacaacattcgtcagcttgatgattttttggaagattgtgccagtgagctctgggctgtgactcatgctaagatcttggggtctgaaaccttagccaccgttgaggacagcaaggatagcccagatctggagatcatgatgcgccgaatggaagagatggaaaaataccaggagtctgttcgtcaaagatataataaaatcgcatatgctgatcctcgactttggatgcaggaagaaaacaatgaccaaaaaatctcagcaataagtgaaaagcctctatctcctcatccaatcagaatcacgaagacagtggatcgcaaggatccagccgtgaacatcatgttagaaaggccctgtaatggcaattccctggatgaaagtgtgggaacagaggaaggatcagagaaaagagaggcccctcttctctccctagccgaagattctcaacagaaagaaggccgagctcccctctttgtcccaccgggtatgcagcacagcatcggtgactactgtagtcgttttgagcagtaccttcggatcatatctcatgaggctgtaggctccttcaacccgtggctgatagctgaaagcttttcagaagagctggtagatgaagctctgggtgctgtggctgctgaacttcaggatatgtgcgaagattatgcagaagctgtgttcacctcagaattcttagaggctgctacataaaggctctctgaggcgaggccatttgtgtcacactggagaagggatggcaccaccctttgttttggcccacaggaaattttcatcctcagctgtccatccaggcccagaaggtgctgcccactgaaaggaaggcagtgccggggaggtcatcctcactttgcattttcttttgtcatggcaatggttctggaaatgtatgatgcaatgtatcacacttatcagtgcccaggcaacacaacttgattatggcaatattttcagaatgtgtacttttcctattgaaataccatgttcattcctctggctcagtttggtgatgaaaatgttttgaaagataatcgatacgtatatttcacacaaggattcaggttgctgttgaacccttgctggcattgataccaacacaagtgcggctactagctggtcccatcacggggcccctgttttgcatctttggcgatttcctgtcaggacctctggccctactaggctgtagactcagggagagcacagtctggctgtgctgccaaacctctcctctgctgcagtttattccaaacaggagccccctggctgtcagtgcacaataatagacacacatttcttcaacgttccattcctaggtgattttcacatttttagttcctcagcatattttattgctgtgtgttgacacaatctggtataaaaaactttctctggattcagaggaagtttgaggaatcaggagaggaccaggccttctcctgtgcctgggtgaaggtacagacctcgctgtgtctccgatgaggtcagaagtgtctctatttcataccacaaaggaacccaagtgggagtagggaacagatggatggcgcgaagacctctgtgtctccccagagaaaggaagaaacttaagaaccatcatagcctggtcctccaacatcttacagatcatgttttccaagagaaaagcctgtgttttcagaaactctgaattcagaaaaagaaacggaatgtgcgtaagaatcaggccactgcctggaaagactttctctcaattcgtagcctgaggctcagtgaaggaaacatgcagaaagaatgcctgagacgcccccagggaataagggaactctttataacctgtccagtgccgtcatctgggatttttctctgaagtacaagaatttcaggtgatttaagctgcttgatcacacttatttgtgcaaaattgattttcatttaatgttaatgttttcctgcttaattttatataacttcagaatgtaaagagcttcaaggtaaattacagggtgtttaacctggggagttaaatgtgtacacttgaattaataggagcaccggttgttgctagtataaagtaatttgtgtggcagtttgtactgtgctgagtttttaaaataaacccaatatttt

SEQ ID NO: 32568 - DNA, 4228 bp, Homo Sapiens
gactgggagcaggcagcccgggcggagcgggccggtgccgaggacggccccaggcattgctctgccccgggcattgcgcggcgcgcgtgagggggatgcggcaggaggcggcgcggcgggaggagtaggcggcggcgccctcgggagggagctgcgcgcgggccagacggcgcccggaggctccgcagtgccgccgccgtcgcccgggaggctccgcgcgggagccatgtaaccctgcggcgggctccgggctgctccgtccttccccagctcccgggctagcgcggcagcggggccacgatgaagaagcagttcaatcgcatgcgccagctggccaaccagacggtgggcagggctgaaaagacagaagttttgagtgaagaccttcttcaggtggagaagcgtctggagctggtgaaacaggtgtcccacagcacgcacaagaagctcaccgcatgtctgcagggccagcaaggggcagaggctgacaagcgctccaaaaagttgcctttgacaacactggctcagtgtctgatggaggggtcagctatcctgggagatgacacacttcttgggaagatgctgaaactctgtggagagacggaggacaagctggctcaggagctgatacattttgagttgcaagtagagagagacgtgattgagcccctgtttttgctggcggaggtggaaatcccaaatattcaaaagcagaggaaacacttagccaagttggtgctggacatggattcctcacgaaccaggtggcagcagacttccaagtcttcaggtttgtccagcagcttacagcctgcgggtgccaaggctgatgccctcagggaagaaatggaagaggctgccaacagagtggagatttgcagggaccagctctcagctgatatgtacagttttgtggccaaagaaattgactatgcaaactactttcaaacgctaatagaagtgcaagctgaataccacaggaagtccctgacactattgcaggctgtattgcctcagatcaaagcacaacaggaggcctgggtagagaagccttccttcgggaagccgctggaggagcacctcaccatcagcggccgggagatcgccttccccatcgaggcgtgtgtgaccatgctgcttgagtgtgggatgcaggaggagggactcttccgagtagccccctctgcctccaaactgaagaagctgaaagcggccctggactgctgcgtggtggatgtgcaggagtactcggcagacccccacgcaattgcaggagctttgaaatcttacctccgagagttgccagaacctcttatgacctttgaactctatgatgagtggatccaggcttccaatgtccaggagcaagacaagaagcttcaggctctatggaatgcttgtgaaaagttgcccaaggccaatcacaacaacatccgatacttgataaaatttttatccaagctgtcagaatatcaagatgtaaacaagatgactcccagtaatatggcaattgttttaggacccaacctcctatggccacaagcagaagggaacattacagagatgatgaccacagtgtcgctgcaaattgttgggatcattgaacctatcatccagcatgcagactggttcttccctggggagatagagttcaacattactggcaattatgggagtccagtacacgtgaaccataatgccaactacagctcaatgccctccccagacatggaccctgctgaccggcgccagcccgagcaggcccgccggcccctcagcgtcgccacggataatatgatgctggagttttacaaaaaggatggccttaggaaaatccaaagcatgggtgtgagggtcatggacacaaactgggtggctcgaagaggctcctcggccggtcggaaagtgtcctgcgccccgccctccatgcagcctcccgccccgcccgccgagctggctgcgcccctgccttcgccgctgccggagcagcccctggacagccccgcggcccccgcgctctctccatccggcctgggcctccagcctgggcccgagcgcaccagcacaacaaaaagcaaggaactttctccaggctctgcacagaaaggaagtccaggctccagccagggcacagcctgtgcagggactcaaccaggggctcaacctggagctcagccgggcgccagccccagccccagccagccgcctgcagaccagagtcctcacaccctccggaaagtttcaaagaagctggcaccgattccacccaaggtcccctttggccagccgggggctatggcagaccagtccgctggccagccgtccccagtcagcctgtcccccaccccgcccagcaccccgtcaccctatggactgagctaccctcaggggtactccttggcctcgggccagctctccccagctgcagctcctcccctggcctctccttctgtctttacaagcactttgagcaaatcgcggcccactcctaagccgcgacagagacctactctgccgcctcctcagcctcccacagtaaacctctcggcctctagtccacagtccacggaggcccccatgctagatggcatgtcccctggggaaagcatgtctacagatcttgtccactttgatattccctcgatccacatagagctcgggtcgacgctccgcctgagtcccctggagcacatgcggcgacactcagtaactgacaagagggactcggaggaggagtctgagagcaccgccctctgacatgacaccgcccatcctgcctcgcgtgtacatacatcacgggccctaggaacgccgccaggagcagcgtccatgagcttgccaagtgttctctgctggctctttcctgccactgccaacacgaggttggaatttggcagaaaattgtgatctccagtccgtgtggtgatgctggtggtgcaggttttgtttgttcctttcgggtggtgacttcggccttttgtttgacctttgccttttgactttgtgcctcttttgatccactttcagcctccatgccagaaaacacccacctctccatccaaggctggtcaggaacgtcctttgcagggtcggggtggtgcgggagaggctcactttgcctggttagacccaagggctgctaccttttccttggacggctcatgtcaggtcttgcaggatcagtttaatggccacagaaaggaagcaggacagcagggcccctctcacccacaactggaccaggtccaggattctagcagtcctggggcactgacctttgccagctacctgggggagggcttgccactggaaaacctttcaggccgcccccatcagtgggctccaaagtaaatggctgaaaacaaaaatgtttcacttcctaacagttttcctttttccactgtgtgactgaaagctcctatatcattttatatttctgaatctataaaacaaaacaaacaagcctgacagtgtctggaggagccaaaggtggcctccctgtccccaaatatattggctatatgagagtaattttacccctctacgtacctaaaggcacccagttcactagtctgtggggtcctggagcctgtctcttctttctggaggttcaaactgaatagcaataattacgttacccaaagcatgtggaggaaaagtgaaaccagccacggagacgctggcccacgggctcggcctgcggtgtggcctgctttgctcaccagcgtcagccgctcatttccttctcatgaagtcccatctggtcatggggacgagggccgggagggcaccgggtagccttttcacacttggggattaggggagtgagaaaagatttgggccatgcatgcaaagtcaaagtttaaaattttatccttttcaaatagatgatataatatacctatacatgatataatatttgtatatatgaaatctctctatatttgtttaatttgagccattcaatctaaaccaatgtacaggtgtacaatgaaaaatttaaatgcttagttatttttcccaacacagtgtaaagtcaccctcctctgagagtgggatgtgcagagttttgatgttgcagctttgctcacttcctggcaagggcaggtcatgcctcaatttgtaatgggagtctggggtaagggtgggggttgaaagttgttatctttaaatacatgtacaaatcgttgtcaaaagtaacgttattaaaatagatttattatccctg

SEQ ID NO: 32569 - DNA, 3019 bp, Homo Sapiens
tgctgcctcctatagacccagactctgattggcagtggagtccagggcctgagctcaggcctgggaaagactaggccccctttaggtttcaggccttgaaggaccatccagacttagggagcctgggccttggggagggagagaccctgatgccaggactgagctttgggcagcgaggtggggagggaaggtggccgcattcagaggtgccttggactcacaacaacacccccacccccgtgtgtgcagccgtgttgccgcccgctgtgctatgagcagtcagagcgccgtctccacaagagtttacaaatgaaaatggaggaaatgtctttgtctggcctggataacagcaaactagaggccatcgctcaggagatatacgcggacctggtcgaggattcttgtttgggattctgctttgaggtacaccgggctgtcaagtgtggctacttcttcttggacgacacggaccctgatagcatgaaggattttgagatcgtggaccagccgggcttggacatctttggacaggttttcaaccagtggaagagcaaggagtgtgtttgccccaattgcagtcgcagcattgccgcctcccgctttgctccccatctggagaagtgcctgggaatgggtcggaacagcagccgaatcgccaaccgccggattgccaatagcaacaatatgaataagtctgagagtgaccaagaagataatgatgacatcaatgacaacgactggtcctatggctcggagaagaaagccaagaagagaaagtcagacaagaaccccaattcccctcgaagatccaagtcattaaaacacaaaaatggggaacttagcaattcggatccttttaagtataacaattcaactgggatcagctatgagaccctggggccggaggagcttcgcagcctgctaaccacgcaatgtggggtgatttctgaacacaccaagaagatgtgcacaaggtccctgcgctgcccacagcacacagatgagcagaggcgaaccgtacggatttattttctcgggccctcggctgtccttccagaggtcgagagctccctggataatgacagctttgacatgactgacagccaggccctgatcagccggcttcagtgggacggctcctctgacctctcaccctctgattcaggctcctccaagacgagtgaaaatcagggatggggtctaggtaccaacagctctgagtcacggaaaaccaagaaaaagaaatcccatctgagcctggtagggactgcctccggcctaggttccaacaagaagaagaagccaaagccaccggcacccccgacgcccagcatctatgatgacatcaactgacttgggtgcaagggatagcctttggctgagcagagccctctctcctgacccccacccaggtggcatagcctggcaaatggacggctgctgggggttggggcttgggaagcttggtgggccaggcaggcagaggatccgattatgcgcccctggggggtgtcaaagtcctctgcaatggagcacgactcctcggcgtgcaggactcagacctggacatattatgccttggacataagtttggtggggaggcggttttcctatttattctgtgagttactggatgtccagctaggccaggggcctgacctgggcactgtgccagggcactgcctgccccccaccccaggaactggactaagccctgctgaggggcaatgtggcgacccgggaggctgtgggttggaagctgagcctggagggggcctgcctcggccgccctcagcaatgtgaatgggtccggtgcttggagctgaggggcaaggctgggcatgtcctgtctgtgtgcagaatcttatcaaatgcccccagtcccaggggtaggcaggcacagagtgctgtctgctgaggtgggcgtccagaactgccgccaccttccctgcccctcacaggggcagccctttcccctcagtccccatgggcctccttggcagcaggagctgtccttttgttgggtgccaggaaagggcctccagcctctacagcttcaaggaatgggaaagggagggtaggaagagggagaagtgtcagaattcctccccctgcctctcctccctgacccagggctggtgaggagtggggccccaaggtgagagggaacggtgctgctttatttgaaatgttttcttacctcattccctgccccaggaagggacccagcctcaccctcctggggtggccccgtgttcctcctgcccaccctgccccactgccctaccggggcagcccaggttcccaactgctgcttccacccccttcaccttgactggcttcagttcctctcagcgctcctgcctccaaagcgtgccctgtttcccttccttagcgcttttaagttatttattctgtacttgtggtttggggctctgaggaaaatcctaatcttgtgcctctccccctttgctaggagttgggtgggaagagagggtggcctctgtgccccaggttgtcagtggaggggaaggggtgtcactgcccctctgtgggactgtcatgccagtgtgcccacctgcctggtctacatcctaaagagatgtaccgtcccccctccatgcgggcaccaccactcccaggagccaagctggaggaccgcgacctgggctgggagcagagctgactgacatgggtggaggtgaccctgagccaagttctctggcacttgctggacatgtcccctaccctcttcccaagaggagccatcccacatttgggtagttagtacccaggactggttggactgatcgggttagggaccctagagggttaagggaacaacagagatggggctgcaatgccctgtctggaactccgctctcccgctggggtggttctgattgtggctcatgcctggttgcaaattggtttttaacccacaaattgtgattattttttaaaaagccaaacagattttggcaggagttagaataaatcccggggcctgggcttctct

SEQ ID NO: 32570 - DNA, 5368 bp, Homo Sapiens
ataagatgctcccaagtcccttgcagctctcttcagaagaaaaatcactagtgctctgctcttgccataataccaaacctttttgactcatgctttggtgctgcaacactggaagaattgcacacagtttccaggaatatctttttttcatttgagtgattctttgtggatgagaaaagatttgagtcttaataattaccttgttttaaagctatttctttatagtctgaactgtttaataaattgggccacttaccaatgagccacacagccagttcttgtcaggagctggttgaaaactgtgctgtgcatgtagcaggaatggcacaagaagatagccgtcgtggtcaagtgccatcttccttttatcatggtgccaaccaagaacttgacctgtccaccaaagtgtacaaaagggaatcaggaagtccttattctgtgttagtggacaccaagatgagcaaaccgcatctccatgaaacagaagaacagccatatttcagggagacaagagcagtgtctgacgtgcatgctgttaaggaagaccgggagaattctgatgacacagaggaggaagaggaagaagtctcttacaaaagggagcagatcatagtggaggtaaaccttaataatcaaacattaaatgtatctaaaggggaaaagggtgtctcttctcagtccaaagagactcctgttcttaagacaagcagtgaggaggaagaggaagagagtgaggaagaggccacagatgacagcaatgactatggagagaatgaaaagcagaagaaaaaggagaagatagtagagaaagtcagcgttacacaaaggagaaccaggagagctgcctctgttgccgcagctaccacttcccctactcccagaactacaagaggtcgtaggaagagtgtagagccacctaagcgtaagaagcgggccacaaaggagcccaaagcaccagtccagaaagctaagtgtgaagagaaagagactctgacctgtgagaagtgccccagggtatttaacactcgctggtacctggagaagcacatgaacgttactcataggcgcatgcagatttgtgataaatgtggcaagaagtttgtcctggaaagtgagctgtcccttcaccagcaaacagactgtgaaaaaaacattcagtgtgtttcctgtaacaaatcgttcaagaaactctggtcccttcatgaacatatcaagatcgtccatggatatgcagaaaagaaattttcctgtgaaatttgtgagaagaaattctataccatggctcatgtgcggaaacacatggttgcacacacaaaagacatgccatttacatgcgaaacctgtggaaaatcattcaaacgcagtatgtcactcaaggtgcactccttgcagcattctggagagaagccctttagatgcgagaactgtgacgaaaggtttcagtacaagtaccagctacgctcccacatgagcattcatattgggcacaaacagttcatgtgccagtggtgtggcaaggatttcaacatgaagcagtacttcgacgaacacatgaaaacacacactggagagaaaccctttatctgtgaaatctgtggcaaaagcttcaccagccgccccaacatgaagagacaccgcagaactcacacaggcgagaagccctatccatgtgatgtgtgtggccagcggttccgcttctcgaacatgcttaaggcccacaaggagaagtgctttcgggtgaccagccccgtgaatgtgccacctgctgtccagatcccacttacaacttccccagccaccccagttccttctgtggtgaacacagccacaaccccaacccctccaatcaatatgaatcctgtaagcactcttccccctcggcccatcccccaccccttctcacacctgcacatccacccacaccctcaccacccacaccaccttcccatccctccagtccctcacctcccgccacctccagctctctttaagagtgagcctttaaatcatagaggccagagtgaggacaactttctgcggcacctggcagagaagaacagttcagcacagcatcattaacatccgtctccttagtgtgttctccaggagacacgtccccatgtgtgagcgtgcacagagggagtcggtgagcatttccttagttctcagactctcctccgcctctaccaagagcttcgccagtgtcactgaatcaacagatccaagggaatgaacaagaagactaccttgagctcacagagggactgtcatctaaaccaggggaaccactgaactaaagcccaatttgcttgcattttctgatgacttttataagtttcaaatactcagacttgtggaattttataatttcatatcagctgatgaggtatgcttgcttttatatcccagacttctcctcaaagaggggataggcctggtttcctttgtactaatcgggaaggctgtgagattaatccagagcattaattgtatcactgtgtatggtaaggaattcttttcagcttttggtgccagctacagagttgagctggccatgtttcacagtatatcaagcattatagagaaagacagaaattttcttctttgtgtagctctcctaacgcactctttattttactacagaaattattttagagtttttgtatagacttctttggtagtctgtttctaaaatgaaatgtatttcaataagcagtgtaattttttcagtgtagctgaacctatgttgtaaaatagaaaaaaatttttataatcatcaaaatgtgattcttaaagatgcatataacttctataattcaaagctattcttacatccgtacaactcaaaaggtgcttcagagactagatgtatctgagagggtctccagaccaggttactgcaaaaatgaggttttgctttcaggatttggcgtaaatacttggtagttttgacatctctgcttaacactcaagagaggctccctaatgtgctcctgtcctccatgttctgcttggcttcgttagtgcattacatgaaatgatttgcaggggatggggccttttccagggaagtcacctaaagcttgcatgttttgaaaatttgaataaggctgtttgctgacaggaggaggaagtagtggagatcatttcatctcagtcacgtctgtttctcacttcccttaggaattgtgttgatgtttaacttttatgggatgacaaattgaaatcgctcattttgaggttgctttatttttctagaattgttataagaagctaaaatagtaaacttaaaatcacaaacatgacattgctgatagtggctgagaaattcagatgagaagacaaattggttatgaattttgaaatatctattatatgtaaaatgtggatatgttcacaaccttgagctattttaacacagtttaaatatagtgagggaaaactcctaagttttactgccctgtcctctgcaaattatgtaataccagcattcttaggcgataaagagagcagcacctctagtacctttaggcagattactttttcaagtttggggaacttcaaaagaccataatcaaccaggagcttattataggaaaggctgaacagaagggctagtgtattgattacacttaacagatcatatttatccagactcagtatagcttaaaattttgtatttctttatctgagagaactgagttcccaggctaaatcacttacctcccaccccctctccaattttttttttaagagacaaggtcttgctatgttgcccaggctagagtgcagtggctattcacaggtgcagttatagcacactacagcctccaactcttgggttcaagcaaccctgcctcagctaaccaagtagctgggactacaggtgcatgctaccatgcccagtccattttttaatcttgaaatttcttcatttttctttcttcggtttcttaaaatctttgcctgaatcagaacgctggcttttatttatttttttatttttaatattaaatgtgcagatatgcttcgagcacttttctaactaatgagctctgtggtaagaaaaaatgaactctttcaattgagattaagtccatatttttcaaacatcacgttctctattggctttttggtttagtgtttctaaattttctccttctgattttgcctgtcttatataatgagcataggaaaattttggaatgaggcagaaaagtatatcaagacatacttcctggttttggatgtaagttttaaagaatggtatttttaatatttgtacacattctttgagcacccaggtacccaagccaataaggaaagttaattccttgcatatgactgttatatctttagtggttgtctccctctccctccacagtctccttggcattccatgacaagtttgtcaacctacacttttatatagacatatcattatttcatggtcaagcctgtagtattaaaatgatttttttaaaagatgtaaactgtgcttagttaattggttatattttgttctgttttttttttttttttttttttttttttgaggcagagtcttgttctgttgcctgggctggagtgcagtggcgtgatcttggctcactgcaacccccgccccccgggttcaagtgattctcctgcctcagcctcccgagtagctggaattacaggcatgcgccagcacgcccggctaagttttgtatttttggcagagatggggtttcaccatattggccaggctggtctcaaactcctgaccttgtgatccgcccacctcagcctccgaaagtgctgggattacaggcgtgagccaccacgtccaactgccttattttgttctgaataaatttacagtattgggcagcaattctggattctagacttgagaccacagaatcaaccatttcatgaggttgtactgtaattatacactggaatattcaggtagtcatctttgatttttcattcaagtaaatatagccataagaaaatatctgctatacaggaaaaccagtattaagcaaataccaccatccttaacagaaacaaaaatatatatatatattatttttaaaaattagcattgtcatacagtacaattcttagtgaagtgtattgtggaacaatttagaaacttcctttttttcccctagattaaggatactttccttgacttgagacttgtggtcttcaggaaaactactcagaatataatgactcctcatcagtatcatattgtatataaataatgaaatgcattaagaatattcacaacattgaacccaggaggcggagcttgcagtgagccgagattgcgccactgcgctccagcctgggcaacagagcgagactccatctc

SEQ ID NO: 32571 - DNA, 4722 bp, Homo Sapiens
ctcatgcttccataatagttctgggataattctaaacacaagccatttttctaaggagagtccacattagagaggtctttgttttgtattcaagatgattaaaattatgaactgggaagttagtccctggggtgtcctggctggcctttggaaatcttcactacatctttctgggttggaattctcaccacagcctgaacgtggggctgtatctgagctgtctctgagtgctgtccatttgatatatcgagtactgggtgtttaccagggctcttcaagccactgggagaaacagctaaagagtaacctactgatttgagatgtggatttgtgccccatccctttctccttgtttcccacaggagttttatctcaaactcctaagccatttttaaggagatcactggaacaaactccaaacctaccctctaatagtcaagtttacctgaattttctcagttctctcgggagaagactaatcacacattgtagtaccaacttggactcttcatgtgcttttcttaactgattagagttaacacctcagctaaagtgtatagaacatacatggggcttcatcaggcttcagaatcagtttcactagatgtgctatgtaggaggccacggaaaaattactgtagtagtaaaagttatcagttctgatgtaaacaatcattttgtcccatattataaataaattggcctgaaaatatcttttcatatgtgaggaataagtatatgatgcctttctcctttaaagtatgaactgctaaaagacagggataacgtgtattctgtattccagcagccacagtgtgtttctggtctttgtaccaggtgctcaggaagtgttttcactggcttgggttgactacttgccatctgctctctgagcattcatttctgaatgaaaggggagaaagtgaaaggagaggtgggaagaaagaggaagctgcagaaatacgaggaaacagctggaggagggaggtgaagttgaggaggtaaggtcagtaaaacaaaaagctagcagagggcagggtcaggcccttggggtagagggctaattaacttctgtcagctagttgaatagagccttgtgtgctttgttagagaccaaaggtacttcaaaggaaaaaaatctagattcttccctgtgtaccttaataattgttcatcaggtcaaaatctatcctgtcctctaggaattctggtcttccctcaggcctagcagagagctttctgccactactcaggcaaccaagggtgaagtgcttcaagtagtatttgtggacagcagcaggtaagcttgatgtgttattcacagcttaaagagtagatgctgagtacagctgttgtccatgtgtagagcttttaataaccagcgcagcaggccccttcacctgcttttatgcctggaccagatgactgaatgtagaactttaggcacttttttttttttttgagacggagtctcggtttgttgcccaggctggagtgcagtggcgcaatctcggctcactgcaagctctgccccccgggttcacgccattctcttgcctcagcctcccaagtagctgggactacagactcccaccaccatgcccggctaatttttatattttttagtagagacagggtttcaccgtgttagccaggatggtctcaatctcctgacctggtgatccacctgccttggcctcccaaagtgctgggattacaggtgtgagccaccagatcggccctttaggcactttctacttctcaaggtcaagaaacatcctttaaaaagttaattcccttttctggagcctaagccagatcttatctaggccttgtgttgccatctgttagcattgatttctggaatggagcagctttctcaaagtttggtcttgctagtcatgaggtcatgtcagtgtcttaggtcactgctgctcaccttccttacccagggagtatactgcataggtttctgaacacctgttttcattattcactgttcctctcactgccaagaatggagggaccctcagttgaagatcaaattgactctgaagaaaaactggagatgtttctcttggagtttggatagagtattcacttgataacatgtttttcccctgccttgctcttcacaagaacatctggccaggcattaacaattagtaaatttttttgcatatgaacagtatttttctggtcatgtagatgggtgcacatgacactaaacagcattgtttagtgttatccctcttaactggtgggttgtatttggggtggaggctgtagccgaggagaagacattcacctctgtactcgagaaactttgtgtaggaatttagtttatttttttattttttttaattttttattttttactacttttactgttagcacaatgctataattgagctaatctttgtagtttggtgcaggaccaccaagtttgtgtgacccattacctactttttccatgctcagccattaccctgtcctggggcatctgagggcagtaaggaacaggtgtccaaaggaggaatgttggtgcctatgagtatgttttccagttgtattgaatttcttacttggtgtatttttgacttgtcttagtttctttccttgtggtctatgctattttacttgcgatttgttggatattctccctgtcattaaagagttgtaaaatggaagttagtttctctatgcaaatgctttaatggatgaagctgataggtttagcattgatttttgctggtgtccttcaacaagcatgaaggtgataaatgtgtttccatggctttagactcatttttgaagtcttggattgtgtgaacattcttagaaacaataaaatgttttaattaaaagccctcgactaccagctgaattcagtgtctactaggaaaatgggtagatttgttacattgtccctttgctctctatgactttgttccagttgtcaaggaacttaaatgggtattcaggaaaaagaattcttgtttccctttcctcaccttgccagttaaataactcctggtgacacttcaggtggtagaattgaaacacaaacctgacttctgaccacatgggtcaaaggcaaaaggcaaatggcttcaaagcccttagtgtgcttatccagttcaggcagtgaggagataacctctgctttcctccctgaggagtttggagtatttaaggggggatggggggggtgtcactttgaaaatatgttgctttttctcctgattgtattgaggctgatatggaagggttatttctttctggccaatactttttggtatttctaaatattgcaatcttgatttttactattaaatttgttaattgtcagttctggcttttttgcataaagagttggtccattaacttgccaatttgaagcttctaactagatattccctactgaaagttttggatttgtttttagtttgtggagcagtcttagctggggacaggtaattgacaacggcagagatactttcttttcctaggattctaagtctgtaatccacatcctcaatgtattcacaggactttaaaattctctccaaatgaggaaggaaatatcctgttgctttctaatgtttactaaaagttgtgtttagaacaacagattttaataggcatcttcctttgttatgtgtcattagccctttgcccgtttaccttagggctctttgaaggagaaatggatgggagaaaacctgtcacttggcgaaagtaaaagggataattaactggctcagagcttatgtgcagagttccaagccccaaagttaatctagaaccactcgataacaccaataaaaatatttatttcacatctgttatatatctggaaaatgttctaagcatcttacacatatttctcattaaatccacaggtgaccattgtgaggtagatattttgttctaattttccagatgaggaagctgagaccctaaaaggctgaccggttccctgatgtgttacctgcttctgctactgatccaaactgcagaacttctcattcatccccaaggcctccaggcagtatccaatggggaatcagctctaaaaggaaccagaccaacgttttccagccccttcattctggtgactgaggggaggaaagaatgggagggggtattcttgtctagtggatggaaaggaaacacactgtcaaattactatatctccttggttttctattacagtagaattctccagccatatttttattgtctatgggggaagttggagatggtgaccttgattagaagtgtctggagggggataaatggaggggataagattcagttggttttggaaaatgttaaagtcttaaaataatgcgtccatctgaagaattttttctaaaaccagagtttataaaaatatcactgatacagcctgccccctcatttccctgccacaggagatgtcttggactagagacacttgtttaataatagcttgtctctgatattcccagtagcttccctctgtgtgaggaaaggatagaaatgttcaggacatcatcatacaggctcctcatctacaaagttccagtagcagtgacgcctacacggaagacttggaactgcaaacaggctggggtcacctcagtgacatctgacgctgtccaaccagaagttcgatttttgttctgggggtgaaggaggaaacagactgtactaaaggactaaaataatttgtct

SEQ ID NO: 32572 - DNA, 575 bp, Homo Sapiens
atgaaagatcaaaggacccagggtacacagggtgggtggctattctccagaaatgtcagtttctgggcagggcttaggtgtctgcagtccctagtcccacccctggccttgcattccagctcagcgggtggaaggtataaatttcagctgctctcagccctgctgtgtttttccaaagccttccaacagcaacatgaagttggcagccttcctcctcctgtgatcctcatcatcttcagcctagaggtacaagagcttcaggctgcaggagaccggcttttgggtacctgcgtcgagctctgcacaggtgactgggactgcaaccccggagaccactgtgtcagcaatgggtgtggccatgagtgtgttgcaggatgaagagttatcttaaggatcatctttccctaagatcgtcatcccttcctggagttcctatcttccaagatgtgactgtctggagttccttgactaggaagatggatgaaaacagcaagcctgtggatggagactacaggggatatgggaggcagggaagaggggttgtttcttttaataaatcatcattgttaaaagca

SEQ ID NO: 32573 - DNA, 4988 bp, Homo Sapiens
cttcctgttgtcagtggccgagagaccgcatcgtcggctcggaggctgaggggctgccgcagccgggagcccccctcgcctcgctcctcgctccgcttggtgtcatgtgattctctgagggagcagctgcgtgagtggagatgctttcagtggtggagaatggactggacccccaggctgccatcccgacacatcatctcagagttggagcacctgacgtttgtcaacatggatgtgggccgctgccgggcatggctgcggctggccctgaacaatggcctgatggagtgctacctgaagctgctgctgcaggagcaggcccgcttgcaactacagcggaaggaatctctggattccatttcccattcttcaggctctgaagacatcgaagtccatcactcgggccataagatacggaggaaccagaagccgactgcctcctccctcagcctggacacggccagttcatcccagctgtcctgcagcctaaactctgatagctgcttactccaagagaatggctccaagagtccagaccattgcgaggagcccatgtcctatgactcagacctgggcacagcaaatgctgaggactcagaccagtctctgcaagaaaaaacaagagctggatctcagaggatgacttctaccggccttcccgggagcaacccctgaagagtgcttcagaccacccaatagcttcttacagggggactccagagtcaaggcctggtctccacaggcatttttctcaagaaccaagaaaaaactgctccctgggggcgttagaccaagcgtgtgtaccttccccaggaagaaggcaagcccaggcagccccatcccaggggcataagagtttccaggtggtacaccggaggcagatgggactgtccaacccattccagggtctcatgaagctgggcaccgtggagcggcagggggcaatgggcatctggaaggagctcttctgcgagctctccccactggagttccgcctctacctgagcaacgaggagcacacctgtgtggagaactgctccctgcttcgctgtgagtctgtggggccagcccacagtgacgggcgctttgagctggtcttctctggcaagaagctggccctgcgcgcctcctcccaggacgaagctgaggactggctggacctggtgcgggaggccctgcagaaggtccggcctcagcaggaggatgagtgggtgaacgtgcagtactcagaccagcctgaggaaccccccgaggcgccccagggctgcctctctccctcagacctgctctcggagcccgcggccctccagggcacacagtctgactggtcgtccgcccaggttccagagctagatgccatcaaggagtccctgctgtacttgtacatggacaggacctggatgccctatatattttctctgcccttggaggctctgaaatgtttccgcatcaggaacaatgagaagatgctgagtgacagccacggcgtggagaccatccgggacatcctgccagacaccagccttgggggcccatccttcttcaaaatcatcacggccaaggctgtcctgaagctgcaggccggaaacgccgaggaagccgccctgtggagggatctggtccgcaaagtcctggcatcctacttggagacagccgaggaggcggtgaccctgggcgggagcctggatgaaaactgtcaggaggtgctgaaatttgccacccgggagaatggcttcctgctgcagtacctggtggccatccccatggagaaaggccttgactcccaaggctgcttctgcgcaggctgctcccggcagatcggcttctcctttgtacgacccaagctctgtgccttctctggcctctattactgtgacatctgccaccaagacgatgcctcagtgattccggccaggatcatccacaactgggacctcaccaagcgcccgatctgcaggcaggccctgaagtttctgacgcagatccgggcccagcccctcatcaacctgcagatggtgaacgcgtctctgtacgagcatgtggagcggatgcacctcattgggaggagccgggagcagctgaagctcctgggggattacctgggcctgtgccggagtggcgccctgaaggagctcagcaagaggctcaaccaccggaattatctcttggagtctccgcataggttccgtgttgctgacctccggcagatcgcagatgaggtatatgaaggattcctcaaggccctgattgaatttgcctcccagcatgtctaccactgcgacctgtgcacccagcgcagcttcatctgccagatctgccagcaccacgacatcatcttcccctctgagtttgacaccacaatcaggtgtgccaagtgcaagaccgtcttccaccagagctgccaggctgtggtgaagaagggctgcccccgctgtgctcgctgacgcaagtaccagcaacagaacgttttcgcctgatgcccctctgctgatcccactctgaaggccgggggtgagtgtggctcagccatcccagctgggtttcctatcagcccaggatactcaccgtgtcacagctgtgtccccttgtcaggaagacctcagatgtgaccagagcactggcctcctacagaaagcccaggaagtccccatgatgtcccctggccctccccccacccctctgctgcaggaggcgtggccaccaccagatgctccctgtctggggcaggcagggccgtttactcaccaggccctggctcaccagcgtcccggcgcctccgttagggctggccaaacactgtggaaaggggacttggggaacattttcaattccacattcctgattaaaaggtctggttttttaaggtgggtttttcccattcatatttcaacagaaagtattttttattcttgaccgtatgcgagtcacccatgaaatccagacattttcacccccagcggatgcacaggagcctctcaggcctgtcctagaggcagcgggtggctgttgggcaggccactgctgggacagggcctgtgggcccacccagtgcctttcctggccctcactgccagtgccaaaccgcccctcagcagggcagggccagtcctggtgaccccacttcctctctgtctcctctttactccccaccccagtgcgtctcacctgctgagcccacccctttctcagcgtcagagcccctagctcttctctagcctggggccttggccccattaggagaaggagaaatgactggaaaccagcactttcagcactatgagccctcctcggtttagggagggtcgccgtcttgcccacccccaatccccgtgccctcctcacccctctacagacaggggcactgctgcagatgctccaggcccaccttggtgggtgcccggggtcaccctctctgcctgactgacccctgccagggcacagataggcaggaccctagagacagcaggcagctgggccctgcactgtggagaaatgacctggtccttcgccctaagctgtgcagggcatgcgggggagctgccctgtggatgcagccgccgcctcacaaagctatgaattcccaaagcatcactgaacttgcccagccaggacactggagactgaagaacttccccggagcaggactgcctttgaaggggccttggtgctggggtgggagcctggaattgtttttgaagtgaagttcagaccctccaggcttcagggaaatgtgggtttgctggtctctctgtcgccttctcccacctctcctggacccagcgggccctcagtcctagctgtcttacctgcgctcagcttggagtctgaggcctcaggtggagatccacctgtcactgtcagagatgagcccacccccacccctccctgggggtgatcagctgctgagtcacccacccagctttggagctggatgcctgtgcagaacagaggtggcggtggcaggcaggtggaggctgtgcatagcttctcccggtcatggcgcacacctgtgcccagatgccaatacctcctaagccaggagctgggttatgcacctgccatgaccacaagcctggcctggtcagagccctcattgccccatccctgagtgggcaggagtctggcctggggagggcttaggcctgtgaggattcttcccgaaggcgcccttggaaacagactaattctcagggaaatcagattgcggtaaaatgggatggaaacagacaacattcagatctgcgatttcctgtccttgaaggcccctttcagattacaagttggcaccctctgcccatctaggtgccacagcttcccccaaggacaatagatggtagggccagagaagagaagagaaactgggggagggaggcccagtggagggccatggcacatgacctggttctgccctgccagtgggctcagcccctctccatcctcagccaagcgcctctgagggcacttgtttccccttctcacccatgtttttttgagacggagtcactctgtcacccaggctggagtgcagtggtgtgatctcgactcactgcaacctccgcctcccaggttcaagcaattctcttgcctcagcctcccgagtagctgggacttccccttctcttctgcctgaaggaggacgggtggtttggagattccagtccaaaccccaagagctcatcacataataaaagtgtcataatagctgatataggcaggcactgtggctcacgcctgtaatcccagcattttgggaggccgaggcagtcagatcatttgaggtcaggagttcaagaccagcctggccaatatagagaaaccccgtctctgcagaaatacaaaaattagctgggcatgatggtgggtgcctgtaatcacacctactcaggaagctgaggcaggagaatcacttcaacccagagacagaggttgcagtgagccgagattgtgccactgcactccagcctgggcgacagagccagactccatct

SEQ ID NO: 32574 - DNA, 6292 bp, Homo Sapiens
ggatccaagatggcgtagaaagtaatgacaggatttggatgaagtaatggatcactaatgaactacagtgctggtgagatgtgtaagaaattataaagagctctgatgggctatttgggtgatacccagtgcagtgaactgcaggatttttgtccctgagtcatggaagacagaagagctgaaaagtcatgtgaacaagcatgtgaatcacttaagaggcaggactatgaaatggccctcaagcactgcacagaggcccttctttctcttggccagtactccatggcagacttcacagggccttgtccattggaaatagaacgcatcaaaatcgagagtcttctctacagaattgcctcatttttgcaactgaaaaattatgtgcaagctgatgaagattgtagacatgtgctgggagaaggactggccaagggagaagatgcctttcgggcagtgctttgctgcatgcagctgaaagggaagctccaacctgtatccaccattcttgccaagtcactcacaggagagtccctgaatgggatggtaacaaaggatttgacaagactaaaaacacttctctcagaaacagagacagcaactagtaacgccctctctggatatcacgtggaagacttagatgaggggtcttgtaatggttggcatttccgcccaccacctaggggaatcacaagcagcgaggaatatactttgtgtaaaagatttttagaacaaggaatctgtaggtatggtgcccagtgtacttcagcacattcccaggaagaactagcagaatggcagaaaagatatgcttcacggctgataaaattgaaacagcaaaatgagaataaacagctctcaggcagttacatggaaaccttgatagaaaagtggatgaattcattgtctcctgagaaagtgcttagtgaatgtatagaaggagtaaaggtagagcacaatcctgacctgtcagttactgtcagcaccaaaaaatcccaccagacatggacctttgctctcacttgtaagcctgcaagaatgctgtatcgtgtagcattgctttatgatgctcatcgtcctcattttagtatcattgcaatatctgccggagatagtactacccaggtatcacaagaagtcccagaaaactgtcaagaatggataggaggaaagatggcccaaaatggattagatcattacgtgtataaagtcgggatagcatttaacacagaaatatttggaacttttcgccaaaccatagttttcgactttggattggaaccagtactcatgcaaagagtaatgattgatgcagcttctacagaagatctcgaatacctgatgcatgcaaaacagcagctagtaaccacagctaaacgttgggattcttcctctaagactattatagattttgaacctaatgaaactactgatttggagaagagccttcttatcagataccaaattcccctctctgctgaccagctatttactcagtccgttttagacaaatcattgaccaagagcaactatcagtcacggttacatgaccttctttatattgaggagatagcccagtataaagaaatcagcaagttcaaccttaaagtgcaattgcagattctggcaagcttcatgctcactggtgtttctggaggtgcaaagtatgctcagaatggacaactttttggtcgctttaagcttactgaaacactttctgaagatactttggctggacgactggtgatgaccaaagtcaatgctgtttatttattaccagtccctaaacagaagttagtacagacccagggaaccaaagagaaggtttatgaagctactattgaagaaaaaacaaaggaatatatatttttaaggctatctagggaatgctgtgaagaacttaatcttcggcctgactgtgacacacaggttgaacttcagtttcaattaaatcgattacccctctgtgaaatgcactatgcactagacaggatcaaggacaatggggttttgtttccagacatcagtatgactcccaccataccatggagtcctaacagacaatgggatgaacagttggatcctcgactaaatgcaaaacagaaagaggctgttctggccattaccactccacttgcaatccagctgccgcctgtgcttatcatcggaccctatgggacaggcaaaacgttcactctagctcaggctgtcaaacatattctgcagcaacaggagactaggattctcatttgcacccattctaatagtgctgctgatctctacataaaggattatttacatccatatgtagaagcaggcaatccccaggcaagacctctcagggtatatttcagaaatcgctgggtaaagactgtccacccagttgtgcatcagtactgtttgatctcaagcgcacattccacctttcagatgccccagaaagaagatattcttaaacatcgagtggtggttgttaccttgaatacttcccagtacctctgtcagttggaccttgaacctgggttttttacacacattctattagatgaagctgcccaggccatggagtgtgaaaccattatgcctctagcattagcaactcaaaacactcggattgtcttggctggtgatcacatgcagctcagtccttttgtttacagcgagtttgccagggagagaaaccttcacgtttcattacttgaccgactctatgagcattaccctgctgagttcccatgtaggattctcctgtgtgagaactaccgctcccatgaagctatcatcaattatacctctgagcttttctatgagggcaaactgatggccagtgggaagcagccagcacacaaagatttctacccactaactttctttacagcacgaggagaagatgtacaagaaaaaaatagcacagctttttataataatgcagaggtgtttgaagtggtggaacgtgtagaagagttaagaaggaagtggccagtagcgtgggggaagttagatgatggcagtattggtgtggtgactccatatgctgatcaagtgtttagaatacgtgctgaacttcgaaaaaagagattatctgatgttaatgtagaaagggtgctaaatgttcaaggaaagcaattcagagttttgtttcttagcacagtacgtacaagacatacttgtaaacataaacagacaccaattaaaaagaaagagcaacttctggaagattccacagaggacttagattatggttttttatctaactacaagcttctcaatactgccatcacaagagcacaatccctggttgctgtggtgggtgatcccattgctctgtgctctattggaagatgcaggaaattttgggaacggtttattgccctgtgtcatgaaaacagtagcctacatggaatcacttttgaacagatcaaagcccagttagaggctttagaactaaagaagacatatgtgttgaatccgctggcacctgaatttatcccccgggctctaagactgcagcattcaggaagtaccaacaaacagcagcaatcaccacccaaggggaaaagtcttcatcatacccagaatgatcacttccagaatgatggaattgttcagcccaatccttctgtacttattggcaatcctattagagcatatactcctccaccccctcttggacctcacccaaatttgggaaaatctccaagccctgttcaaagaatagatcctcacactgggacaagtattctttatgtacctgctgtctatggagggaatgtagttatgtcggtgcctttacctgtaccatggacaggataccagggtaggtttgcagttgatcctcgaattattacacatcaggcagcaatggcctataacatgaacctattacagacacatggacgaggatctcctattccttatggccttggacatcacccacctgtcaccataggccagccacaaaatcagcatcaggagaaggatcaacatgagcaaaatcgaaatggtaaaagtgatacaaataattccggacctgaaattaataagattcgaacaccagagaaaaagccaacagaaccaaaacaggttgatttggaatcaaatccacagaacagaagtcctgaatcacgtcctagtgttgtttatcccagtaccaaatttcctcgcaaagataatctcaacccaagacacataaatcttccccttcctgctccccacgcacagtatgcaatccctaatcgccactttcatccccttccccagctaccaagaccaccctttccaattccacagcagcacaccttgttaaatcagcagcagaataatttgcctgaacaaccaaatcagataccacctcagccaaatcaggtagtccagcagcaaagtcagttgaatcagcagcctcagcagccacctcctcagctttctcctgcatatcaggcgggacccaacaatgctttttttaatagtgcagttgctcatcggccacagtctcctcctgcagaagctgtaattccggagcagcagccccctcccatgctgcaagaaggccacagtcctctgagagccattgcacaacccggccccattcttccttcacatctgaatagcttcattgatgagaacccctcgggattacctataggggaggctttagatcgtatacatgggagtgtcgctctggaaacattaaggcagcagcaggcacggttccagcagtggagcgagcatcatgcctttctcagtcagggcagcgctccatacccacaccatcaccatcctcacctccagcatcttcctcagccgcccctgggattacatcagccgccagtgagggcagactggaagctcaccagcagtgccgaagatgaagtggagaccacatactcaaggtttcaagacttaatcagagaactgtctcatcgtgatcaaagtgaaacacgggaactagctgaaatgccaccacctcaatcaagacttttgcaatatagacaagtacagagtagaagcccaccagcagtcccatctcccccatccagtacagaccacagtagccacttttctaactttaatgataacagcagagacattgaagtagccagcaacccagcatttccacagcgcctcccaccccagatattcaactcacctttctcgttgccatctgaacaccttgcccctcctcccttgaaatacctggcacctgatggagcatggacttttgctaacttgcaacagaatcacctaatggggccaggttttccctatggcctacctccattgcctcacaggccaccgcagaacccttttgtacaaatacagaatcatcaacatgctattggtcaagagccatttcacccattgtcatctcgaacagtatcttcttcttcgctccctagcttagaagagtatgagcccagaggacctggtcggcccttgtaccaaagaagaatctcatctagctcagttcaaccttgttctgaagaagtaagcactcctcaagacagtctggctcagtgtaaagagcttcaggaccacagtaaccaatcttctttcaacttttcatccccggagtcctgggtaaacaccacctcatctactccttatcagaacattccgtgcaatggatccagcaggacagctcagcccagagagttgatagcgccacccaagactgtcaaaccccctgaggatcaactgaagtcggagaacctcgaggtgtccagttccttcaactacagtgtgctgcagcatcttggccagtttccaccccttatgcctaacaagcagatcgcggagtcggccaatagcagtagcccccagagctctgcggggggcaagcccgccatgtcctatgccagcgctctgcgggcccctccaaagcccaggccccctcctgagcaggccaagaagagtagcgaccctctgtctctcttccaggaactgagcctagggagctcatctggcagcaatggcttttactcatattttaaataatcactttttttttccctcaagggagaatgttttaatttctgtttgtatcagtagaattaaggtagttggacttcatctatagatgcacagttccctttgttttaatattaaatatgttctcacttaattgctttgctgctagacttgcaactaatttttttaaagtatattccattattttgcatttttgatgtgtcaaaactttgacagcttttatgtagaataaaaaaatttttaaatttgtgtattgttacatatgtttgcatcaagctagcagccaagaggttaattgtgcaactat

SEQ ID NO: 32575 - DNA, 5190 bp, Homo Sapiens
atgctgaccctgtgctacctgattgcacgctgtatcggcaggacccggctggcccccgggcagcaggctcttaaggagttctgggagctccggaggtggtgtggccaccaggtgaaggtccaaggctgctggggcagatggcggtggcaggagtttgagaatgcggagggggacgagtacgcagccgacctggcgcagggctccccggccacggcagcacagaacgggcccgacgtgtacgtcctgccactcacggaggtctccttgcccatggccaagcagcctgggcgctcagtgcagctcctcaagtccacagacgtgggccggcacagcctcctgtacctgaaggaaatcggccgtggctggttcgggaaggtgttcctgggggaggtgaactctggcatcagcagtgcccaggtggtggtgaaggagctgcaggctagtgccagcgtgcaggagcagatgcagttcctggaggaggtgcagccctacagggccctgaagcacagcaacctgctccagtgcctggcccagtgcgccgaggtgacgccctacctgctggtgatggagttctgcccactgggggacctcaagggctacctgcggagctgccgggtggcggagtccatggctcccgacccccggaccctgcagcgcatggcctgtgaggtggcctgtggcgtcctgcaccttcatcgcaacaatttcgtgcacagcgacctggccctgcggaactgcctgctcacggctgacctgacggtgaagattggtgactatggcctggctcactgcaagtacagagaggactacttcgtgactgccgaccagctgtgggtgcctctgcgctggatcgcgccagagctggtggacgaggtgcatagcaacctgctcgtcgtggaccagaccaagagcgggaatgtgtggtccctgggcgtgaccatctgggagctctttgagctgggcacgcagccctatccccagcactcggaccagcaggtgctggcgtacacggtccgggagcagcagctcaagctgcccaagccccagctgcagctgaccctgtcggaccgctggtacgaggtgatgcagttctgctggctgcagcccgagcagcggcccacagccgaggaggtgcacctgctgctgtcctacctgtgtgccaagggcgccaccgaagcagaggaggagtttgaacggcgctggcgctctctgcggcccggcgggggcggcgtggggcccgggcccggtgcggcggggcccatgctgggcggcgtggtggagctcgccgctgcctcgtccttcccgctgctggagcagttcgcgggcgacggcttccacgcggacggcgacgacgtgctgacggtgaccgagaccagccgaggcctcaattttgagtacaagtgggaggcgggccgcggcgcggaggccttcccggccacgctgagccctggccgcaccgcacgcctgcaggagctgtgcgcccccgacggcgcgcccccgggcgtggttccggtgctcagcgcgcacagcccgtcgctgggcagcgagtacttcatccgcctagaggaggccgcacccgccgccggccacgaccctgactgcgccggctgcgcccccagtccacctgccaccgcggaccaggacgacgactctgacggcagcaccgccgcctcgctggccatggagccgctgctgggccacgggccacccgtcgacgtcccctggggccgcggcgaccactaccctcgcagaagcttggcgcgggacccgctctgcccctcacgctctccctcgccctcggcggggcccctgagtctggcggagggaggagcggaggatgcagactggggcgtggccgccttctgtcctgccttcttcgaggacccactgggcacgtcccctttggggagctcaggggcgcccccgctgccgctgactggcgaggatgagctagaggaggtgggagcgcggagggccgcccagcgcgggcactggcgctccaacgtgtcagccaacaacaacagcggcagccgctgtccagagtcctgggaccccgtctctgcgggcggccacgctgagggctgccccagtccaaagcagaccccacgggcctcccccgagccggggtaccctggagagcctctgcttgggctccaggcagcctctgcccaggagccaggctgctgccccggcctccctcatctatgctctgcccagggcctggcacctgctccctgcctggttacaccctcctggacagagacagccagtagtgggggtgaccacccgcaggcagagcccaagcttgccacggaggctgagggcactaccggaccccgcctgccccttccttccgtcccctccccatcccaggagggagccccacttccctcggaggaggccagtgcccccgacgcccctgatgccctgcctgactctcccacgcctgctactggtggcgaggtgtctgccatcaagctggcttctgccctgaatggcagcagcagctctcccgaggtggaggcacccagcagtgaggatgaggacacggccgaggccacctcaggcatcttcaccgacacgtccagcgacggcctgcaggccaggaggccggatgtggtgccagccttccgctctctgcagaagcaggtggggacccccgactccctggactccctggacatcccgtcctcagccagtgatggtggctatgaggtcttcagcccgtcggccactggcccctctggagggcagccgcgagcgctggacagtggctatgacaccgagaactatgagtcccctgagtttgtgctcaaggaggcgcaggaagggtgtgagccccaggcctttgcggagctggcctcagagggtgagggccccgggcccgagacacggctctccacctccctcagtggcctcaacgagaagaatccctaccgagactctgcctacttctcagacctcgaggctgaggccgaggccacctcaggcccagagaagaagtgcggcggggaccgagcccccgggccagagctgggcctgccgagcactgggcagccgtctgagcaggtctgtctcaggcctggggtttccggggaggcacaaggctctggccccggggaggtgctgcccccactgctgcagcttgaagggtcctccccagagcccagcacctgcccctcgggcctggtcccagagcctccggagccccaaggcccagccaaggtgcggcctgggcccagccccagctgctcccagtttttcctgctgaccccggttccgctgagatcagaaggcaacagctctgagttccaggggcccccaggactgttgtcagggccggccccacaaaagcggatggggggcccaggcacccccagagccccactccgcctggctctgcccggcctccctgcggccttggagggccggccggaggaggaggaggaggacagtgaggacagcgacgagtctgacgaggagctccgctgctacagcgtccaggagcctagcgaggacagcgaagaggaggcgccggcggtgcccgtggtggtggctgagagccagagcgcgcgcaacctgcgcagcctgctcaagatgcccagcctgctgtccgagaccttctgcgaggacctggaacgcaagaagaaggccgtgtccttcttcgacgacgtcaccgtctacctctttgaccaggaaagccccacccgggagctcggggagcccttcccgggcgccaaggaatcgccccctacgttccttagggggagccccggctctcccagcgcccccaaccggccgcagcaggctgatggctccccaaatggctccacagcggaagagggtggtgggttcgcgtgggacgacgacttcccgctgatgacggccaaggcagccttcgccatggccctagacccggccgcacccgccccggctgcgcccacgcccacgcccgctcccttctcgcgcttcacggtgtcgcccgcgcccacgtcccgcttctccatcacgcacgtgtctgactcggacgccgagtccaagagaggacctgaagctggtgccgggggtgagagtaaagaggcttgagacctgggcagctcctgcccctcaaggctggcgtcaccggagcccctgccaggcagcagcgaggatggtgaccgagaaggtggggaccacgtcctggtggctgttggcagcagattcaggtgcctctgccccacgcggtgtcctggagaagcccgtgggatgagaggccctggatggtagatcggccatgctccgccccagaggcagaattcgtctgggcttttaggcttgctgctagcccctgggggcgcctggagccacagtgggtgtctgtacacacatacacactcaaaaggggccagtgcccctgggcacggcggcccccaccctctgccctgcctgcctggcctcggaggacccgcatgccccatccggcagctcctccggtgtgctcacaggacacttaaaccaggacgaggcatggccccgagacactggcaggtttgtgagcctcttcccaccccctgtgcccccacccttgcctggttcctggtggctcagggcaaggagtggccctgggcgcccgtgtcggtcctgtttccgctgcccttatctcaaagtccgtggctgtttccccttcactgactcagctagacccgtaagcccacccttcccacagggaacaggctgctcccacctgggtcccgctgtggccacggtgggcagcccaaaagatcaggggtggaggggcttccaggctgtactcctgccccgtgggccccgttctagaggtgcccttggcaggaccgtgcaggcagctcccctctgtggggcagtatctggtcctgtgccccagctgccaaaggagagtgggggccatgccccgcagtcagtgttggggggctcctacctacagggagagggatggtggggaaggggtggagctgggggcagggcagcacagggaatatttttgtaactaactaactgctgtggttggagcgaatggaagttgggtgattttaagttattgttgccaaagagatgtaaagtttattgttgcttcgcagggggatttgttttgtgttttgtttgaggcttagaacgctggtgcaatgttttcttgttccttgttttttaagagaaatgaagctaagacaaaag

SEQ ID NO: 32576 - DNA, 2890 bp, Homo Sapiens; identical to SEQ ID NO: 27591

SEQ ID NO: 32577 - DNA, 4894 bp, Homo Sapiens
gcccgaaacccggaagtgagcggcggcagctgcgaggctcggagaaacaggcgccgcgggctccgcgcccggccggacccgggcccgagatcatgatgctgccgccaccgccgccaccacggagcgagaagcccagatagacgccccggcggccccgggtcctggagtcccgccgcctgctgcccggccgaggaccccaccccgcctgccgcccgatgcttgcagtggggcccgccatggacagggattacccgcagcatgaacccccgccggcgggcagcctcctgtacagcccgccgcccctgcagagcgccatgctgcactgcccctactggaacaccttctcgctgccgccataccctgccttctccagcgacagccgcccgttcatgagctccgcctccttcctcggcagccagccctgcccagacaccagctatgcccccgtggccaccgcctccagcttgccaccaaagacctgcgactttgctcaggactcctcctattttgaggacttctccaacatctccatcttctcctcgtccgtggactccctgtcggacatcgtggacacgcccgacttcctgccggctgacagcctcaaccaggtgtccaccatctgggacgataaccctgccccctccacccacgataagctgttccagctcagcaggccgtttgcaggcttcgaggactttctgccctcccacagcaccccgcttctcgtcagctaccaggagcagagtgtgcagagccagccagaggaggaggacgaggctgaggaggaggaggcggaggagctggggcacacagagacctacgccgactacgtgccgtccaagtccaagatcgggaagcagcacccagaccgcgtggtggagaccagcacactgtccagcgtcccacccccagacatcacctacaccctggccctgccctcggacagcggggccctgtctgccctgcagctagaggccatcacctacgcctgccagcaacacgaggtcctgctccccagcgggcagcgcgcgggctttctcatcggcgatggggccggcgtgggcaaaggccggacggtggccggagtcatcctggagaaccacctgcgcggccggaagaaagcattgtggttcagcgtctccaacgacctcaagtacgatgcggagcgcgacctgcgggacatcgaagccacgggcatcgcggtgcacgcgctcagcaagatcaagtacggtgacaccactacctcagagggcgtcctcttcgccacctactccgccctgattggggagagccaggccggcggccagcaccgcactcgcctccggcagatcctggactggtgtggggaggccttcgagggcgtcatcgtgttcgacgagtgtcacaaagccaagaatgccggctccaccaagatgggcaaggctgtgctagacctgcagaacaagctgcccctggcccgcgtggtctacgccagcgccacaggtgcctctgagcctcggaacatgatctacatgagccgcttgggtatctggggcgagggcacacccttccggaactttgaggagttcctgcacgccatcgagaagaggggcgttggcgccatggagatcgtggccatggacatgaaggtcagcggcatgtacatcgcacgccagctcagcttctccggcgtcaccttccgcatcgaggagatcccgctggccccagccttcgagtgcgtctacaaccgcgcggccctgctgtgggccgaggccctgaacgtgttccagcaggcggccgactggatcggcctggagtcgcgcaagtccctgtggggccagttctggtcggcacaccagcgcttcttcaagtatctgtgcatcgcagccaaggtgcgccggctggtggagctggcccgagaggagctggcgcgagacaagtgcgtggtcatcgggctgcagtccacgggcgaggcgcgcacgcgggaggtgctgggggagaacgatgggcacctcaactgcttcgtctcggccgctgaaggcgtgttcctgtcgctaattcagaagcactttccgtccaccaagagaaagcgggacagaggagcgggcagcaagcggaaacggcgacctcggggacgcggggccaaagccccccggctggcgtgcgagacagcgggcgtcatccgcatcagtgacgacagcagcacggagtcggaccctggcctggacagcgacttcaactcctcccccgagtccctggtggatgacgacgttgtcatcgttgatgcagtcgggctccccagtgacgaccggggacccctgtgcctcctgcagagagacccgcatggccccggggtcctggagcgggtggagcggctgaagcaggatctgctggacaaagtgcggcggctgggccgggaactgccagtcaacaccctggacgagctcatcgaccagctgggcggcccccagcgggtggcggagatgaccggcaggaaaggccgcgtggtgtccaggcccgacgggacggtggccttcgagtcgcgggcagagcagggtctgtccatcgaccacgtgaacctcagggagaagcagcgcttcatgagcggcgagaagctcgtggccatcatctcggaggcctccagctcgggtgtctccctccaagccgaccgccgtgtccagaaccagcggcgccgcgtgcacatgaccttggagctgccgtggagcgccgaccgcgccatccagcagttcggccgcacccaccggtccaaccaggtctccgcgccagagtatgtcttcctcatctcggagctggccggggagcgccggttcgcctccatcgtggccaagcgcctggagagtctgggggccctgacccacggagaccgccgcgccacggagtcccgtgacctcagcaagtacaactttgagaacaagtatggcacccgggccctgcactgtgtcctcaccaccatcctgagccagactgagaacaaagtgcctgtgccccagggataccctggaggggtccccaccttcttccgggacatgaagcagggcctgctgtctgtgggcattggtggccgggagtcccggaatggctgcctggacgtggagaaggactgttccatcaccaagttcctgaaccgcatcctggggctggaggtgcacaagcagaacgccctgttccagtacttctcagacaccttcgaccacctcatcgagatggacaagcgggagggcaaatacgacatgggcatcctggaccttgctcccggtatcgaggagatctacgaggagagccagcaggtgttcctggctcccgggcacccgcaggacgggcaggtggtcttctacaagatcagcgtggaccgcggcctgaagtgggaggacgcctttgccaagtcgctggcgctgacgggcccctatgacggcttctacctctcctacaaggtccgcggtaacaagcccagctgcctgctggcggagcagaaccgcggccagttcttcacggtgtacaagcccaacatcggccggcagagccagctggaggccctggacagcctccgccgcaagttccaccgggtcaccgcggaggaggccaaggagccctgggagagtggctacgctttgtcgctgacgcactgcagccacagcgcctggaaccggcactgccggctggcgcaggagggtaaggactgcctgcaggggctgcggctgcggcaccactacatgctgtgcggcgcgctgctgcgcgtgtggggccgcatcgccgccgtcatggccgacgtcagcagcagcagctacctgcagatcgtgcggctgaagaccaaggacaggaagaagcaagtgggcatcaagatccccgagggctgcgtgcgccgggtgctgcaggagctgcggctgatggatgcggacgtgaagcgcaggcaggcgcccgccctgggctgccccgccccgcccgccccgcgcccgctggcgctgccttgcggccccggagaggtgctggacctcacctacagccccccggccgaggccttcccgccgcccccgcacttctctttcccggcgccgctgtccctggacgccggccccggcgtcgtgccgctgggcacccccgacgcccaggccgaccctgcggccctcgcgcaccagggctgcgacatcaacttcaaggaggtgctggaggacatgctgcgctcgctgcacgcggggccgccctccgagggcgcgctgggggagggcgcgggggcggggggcgcggcgggcggtggtcccgagcggcagagcgtgatccagttcagcccacccttccccggcgcccaggctcctctctgacacgcctttaggcgaaacatgccccaagacacagggaccgtttctcccctaggagcagcggtggggagcagggccaaggtcccctgaccactgctcagaggagccctaggccctggccgcagtgccttcagcgcccgacccgggcccccacctggtcagccctggcggggcccactcaggacagctgggggccggggcgtggcagggccctctctgtgcctctcctcccaagtaggaaggggctccgggtggctgctctgggactgggcacccacaagggctcagtgggcccaaacccttgaaatccgtgaaaccgggtggtcccaagagctagaaactcaggaaaccccaggtgctcagggccccgcgtctcgggggctccgtggggcagacccctgctaatatatgcaattctccctcccccagcccttccctgacccctaagttattgcccgctcacctctcccaggccccaggccgcggagctggcagggtggcgcctgcggtttctatgtatttatagcaagttctgatgtacatatgtaaaggacttttttaaatatatgtgccttttgcct

SEQ ID NO: 32578 - DNA, 2793 bp, Homo Sapiens
atgacaacccacatctcaggaccggcaaggcgcaaacggggcagcctggagagcgccgtgggcgaggaaggcccccagcgcaggcttcggctattggtgttggtgccgcggccactggcccagccgatgggtcgggacacacgctcgcgctcgcggtccgcgggtcgccggggccgaaggcggcagagtcagagcgggagccgaagtcggagcaggagccatgggcggcgaaaccgacggcgccgggaggacgagggacggcgcagacggaggcggcggagccgggagcgcaggtcagattcagaggaagagcggtggcagcgctcagggatgcgaagccggagccccccgcggcccaagtggcactcaagagatgggtcctctcagtcggactcaggagaggagcagtcacggggccagtgggctcgccggcgacggcgcgcacgctcgtggtctcctagctcctcagcatccagctccgcgtctccagggcgatcccagagcccccgggcggccgcggctgccctgagccagcagcagagcctgcaggagcggctgcggctgcgggaggagcggaagcagcaggaggagctgatgaaggccttcgagacgcccgaggagaagcgcgcacggcggctggccaagaaggaggccaaggagcgcaagaagcgggagaagatgggctggggtgaggagtacatgggctacaccaacaccgacaaccccttcggagacaacaacctgctgggcaccttcatctggaataaggccctggagaagaaggggatcagccacctggaggagaaggagctgaaggagcggaacaagaggatccaggaggacaaccggctggagctgcagaaggtgaagcagctgcggctggagcgggagcgggagaaggccatgcgcgagcaggagctggagatgctgcagcgcgagaaggaggcagagcacttcaagacatgggaggagcaggaggacaacttccacctccagcaggccaagctgcgttccaagatccgcatccgggacgggcgggccaagcccatcgacctgctggccaagtacatcagcgctgaggatgacgatctggccgtggagatgcatgagccctacacgttcctcaacggcctcaccgtggccgacatggaggacctgctggaggatatccaggtctacatggagctggagcagggcaagaacgccgacttctggcgggacatgaccaccatcaccgaggacgagatctccaagctccgcaagctggaggcctcgggcaaggggccaggtgagcgccgcgagggggtcaacgcctccgtcagctctgatgtgcagtcggtgttcaaggggaagacatacaaccagctgcaggtcatcttccagggcatcgagggcaaaatccgcgctggtggccccaacctggacatgggctactgggagagcctcctgcagcagcttcgtgcccacatggcacgggcccggctgcgtgagcgccaccaggacgtgctgcggcagaagctgtacaaactgaagcaggagcagggcgtggagagcgagccgctgttccccatcctcaagcaggagccccagtcccccagccgcagcctggagcctgaggacgcggcgcccaccccgcccgggccctcctcggagggcggccccgcggaggccgaggtggacggcgcgaccccgacagagggcgacggcgacggggacggtgagggcgagggcgagggcgaggcggtgctcatggaggaggacctgatccagcagagcctggacgactacgacgccggcaggtacagcccgcggctgctcacggcgcacgagctgccactggacgcgcacgtgctggaaccggatgaggacctgcagcgcctgcagctctcgcgccagcagctccaggtcacgggagacgccagcgagagcgccgaggacatcttcttccggcgggccaaggagggcatgggccaggacgaggcgcagttcagcgtggagatgccactcaccggcaaggcctacctgtgggccgacaagtaccggccacgcaagccgcgcttcttcaaccgcgtgcacacgggcttcgagtggaacaagtacaaccagacgcactacgactttgacaacccaccgcccaagatcgtgcagggatacaagttcaacatcttctaccccgacctcatcgacaagcgctccacgcccgagtacttcctggaggcctgcgccgacaacaaggatttcgccatcctgcgcttccacgcggggccgccctacgaggacatcgctttcaagatcgtcaaccgcgagtgggaatactcgcaccgccacggcttccgctgccagtttgccaacggcatcttccagctgtggtttcacttcaagcgctaccgctatcggcgaagagaccctctgtggacacccacactctgcagggactggcccccaactcaccccgtgctggctggtggggtccatttccccgcagcgggccaggagggccgagggccacacgggtgccacagcccaggtcggagtggcccagccggcaggcttgttcttcagcatccgacgggaacatctccaacagaagcaaaacggaaagtgcctcccggacccccagagggccacccaacctcaccagtcaccagccccagaccacccacagcccctcccagacaccccgcctcatctggaaatagttccgtttgtttctctaaaaagacttgtaggtgggaaaaaaaatcttttgttctcatggaattggcctattggcaagatcgcatgtttttttaa

SEQ ID NO: 32579 - DNA, 6335 bp, Homo Sapiens
atgcagaccctgggcagcttctttgggtccctgcctggcttcagctctgcccggaacctggtggccaacgcacatagctcggcgagagcccggccggccgctgaccccacaggagcgcctgctgccgaggctgcccaaccacaggctcaggtggctgcccacccagagcagacggccccatggacggagaaggagctgcaaccttcggaaaagcagatggtgtccggggccaaagacctggtgtgttccaagatgtccagggccaaggatgccgtgtcctccggggtggccagcgtggtggacgtggctaagggagtggtccagggaggcctggacaccactcggtctgcacttacgggcaccaaggaggtggtgtccagcggggtcacaggggccatggacatggctaagggggccgtccaagggggtctggacacctcgaaggctgtcctcaccggcaccaaggacacggtgtccactgggctcacgggggcagtgaatgtggccaaagggaccgtacaggccggtgtggacaccaccaagactgtgctgaccggcaccaaagacacagtgactactggggtcatgggggcagtgaacttggccaaagggactgtccagactggcgtggaaacctccaaggctgtgctgaccggcaccaaagatgctgtgtccactgggctcacaggggcagtgaatgtggccagaggaagcattcagaccggtgtggacaccagtaagactgtcctaacaggtaccaaggacaccgtctgtagtggggtgactggtgccatgaatgtggccaaaggaaccatccagaccggcgtggacaccagtaagactgtcctaacaggtaccaaggacaccgtctgtagtggggtgactggtgccatgaatgtggccaaaggaaccatccagaccggcgtggacaccagtaagactgtcctaacaggtaccaaggacaccgtctgtagtggggtgactggtgccatgaatgtggccaaaggaaccatccagaccggcgtggacaccaccaagactgtcctaactggcaccaagaacactgtctgcagtggggtgaccggtgccgtgaacttggccaaagaggccatccaggggggcctggataccaccaagtctatggtcatgggtacgaaagacacgatgtccactgggctcacaggggcagcgaatgtggccaagggggccatgcaaactgggctgaacacaacccaaaatatcgcaacaggtacaaaggacaccgtctgcagtggggtgactggtgccatgaatttggccagaggaaccatccagacaggcgtggacaccaccaagatcgttctaactggtaccaaggacactgtctgcagtggggtcaccggtgctgcgaatgtggccaaaggggccgtccagggcggcctggacactacaaagtctgtcctgactggcactaaagatgctgtgtccactgggctcacaggggctgtgaacgtggccaaagggaccgtccagaccggcgtagacaccaccaagactgtcctaaccggcaccaaggacaccgtctgcagtggggtgaccagtgctgtgaacgtggccaaaggggccgtccaggggggcctggacaccaccaagtctgtggtcataggtacaaaagacacgatgtccactgggctcacgggggcagcgaatgtggccaagggggctgtccagacaggtgtagacacagccaagaccgtgctgaccggcaccaaggacacagtgactactgggctcgtgggggcagtgaatgtcgccaaagggaccgtccagacaggcatggacaccaccaaaactgtcctaaccggtaccaaggacaccatctacagtggggtcaccagtgccgtgaacgtggccaagggggctgtgcaaactgggctgaaaacgacccaaaatatcgcgacaggtacaaagaacacctttggcagtggggtgaccagtgctgtgaatgtggccaaaggggctgcccagacaggtgtagacacggccaagaccgtgctgaccggcaccaaggacacagtcactactgggctcatgggggcagtgaatgtcgccaaagggactgtccagaccagtgtggacaccaccaagactgtcctaactggtaccaaggacaccgtctgcagtggggtgaccggtgctgcgaatgtggccaaaggggccatccaagggggcctggacactacaaagtctgtcctgactggcactaaagatgctgtgtccactgggctcacaggggctgtgaagttggccaaagggactgtccagaccggcatggacaccaccaagactgtgttaactggtaccaaggatgctgtgtgcagtggggtgaccggtgctgcgaatgtggccaagggggccgtccagatgggtgtagacacggccaagaccgtgctgaccggtaccaaggacactgtctgcagtggggtcaccggtgctgcgaacgtggccaagggtgctgtgcaaactgggctgaaaacgacccaaaatatcgcaacaggtacaaagaacacccttggcagtggggtgaccggtgctgcgaaagtggccaaaggggccgtccaggggggcctggacactacaaagtctgtcctgactggcactaaagatgccgtgtccactgggctcacaggggctgtgaacttggccaaagggactgtccagaccggcgtggacaccagcaagactgtcctgaccggtaccaaggacaccgtctgcagtggagtcactggtgccgtaaatgtggccaaagggaccgtccagacaggtgtggacacagccaagacggtgctgagtggcgctaaggatgcagtgactactggagtcacgggggcagtgaatgtggccaaaggaaccgtgcagaccggcgtggacgcctccaaggctgtgcttatgggtaccaaggacactgtcttcagtggggttaccggtgccatgagcatggccaaaggggccgtccaggggggcctggacaccaccaagacagtgctgaccggaaccaaagacgcagtgtccgctgggctcatggggtcagggaacgtggcgacaggggccacccacactggcctcagcaccttccagaactggttacctagtacccccgccacctcctggggtggactcaccagttccaggaccacagacaatggtggggagcagactgccctgagcccccaagaggccccgttctctggcatctccacgcccccggatgtgctcagtgtaggcccggagcctgcctgggaagccgcagccactaccaagggccttgcgactgacgtggcgacgttcacccaaggggccgccccaggcagggaggacacggggcttttggccaccacacacggccccgaagaagccccacgcttggcaatgctgcagaatgagttggaggggctgggggacatcttccaccccatgaatgcggaggagcaagctcagctggctgcctcccagcctgggccaaaggtgctgtcggcggaacaggggagctacttcgttcgtttaggtgacctgggtcccagcttccgccagcgggcatttgaacacgcggtgagccacctgcagcacggccagttccaagccagggacactctggcccagctccaggactgcttcaggctgattgaaaaggcccagcaggctccagaagggcagccacgtctggaccagggctcaggtgccagtgcggaggacgctgctgtccaggaggagcgggatgccggggttctgtccagggtctgcggccttctccggcagctgcacacggcctacagtggcctggtctccagcctccagggcctgcccgccgagctccagcagccagtggggcgggcgcggcacagcctctgtgagctctatggcatcgtggcctcagctggctctgtagaggagctgcccgcagagcggctggtgcagagccgcgagggtgtgcaccaggcttggcaggggttagagcagctgctggagggcctacagcacaatcccccgctcagctggctggtagggcccttcgccttgcccgctggcgggcagtagctgtaggagcctgcaggcccggcgcggggtcgccctgctctgtccagggaggagctgcctcagaactttctccccgcccccaaacctggatcggttccctaaagccctagacctttggggctgcagctggctgagcgccgaggggctgcggaggcagtgaccttcttaactgagccaccccacgccctgctccgggcctgcctgcatctcccacctcctccccagcgctgcctgcccctctcggagcctggggtcactcagaccaccagccaagagccttcccttgaagtccccaagcaagcactgcaattaggaaagagaaaaagcagcgtgcccagcctggaagggcatctgtttgccccgctagcaacccttttatatctagcagggctcttccagtcctgcagcacgggcccccagctatcagcggtgcaggcagtgctgtggcatcccaggctccgggcagctccgttctcatgctgaaagtgggtctccggccttagcacacacaccttgagggtcttaagaaccacattccctcatagtagaaagtactagaaaaagcgacactgccatcatcatcccaaggcaggctgctactgcctttgctgacccccggggtggcctcacggtggggacaaagctgccaggagccacagcagccacagctggggctttgcaccagcctggcttgagactgagcagtttgcagggggtggggggtgcaaaaaacaagcaaacaggctgctgctgcctccagctgcccaccacaggcctgccccaggcacctggggctctgaggcccctggggaggctgggcccagcagctgcccctggagaacacagacaaaggacttccccgcagggaactgtgccctatggagggatcagacagggctgggaacagccacagaggctgcgtgcctatggcacagcccttcctccgccgcacactccccctgggtcctcaggcccacccaagcgccgggctgcagaggaagcggggctggggaggctgcaggcatcagagacactggtggtggcggacccggccgccgggccccgtgctctcaggctagcccaggtcgtggaggctggcaggctcaggtcgggtgtgagacgtgccgtggctgcgctcagtccagcggggaggagccgttcagcccggcctccccaggaagccatatccccactcacccggtaagagaaccttgtcgtcccctttccatgctctcctaggacacgagcccaggaaccccagacccagggggaggaagggtggaggggccccaggggtcaccgtgtgcaccaggggccgtgaggggccggggcattcagctcagctctgaaccggggaagctggcacggcaaggactgcctcaggtgacgggccgtgagaggggacgggtcaggagccttcccaagccttctcctcagcccgacacccatggccatcggaggctaggatgccagacacagccatttgcagaaatcaggcacagtgactgcagctcacgtccagccaaccaagcatggggccgcagctcaggaagtcccttcccgccacaccacagcctaattcttactgggacggaggcaactcggctacgctgggcaggacgacaaacacgagacgccactgtggaatgagcaacttcggagcacggggtgacttgcttgggaccgtgcccacgtgacagccccttatgcagaggaggaaagagaagccccgagtgggaggggaacctgtccaaagtcacacggtgtgtgggtgacacagctggggtgagtcgaggctggcccctgaggcccatgctccctgaacgctggagaccactgtcggctagcagcggctctcagggaaggcctggtctccaccctcccagcctagcctcgcggaccctcgtcctccccacatcggacctgctcacctgcctggaccctgggctgccagatgcaggaagcatcaaaccccccagcctcgtgggtgcggggcagggcgcaggcagcacagcttagatgccctggtttgtccctcttgtctcctgggaagagcttgctcccgcccagctctcctgccactggcctttcagggttgggctgggcccagagtgccttttagtcgcttctcacggtggcctgatggctcaacccagtcccaaacgggcccagtgacactgccgcctgcgccccagctcaggcccccactgcaccagcaatgctagaaaaccaagccaataaaagtgatttcttttttcatt

SEQ ID NO: 32580 - DNA, 3164 bp, Homo Sapiens
gccgctatagctgccggcggtgtgcgactgagtcggtggcgaagacgggaacgcgacgatggcggagactctgcccgggtcgggcgactcgggccctggcacggcttctctcggcccgggcgttgcggagactgggacgaggcggctcagcgagctgcgggtgatcgatctgcgggcggagctgaagaagcggaacctggacacgggcggcaacaagagcgtcctgatggagcggctcaagaaggcggttaaagaagaggggcaagatcctgatgaaattggcatcgagttagaagccaccagcaagaagtcagccaagagatgtgttaaaggactgaagatggaggaggaaggcacagaagataatggcctggaagacgattccagagacgggcaggaggacatggaagcaagtctggagaacctgcagaatatgggcatgatggacatgagtgtgctagacgaaactgaagtggcgaatagcagtgctccagattttggggaggatggcacggacggccttctcgattccttttgtgatagtaaagaatacgtggctgcacagctgagacagctcccggctcagcccccagagcatgctgtggatggggaaggatttaagaacactttggaaacttcatcgttgaacttcaaagtaactccggacattgaagaatcccttttggagccagaaaatgagaaaatactcgacattttgggggaaacttgtaaatctgagccagtaaaagaagaaagttccgagctggagcagccatttgcacaggacacaagtagcgtggggccagacagaaagcttgcggaggaagaggacctatttgacagcgcccatccggaagagggtgatttagatttggccagcgagtcaacagcacacgctcagtcgagcaaggcagacagcctgttagcggtagtgaaaagggagcccgcggagcagccaggcgatggcgagaggacggactgtgagcctgtagggctagagccggcagttgagcagagtagtgcggcctccgagctcgcggaggcctctagcgaggagctcgcagaagcacccacggaagccccaagcccagaagccagagatagcaaagaagacgggaggaagtttgattttgacgcttgtaatgaagtccctccggctcctaaagagtcctcaaccagtgagggcgctgatcagaaaatgagctcttttaaggaagaaaaagatataaagccaatcattaaagatgaaaaaggtcgggtcggcagcggttctggtcggaacctgtgggtcagcgggctgtcctccacaacacgcgctacggatctcaagaaccttttcagcaagtatgggaaggttgtcggggccaaagtggtaacgaacgcccgcagcccgggggctcgatgctatggattcgtcaccatgtcgacatctgacgaggcgaccaagtgcatcagccatctccacagaactgagctgcatggacgaatgatctccgtagagaaggccaaaaatgagcctgctgggaaaaagctttccgacagaaaagagtgcgaagtgaagaaggaaaaattatcgagtgtcgacagacatcattctgtggagatcaaaattgaaaaaactgtaattaagaaggaagagaagattgagaagaaggaggaaaaaaagcctgaagacattaagaaggaagaaaaagaccaggatgagctgaaacccggacctacaaatcggtctagagtcaccaaatcaggaagcagaggaatggagcggacggtcgtgatggataaatcgaaaggagagcccgtcattagcgtgaaaaccacaagcaggtccaaagagagaagctccaagagtcaggatcgcaagtcagaaagcaaagaaaagagagacatcttgtcgtttgataaaatcaaagaacaaagggagagagagcgccagaggcagcgggaacgggagatccgcgaaacggagaggcggcgggagcgcgagcagcgggagcgggagcaacgcctcgaggccttccatgagcggaaggagaaggcccggctacagcgggaacgcctgcagctcgagtgccagcgccagcggctggagcgggagcgcatggagcgggagcggctggagcgcgagcgcatgcgcgtggagcgtgagcgcaggaaggagcaggagcgcatccaccgcgagcgcgaggagctgcggcgccagcaggagcagctgcgttacgagcaggagcggcggcccgggcggaggccctacgacctggaccgacgagatgatgcctattggccagaaggaaagcgtgtggcaatggaggaccgatatcgtgcagactttccccggccagaccaccgctttcacgacttcgatcatcgagaccggggccagtaccaggaccacgccatcgacaggcgggagggttcgaggccaatgatgggagaccaccgggatgggcagcactatggagatgaccgccatggccacggaggacccccagagcgccacggccgggactcccgtgatggctgggggggctacggctccgacaagaggctgagtgaaggccgggggctgccccctccccccaggggtggccgtgactggggagagcacaaccagcggctagaggagcaccaggcacgcgcctggcagggtgccatggacgcaggcgcggctagccgggagcacgccaggtggcaaggtggcgagaggggcctgtctgggccctcggggccggggcacatggcaagccgcggtggagtggcggggcgaggcggctttgcacaaggtggacattcccagggccacgtggtgccaggtggcggactggaaggtggcggagtggccagccaggaccggggcagcagagtccctcacccacaccctcatccccccccgtacccccacttcacccgccgctactaagtcccactcgctgcgagttttcgggtgggcagacgcactgttgaatctggtagccagggttccctcgaacttgggggatctttttaaaagcaaagtaaatcctgccaccatgttgtagctcaatacaatgtgaactcactttttttttttttttaaataaatgtgttcttgttctgccatttttaaatcaaggtttctgttaacgaggcattccattttccattaataaagtttaccattcgca

SEQ ID NO: 32581 - DNA, 2875 bp, Homo Sapiens
cggaaatggagggggtcgctttcctcaccttcctcgctgcgcgggcggcggttggtaaccggtcagaccagcccgagagggacctggtgcctgtacccaggcttctgtcgctctgtcgcctgcgctatgccctgctgtagtcacaggagctgtagagaggaccccggtacatctgaaagccgggaaatggacccagtggcctttgaggatgtggctgtgaacttcacccaggaagagtggacattgctggatatttcccagaagaatctcttcagggaagtgatgctggaaactttcaggaacctgacctctataggaaaaaaatggagtgaccagaacattgaatatgagtaccaaaaccccagaagaagcttcaggagtctcatagaagagaaagtcaatgaaattaaagaagacagtcattgtggagaaacttttacccaggttccagatgacagactgaacttccaggagaagaaagcttctcctgaagtaaaatcatgtgacagctttgtgtgtgcagaagttggcataggtaactcatcttttaatatgagcatcagaggtgacactggacacaaggcatatgagtatcaggaatatggaccaaagccatataagtgtcaacaacctaaaaataagaaagccttcaggtatcgcccatccattagaacacaagaaagggatcacactggagagaaaccctatgcttgtaaagtctgtggaaaaacctttattttccattcaagcattcgaagacacatggtaatgcacagtggggatggaacttataaatgtaaattttgtgggaaagccttccattctttcagtttatatcttatccatgaaagaactcacactggagagaaaccatatgaatgtaaacaatgtggtaaatcctttacttattctgctacccttcaaatacatgaaagaactcacactggggagaagccctatgaatgtagcaaatgtgataaagcatttcatagttctagttcctatcatagacatgaaagaagtcacatgggagagaagccttatcaatgcaaagaatgtggaaaagcatttgcatataccagttctcttcgtagacatgaaaggacccactctgggaaaaaaccgtatgaatgtaagcaatatggggaaggcttatcctatcttataagttttcaaacacacataagaatgaactctggagaaagaccttataaatgtaagatatgtgggaaaggcttttattctgccaagtcatttcaaacacatgaaaaaactcacactggagagaaacgctataaatgcaagcaatgtggtaaagccttcaatctttccagttcctttcgatatcatgaaaggattcacactggagagaaaccctatgagtgtaagcagtgtgggaaagccttcagatctgcctcacagcttcgagtgcacggtgggactcacactggagagaaaccctatgaatgtaaggaatgtgggaaagccttcagatctacctcacaccttcgagtgcatggtaggactcatactggagagaaaccctatgaatgtaaggaatgtgggaaagccttcagatatgtgaagcaccttcaaattcatgaaaggacagaaaaacacataagaatgccctctggagaaagaccttataaatgtagtatatgtgagaaaggcttttattctgccaagtcatttcaaacacatgaaaaaactcacactggagagaaaccctatgaatgcaaccaatgtggtaaagccttcagatgttgcaattcccttcgatatcatgaaaggactcacactggagagaaaccctatgagtgtaagcaatgtgggaaagccttcagatctgcctcacaccttcgaatgcatgaaaggactcacactggagagaaaccctatgagtgtaagcaatgtgggaaagccttcagttgtgcctcaaaccttcgaaagcatggtaggactcacactggagagaaaccctatgagtgtaagcaatgtgggaaagccttcagatctgcctcaaaccttcagatgcatgaaaggactcacactggagagaaaccctatgaatgtaaggaatgcgaaaaagcattctgtaaattctcttcttttcaaatacatgaaaggaagcacagaggagagaagccctatgaatgtaagcattgtgggaatggattcacatctgccaagattcttcaaatacatgcaagaacacacattggagagaaacactatgaatgtaaggaatgcggaaaagcattcaattatttttcttccttgcatatacacgcaaggactcatatgggagagaagccatatgaatgtaaggattgtgggaaagcattcagctagcctggttccttttatggacatgaatagactcacactggaaggaagcactatgaatgcaagcaatgtggcaaaactttcacattttccagttcttttcgatatcatgaaaggactcacactggggagaaaccctatcaatgtaagcagtgtgggaaagccttcattccttttacttcttttcaatgtcatgaaaggactcacacgggagagaaaccctatgagtgtattctagttccgtttgatatcatgaaaggacttacactggagtgaaaccctatgaatgtaagcaatgtgggaaagccttcagatgtgcctcgcaccttcaacggcatggaagggttcacacttgggagaaactctatgaatgtaagcagtatgggaaagccttcagatctgccaagattctttgaatacagataattaatgtaaacaattatcataagtatactaacatgttattctttttaaataagaaggtataataaaatatcccattggttttatgtattagatcaagctt

SEQ ID NO: 32582 - DNA, 7704 bp, Homo Sapiens
atgcccattgttgaaagccaattgcgggcctcgccccgcccccgctgcccgccattcgggtcacctgacccacccgcggctcacgtgatccgtccccagcgccgccattttggagctccggatgaggagggggaaaccgggggaaaagagggaaaagagccgggagagaggtgggcaaggacgagggcgagggcacggccgggtcctggctggccaaacgaggctcgcggaagcagcagccgccgcctgaccgcagatatggaagaaagtagcagtgttgccatgttggtgccagatattggggaacaggaagctatactgactgctgaaagtatcatcagtccttcattggaaattgatgaacaaagaaaaactaaaccagatccattaatccatgttatccagaagttaagcaagatagtggaaaatgaaaagtcacaaaaatgtcttttaattgggaagaaacgcccacgttcaagtgctgcaacacactctcttgaaacccaagaactttgtgagattccggctaaagtaatccagtcacctgctgctgatactagaagggctgagatgtcacaaacaaattttacccctgacactcttgcccagaatgaagggaaggctatgtcttatcagtgtagcctttgtaagtttctatcatcatccttttccgtgttaaaagatcatattaagcaacatggtcagcaaaatgaagtgatactgatgtgctcagagtgccatattacatctagaagccaggaggaacttgaagcccacgtggtgaatgaccatgacaatgatgccaatatccacacccaatccaaagcccaacagtgcgtaagcccctccagctctttgtgtcggaaaaccacagaaagaaatgaaaccattccagatatcccagtaagtgtggacaatctacagactcatactgtccaaactgcatctgtggcagaaatgggtaggaggaaatggtatgcatacgaacagtacggcatgtatcgatgcttgttttgtagttatacttgtggccagcagagaatgttgaaaacacacgcttggaaacatgctggggaggttgattgctcctatccaatctttgaaaatgaaaatgaacccctaggcctgctggattcttcagcagctgctgcgcctggtggggtcgatgcagtcgtcattgctattggagagagtgaactgagtatccacaatgggccatcagtgcaagtgcagatttgcagctcagaacagttatcatcttcatctcctttagaacagagtgcagaaagaggagtacacctaagtcagtcagttaccctggaccccaatgaggaagaaatgctagaagtgatttctgatgcagaggagaatctgattcctgatagcctgcttacatcagcacagaaaatcatcagcagcagccccaataaaaaagggcatgttaacgtgatagtggagcgattgccaagtgctgaagaaaccctttcacagaagcgcttcctcatgaacactgaaatggaagaagggaaggacctgagcctgacagaagctcagattgggcgcgaaggaatggatgatgtttatcgtgctgataaatgtactgttgatattgggggattgatcataggctggagcagttcagagaaaaaagacgagttaatgaataaaggcctggctactgatgagaatgccccaccaggccggagaaggacaaattctgagtctcttcgattacactcattagctgcagaagcccttgtcacaatgcctataagagctgcagagttgacaagagccaacctggggcactatggagatataaaccttttagatccagatactagtcaaaggcaagtagatagtacattggcagcgtactcaaaaatgatgtcgccacttaaaaactcttcagatggattaactagtcttaaccaaagcaactccaccttggtagcactcccagagggtaggcaggaattgtcagatgggcaggttaagacaggcatcagcatgtccttactcaccgtcattgaaaaattgagagaaaggacagaccaaaacgcttcagacgatgacattttgaaagagttgcaggacaacgcccagtgccaacccaacagcgatacaagtttgtccggaaacaatgtggtggaatacatcccgaatgctgaacgaccctaccgttgccgcctgtgtcactacacaagtggcaacaagggctacatcaagcagcacttacgagtccatcgacagagacagccttatcagtgtcctatctgcgagcacatagcggacaacagcaaagatttggagagtcacatgatccaccactgtaagacaagaatataccagtgcaagcagtgtgaagaatccttccattataagagtcaattgaggaaccatgagagagaacagcacagtcttccagataccttgtcaatagcaacttctaatgagccaagaatttccagtgatacagctgatggaaaatgtgtccaggaagggaataagtcttcagtccagaaacaatatagatgtgatgtgtgtgattatacaagtacaacatatgttggtgtcagaaaccacaggcgaatccataactctgataagccgtacagatgctctctgtgtgggtatgtgtgtagccatcctccttctttgaagtctcatatgtggaaacatgcaagtgaccaaaattacaactacgaacaagtaaacaaggctattaacgacgcgatttcacaaagtggcagagttctggggaaatcccctggaaagactcaattaaagagcagtgaagagagtgcagatcccgtcactggaagttcagaaaatgcagtgtcatcttcagaactgatgtcccagactcccagtgaagttctgggtaccaacgagaatgagaaactgagccctacaagtaatacctcatatagtttagaaaaaatctccagtctggcccctcctagcatggagtactgcgttttactcttctgctgttgtatttgtggttttgaatcaaccagcaaagaaaacctcttggatcatatgaaagagcacgagggtgaaattgtaaacatcatcctgaataaggaccacaatacagctctaaacacaaattaggtggaataatgactcgagcaggaaagcagtagaagaggattccttcaccacagtttcacctttacgctgtcagacaacttcctgccacagaagaagtcgttgatgtgatttttgaggaaatgacagatgtgactttggaaccaaacttgtaataaaaggaattccaaatggacaagcagtaatgatatttaaatattttgagtgagggggagtgggtcaaagaggaagtagaggtgtaatcctgtattaaccctctgtcaccccttcttagtgtcgagtgtatttattaataaaagcttattagagtgtagaaatgccagcaagagttaagaaagggcttttcaggaactattctaaaagtcataaaagggtcacagtcttaagcagagcttagttttcttctcacttgtcaaatgcagactgtgaggcctccagtgagaaatgggaggcagttctgggagggggttttttcagtgtcaccaacagagtcaacaaggaaacataattagagggctttgaaatgatctactgaaatacctaaattgatagaaattaatcatactcaatctaggacatgttcctttactccttaaaaaagaaaggaaagatctctaaattcaaagctagattgtaaataggcattcaagaagtattgtcttaaatttacgatgaatttcttgtgagcagaggacgaaacaggtgaattctcaccagactcaaaccagatctcaattcgtagtaatgctaaatcgtcttccgtgttctcagaggttcttttcagtgtctgtcagaacttggcatactttctccatagtacgtagaccttctaatactctgctaaatgaaaccacacttgttatctgaaagtgtgtgaaagaaacaatgtatgaaaatttacatttgatcatccggcattggaaatagtttgaactatttccaaaaatcccttaggggatgaggggtgaaatttaaaagctcctgaaaatgagtactgctgtgttgagcttttctttcctggggtatattaatttagttatatttagcagaagaggaatataaccaaatgtgactaaaatatagcagaaattcaggttgtttgtaaaaattttaataacaaatagcatttggcaagtctataggattcttcctatctggaaattctattttgttagagtgcgataggacatatggaaaaccaacacaaagtgctttagcattaaaactcaccatcaaatagatgtaatcttattaattacacattttgtattttaattatttcaaggagtgaagaaaacagggtgtttttgtttttgtagttctgattactcatttatgcattgttttgtttaagtaaattctgcctacaagtgaaaaggtcggtgcgctcttctgtgcaccatcctcacggtgctatttccgaatatctgaatattgatttctaacacctggatgaggctgtgaccgatcaacttggaacactgtaaaggttttcgaatgggatacgctgtaggcacgttttaagaagtattctgttcctaaagtccaggtatgattggattaatatttataaaattattattaggaattatttaagtggggccaggcatcttgcaacattttctgatttttttttctttctttctaatctcattttggtgatatttaaacaaacataaatgattgtaactttgcagcttttttatttaggtagctttaatttatttatgaaagttaatccatttctgatacgtggtttttaaaaatatgaaatggatttatatatactatattcctcaaatccactgtatgtggacttatattcattttctccttttttcggaattgaaacattttaatttcaaattcaaatagaacatttaaaatgatttcattattattacccatactgttgccactcatattgtaagtcagttttttcattgctggtacaatgactcagtatttctttataaaaatctgttgttctgaaaatcaacaaccttagaaggattttgtcttagaaaatttccttggctttagttttatatcatatttagaaaataataatgaaaagcatccccaaaatttcaatgatgtgaatttttaaattacctttatttctttaaactaattccattgattgttacttaaattttccacctggaatcatggatttaaaatttccccacctcatggggaaaaaactaacccagaagttcaaagcctttaaagtttcatctgattctggccttagaattgtccttaaaagctttctcctggccgataggaggaagcatatatcaaggaggttctttcccttcccattatcattttgtggcaagccttaagttaacaatgtgtctaccaagaacaattgagttttctaaaagtaataatgaagattatgcaattctaactgtagaagagatagctattaaaataatcagtagcctgggcatagtggctcacacctgtaatcccaatactttagaaggccaaggctggaggactgcttgagtccagaagtttaagaccagcctgggcaacacggggagaccctgtctctacaagaaattaaaaattagccaggcatagttggcacgtgcctgtagcaccagctacttgggaggttaaggtgggaggatcacttgagcctgggagatagaggcttgcagtgagccgtgatggcaccattgcactccaaccggggtgacagatgaggtcctctgtttacctccccccccaaaaaaaaaattcagtaggaattccttcatagaataacatgttatttattggtattgacttcttattagacagagctcatagtatttgttttctgctccgaacacttaaaaaatactaagacgtgatagtgaaaatagctttgaaaagaaactacatatggcaaaggtggggaggggggaagatgatgcattctgatcattataaagaatacttttcagggctctatcattttctccctttctctaatcatccagaatatggcgggtgtcccagtgttcaacagtatcatgctaatattccatttgatcggtagtccaagttctttggccagatagtgcaatgttgtgacaccgaccgaagcctttgttctggatctttcttcctattgaaggtggctgctggtggcttcataattttctgttttttttctcacaaagtaaatggtgggcatccatgtttacattgcaccttcccgtgctgtaattggcttgacaaagacaagcaggcttctctgttgagacttattgtgtttttagttttcatagacacttatttaatctttttaaattgtacagcaaggtgctctaagtaatattcgataaaatatatttaatagaaatttgcgtttgatattcatgaacatgaatacatgtatttttttaagaaataagtattgtgtaacactatggcattgcttctatagccaaagtataaaaatttctggaatactgacatgtaaagactacagttaattctgacactgtatcttattaaaataggatgatttgcattttgtaaaattatcctgcacatcaagctgcatgccttaaagcggaaactctaggactgtgttcatgggagagcagttcatctgttcagaacagtgaggcaaggtctgtagtgcttctttaactacctttggaaatactgtacaatgttagaataatttattttgctttacaggagtttgtcatgtattgactttaatattgtattttggtaataaattttttgttaaaaaaaacttggctccaagttctattaaccacaggttgtgttcattcttttcctggaaatgatgactttattgcttagaaagttgtaaataattaaaagcttcccaagagttaaatgaaggttatgatgactcttgataacttgttaatctgttgctgactagcattagactgttacacgaagataaactgaataagcatttagctttttaaatcattttaaaaattaagtctaattttgaagcttttttccttgctacccagttcagtttctcttccaaatgtgacacgcttatatgctttcaattctgatatagtcaaagtgctaaagactagttctgctattgacgaaggaattagcattccttagtgaaggccaaaaactacagtgatatgttcacaccttgatcactctgtcgtctatacagacagctattgacatatttgttgcattgacgaagctaacatcatctgactgtatcgtgggtctggttatccatttgtgccctagaatcctgggtcacctcagttgaaagtgaccaaggccaaatatttcgtcccatgcttcccagggacaacataatcatatcccctgtctttgaaaaacccaatctgaaactgtgtcactaacctccaaattaaagaatccgagcatggaagctctagaacgtatggtccagtgtggcagccactataatatctaagtgtaaaatacatagcagttgcaaagacttagtacaaaaagaatggaaatgtattaacagttttttatattgattacatgttgaaatgatattttggtttaaataaaatattaaaatta

SEQ ID NO: 32583 - DNA, 2067 bp, Homo Sapiens
ttaagttgcaaaacctgaaactttaaaggaacaaacataacacatttgattgtagaaatgagggaaaaagagtgtgtgtgggtatgtgtgtttatgtacatatgtgtatatgtacagtggaagatgccataaacagatttgtaaaagttaaaggacaggctccccagagaaatagccagtgtgctccatccacatcaagcctgagtgtgagagagttctggataatcctgttacctggctgtgactttggaagtggagaccatgatctctgccttctccctcatatcatctgtcttaaggtcacagataccgcagccactgccaggtttccacaagccagtcacctttcaggtggagaagtagcttgctatagcagccagtttctcgagtttgcgcgacagtgccactggaacaatggctcattcatgtcagatttccagagagttgggcagcacacttgtgagaatccagctgtgaacaagccattgctgtctttaggagcttatgtgccaggtggtaaagtgtacatatgcaaataaaatggtaagatgattgcaagttgtcatgaagataagacagcattgtaggggtgaggtgaccctagattagacaggttggctgcagaaggcttctctgagggtgtaacacttgttttgagagctaaaggatgaacgggaggagcatcatgagtaggagggaggcaggagctttctggatagaggcagcagcgtgtgtaaagagcttggggcactagaagaactggaagataaatggtgtgactgcagaatgatgagtgagactcaggaggcacgacatgaggctggagaggtgggcagggctgtgcaggtctcagtaaggagtttgattttattcaaagtgccagggaccattggatataaattcttcataaactgcatgcagaagagagattaaaaggttggcagaaaggaataaaaatgaaactggaggaccaagctggtaaaaattgcccccaagggtctatcagaatcctaactcacttagaccaataagatcagtggttacttatgaacaatacgtttgaaaagacctatgaaaaaacacgtgaaatttggagtttctctgtctctcatgtttcctgtaagtaattcgctagatatagagactcgattagattttgattcagtattttaggcaaaaatattttttgggtggtactgtgtacttcctattttgtcacaatgataggcatataattatatgtttagttccccactttaatgatgctaaaattaattagtgagttcaggtgttatgcctgattccttcatcataaacttctccatcaagtttcaccaaatcattttaacagtgattaataatcattggctagatacactatttcattagagttgcaaaataatagttttcctagcatttcttctttatttattggctaattttctttgattaagcactttcctaaatggagtattcaaaaaaaaactatataaacaggaaaagcaggataaatgcttgatttcaccccccccccccacccccagcagttttcagaacaatagcttggtgccttaacacctccacagagagatgaccaatggaatttttcttaatatcattattgactcactttttttattgtggtagaatatgcataacacaaaatttacagttttaaccatttttattatacatttcagtggcataagtacattaacaatgttgtgcagccatcaccaccatccatctccagaactttttcaacatcccaaactgaaagtcttggccaggcatggtggctcatgcctgtaaacccagcactttgggaggctgaagcgggtggatcacctgaggtcagaagtttgagaccagcctggccaacatggtgaaaccctgtctctgctaaaaatacaaaaattagccagatgtggtggcataagcctgcagtcccagctacttgggaggctgaggcacgagaattgcttgaacccaggaggcagaggttacagtaaaccgaaattgtgccactagtactccagcctgggtgacagagcaagactccatctc

SEQ ID NO: 32584 - DNA, 5686 bp, Homo Sapiens
gcagttctttccggcttcgctgctggtgtcggctccgagagctctggcttatcaggactccatagttctccaacagagaaatcttgaaaaggactgaccagtttttgcagttctaaaaccatggcccatggttcagtgacattcagggatgtggccatagacttctcacaggaagaatgggaattcctggatcctgctcagagggacttatatagggatgtaatgtgggagaactacagcaacttcatttcactaggaccttccatttctaaaccagatgtgattaccttattggatgaagaaaggaaggaacctgggatggttgtgagggaagggacaagaagatactgccctgatttggagtccagatacaggaccaatactttatctccagaaaaggacatttatgaaatatattcatttcagtgggatataatggaaagaattaaaagctatagccttcagggttccatttttaggaatgattgggaatgcaaaagcaagattgagggggaaaaggaacaacaagagggatattttgggcaagtgaaaattacctctgaaaaaatgaccacttacaaaaggcacaattttcttactgagtatcagatcgttcataatggagaaaaggtgtatgagtgtaaggagtgtaggaagacctttattcgtcgctcaacacttagtcaacacctgagaattcatactggtgagaaaccttataagtgtaaggaatgtgggcaggcctttagacagcgtgcacatcttattcgacatcacaaacttcacaccggtgagaaaccctatgaatgtaaggagtgtgggaaggcctttacagtgctccaagaacttactcaacatcagagacttcatacgggtgaaaaaccctatgaatgtaaggaatgtggaaaggcctttagagtacatcagcaactggctcgacatcagagaattcacactggtgagaaaccctatgaatgtaaggactgtggaaagacctttagacagtgtacacaccttacacgccatcagagacttcatactgctgaaaagctctatgaatgtaaggaatgtgggaaagccttcgtatgtggtccagaccttagagtacatcagaaaattcattttggtgagaaaccctatgaatgtaaggagtgtggaaaggcttttagaatatgccaacaacttactgttcatcagagtattcatactggtgagaaaccctacgaatgtaaggaatgtgggaagacttttagattaagacaacaactagttcgccatcagagaatacatactcgtgagaaaccctatgaatgtatggaatgttggaagacctttagtagttactcacagcttatttcacaccagagcattcatattggtgagagaccctatgaatgtgaagagtgtggaaaggcctttagactgctctcacaacttactcagcatcaaagtattcacactggtgagaaaccttatgaatgtaaggaatgtagaaaaccttttagactgctctcacaacttacccaacatcagagtattcacactggtgagaaaccttatgaatgtaaggaatgtggtaaggcttttagactttattcatttcttactcaacaccagagaattcatactggtgagaagccctacaagtgtaaggagtgtaagaaggcctttagacagcattcacaccttactcagcatcagaagattcataatggaatttaatagaagaaagccttcaaatgtatatgatgttacagaacatcagaaaattcatttttgagaaaatgtgtttcatgctcaattccaagcataataaattttatattagagaaagaatatgttgatttaaaagccttccaacaccatttaaacatggtttatcttcagcaaattcctatgagagaataatgtaatgaatgtaggaaaatctttagccttatctgtcattatctccctttctccacttgattaccagtttgatttattggacaagatactaagcttctgtgcctcattttgctgacttgtaaaatggtaataatagtacttatatgtattagttatttattgctgcgtaataaattaccacagacttagtagcataaaataacatataattatatcttataatttggatcaggagtataggcatgacttagttgggtcctctgcttcagggtctcttgcaaggctacagatttcagccagggctgaggtctcatctgaaggctcaactggggaaggatccacatccagactaacatagttgttacccaatgtatttccgtgaggcctgttgcattgagattctcagtttctagctggctgttggctgaacgctgactgcagctcctggccacaatagcctcatcaacatggctgcttgcttcatcaaggcatgcaagccaaaagggaggacagtctgctagcaagatggaagttaccatcttgtgtaatctaatcatggaagtaacattccctcaccttctactggtagaagtaagttactaggatagtccacactcaagagaacgggatgatacaagagtgtgaataagtcctggagacaggaccactggggggcctgtttagagtcagcctgccacactgtggaataggattgttgcaaggagtaagtagttaatacttggaggaatcacagtcatatagcatgtattctgtaaatattatctgtaattgttattattgtcattagtattagtgaattcacgtaaaaggaagatctgtagacataataaatgtagaaatgcctcctgtcacctctcagaaattattaaacataatttattctaggtaaaatttagattgtagtgaatgtaggaagttcttcagcacttgagctgcattagaaatttcatgccaaaaatgaatttcatgaatgtgaggtcactagtaatacagctgttgaagaattagagggaaataggaaatgattttcccataattccagaaagcaaaaggcttacaatccctgttgtctgaccacagtttaaaattaattagaaactatcaaaaatgtggcttaaaagaaattaaccacctaggaatttaatattgttgtgtatatttatgtgtgtgtataaaactcctgtgggaaagaaacaaaacatcattctataagtcagtatacttttggatgctcaaaatgccatatcttcaaccagtaggagttgtttcaagttgagtttttgatgtgatcccaccaataatttgatagtttacttgattgtggctgcataatttggtaacctatgaaagatgctagagcaccaatgtataatttttttgagacagggtgtcactttgtcccccaggctggagtgcagtggtacaagcacagttcactgtaccctgttcctcctgggctcaagtgattcttccacctaaattttttttttttttttagagaaagggtctcactatgttgcccaggctggtcttgaacttctgggctcaagtgatcctccctccttggcctccaaaggtgctggggttacaggtatgagccaccacacccagcccaactcattattcttgaaatcaataaatcagaggaaaaattgtcatttagtttccttttcccatgtgaaccaaatttcagggtcaccagaagttcatcaaattcaaatgaatttggcctggcacaggggtcacacctgtaatcccagcactttgggaggacaaggtgggtggatcacttgaggccaggagtttgagaccaacctggttaacatggtgaaaccctgtctgtactaaaaatacaaaatttagccaggcatggtggcacacacctgtagtcccaggctgaggtgggaggatcacttgaacccaagaggcagagtttgcagtgagctgagatcgtgccactgcactccagcctgggtgacagagtgagaccctgtctcaaaaaaaaaatttgttttttgaatgggtttttcttttttgaagaagtctaataaatctagaaggaattagaggattagaaaaatcaccattttctagaccttaatggaataatgggtccagaaaacatgatcttcaatgggtactacaactaataggtgaaatattttatagcgagatttttatggtggatctatcaaactggccacctctgaaccctttgatctgttttaaccttaataaaaatgggtctatcagacaacacacttcctgacgtaatgcaataggaagtccacaccaccatctacaaagccttattgctggaataatgaactgaaagcagacagggactagatgaacagtatatggtcatcccttggtatccatggggaattggttccaggatcctccactgatggtaaaatctgaggatgctcaagtcccttgtataaaatggcatagtatgtatttgcatattacctactcacatcttcctgtatactttaaattatctttagatcacttatacctatcacaatgtaaatactatgtaaatagttgttatactgtatttttcaatttgcattatttttattgtattttatttttattgtttttttttgagtattttctatttgagattggttgaatctgcacatatggagggctggctataaagggcaccacaaggaagaagccaaacagatccagaatgtgtgaaattctacagagcaaattacctgatttcttcaactaacaggtagcatgaaaatacaaggggaagggcaaccattaacagattaaaagagacttaaagagacatatcaactaaattcagtatgttggcattacttggacctggtttgaacaaaacataaaaagccattttggagacagtgagggaagtgtggacatggactaaatattaaatgatatttacatatattaatttggttagggattatgtcagtgtgattataaaaaataaaagatcgtatgatatgagatacatactatgaaatgaagatagacacatttggattaaaatattctagcaaaagaaataattggcaaagagagctggaaactaaattggcaacatgttgataatttaagtggagtgttttgttcatggagacttattgttctaatatttctacttttgtatgtgtttgaaatttcaataataaaatgtttaaaatcaaaaccaaaattatagactatgtagaaatgaatgacagtgagatgcctgcacatctaaccttgtcagatataatcaaagttctgttcagtgacaaattaatgccctgtaatgtggtaaggaaatcttatttgtggatacagtcttcatcttcttcacttacccacagcagcaacaccaggcctgtcacacagatgaatgtgttgagggaatgaataagtatttccgtcaagaaaaaggaaacaacaaaataaaaccaacccaagtaaagaacagccaagtggccaggtgcggtggctcatgcctgtaatcccagcactttgggaggccatggcaggtggatcacctgaggtcgggattttgagaccagcctgaccaacactgagaaaccccatctctattaaagatacaaaattagccaggcatggtggtgcatgcctgtaatcccagctacttgggaggctaaggcaggagaatcacttgaatccaggaggcggagtttgtggtgagttgagatcgcgccactgcactccagcctgggtaacagagcaagagtctgtc

SEQ ID NO: 32585 - DNA, 4004 bp, Homo Sapiens
gcgtcgtcctgcgctagggggattgtgggatagtggcggagggagccgggcgtcggaggccctgaggccggccgcagagcccggagattgagcggctttggggaaggggtggttaaggaagtaggcctcggcttccgtcggtcgctgctcggctctgcggcccgtttggaccgcggaggaggtcgccttcccctcccgtggggcgctcggttggactgtggaaaccggggcaacttcccccgtcttcccggctgaggcgcctgcgtgggcctcgcgacccggctcgccaacccgcctcggcccgcacgcccacctcgcctgcggaccccggaggtgcctacgcggactagtgacgccccccgcccgtcggcaactccacccggcgctgaccccctcaactctgcaggacccggcgcgcgaggaccccacgacccgcgggcgcctgcgcggaccccgcgagccccggcgcctgcgcgagtccccgacgccgcccccgcccccactcaccgggccccgcagcaggggccggagccgccggcggcggggcgggggggggcgccccgatgagccccgagtgcgaggagccgccgccccccctcgcagggcgccatgttttggaagtttgacctgcacacaagctcgcacctggacacgctgctggagcgggaggacctgagcctgcccgagctgctggacgaggaagacgtgctgcaggagtgcaaggtcgtcaaccgcaagctgctggacttcctgctgcagccaccccacctgcaagcaatggtggcctgggtcacccaggagccgccagatagcggtgaggagcggctgcgctacaagtaccccagtgtggcctgcgagattctgacctcagatgtgccccagatcaatgatgccctgggtgctgatgagtcccttctgaaccggctctacggcttcctgcagagcaccggcagcctcaacccactgctggccagcttcttcagcaaggtcatgggcatcctcatcaaccgcaagacagaccagctcgtgtcctttcttcggaagaaggatgacttcgtggacctgctgctgcagcacattggcacctcggccatcatggacctcctgctgcgcctgctcacctgtgtggagcggcctcagctgaggcaggatgttgtcaattggctcaacgaggagaagatcgtccagcggctgattgagcagatccacccgtcgaaggatgagaatcaacattccaacgcatcccagtccctgtgtgacatcatccgcctgagccgggagcagatgatccaagtccaggacagcccagagcctgaccaactgctggccaccctggagaagcaggagacgattgagcagctcttaagcaacatgttcgagggggagcagagccagtctgtcatcgtcagtgggatccaggtgctgctgaccctgctggagcccaggaggccgaggtccgagtccgtgaccgtgaacagcttcttcagcagtgtggatgggcagctggagctcctggcccagggggccctggaaagcactgtgtccagtgtgggcgccttgcacgccctacgcccgcggctcagctgcttccaccagctcctgctggagcctcccaagctggagccgctacagatgacatggggcatgctggctccgcctctgggcaacacgcggctgcacgtggtcaagctcctggccagtgccctgagcgccaatgatgcagccctgacgcacgagctcctggcactggacgtgcccaacaccatgctggacctcttcttccattatgtcttcaacaacttcttgcatgcccaagtagagggatgcgtgagcaccatgctgagcttggggccacctcctgacagcagccctgagacgcccatccaaaaccctgttgtgaaacatctgctgcagcagtgccgcctggtggagcggatcctgacgtcctgggaggagaacgaccgtgtacagtgtgcgggaggccctcggaaaggctacatgggtcacctgacaagagtggccggtgccctggtgcagaacacggagaaggggcccaatgcagagcagctgcggcagctgctgaaggagctgcccagcgagcagcaggagcagtgggaagccttcgtatcggggcccctggcggagaccaacaagaagaacatggtggacctggtgaacacccaccacctacactcctccagtgacgatgaggacgaccggctcaaggagttcaacttccctgaggaggctgtgctgcagcaggccttcatggacttccagatgcagcgcatgacctctgccttcattgaccacttcggcttcaatgatgaggagtttggggagcaggaggagagtgtgaacgcaccttttgacaagacagccaacatcaccttctccctcaatgctgacgatgagaaccccaacgccaacctacttgagatatgctacaaggaccgcatccagcagtttgatgatgatgaggaagaggaggacgaggaagaggcccagggctcaggggagtctgatggagaagatggcgcctggcagggcagccagctggccaggggggcccgtctgggccagccacctggtgtccggagtggaggcagcacagacagtgaggacgaagaagaggaggacgaggaggaggaggaagacgaggagggcattggctgtgcagcccgtggaggggccacccctctgtcctaccccagccctggccctcagcctccaggccccagctggacagccacctttgacccagtgcctacagatgccccgaccagcccccgagtctccggggaggaagagctgcacactgggcctccagccccacaggggcccctcagtgtgccccagggcctccccactcagagcctggccagccctcctgcccgtgacgccctgcagctcaggtctcaggaccccacacccccctcagcacctcaggaagccacagaaggcagcaaagtcacggagccctcagccccttgccaggccttggttagcatcggggaccttcaggccaccttccacgggatccgttctgcccccagctcctcggacagtgcaaccagagacccctctacctctgtcccagcctccggggcccaccagcccccccagaccacagaaggggagaagagcccagagcccttggggcttccccaaagccagagtgcccaggccctcacgcctcctccgatacccaatggctctgccccggaagggcctgcatccccaggctcccaatagctgcctggtgcggcagcggcggccaaatcttccgtcctcccgtggatctcccggggtgggggcagggcgggtcccacgatggcccccattgccctcatcaccctgacacccccacattctctcctctggacccccaggaggctggtgccagggagacaggcccaacccacccccatttgcactgagaagagaagttttggagcgttgcctcctagaataaagatacagagagtcaaatagagagaatggagagagagaaacatatattatatattatatagagagagggaggagagcgagagagagtgaggacaccgaactgggctggcggctccaaagcacagccttccctgttccgtcccagcgggagctggtgttaggggtcccaaggttgccacccacgtgcccagctgtcccacgctgcagcgcagacggccacgcccacacccggccttttagctcaggtccaccatgggggacggcccagcgtgggtgggggtgccagagggtcccgagtgggggccgtgcctttgcccagaccctgcactttcaaccaggccagtccggctctggggagcaggggcctccccggcaacagccccaggggccttgagggtctgaggtcccagccctgttgccaagtgaccttgtccccagctccctcctcccaggctggtgtgagtgtgcgtgcgtttgtgccgagcttctatttcatattgcaaatataaataaaggaaggcagtttacga

SEQ ID NO: 32586 - DNA, 6580 bp, Homo Sapiens
ttttcttctgcacttctgtctggagaggtctgtagccactgagggccccggtcggggccgctttgcaggtccctagtcaggaccgagcaggggagtaggataggaatccccgccgcacctttgtacgagcctgaccccttccgtgggtttgttcctgggtcgccgtcaagctgcggtctctcctcccccgcccttcagccccgcggtctccaggggcggcgccctgggtctggaacgcggttgccaccgaggaggcggcggccctgcgtctggaacgccgttgccaccgaggaggcggcggccccgagcgcgcctggaagccccgggcaaccggccagggtcgggcacaggtggggtccgtcaggccgcccggggctcctctgtcccagctctgcggcccagggggtgacgtgatggcggcagcggtgctgacggaccgggcccaggtgtctgtgacctttgatgatgtggctgtgactttcaccaaggaggagtgggggcagctggacctagctcagcggaccctgtaccaggaggtgatgctggaaaactgtgggctcctggtgtctctggggtgtcctgttcccaaagctgagctgatctgccacctagagcatgggcaggagccatggaccaggaaggaagacctctcccaagacacctgtccaggcgacaaaggaaaacctaagaccacagaacctaccacttgtgagccagccttgtcagagggaatctcacttcagggacaagtgacacaaggaaactcagtggactcacagttggggcaagccgaggatcaggatgggctatcagaaatgcaggaaggacacttcagaccaggaatagatccccaggagaagtctcctgggaagatgagccctgaatgtgatggtttagggacagctgatggtgtgtgttcaaggattggacaggagcaagtctctccaggagatagagtccgtagccataactcatgtgagtcaggtaaagatcccatgattcaggaagaggaaaataactttaaatgcagtgaatgtggaaaagtatttaacaagaaacacctccttgctggacatgagaaaattcactctggagttaagccctatgaatgcacagaatgtgggaaaacctttattaagagcacacatctcctgcaacatcacatgatccacactggggagaggccctatgagtgcatggagtgtggaaaggccttcaaccgcaagtcataccttacccagcaccagcggattcacagtggagagaagccttacaagtgcaatgaatgcggaaaggccttcacccaccgctccaattttgtcttgcataacaggagacacactggagaaaaatcctttgtgtgcacagaatgtggccaagtctttcgacataggccaggctttctccggcactatgttgtccacagtggtgagaatccctatgagtgcttggagtgtggcaaggtcttcaaacacaggtcatatctcatgtggcaccagcagactcataccggggagaagccctatgagtgcagtgaatgtgggaaggtcttcttggagagtgcagccctgattcaccactatgtcatccacactggagagaagccctttgagtgcctcgagtgtgggaaggctttcaaccaccgatcctacctcaagaggcaccagcggattcacactggggagaagcccttcgtgtgcagtgaatgtggaaaggccttcacccactgctctacttttatcttgcataaaagggcccacactggagaaaagcctttcgagtgcaaagagtgtgggaaagcctttagcaatcggaaggacctcattcgccacttcagcatccacactggagagaagccctatgagtgcgtggagtgtggaaaggccttcacccgcatgtcgggcctcacgaggcacaagcggattcatagtggagagaagccctatgaatgtgttgagtgtgggaaatcgttttgctggagcacaaacctcattcgacatgccattatccacactggagagaagccctataaatgtagtgaatgtggaaaggccttcagtcgcagctcgtccctcactcagcatcaaaggatgcatactgggaaaaatcccatcagtgtaacagatgtgggaagaccttttacaagtggacaaacctcagttacccttcgagaacttcttttagggaaggactttttgaatgtaaccactgaggcaaatattttgccagaggaaacatcttcctctgcatctgatcaaccataccaaagagaaaccccacaagtgtcttcactgtgagaaaaccttctgttgctgaatattacttgtcatctgaagagtcatattagaaattcgttcagtctagagccttattctccatctgataatttatcctggagagagacccagtggttattgtgcacataggagaaccttcagctgcatctttctccttagtttacagtgcaattttatctcaggaattatttttaaaaggaggaggggacatagaaaaaatgaaatgcaagcacacatcttttcaggcttctctgccaagcctatggcgctttgtcatggatttcttagtgtatttgggggaagggaaatgtttcaaggtaaagaaccttgaccctttatgtgcttgtatgtacatttattgctatccagtgtcagaacagttagtttaggaaaagtatgcaaactttaatcgcacatcttctgtattccacaatagtacttactcttgagaagcataactttatgacaacttagggggcttgagccatgaaatactcacgtttaagtcagtaaggatacacatgttaacattcaggcttttgtcttgatgcccgtcttttggtttacgtcatcattgtagccatatggtaaatttttatttgttaaatttttaaaaattacttagctcaaaatgtcagtggtaaatttttaaattgagtaaagtgattcttctttgctcttatttaaaatcgacagcatttctagttcctttgacattccatataatttttaggattagtttgtacttatttacaaaacagtcttgttcagatttttacagaaattgagttaagtctgtggattaatctgttaagaattggtatctttactatgttgggtcttgtagttcatgagtgcaggagtaggcctcttaatttataatagttaagcattccttaaagtatttcattaatgttaaaaattttcagcgtatagatccctatgcatttttgttagaatttgcatcctagggtgcttttttgtttgtgtgtgtgtgtaatttgagtgattgtaaatggcattgatgtttgaactttgaattgcacacaatttttggtagtatacagaaatataatatttttggacattgttttgctaccctgcaaccttattgagttcacttattatttttagctatttctttcgacagaatccttggaattttctatatagaaatgtcatctgcaaatacagaccattttttatctttcatcttacctgtaatcctagcactttgagaccactaaggcaggtggatcacctgaggccaggagttcgagaccagcctggccaacatggcaaaaccctgtctactaaaaatacaaaaattagccaggcatggtggcgtgtgcctgtaatcccagctgctggggggctgaggcaggaggatcagttgaacgtgggaggcagaggttgcagtgagctgagatctcaccactgcactccagcctgggcaacagagcgagactctgtctcaacaacaacaacaaaaagtcctgaacatgattgtggaagtgtgttgctctttcaagttctatcactttttgtttgcaaagttcaaagctgtattgtttggtacatatacatgtaggtttgccaagtctttgtggtgaattgactcttctgtcattatgtgatgtcatttttttgccttttaatagtcttgtcaatactttacctgatgttctcatagtgactcctgcatattttgattaatgtttgcatggttaatatttcttcattttattttaaagcttacctgtatcattacttatgaagtcagtttctttgaacagcatatactcaggccatgctttttttattcattctgcatatgtctctcttaattggtatgttgaaatgatttacattaaaataattattgatattttagggcttaagtgtgcccttaaatgatttttgtgttcttttttattgttcctctgttatttggggttgtttactagtcttcctataggttacttcaccttttttttttttaataatttgatttgatacatatgtagtgttttttagtatagatcctccttgacttatgatggggttatgtcacaataaacccattgcaagttgaaaatactatgtcaaatatgcatttaatacacctaccctgctgaacatcatagccgatcttgccttcagaatgctcagaaaatttacattagcctgcagttgggcaaaatcatctaacacaaggcctactttataataaagttactgcaaagaattttaaataaaaattcaagtgtggtttctactgaatgcatgtcgcattcgcaccattgtaaagtcaagtagtaagtcgaaccatcctaagtcagggactgtctgtatatatctgcattttttagtgattgttctactattacagtgtaaatatataacttatgacagtttaataagttatcagcaatttagcactttacttccattaggttcctttagcttacctactaatgtaactatcttaagtaatagtaattcctcttcaaaaattgagcgctatgttgcaagatgtaatttttcttttccttttttttgagaccaagtctcactctgtcacccacgctggagtgctgtgatgcgatctcggctctctgcaacctctgcctcccgggttcaagcaattaactgcctcagcttccctagtaatggattacaggcgcccgccaccacgcctggctaatttttgtatttttagtagagacggggtttcaccatcttggccaggttggtcttgaactcttgacctcatgatccacccgcctcggccccccaaagtgctggggttacaggtgtgagccactgcacccggccacaagatgtaatttttactttatctctcacacgtattttacaaaacgtcatgagaaacattgtctcttgaccttttttttttttttttttttttaaagagacagagtctcactctgtcacccaggctggagtgcagtggcacgatcttggctcactgcaacctccgcctcctgggttcaagcgattctcctgcctcagcctcctgagtagctgggattacaggtgtgcgccgccacacccagctaattttgtatttttagtagagacggggtttcaccatgttgctcaggctggtctcaaactcctgaccttgtgatccgccaaccttggcctgtcgacctctttacccattccattgttcattcttctttcttgaaatcccaaaccttctattaacatttcttttcagttatacactgaactttactgtagcctttcttctagagtaacaaatgttctttgttttccttcctctaaagatgtctttatgtttccttcattcccaaagaatatttttgtggaatataagattcagagttggcagttgttttcttttagacttcagagatgtatctctctgttctgtacattattgtttaatataagaaacctactagcattcaaataatcattccctattttacaatgcatcagttctgtcaagcttcattcaaagtgtttttcattgtctctagtgttcagaagtttggctgtgatgtgcgtggcatggaagtttttgggtgtattctatttggcgctccctggtgcttgcccagctttttgatctgtaggattatgccttttgcaaaatttggggaactttcaactattatttcttcaaatattttttcaccccccagtcttgtcttttttagggacttcaataacatgagtggcagatcttgttttacactcccatgggtccttcaggctctcatcttttttctttttccagtctattttctgtcttgttaatattgattaatttttattgaccttccatggtcctcactgattgttttctttgtcatacctaatctgttgagtttgtgcagtgagttttcattttggttttgtattttccagttgtttaatttccattgggtgggttcttttgtacaccttctgtttctttgcttattttttaacgccaaagaaagactctcagagaatagacaactatattccaaagtcatggttctctggtggtttgtcttgacatttgaatagaaatgttaaactatctgggggaatagaaagcccacagtcttctgagttgtgctacaccaatatttctatgaacagatcttacaactgagagtgatctgcagatttttcagagtcatgttctccatggaatgtttgtaaaattccctagctctctgcactgagctgagatcgtgccactgcactccagcctgggcaacagagcgagactccatctc

SEQ ID NO: 32587 - DNA, 2487 bp, Homo Sapiens
atggtctttgacccaagtcaacgttccgtctcggactgtttctttggccgtgaggcgggaccgttatatgacatcaaggaccacgagtacaaccgcatagttcaaaccaagttccccaagccccgctatggggaaaagctagaagcggcggagcaccagaaagaagtcaagactgcctctgaacaggtagggcctctgaacagctcagccctggctgggagcagacagcgaaccctctcacagggcctgaactattgcgtgggattgaggatgtgggccttcgacccggggtcctcatccgtgcgtggggttggcacggtaatcctacaaccaggattctgtgttgggggccaagatgccctgctgaagcctctattccctgaggctgcttcgcacgtcaaagcgggacatgacgggactacgtttcccagcagtccccgcgcgggttcccgcctgcgcttgctgtggcccgggtccctcagtgccgcggcggcccggaggtggcgggaggacggctccgcgctgcatgcggggcggggaccagggacccgtgcgggccgcctccagagactcaggccagcagcctcccatacagcagagcaggaaccgggcctggctgcttcaaaggcctttcgtgacctgcagaacttgtccaactctgcatttttgtctttaaccagtttggggaggggaagtccagcattggcctctgcagcgtggatctcccggccaggctctcagctgtcagatcctacaaccagaactctgcgccccaggatggaggctccagcccagaaggctgggcagggaggactccccaaggccgatgcccagggtgcctccggggcccgggagaagaggcccgaggagccgaggcccctcgaagaggaccgagctgggagccgccccactcaaaagggggacctgcgtggagcggcgggcggtaggacgactcccccaggcgggggctcccggggctgcagcctcggggtgagccccggcccggggacccggcacagcgccgggaccagacccctcgtgcgggagccgtgcggccccacctcttctcagaaccctgagctggttatccccgaggggctgcaagcccgggagggcccctgtaggagcccagcgcgtggcggggactgcagcaggaactcctgcctggcgtggcatcgcggggcgcccgctggggagacgccacccgtgtgtgacccctgtccggagcggatccagaaccacccccggactcaactgtgtgaggtccacacggactgttggccgtgccaaccagggactggcgctccgacctgcccgaggaccccaaagccgacctcccgcgggaggaaccccttggtggagcagccccgggcttgcgcgtgcggcgaggcctttgcgtggagggccctgcggatcccccaggagaggctgcaggcgacggaggagccccgtccgtgtgcccggtgcgggaagcgcttccgccccaaccagcagcagcaggcgggcaagagtcccccagtgtgtcctgagtgcggccaaacctcgcgacctcgccctattgtccccgaccccccggcccagcgactgtacgcttgcgacgagtgcggcaaggccttcacgcgcacctccagcctgctgcagcaccagcgcatccacacgggcgagcggccctacgagtgcgccgagtgcggcaaggccttcgtgcgctgctccggcctgtaccgccaccagaagacgcactcggccgagcgccaccggcgtggccccgtcctggcgcggcgcgccttccggctggggtgcccgccctgcggggactacagcgagcggagtccccgacgggggtcgggagccggggagaagccgtacgagtgcgccgactgcgccaaggccttcgggctgttctcgcacctcgtggagcaccggcgcgtgcacaccggcgagaagccctacgcgtgccccgagtgcggcaaggccttcaaccagcgctcgaacctgagccggcaccagcgcactcacagcagcgccaagccctacgcgtgcccactgtgcgaaaaggccttcaagggccgctcgggcctggtgcaacaccagcgcgcgcacaccggcgagcggccctatggctgctccgagtgcggaaagaccttccgcggctgctccgagctgcgccagcacgagcgcctgcactcgggcgagaagccctacatctgccgcgactgcggcaaggccttcgtgcgcaactgcagcctggtgcgccacctgcgcacgcacacgggcgagcggccctacgcgtgcggagattgcggccgcgccttcagccaacgctccaacctcaacgagcaccggaagcggcacgggggccgcgccgcgccttgactgcagggagccgagagtcgacgcgtcgcccaagcgaaccctgcgtcgaggaggggcctttgtcccggaaaacccaccaacgtttgtaactttgattaaacttcactttgtaca

SEQ ID NO: 32588 - DNA, 2875 bp, Homo Sapiens
cgcggcgcccgggtgtggatccctagatgggagccggggatgggccgggtgcctggtgggtggcagtcggggctgacggcggcggcactttgccgcctcaggccctggacaccttcaccccgccgcctgcccaggcgggccggccctgcccgtccaccggccgccgagagtccccggccttgggtccccggggccgctgactggcctcggtcacctcccggggaaggctcccgcgcctccatctgcccccgcaggaagggaccctcttctcgcccgcgaggcttctccgggtgggatcgtcctggcccccagccctaagggatccgccccctccgagcatccgccgcccctcggagaccactccagctcggacggacccactccagcccccgctgcacgcggaagcgctcatcctccccgcctgccccgttccctcccccttctcctgtgggacaaccagggaccgcagctccccgctccccaggtgtgggggctccgacacgaacgcctctgctcgcagggcggtgagcgcagatcccacgggtccctcggtcgggggtcgaggctgcttccgtttccatcccggacccgacaatgggcgggaaaaagaaggctttacacgactacgcggcggagttcaccgacctggtggtgaagcacctgattgagcacagtgactctggggacacgtctgtggtggagaccctttactgcagggcctgcgagctgcccgtgcgcgtgcggagggaccgcatcctggaacacctgtcctcgggcaggcagcacggcctgcggacgcccattctcatgtaaatgtcagtgccaacgctggtgtttcaggagtcatcccagcgggctgcgggctattttaggattctctgccctgcaaacgtttccaaagtacgtggacaggccgcctgatgacactacgtttacgggatctgctagtggcttgcctacttagggagtaaaccctgtgaagtctcgcagttttgttaaagtgtgcgtggccacctgaatgctgccttatcacaagccagatacatactggtctgtagggtaactccccactgttgatcctctgagatgattgtggactgggtgctgtgagtcctgccactttgtttaagtgaatgtgtcttttgtccagctcagccgcctcggatctcgctgccaccagccttactgcacacccgtgccacccgcccttgccccgtcagcctcagcctcagctcattctctcaggcagtcccagcattggcacggtacctcctcccgctgtgggccacacgtctctgctccctgtcaaccctcctgccatcagcaccaccaccagcgacttgtctgcccgggaggatgcaacaccatctgcctccaccggccacctttcagtgtttcctgctttccaagtaaagataccagcagtgccctcagagcagaccagccagagtttttctgaagcctcccacagggtgctccccggaggaggcccgagatgctctcgtgactttggagccggggtggctggccaccttggcctgggcatctttggggtgggcttcgggagcccggcactgctgcagagtgtggtggatgagaacagctgctgcttgctgtacgtggtggaggaccagctgtgtgatgtggagcaagccttcagagctgagcatttgggccaacaccagagtggttcgggaacaggatgcagacattgtcctcaacgaccagcggcactttgatccggttttccagttcttgcacaagcaagtttgtgtcagccacgccctggggaggatccactggatcaccgccgtcactgcctgttcccggcggcctctccggcttccctaaagagagcagcttccctcgagaccagaagccagagctcaccctcccttgtgtccaggtgggactttctacaacgctgctgtgcacgacgtggatgccgtatgcatgttgctgggggaagccactccggacactgtgttttctctgggacatgtcttctgcccagatatggccgccttaaaagatgcagatgctgttgtgatcagcatgaagtttccctgtgaggccgtggttagcgtggacatcagccagcactgcacagacagctgcgaccaggacgtcagccagcactgcacagacagctgcgaccagagactggagatggagtcttgccctgtcacccaggctggagtgcaatggtgcgatctcggctcactgcaacctccgtctcccaggttcaagcgattcttctgcctcagccttctgagtagctgggattacacgcgtgtgccaccacgctcggctaatttttgtatttttagtagagatgggatttcaccatgttggccaggctggtctcgaactactgacctcgtgatccacctgccatggcctcccaaagtgctgggattacaggcgtgagccaccatgctcggcctaaaaaacaattttcttgaagaatccgattttgtgcatagtaatgacacagcaccattcctgagaaataggaaatatatgtgtgtggtatgaaaagcccatattctgttcttgtcacctgaatctaggcttcctctttggatgtgaacgcgggaatgaacagtggctgttttccacccaaaggggcgtggagaccttttggaaacgggctttctcctttccattttgcagccgggggcgggtggaaaccttccttcgaagggtagtgccttggggagcagcagacctgctctgagtccagcttagctttccaaaattctgtgtggaacttactggagatgtttttatatatttgaaaataatggcctgtatttctcacgctatacttaaaaaaaataactaaccttttaaacaaagatattcaaactca

SEQ ID NO: 32589 - DNA, 5857 bp, Homo Sapiens
gttgtcatgagagtggaggctgcggccggggctatgggcagaggtggccgggtctgcttcttccctgtcactgccgcagcagcttggggtgcaaggcggcctggggcggcggaaggggcgccccccgagttccgtctgaggaagcggcggctgccgaggaagtccacgagagccgggtcccgcacgcccctggggtccgggtgctgaggcgccgcctggccgcctccccgggccgcggcaccgctccgacccagccgccctctccaccggggccgcggcagcgccagtcggggcccttccctctaagcagcccaaacgtgcagaatgccccacaagattggatttgtagtcgtcagctcatctggacacgaagacggcttcagtgcccgggagctcatgatccacgcgccaactgtcagtgggtggcggtcacctagattttgccagtttccacaagaaattgtccttcaaatggtggagagatgtcgaataaggaaactgcagttacttgctcaccagtatatgatttcaagtaaaattgagttctacattagtgaaagcttgcctgaatattttgcaccctatcaagcagagcggtttcgaagacttggctacgtgtctctctgtgataatgaaaagacaggttgcaaagcccgggaactaaaatcagtttatgtggatgcagtaggacaatttcttaaactgatttttcaccaaaaccatgtcaacaaatacaacatatataatcaggttgctttggttgccataaatatcattggagaccctgcagatttcagtgatgaaagcaatactgcctctcgagagaagttgattgaccactaccttgggcacaacagcgaggaccctgctctagaaggaacgtacgccaggaaatctgactatatctctccgctagatgacttagcttttgatatgtaccaagatccagaagttgcacagatcatacgaaaattagatgaaagaaaacgggaagctgtccaaaaggaacgctatgattatgccaagaaactaaaacaagccattgctgatttgcaaaaggttggtgaacgccttgggaggtatgaggtagagaaacgctgtgccgtggagaaggaagactacgatctcgccaaggagaagaagcagcagatggagcagtatcgtgccgaggtgtacgagcagctggagctgcacagcctcctggatgccgagctgatgcgaagaccttttgatttgcccctccagcccctcgctcgttctggcagtccttgccaccaaaagccaatgccctcactaccacaactggaagaaagaggaacagaaaaccagtttgcagaacctttccttcaggaaaagccttcatcatattctctaactatttctcctcagcattctgcagtagacccgttactccctgccacagatcctcatccaaagatcaatgcagagtccctgccctacgatgagcggcctcttccagctattcgtaagcattatggggaggcagtggtggagccggaaatgagtaatgcagacatcagcgatgctcggaggggaggcatgttaggggagccagagcccttaaccgagaaggccttgagagaagccagctctgccatcgatgtgttgggagaaaccttggttgctgaggcctattgtaagacgtggtcctaccgagaggatgcactgcttgccttgtctaagaagttaatggaaatgcctgttggaaccccaaaagaagatttaaagaacacactgagagcatccgtctttctcgttagaagagccataaaggacattgtgacctccgtttttcaggcttctttgaaattgttgaaaatgatcattacacaatatattcctaaacataaactgagtaaacttgaaacagctcactgtgtggagaggaccattcccgttttgctcaccagaactggagattcttctgcccgcctccgcgtcacagctgcaaattttattcaggaaatggccttgtttaaagaagttaagtctctccaaattattccatcctacctggtgcagccattgaaagcaaactcttcagttcacctggcaatgagtcagatgggcctcctggcccggctgctgaaagacctgggcactggcagctcgggcttcaccattgacaacgtgatgaagttttcagtgagtgccctggagcatagagtgtatgaggtccgcgagacggcggttcgaattattttggacatgtacagacagcaccaggcttccatcctggagtaccttcctccagacgacagcaacacacgcaggaacattctctacaaaacaatttttgagggatttgctaaaatagatggcagagctacagatgctgagatgagggcacggagaaaagcggctacagaagaagcagaaaaacaaaagaaagaagaaataaaagctttacaagggcagctggcagcactgaaagaaattcaggctgaagttcaggaaaaagaaagtgatgctgtgaagccaaagaatcaggacattcaaggagggaaagcagcccctgctgaagctctgggaatcccggatgagcactatctagataatttgtgtattttttgtggggaaaggagtgaatccttcacagaggaaggtctggatctccactactggaagcactgtctcatgctgacaagatgtgaccactgcaaacaggtggtcgagatatccagtctgacggagcacttgctgacggaatgtgacaaaaaagacgggtttggaaagtgttaccgttgcagtgaggctgttttcaaggaagagctgcccagacacataaaacacaaggattgcaaccctgccaaaccggagaagctggcaaaccggtgtcccctgtgtcatgagaacttcagccctggagaagaggcatggaaagctcacctgatgggcccagccggctgcacgatgaacctgcgcaagacacacattctgcagaaggccccggcactgcagccagggaaaagctcagctgtggccgcatcaggccccttggggtcaaaggccggaagcaagatccccaccccgaagggcggactgagcaagagctccagcaggacgtacgccaagcgctgacgcggcgctcgggctccttggtctctgtgagggatggagcgggtctcctgattctacaccatctctccagaactctctggccttggtggccccatgctctggctgctgtccccagctccccgccgtgcacgcctcttacgcgtctgtgccgtcagctctcgtgcaaacgatatggatgcagctaaccaaagatcctgcgtgcagtgccaggacctggccgcactgtacattaagccttcagggctgtctcaggccttccttagaatcagagaaggaagcgtcctgtttggagagagccagagagcaccgccgggaggcgctcgcgcaaggccacggtcagcacaggcacggtcccgctttccttagtgcttggagcaatttccataaaacattcaccagaaaccttttgcacatcggtctctgccacacgcagtagaatttccgcagggctgtggctcggccagcagcggttccaggagagtggcggtgcgcacgggcctccagccgtgccttccccctgcaggccccgtctgctgggcctgctgcccagtgcactcagccccaggtagcagaactcacgttcccactatagcaagaaataaaggcaaaagagaacatcttttttttaatcgtagtttttttgagaattggtcccacctcagccgcaccttgctggatgcttctccagtagtgctgcccctgtgacaggcatcagctccctgctggaactgaggtagacacaggtgtgggcccttcccgtgcctttgctcagaggcgcttcactttctccacactttcgaattcctaaagacatgtggaggaagtcactgttaaatgaatttccacctgatcaccctgtgttcacagcaggcagaagcccactggtatgggcctcccgccccttccacatccatgttgtgattggatccataagtttactttcttcaaagagttgataggatgtttaaaacatcaacacattgcttaaaatgatgaaaccaaccctcaaaaaacagtctcctaaccagccatcccctcctgtgggagtgagctgggggttttgtccatagctttggttgggcctgtgtcacatccaggcagccatgtggagggagtcagggtctgtctggaagcatccaccctctcgctgccccagcctgtgctcccaggggcctaggctaccatggactgaagggcagtcccctcccacctggtgcccagggcttctgcttgcctcgctgatgttgcatgggcagacttcaaaaaggatagttagaaaggtttgggttgatggagtttgcattaatgcaattagtgtataaatatgttttaattgccaaccgtgtgaaacaacaaaatatctaaaaactaatcccgatttgaacaatgtactccctggcctggatacattaataaccataaatttgcatgaattaatctccacgtttggtaaactaatacctctggttgactgagaatactgagtaagatataagacctaccaggaacctttaagaatatgctctgctcagtgttgtttgtctgcttgtttgcgacagagcgagactccgtctcgaaaaaaaaaaaaagtataaggagagaaataactttaaagtttattagacaaaacagagtatagatgccaagatgtctgtaaaatgattttttctggttttaaagagatgttggccattattttctaatccatttttaaaatacagacaaaacacttctttaaacagaacaagaatgagaaaagttaaccaaggaattattcttttctcaccaatcaacacttttaagaaatatatatatatatatacacacatatacacatgccttctatatattgtaacttaaagaaaatacttataaaaagacttcatttttagtgattgacaagcaaacgggttcatttaaaacaggttcctcttttgttagttacagggggtttttttgttgtttttttgtttttgtttttgttttgcgggggtggtggggtttgagacggagtcttgctctgttgcctaggctggagtgcagtggcgcgatcttggccccctgcaacctccgcctcccgggttcgagcaattctcctgcctcagcctcccgagtagctgggattacaggcgtgtgtcaccacgcctggctaatttttttgtatttttagtagagacggggtttcaccatattggccaggctggtctcaaactcctgaccttgtgatccacccacctcggcctcccaaagtgctggaattacaggcatgagccaccgcgcccggcccaatcatgtgtttttgttgaaatgatcctaccagtgattagtggctattgagagttttacagggttatacattgttaagggaccaagaatcaagtacaaaaaattaaaaaggaactgtaaaatcccttggtcattcataaataaatatctaaattaggaatactaattaattgaattttcactcatgagtatgttctgaatatttaatatttatttctattattttcatatgttaagatattccattaaatctaacttaaaagaattgtatgtataaattggcattaggatacaaatgtaaatgtttttaatgaaattttgcaactttttaatattttaacatagttttctatttgtctttatttcaagtaccagaattacaaaatatctaagtaatatatttttgttgtcgttttagggcttaagggttaattcacccagagtatattaatataataaaaagatcact

SEQ ID NO: 32590 - DNA, 4375 bp, Homo Sapiens
cgcggggacactcgtgcgactggggcaaggtgcccaggggcttctctcctaatttgcctcacgtaacagttgagaccccagagggcagcaaaactgggttcgaattggagagccgtccaggcacagacaaattcattcatctgcccagtgcccgctaactgcggttccaggcgccggcgacgcaattccagagctgccaccgcttccccgcggagcatggggctgcctcgccgggcaggggacgcggcggagctgcgcaagagcctgaagccgctgctggagaagcgccggcgcgcgcgcatcaaccagagcctgagccagcttaaggggctcatcctgccgctgctgggccgggagaactccaactgctcgaagctagagaaggcagacgtcctggaaatgaccgtgcgcttcctgcaggagctgcctgcgtcctcatggcccacggcagcgcccctgccttgcgacagctaccgcgagggctacagcgcctgtgtggcgcgcctggcccgcgtgctgcccgcctgccgtgtcctggagcccgccgtgagcgcgcgcctgctggagcacctgtggcggagagcggccagcgccaccctggacggcgggcgcgctggggattccagtggcccgtctgcccccgccccagcgcccgcgtctgccccagagcccgcatccgctccggtgccctcgccgccctcgcctccctgcggccctggcctctggcggccgtggtagcccctcggccgatccacagaccctgccgactgcttgggaccttggggcactggacaggttgaagctcttggtggcggctgctgttcccatcattaggggccagcccagtacccacacccaggccggaagccggctgtttgtgactggcgtggcagactgaaagccctggggctggggctcggctcagggaataaaaggagcgtccctgcttcacccccaacttggctggagaagaaaggacaagaggcagcagggtgaagaagaagccccccatcccagctggtggagatagttctggaactggaccccgcagctgcgtgggcagccgacacacccaccccagcactggcaccagaccagagccagagccaggacctgggcaaagtgcagccgtgcaccctgcctggtcactgctctcccagccctgcctgggcctacctcctgcccagctctgcttgggaccctctgggcatgcagcagcagtagcctaagggctctggtcacttccagggctctacagggcagcagagcagagcaaaagggtgcatatgctgggagctgtcacctccactcctaggcttttctgcctagagcagaattataggggcagtatacatccaggggtctgtgcggtggggctgggggattccttaagtgactttgggaaggatttgttttcccgagcatcaatttcacacctgggcattgcaccccaggctatgcagtctttcagtgtgaggaaggggcagaacaagaatgaggcggccccgtggcctcaaggaagcttgtggctttggaggatctgactccagcagagtctgtgccaatgtggggtgagcagggcccctgccatggagcagcaggaatttgagggatggagcaggttaaagaatgggaaacatcttcacttgtttttttttcttgcaaactactccctgctactcattgagactggttactggaagcaacttgttaagatttttctttctgggcgggcgcggtggctcacgcctgtaatcccagcactttgggaggccaaggcgggtggatcacctgaggtcaggagttcgagaccagcttagccaatatggtgaaaccccgtctctactaaaaatacaaaaattagccgggtgtggtggcatgtgccagctactcgggaggctgaggcaagagaatcacttgaacctcggaggctgaagttgcagtgagccaagattgagccattgctctccagcctgggtgacacagcaagactctgtctcaaaaaaaattttttatttctttcttttccatggaggcctagagtccctgtgaaggctaggaaggggctgctgatcccaggagtgcccacgaggagtggggggcactgttggcccataatcaggcaaacacccatcatttcatgggggattcatgaaatcatagtcaggcaaacacccgtcatttcatggctaagcatttgcagaaggtggaggattctcccccgagtccccaaatcagcagcctgtgctagggaccagagcaccgggggcaagaagacagaaccaatgtgggagtggggatggtcactaaatctgactgtgccacacaagcccatgatgaccttggcactggtttgggtggcaggatatgaaggaagctgtaggcattattgaaaaaatcattgttcagccaacagggtgaggctcccagcaaggccgtgccatcttcccacctccctgtgcccagagggttagactgtaagctcccggagggcgaggctggggctgagcgtgcctccacgtccccaaggcacagggtgcacagtgggtgctcactgaatatagtggactagtgagcagaggatgagaggactaccctgtaatgagccttggacagtctggcatttgccttaactcccactcccatgccctgggatcactgttggatatttactccatgaggacaaatactggggaggtgtggagaggagggagggcaggttcctcttactttcacccattgctgagaatgagcgcctgttggcactgcctttgtgagcctccgggagcaggtaacctgcggcccaagcccgcctaggactccacatcaggcaggcacaggactggccccttgtcctcataaaaactctcagtacagcttaaactctgtaagatctaaccagccaggaggaccctcgcttcctctccgccatgcttgccacctcttgcttctgagagtccatctcagttcgcagttctgtgacttgcattgacctggctccaatcaagctacaactcaagcagtcacggggagaaggattgtagatgggccagtgactcacagggtcaggcactcgggggagcctgagtcaggaggtcagtgggccctggaagggagggggcaagcctgggtgggtaaggttctgggccccaggcaagaaggcagagtttctccgcaggggtgtgtgcaagagctagctgcgcagaaggtctccgctggctctccaagccgggcttgtgaaataggaacgccaacatcctcctccacaggcagtggcaggcacctcctcctcaggtgccccccaagccctatctgatgggcaaaggtgaacgcagggcggtgggcttttcctgtgcagagggagactgattcaaagggtcatttatgacctttcacaagtcccacatcctgcccaatggccaggtcttgggatgctgttgcaagatggttctgtgactccatgtgactgtctgatgattgccccagctggggaaaaggctcccatgtctctttctcataaaaccagtgggcaaggccgggcgcagtggctcacgtctgtaatgccagcacttcgggagaccaaggtgggcggatcacctgaggtcaggagttcaagaccagcctgaccaacatggtgaaaccccgtctctacaaaaatatggaaattagctgggcatgacggcgggtgcctgtaaccccagctacttgggaggctgaggagggataatcagttgaacccaggaggtggaggttgcagtgagccgagatcgcgccactgcactccagcctgggtgacagagcaagactccatctcaaaaacaaacaaacaaaaaactagcgggtgaaatgattcagtgacctaaggacagccagagcactaagctgctgggaacccatctgtgctgaaatgtagatttcccaggaaactcaggcttgggacaggcgcctacctgctcctcgggcaccaggtgattaggagaggtcgaatctcatttccacgtgagtgaggataaagactgggctgccaaggaggactcctcataaacattgacaaattgctctgccccgcctgtgatcccagacgactcctgcagtctgggatcctgagtgtcctgtgggttcatctcggatgggcgctgcataaacagcctgcagggaacgtctgggagaaccagcttcacaacagatataataaggaagaagtttgaaatattgcaagaattgcgaaagtgtgacacacagatacaaagtgggcacatgctcgtgggaaaatgttgccaatagacttgcttgactctggagttaccccgaaccttcaatttgtttaaaaaaaaaaaaaggcaatatcttgacgtgcaataaagtgaactgcaat

SEQ ID NO: 32591 - DNA, 4779 bp, Homo Sapiens
atggttaccctctcgtggagtccgagcagctgcttcagggaggcccgggagcccctagggcgggcagccccggagcctgcagctgcgacgcagactcggaaactacaactgcgcgtgaagccgactaaagttaacgcctgtgtgattgagtcagaagctccttcaggaacacaggagtggggccgactcctggaatccggccccgggtcgcttataaatgcgccaagaaaaaaacgtcaccgaaaaactttatacgcgttcttgctttggtccagaatgcgcgccgcgtctctccgcaggccccggccgcggcgtcctcgacaacctatcgaaggcgccatggagcgaccggcgcccctggccgtgcttcccttctcggaccccgcgcacgccctgagcctgctgcgcggcctgagccagctgcgcgccgagcgcaagttcctggacgtgaccctggaggcggcgggcgggcgcgacttcccggcgcaccgtgcggtgctggccgccgccagcccctacttccgcgccatgttcgcggggcagctgcgcgagagccgcgccgagcgggtgcgcctgcacggagtgcctcccgacatgctgcagctgctgctggacttcagctacacgggccgcgtggcggtaagcggcgacaacgctgagccgctgctgcgcgccgccgacctgctgcagttcccggccgtgaaggaggcgtgcggggccttcctgcagcagcagctcgacctggccaactgcctggacatgcaggacttcgctgaggccttcagctgctcgggactggcgagcgcggcgcagcggttcattctgcgccacgtgggcgagctgggcgccgagcagctggagcggctgccactggcgcgcctgctgcgctacctgcgggacgacgggctgtgtgtgcccaaggaggaggccgcctaccagctggcgctgcgctgggtccgcgctgacccgccgcgccgcgccgcgcactggccgcagctgctggaggccgtgcgcctgcccttcgtgcgccgcttctacctgttggcgcacgtcgaggccgagccgctggtggcgcgctgcccaccctgcctgcgcctgctgcgcgaggcgcgcgacttccaggcggcgcgctacgaccgccacgaccgcgggccctgtccccgaatgcgtcctcgcccgtccaccggtctcgccgagatcctcgtgctcgtgggcggctgcgaccaggactgtgacgagctggtcactgtcgactgctacaacccgcagacgggtcagtggcgctacctggccgagttcccagaccacctgggcggaggctacagcatcgtggcgctgggcaatgacatctacgtgacgggtgggtccgatggctcccggctctatgactgcgtgtggaggtacaactcaagcgtgaatgagtgggcggaggtggcgcccatgctgaaggcccgcgagtaccacagctcctctgtgctggacggactgctgtacgtggtggccgccgacagcaccgagcgctatgaccacaccactgactcctgggaggccctgcagcccatgacctaccccatggacaactgctccaccactgcgtgccgtggccggctctatgccatcggctccctggctggcaaggagaccatggtgatgcagtgctacgacccggacaccgacctgtggtcgctggtggactgcggccagctcccgccctggtccttcgcccccaagactgcgactctaaacggactcatgtactttgtcagggatgactccgctgaggtggacgtgtacaacccgacgaggaacgaatgggacaagatcccgtccatgaatcaggtacatgtggggggcagcctggccgtccttggggggaagctgtacgtctctgggggatacgacaatacatttgaactctcggacgtggtagaggcctatgacccagagactcgcgcgtggagcgtggtggggcggctcccagaacccaccttctggcatggcagtgtcagcatcttccgccagttcatgccccagaccttctcgggtgggcgtggcttcgagttggacagtggcagcgatgacatggacccaggccgaccccggccgccgcgggaccccgatgagctgcactagccccagtctggcccggcacgggcctcggtgcaggtaactggcacctctgcggggcagtgccccactcctttgtgcacaaggacacgttgggctcacaggaggagcacaggctcttgggtggcgaagccagcccaggatccattacctggaaggtttctgtaccttgagagcctgaatcagaggccgtcgggaacgccctccctgcagttgaggaagagccactttcctgccagcacatgtttctgggtcttggaggtcacccccaccccgcggatcacagctcacccacgcggcgcacacccctcctgccgttgtcatctgcacctacttgttcccaccttgggagaggacgatgacttgggagggacgcgtgaagggagaaggggtcctcccatgaggctgaggatggcctgaacctggagcagcggaccaggcagacgggctgaagtggggtcccaaattccatgtccagaggtgtggggagcctgcctccctagctcctggcccctgccaggggcttacatcaaaacacctcagagggctgccctccagaggctgcacccagaacagtgggacatgagcaggggtgtgggcttggagggtgaagaggatgtggtcctatcagatgctgggcctcctcagccatagccccctgctcctaccccctgactggctcttgcgtcctcacctctcaccctctccttcccgggaggccctgggaggtgatcattgacacccagccaagcagacagctgcgggtgcccaagcccttgctgggcctgcgcgtgaggagtcccactgcttctaaaggaagtcctgggcaggaggtggctttggtggttggttccaaagttgaaaatgcttgcagtttgaccttagaagaagtgggaagaagaaggagctctacagggtcagctttgtttgatttgtccagtctaagaagtcccattgccaaagctttctgcaggagggtgaatgccgcagcttggcagcccctgggtttctcttggaaatggtcagtttcccctcaaagtacccaaagtagccttggcttgagtttttgtccttgcctcctttttagagaagagggcatttagactgcattttcctggttaaagaaggttaaagcaaatgtttattgccttttctagtgaactaactcgtagagatgttctcagcaggaagacagtcttagcactgtcacttagcagattgcacttaagtcccttgtgctggccagatggcgtggctggttgccttaatatgtcccaggacccctgacagggctgcctggcctctccctcgtgctcctcaagagcccagtccatacactgtggatgtcattgctgtcgggttaggaagtcttgtcctagaacgccctggctggtatgaccacagttcatggcggctcttctcgcttgggtcatggtcatcttccagcacctgctgtgctgggaaggccgaggatgggggcccagcactgtccaggcctgctggggcctggctgggagtcctgtgggcagcatggaacatgcagctgggcttcctgtgaccaggcaccctctggcactgttgcttgccctgtgccctggaccttttcctgcccttctccttcctctgctcccttggggctaccccttggcccctcctggtctgtgcaaactccctcagggagcccccctgccctgtagctctcgcttaacttcctaggggctgctgagcccacccagaggttgttggagttcagcggggcagcttgtctcccttgtcagcaggggcgtaagggctgggtttggccatacaaggttggctacgccctcaatccctgaccgttccaggcactgagctgggcacccacggaaggacatgctgtccagactgtgatgactgccagcacagggcatctcgggcttggctggtctgcgaggccttgcccctgtggaactctgggttcctgttttctcagtcttttttgcggctttgctgtggttggcagctgccgtactccaggcttgtgtcggccactcagatgagggctgtggtgcgagccagtgcaggagagctgcgcttgggattgtgccctctcctgtgtctgtcctccggacctacccaggtctccaccatcaggaccctgtctttgggtttagaagaccaagtatggggaaaaccaggcaccagcctctgcagcaatgggtccctctagcctgtggacaccagctgggggatccagggtcaggccccctcctctccccagtttccctctgctgtgggttctgggctgtcatgtctccaccacttaaggatgtctttacactgacttcaggatagatgctgggatgcctgggcatggccacatgttacatgtacagaactttgtctacagcacaaattaagttatataaacacagtgactggtatttaatgctgatctactataaggtattctatatttatatgacttcagagacgcgtatgtaataaaggacgccctccctccagtgtccacatccagttcaccccagagggtcgggcaggttgacatatttatttttgtctattctgtaggcttccatgtccagaatcctgcttaaggttttagggtaccttcagtactttttgcaataaaagtatttcctatccatttgg

SEQ ID NO: 32592 - DNA, 6035 bp, Homo Sapiens
atgcaccttcggatactgtggtcccccagcccttccagccgcggtcgcgcacatccgaaggaatttggggccaggggcattgcgggcagagaggacagagaaacggagccctctcggcaggcgacgtgggagaggagcgccctaaaaagtggaaagcgagcgttgccgaggctgctggcccctttaagaggcccggctggctctgcggcggttccagctaacccggtccctggtgcagctctgcggtccgggtcccccagcagagaatcggcacccggcggggaggcaggaccagacgcaggagagggcgtggccccgccggggagctgggcggagtctatgctgcggagaaagcgggagaacccggagaaggggcagtgccggccgagagtcctctgcgtgcggctgccgcggcccctccacagcgtctctgacagcccgggcgggccgggtccgtcgccggtgacggcggcgctgcgggacgacctgggctccaacatccacctcttgaaggggctcaacgtgcgcttccgctgcttcctggctaaggtgcacgagctggagcggcgcaaccggctgctggagaagcagctggagcagcagcagagcgagcgcgagcggcggctgcgctacaagaccttctcccgcgagcaggcccactacggccgcctgcccgggaccatctggagctacacgcaggtgcggcgcacgggcggcggcggcgtggagaccgtgcagggccccggcgtgtcgtgggtgcaccccgacggcgtgggcgtgcagatcgacaccatcacgccggagatccgcgcgctctacaacgtgctggccaaggtgaagcgcgagcgcgacgagtataagcggaggtgggaggaggagctcgccaagcgcatgaaccttcagaccatggtggacacgctgcaggaggcagcacaggaggctgatgccatccaggaggagatgaatgagaagatcgagcggctcaaggccgagctggtggtgtttaaggggcttatgagtgaccccatgacagacctggacacaaagatccaagaaaaggccatgaaggtggacatggacatctgccgccgaatcgatatcacggccaagctgtgcgatgtcgcacagcagcggaactcagaagacgtgtccaagatcttccaggtggtccccaaaaagaaagagcgtaaggtggcttccgatgatgacatctctgagcaggacggggaggtgaaccggttctcggacgatgaggtcggctccatgaacatcaccgatgagatgaagcgcatgtttaaccagctgcgggagacctttgactttgacgacgactgtgacagcctgacgtgggaagagaatgaagacacgctgctgctctgggaggatttcaccaactgcaatccgaccatcgacctgcagggcgagcaagaggaaaacttgggcaacttgatccatgagaccgaatccttcttcaagacgagagacaaggagtaccaggaaacgataggtcagatcgagctcgagctggccacagccaaaagtgacatgaaccgacacctgcacgagtacatggagatgtgcagcatgaagcgaggcctggacgtgcagatggagacctgccgccggctcatcaaaggctccgcagacaggaattcaccgtcccccagctccgtggccagcagcgactcaggaagtacagatgagatccaggatgagttcgagcgcgaggcggatgtggagcccatggtcagctgatgactgaggccctgcgagcctggtggtcttggtgatggggccctgccacctctcctcatggggccaggaaggcccctcggagtggggttcgaagccacaccacacagactttctctgccctcccttctctggaggccctgagggactgctgcttccttccttccttccacaccaccaacgggtgccccgtctccatcccccacccacccaaggaatggtgctgtcaatttctattgttctccacattacaaatgcagacttctgtgcggactttgcagtgttaactgtgccttctcccttaagctgagccactttgagctccaaagaattattcctagcaggtgtttttatacagaactctaagctgagggccgggccaaccggccgtggtgtaatgtggtttctgccgtccgtcccacctgctcctctgattggccatgggctatgccctcccttcctcctgagccagcccagactcggcctggagcttggggtgctctgccaacccccaggaaggagccgcttgcctctgtgagctttctaggcctgggtagggaccaccccaattttctcactccctgaaggagagaaaggtggaaggaagggaaggaggacacattttaattttttggggggatcgagtggcaaagttgaagggacaaggcactgtgaggggaaggcagagcctcactgtgtttaaactactatgcaaaaaacaaaacaaacaacaaaagcagcttgccttatatcattgtggaaggcaggacctctcctgggctcctggcttccccctggagctgggagagaggccggggttagggtgatctgtgtggcagcactgactgggtagtgtgggtttggccgaggttggtcatgaggctggggttcccgcaaggcactggcctccctgaccgcttgcttccttccggacctctgggttcagggcgggggcggagggatccttgatttccctgataacttgatgttcttccctccctcgccagccaacaatagaggcttagagatctgtaatttctctgtgagaaagtctgaaggggccaggcctggtctctgctcccttctacccgccttgggttaggactgtccggcagttgcctgcttttggctgctggcaggagagaagcagggtgggctgctggcagtgcaggagctggagtgagggccatcctctttctgctcctcgacacacgcaagccgctctcagcagttccctcgactggccagtcggggtattgatctgagccagcatcccccaagacttgaatggcttgagtgggactgcgttgaagggcactgtgtggcccccttccaaatctcagcttggagccagctgagcaggctttgctttattattattttttaagcctactgcagtgggtctgttgccaattttaattttttattgtcccaggagctccctctagtggtcaaggtagcaaaatgtgcccaaggactagaacttgggtccctctgccttgcctggaggcagaaggagggggctctgggtttgactgggattgtggtccccaggggtccgtggcctttaaggctcttctctcttttctgtttcccccacctgtgttacagtcttaaaaatactgtacataaaagatatatgtagagagagagagagagcgtgagaatgtgttagtgactatgtgtgatgtaatttatcacgatttggtggccttcgtcatgagttttttcctttgttttcttttgctgggggcacctcccacgggtcccctgtggcagtctggctgtgacacttccatagtcagcatctcttgttagccaaacagttccctttgacaggtacttggagggacaatggttttggaagagagacggcccttctctctcctcactcacccttgttctaaaggttacagggttcaaacatacctgattcttgttgttattgttgttgaatttttattttaaccaaaggttatcagagccagttgggcttggacctcagctgctaaaaagattttccgtttcctcgagggcaggaaaacatccaccctcgtgggtctcctccgtccagggccgagggaggcattggacaatgtggtatgggagtttcgtgggcagcgtggaagccggccctgggttgttccccaaggtggtgggagggtgacagatatatctttagacttaagactgtaaggcagcagtgttagcatgggagtaactaaggttactgtggttatcggtgtccggcggtattatttttactttcctccttgtatacataggtcatttgtctttgaggactagggtactctagggagtttgaaaactgcaggagccagaaagagatcctggcctgagagtcccttctggctggcttttaatatctgctctcctcttgggagtgaggacttggggcaggtgggtaggagagggaaagccagagtgtgatgggcctgcctcctgggctggttcctgggtccggcctgcctgcctgcctgcctgcctctccaccacatgcttttttcagttaatgtcagtgggccctgcttgtcccctcaccatgagcccacagcttgccaagaaagaccccaacgctcgctggggcagcaccagtcctagctgggacgaattggtccatcctttgtaaagctgtaaatacttaattttgactttctatttctaagcccagtgtcatattgacactggtattttagaattttctcagatgggctctcctgcgctgccctctgtctcctgtttttgggggttttatacaaacagaggattggggagggataggaagactagcatccttttggctccctggttggttgtgaaatacacacacacacacacacacacacacacacactcgcactcctctgagactccgaacagagaaaaaaattattggcaaatcaacacatttttctttctcgtcttgagaaaatgtcttgaggtccctgaagggccaaatccatcgtggactaactctgtgggtagagctcagatgacctagggagaattaaaccacttaagcttggagtgggaggagagggggtggggtgggggagaatataagatgtaacttaagctaaatgtaatctatttataaagcaagagactctcatctatttttatgaaaggaagggttttttaatctagggtaggcagttgtggtagcccagcattttcctgtggacgagacatggtgcatgttgttgctggattgaatggaacccattcctgtcccccggcctcgtcttctgtcctcacttttggtcatccacacccatgagcagcttcagcagagtgtaggtcccacttcaccccattctcctctcctctgacccctcagctccttggaagtcttggggtggggatctgagggggtgggtgggctgcaggaaattcagaaatgtggtgggtgggggaagggacaaggcgcattagggagggaacaagctgggctctggggataggctctgattaattagttactctgactctggtctgccgagatccatttccaacccagttgcgttgggagagggttgggaggcagcagagcatgggtgacagtgggagcacacgacttccttggagcctgggcctttgcgggtcccaggtggtcaggcagctggagcagaagtggaaatggcttaagatgctcatagcccagccccggctgtgtctactccaggccaagcctgggctgcagtccttgctatgttccccccagggccctggggggagggatcagggtgctgggggtttcctaggacaggggtcttcccccttgagacaccaagctctggctctagaagagctctctcctggagtggggagtctggaggggactgggtgggtgcaggtaaagccagattctctctggaagggaattttctatgaatggatgatttccaggctcagggtgggctgtgtgttagttctgagcaaatccctcaccaagacccttccctcccaagccctcaaagaaatgaggcaaagcccttccctgcaagaccccttgtggatgtttttgcatctacctgatttttagccccacccagggagactttataccccatgatcctgccccaccgttgctgttgtctgccagctgggtctagcatcacagggaagggggggatttatactcatggaaagactactgatcctaccggaaaccaacctgtttactgtactgttgtaaatatcatgccctttatatcctgtatattggcttcttttaaataaagtgaaatgtcttagaactg

SEQ ID NO: 32593 - DNA, 5958 bp, Homo Sapiens
gccgagctcagcccagggcggcggcttcgcctcgcccggcgaagcttctctccggtggccgctccttcttttccctcctctttgcgtcatgtcgggcacttaatttttttttttttttaattccttcttcagccctttccaccttccatctcccttttcgcttcccaggttgattattttctcttttctccgggcttgcccatgagcctcctcgggagctaccggaaaaagaccagcaacgatggttatgaatctttgcagctggtggacagtaacggggacttaagtgcgggaagcggcggggttggcggcaagcagagagtgaacgccggggcagcggcgcggagtcccgcccgacagcctccggaccgcgccagcaccatggacagctcaggtgcctcatctccagacatggagcccagctatgggggaggtctctttgacatggtaaaaggaggtgcagggaggctctttagtaacctaaaggacaacttgaaagacaccctcaaagacacatcttctagagtgatacaatctgtgaccagctacacaaagggagatttagacttcacttatgttacctccagaattattgtgatgtcctttcctctggacaatgttgacataggattcaggaatcaggttgatgacattcgaagctttttggattccagacatcttgaccactacacagtatacaatctgtcacctaagtcttatcgaactgccaagtttcacagccgggtctcagaatgcagttggcccattaggcaggctcccagtctgcacaacctttttgctgtgtgtcggaatatgtataactggctactgcagaatcccaaaaatgtctgtgttgtccactgcttggatggacgggcggcatcatcaattctggttggtgctatgttcattttctgtaatctctactctactcctggcccagccattcgattgctatatgcaaagcgaccaggaattggactttcaccatcccataggagatacctgggctatatgtgtgacctactggcagacaagccctaccgccctcacttcaagcctctcacaattaagtcgatcactgtcagtccaataccctttttcaacaaacagaggaatggatgtcgcccttactgtgatgtactcattggagaaaccaaaatatattcgacttgcacagattttgaacgaatgaaagaatatcgtgtccaagatggaaaaatcttcattcccttgaacatcactgtgcaaggagacgtggttgtttccatgtatcacttgaggtcaaccattgggagccggctacaggctaaggtgaccaacacacagatattccagcttcagtttcacactggattcataccactggacacaacagttttaaagttcaccaagcctgagttagatgcatgtgatgtaccagaaaaatatcctcagctatttcaggtgacactggatgtagaactacagccccatgacaaagtaatagacttaactccaccatgggaacattactgcacaaaagatgtcaatcccagcatcctcttctcttctcaccaggaacatcaagatacgctggccttaggaggacaggctccaatagatatccctccagacaaccccaggcattacggacaaagtggtttctttgcctctctctgttggcaagatcagaaatcggagaagtcattctgtgaggaggaccacgctgccctagtgaatcaggaaagtgagcaatcagatgatgaacttctgacactttccagtccgcatggcaatgccaatggtgacaagcctcatggagtcaagaagcccagcaaaaagcagcaggagccagcagcccctccaccccctgaggatgtggaccttttgggcctggaagggtctgcaatgagtaacagcttctctccgccagcggctcctcccaccaattctgaactactgagtgacctgtttgggggtggaggtgcagctggtcccacccaggctggacagtcaggagtggaagatgtgtttcatcctagtggacctgcgtctacccagtcaacaccacgccgctctgccacctccacctctgcgtctccaaccctaagagtgggagaaggtgccacctttgacccatttggagcaccttctaaaccatcaggtcaggatttgctgggttcttttctgaacacatccagtgcttccagtgacccctttctccagccaacaagaagtccttcgcccacagtacatgcttctagtacgcctgctgtgaacattcagccagatgtttctggaggttgggactggcatgctaaaccaggaggctttggaatgggaagcaagtcagctgccaccagcccaaccggatcctcgcatggtactcccacccatcaaagcaaaccccagactctggatccttttgccgaccttgggacactaggtagttcttcctttgccagcaaacccaccacaccaactggattgggtggaggattcccgcctctcagctcgccacagaaggcgtctccccagcctatgggtggcgggtggcagcagggaggtgcctacaactggcagcagccacagcctaagcctcagcccagcatgccccactcctctccccagaaccgacccaactacaacgtgagcttctcagccatgcctgggggccagaacgaacgtgggaaaggatcaagtaatttggaagggaaacaaaaagcagctgattttgaagacctactctctggtcaaggtttcaatgctcacaaagacaaaaaggggcctcggacaatagctgagatgagaaaggaggaaatggccaaggaaatggatcctgagaaattaaagattctggaatggattgaaggcaaagaaagaaatatcagagcccttctttccacgatgcataccgtactatgggctggggagaccaagtggaaaccagttggcatggcagacctggtaacaccagagcaggtgaagaaggtgtacaggaaggctgtcctggtggtgcacccagataaagctactgggcaaccctatgaacaatacgcaaagatgattttcatggagctcaatgatgcctggtctgaatttgaaaaccaaggccaaaagcccttatattaatttatgagcttttccatctctgctgcagacctgtgctaatgcttagtgtgtgtcacaattctgaggttttcgcagatgaaccaaaaactccagtaacatgttttcagtactaaaccgttaagttactcatgaattaatttctcattgataaggaatgtggatgtttggtttctccaaagttcccaccataaaagatccaaagcatgagaggaacttctagtcagatgaccttgcagaaccaccgcattccaccctgccctttggggagcctactcagcattctacctggggaaatggaaaacagaggccaccacccatgaaggcataacacccatcacattgtctgagaataggattaatgagcaaaagttatgataatagagttatatgatggtttaatggtttctagatttttcttggaaagatataatttgagcagtggctttatgcagactccaagaacaaaaccaccaggtatttttttttaagtaaaaatttactaaggcctttagcataatactgtaaatgtcttttggtcaagagaactaacaaatataaaggaacttgaaatgtggggagtgataatagtccagtgattaaactacagtccagtgattaccaccaactttctgactaagctaaaaatgaatgaaaatggtggctaaagaaaatagggactctgaagatgtcgaaatctttattcctggttaggaaggtgggccgctacccttctttccctttagaaaactgtgattaattaaataaaaagtcttactactataacaactctaaacctggtttaaatgaaacatctaattttgctgtaaggcttaatgctcttcttttgtttagccaagaaaacattcttagttggaaacaggtggtaaagtagtttggcctgttcacaacttatcaggaccaatatctagtgtggactcagtgttctctaggtttgtgagcagttgtggtaagagaatggaaggcaacactgaataggagttaagggaatggcacgatcacagtgagagagctgcactcacctgcagacccagtcagatggcttgtcagtatctgctctgaggaaccaggtcccacctccccacaaggcaaatctagacccattaaattattacagtgggcttttttgttttaaaagtggttggggatccacaggaacgacattcatacagggacatttgtgaaagcaaagcaagaatgaatgctttcccgatctcagactggctggattcagatcagtgtgttggctggttctcattttaaggggtaagcagtttgctattctgtgactttagtagatctcttttgtgtgcacatatacaatgtgcattatacatatatattaaatatatccacaaagcagatgggcaaaaagattttcatgctaatcttcaaaggttcatgctcaatattgtgaaaagcttttaaaagttgttttgaaaagacaatcattttttgtttttgttttaactttcttgtggcaagctataccggaaaagcggcatgtcaaaaatactttaggttctacatagatctctttctctcttttgttttgtttgtttgtttgttaaagttcattatttattttaccttttactgacaatgtgaaactcgaagaaaatgttctctttttaaatatacagtcataaactgttcaaggtaaccataacaaactaggtgttatttattaacgtattataaaataatgtttgatccagtatgtgcttgtcttatttaaaattggaatgtgagacatgttgctgtgacctgtttttctttctcattcacatttgtagatattgtgtgaactacagtatataatgataacaattaaaaggatattctgtggatgtcacgtattttgaaatgatagaactacattagctttgtatcatgtttggataattcatcaatgttcacagtttaaaacatcattaaacattatgtaattacaatgagaaagaatcttacttaaatttggagattttcccccacatctcttttccggatacattataattctggacccctatttatctcaaaactcttaatatatgcagaccaacaggtctttgcattccttttaaataactggttgtgacaaagcttgttgttgatcagattcactgtttcatcatatttattgtaatatattttttgttttgtaaatatgttacaacaaaatgtgattggtctaaaatatttgtaatgtatattaaaaggttcaaaaatatttgtataaatctaagttatttgggtacttgtaggaatacaatgaggagcttgaatgccaccttctgacatgatttacttttaaggaaagttatgaggagagaatacaaaaagcatgcaccaaaatgtaatctgacaggatttctggatttatacgtaatcactcctgccccaacacacacacacacacacacacacacacacacacacatgcacgcacacatgattttgattatgctacatgatatatgtttcaaaaagaattagcatagaaatcctggtctcctagccaaaaaaatcaaaggattttcaaaaaaacgaatctgtatgttgaggcaaaaggattgaacctggaagtctgggactttatcatagaaacaaagtctcagatattttagttctttggaaacaaatgctgtaattcaaaagcatttgacctgtcactgtactatctacatgtggaagaatgttcaagttgaatcctaatgccgtgaatgaaacacagtctgtgtagggaatgagcaaaaaagttgaattccaattgctttttggccttttggctaaaataaatgtagcatctaattttatcagttt

SEQ ID NO: 32594 - DNA, 4015 bp, Homo Sapiens
gtccgtcaggccgtgtgtcccaggccgtcgaccccgctgtcgcgctgcgtctgctccttgcatgcctttagatggtacagccttcagccggggcttcgggagacagtgcagccaccgagcatctctgctgagcttctccgccgatcctccttttctagcaggcagctcttctaggccacgtccaggtcgagggggaaaatggcgccggcgcccctaggcgtcccggaggagcagttgctggggtgtcgatctagagtgctttctcggttactcttcattgcccagaccgctctcctcctgttgcccgccgccggagcaggtctctgccccgcgccctgctcctgccgcattcctctcctggactgcagtcgcaggaaattgcccgcaccgagctggagggcgctgtcgggcttgctgccccccgacaccgctatcctggatttcagtcataatcggttgtctaactggaacatcagcttggaatcacaaacattacaggaagtgaaaatgaattacaatgaactaacagaaatcccgtattttggagaacctacatctaatattactctactttcattagtccataatataatcccagaaataaatgcacaggcactccagttttaccctgctctggagagtttagacctcagctcaaatataatatcagaaatcaagacatcttcatttcctcgcatgcagcttaaatacctgaatttaagtaataacagaataaccaccttggaggctggttgcttcgataatttatcaagttccttattagtggtaaagttaaaccgtaaccgaatgagcatgattccacctaagatcttcaagctgcctcacctccaattcttggaacttaaaagaaacagaattaaaattgtggaaggtcttacattccaagggcttgactccttaagatctttgaaaatgcagcggaatggaattagcaaacttaaggatggagcattttttggcttgaataacatggaagaactagaactggaacacaacaaccttacacgagtaaacaaggggtggttgtatggcttgcgaatgttacagcagctctatgtgagccagaatgctattgaaagaatcagccctgatgcatgggagttctgccaaagactatccgaacttgatttgtcctataaccagctgacccgcctggatgaatctgcctttgtgggtctgagcttattggagagattgaatttaggagacaacagagtcactcatattgctgatggtgtatttagatttctttccaatcttcagacattagacttaagaaacaatgaaatttcatgggccatagaagatgctagtgaagcctttgctggactcacaagtctcactaaactaatcttacaaggaaaccagattaagtcaattacaaagaaagcattcattggtcttgaatcccttgagcatctagatttgaacaataatgctataatgtctatccaagaaaatgctttttctcagactcatttaaaagaactgattctgaacacaagcagtttgctctgtgactgccatttgaagtggctacttcaatggttggttgataataactttcaacattctgtgaatgtaagctgtgcacaccctgaatggctagcagggcaaagcatcctgaatgtggatctgaaagattttgtctgtgatgattttctcaagccacagataaggacacatcctgaaaccataattgctctaagaggcatgaatgtgactctgacgtgcactgcagtgagcagcagtgattcacccatgtccactgtgtggcgcaaagacagtgaaatcctgtatgacgtggatactgagaattttgttcgttattggcagcaagctggagaagctctggaatatactagtatcttacatcttttcaatgtgaatttcacagatgaaggaaaatatcagtgtattgttactaatcactttggttctaattattctcagaaagccaaactgactgtaaatgagatgccatcttttctgaaaacgccaatggatctgactattcgcactggtgccatggccagattagaatgtgctgcagagggacaccctgcacctcagatttcctggcagaaagatggtggtactgactttcctgcggctcgagaaagacgcatgcacgtcatgcccgaggatgacgtcttctttattgccaatgtgaaaatagaagatatgggaatctatagctgcatggcacaaaatacagcaggaggtctctcagcaaatgcttccctaacagtgttagagacaccctcatttattagacccctggaggataagacagtaacacgaggtgaaactgcggtgttacagtgcatagctggagggagtcctgcccctcgtctcaactggactaaagatgatgggcctttgctggtgacagaacgacatttctttgctgcagccaatcagcttctcatcattgtagatgccgggctagaagatgctgggaaatatacctgcattatgtctaacacccttgggacagaacgtggccacatttacctaaatgtcatttcatcccccaattgtgactcttcccagagtagcattgggcatgaagatgatggctggaccacagttggcattgtcatcattgttgtggtctgctgtgttgttggcacttctttgatctgggtcattgttatttaccacatgagaaggaaaaatgaagactatagtatcacaaacacagaggagctcaatctgcctgcagacattcccagctacttgtcttcccaaggaacgctgtctgagccacaggaaggctacagcaactctgaggcaggcagtcatcagcaacttatgcctcctgccaatggatatatacacaaaggcactgacggtggcactggtacccgggtgatttgctcagattgttatgacaatgccaacatctactccaggacccgagaatactgtccatacacctatattgctgaggaggacgttcttgatcagacactgtccagcctcatggtccaaatgcctaaagagacatatttagtacatcctccccaggatactactgccctagagagcctgataccgtcagccaacagagagccatctgcctttcccaccaaccatgagaggataagtgagaagaaacttccctccacacagatgagcggtgaaacattgcagcggcccgtgtggaacataaacagagaactaggcctgcctcatcctcctttttcccagcagccagtccatgagtcaccacaacttcatcaaaatgagggcctggcagggagagagccagactgttctgcttcttccatgtcctgccacaggttacaggatcatgcttttgattttagtaggactcggaacattcaagatggtagtgagggcacatgaaactcacttcaggatgaaatctgggcagagacttattaattaattttgcatttactacctcagagctcagaagaaactccgaagtcagcatttgctttactctttctttatgattgcatctgaccgcaccaaggtgggccatgcgttgtttggtcttatacctgatgaagaaatggcaacagctgacagaaatgggtacagctcatcaaaaatgtgcagcaccggcagagggaagatacggggcaaatgtgcttcctgatgcttccatggggatgtgccctggtgtgcatctgcttgtcaggaagagtcacattgctgcttaacatgctggattgccctagtcttcagaatggtcctgagaaaacatcactacttcgatgttctactttgctttccaaggagcaaaaataactttggagccttctgggaagtgtgcctgggattcttcagtggtttcaggcagatagttgagactggggctttgatattcaaggtctttggcaagaatcccaggcttgaccaactggtaccaggtcaaagatttttgtattcttgtgaatttttttttttgtccctattgcccagggatgtcattgtaaatatatgtgcatttataaat

SEQ ID NO: 32595 - DNA, 6841 bp, Homo Sapiens
ggcgggggacacccgcccccgctctccgcagccgcccgccgtccgcgcccgccgaggtgagcccggcgcgcgggccgcgcccgccgccacgacccttccacatccgcggaaaccgctgcaggctccaccggctccccgcgctgcggtcgcctcttctctgcccctttcatcatcccctgcttccttgccctctggtcggaaatctcattctcttcatccccagttccttggcttttacctctttctggcttttgctcccttccccctactcctgtccttcctctttttcgcattataaccccctactttcttcctctcaccttgtaagctttttttctaggccccccattttttttcttaaaaaaaaaagggaaacaaaaaccctattgctacaaatgagaattttgagggtaactcttcgctagagccagagaccttttaaaggaatgcatcggtgtgcaggaatcgtggtggtgaggagactgaggtcctcagtatctgggaaatcttattgaggggaccctgtttcggtcatgtcacttgtgtcttcagtttggagatcctgaggttgtctgaagcgagtggatctatttttctaagtccaatagacgaccgcagtgagacacggtgcggggacggccaccgattactgaatgggaattgtgttatcatttgctaaatatattgtgacatacttcgtgcctcggtgaacagctcccttgaccttgtgcggctcctcctccctcgctctctgtccccctctggaatttcccctgagagatcaccgagaaagacaggacggagtccagtgtgagaatggctataactttggaagaagctccgtggctgggctggctcttggtgaaagcactgatgaggtttgccttcatggtcgtcaacaacctggttgctattccatcctacatctgctatgtaattatacttcagccccttcgagtgctggacagtaagcggttctggtatatcgaaggaatcatgtataaatggcttttaggaatggtagcttcctggggatggtatgctggatatacagtgatggaatggggagaagatattaaagcagtttcaaaagatgaagcagtgatgttggtgaatcatcaggcaacaggagatgtgtgcacactgatgatgtgcctccaggacaaaggactggttgttgctcagatgatgtggttgatggatcatatttttaagtacacaaactttggaattgtttctctagttcatggagacttctttataagacagggaagatcttatcgtgaccaacagctgctgcttctcaagaagcacttagaaaataattacaggagcagagatcgaaaatggattgttttgtttccagaagggggcttcctcaggaagaggcgagaaacaagtcaggcatttgccaagaaaaataacttgccatttcttacaaatgttactctgccaaggtctggggcaacaaaaattattttgaatgcacttgtagcacaacagaaaaatggaagtccagcaggaggagatgctaaagaattagacagcaaatcaaaaggcctccagtggataatagatacaacgatagcttatcccaaagctgaacctatagatattcaaacctggatccttggatacaggaaaccaacagtcacacatgtacattacaggatctttccaattaaagatgtacccctggagactgatgaccttaccacttggctctatcagcggtttgttgaaaaagaagacctcttatcacatttttatgaaacaggagcttttccaccttccaagggccataaggaagctgtttccagggagatgaccctcagcaacttgtggatatttctcatacagtcttttgcatttttgtcaggctatatgtggtacaacatcattcagtatttttaccattgcctgttttaggaattgacgtggacttgtcaaggtcaccgtaggagttcagactttctttcataagtgtgcattattttacatgtgcaaatcagaatatatttaaaaaaaagcaaaagaaattcaatggatggattaatatttatccccctttgggatattttaaaatctactaaaatgaggattagtaatataatgacctgctaatatattttaagaacatgttttaaaaagatacactctatcacatatttaagcaaacatcacatttggagaagaggaaatcataaaatcatcctagaagactatctgagagaaattctgttgccaccagttatacttgacaatttagttgaagctcagaaagttatattcatccctcttagctgtagtctatattagggcagttctctagaacgcccacatttccaccaactcagtaaacttgaggggagctggttggcacctcgtgaagaactctttccctgtcgtttgcagtaacaaactccagtctgttgcagtaacaaactccagtctgttgcagtaacaaactctagaatattgacattctctgtgggggaaaagcagtgtccactggaccccttctggtactggatgtgttctttacaaaggctagctcagtccaacactgtgtttacatacactcgtgcttttccttatctgacttctcattttgtatcagaggcatatcataaattgataattttgcaaaatgcacttttttgagatgcagatatagcaaaggattagtaatatagcctgaaaacaaatgggagcatagcagtgtgtgaggttctcgagaactgtcttgtctctgtgtgtttatttgcctgccagtgctctccagcgccatcctgccctggacaccaccctgacgtgatgcctctattgcagctcagaggctttattttttccattttgacattggcactaaatgcatttggggatggttaaaacaaattactatagaacatttaaatgatcagtttaaggggaaataggctagtttatagaaaaataagagctagtggcttataatggtgacaggttctcatgtggcacccctaggacctgtgcagacagtagtctgttgaatcattacatcaaggagctgcccctgtcagggtgagtgtaattaggaacgataccagcacataaggctccccccaatctcttccagttgctttttcttttttcttttttttttagacaggtcttactctgtcacccaggctgtagtgcagtggcataatctcagctcactgcagtctctgcctcccgggttcgagcgattctcctgcctcagcctcccgagtagctgggactacaggcacccaccatcatgcttggctaatttttgtatttttagtagagatggggtttcaccatgttggccaggctggcctcgaactcctgacctcaggtgatctgcccacctcggcttcctaaagtgctgggattgcaggcgtgagccaccacgcccggcctccagttgcttttgaagagggtaaagtcaagtttctatttctagaaaacattttttagaaatttgttgcgatgtttgtacaatttacctcataagagaaccacacccttctccaaaagtgctggtactgcatcagtgagatgagtagggtttttgtttgggattgtaagactattaagatcctagtaagtcagtggtagtttactgtgatgtgagcattgtagattcccccgttgtcactaatcacacaacaattttgagaagtaggctataaaacaaaaaaaggttgctgttttctatttttaaataaaccaaaaaaaaacagaaaagatgtgaattttccccagttatgtgggaaaggtaaagcaacaccaaataaaagcccacagcagcttcatctttacgataactcagtgcatatgtgaaagagaatgatgcattaactgaaatacctcattgaatattatactactactggtaaaatgcagaagacagtgttaatgtgtttggtttggggactggttgttataaaatgcaatttttttttaaatctaagcatttcattatgtgttctacagtgtcggtgaataaatgaaaccaatctcaatttagaggtatggatgatgacagaaagcccaatagaagcttaatgatgcttctgtttgaggcccagcaagcaccactaaattactggatgaaatgaaattgttcacttgagggattagtcaaccatctgggggagaagttgctcactgtcaaatacagcatgcacggtcctagctgatagaccttttcctcattgctacagcaagccacagggtagagtgaccagttctcctatccaaaaataaatgcgaacatgcatacataaatgtggctgagggccacttttgccatcactgtgctccaaaggaacatgatattgttaaatatactgtacacattaaactattctataagatgctttacttttcaagtacggtgtcattttcacagtctccagggtgacaaatgccaatagatatgtgagttaatttttttaaatatctccgtgagttgtaaatagatgtgtatttgatctgccctatccttctttgattctttaacatgttctctctcttctgtttgcaaaatatgtttgaaagcattggtagtgctttccttatcagtaactggagttctcctgcttgcactagagaaggtaaagagagaatcagtattcttatatggcaatctggggaagcagcaatatgccactgtacaaaactgaagaaaagttcctaatttgtactttgtgaagggagatgaaaggacgtttaaagtatatatattttgtcaagaggaaagaagataaaactatgccagttttatatcaatagcttgtagaagctcagctcttcttggtcttggctagactgcctagattcccacagcagacaaggttgagaatccattgctggaatcttggtattgatgagttacagtgatggaacatgtgcttggccacaggcaggtccagtcactgcaaaagtgaccaagccagcaggtcacccttaacttcagaaacaattattggtggtgaactgtacttaaattgcagagaaacctgtaagtaatggaaggtaaagaaaaattacagaatggaaaataatattttgggcaagcaaacaaattcactgagaattccaaaagtatattaaaaaagaagatagctatgagttcagatctatcttattggtctttaatattacaaccaatccttaactttccactataaaggaaggattactagattgattactttctggatagataatctggtaataaatgataggtaaatcaaaaattacttttatttaggagtttgaattcttactctcatcagacattttttttctagggacgcttactaattaaatgatttaagttgtttcttaggggttttttgcctatatatttatgactgtgttaatgagtagtgaaatgatgcggaaagacagctatcaggaagaggaaatacagaagcctgaataatctatgggttagaaaagcatccctgaataatcaaaaattggcagtattggcattgttctcaagcctttttatgaaaatgaaatctgaaatcaccaaatgtaaacctgggaacattattctagtgttgctgtcttggattcatgttaagaagcgtcttcattctttgctcatgttgcccacttcttgtggatttgtctgagtgttttttgacaatcacttccttaaagactcttctgaactagttggacctggttaatcatagagagtagcctttaatcatggatagtcttcttggattatttttatatttgaaaagaaaatgttttatttgcactactgagtaggaagagttaattgttttctttgttctttttttgaagtcattacacaggacttcactccagagttaccattatgagtgtgttcagctctggtccacagaggatggataaaaatggtttgttatgtttttttgctctgcagtgctatgagccttatatctgttaatatgaaggacaaagtcaaaagcagcagtggatagcaggaagggtagagactaatatgtttgggaccaaaaccatctaagttagagatttccagatcacagaggggctgggcattctctggagcagtcattggttggtgctttattgtaatcattttgcgccaatccccaacaattaggaactggaccctgggaataagctgagggtgctgaactgttggggaagggtgactgtagccacatggaagataaaatatgggtttttctgcaaaatttccatctgagggtttttacatttaatatttttttaagacagtttaaagagcaaacgttttttaagtgtattctagttgcaaagtatgcacacatatcttgaatggctttatttttattgtgtaaaactgttgaacacatgactgtgatgcacaaattctttacgtgtaaggagtctatgcattttacagtaacttattttatgatcgggtgatgagacagttatactttcaactgccattatttttattaagtgctttcattttctttacagttattataaaattgtatttattttatacagatgggttttcattttcctgatgctgtaatgtttacttcagcttgttgacctttctttgtgttatctgcatgttgtaacgtgtgataagaatgaatgtaaaggctgtggcaactgtaattaatttttgtaaagggctggtcacacgtggatctggtttatgaatgcatttgggatgattttggtaaccagatcaccttttcagaaatttagatgtgaacaccaaaagaagcattttctcaacaaaaattaatagctggttctattttttttaaacctagaaaaaataaagttgatttttttc

SEQ ID NO: 32596 - DNA, 2298 bp, Homo Sapiens
gcgcaatgcgagcggctggcgtaggcttggtggactgtcactgccacctctccgccccggactttgaccgcgatttggatgatgtgttggagaaagccaagaaggccaatgttgtggcccttgtggcagttgccgaacattcaggagaatttgaaaagattatgcaactttcagaaaggtataatgggtttgtcctgccatgcttgggtgttcatccagttcaaggacttccaccagaagaccaaagaagtgtcacactaaaggatttggatgtagctttgcccattattgagaattataaggatcggttgttggcaattggagaggttggactagatttctcccccagatttgctggcactggtgaacagaaggaagagcaaagacaagtcctaatcagacagatccagttagccaaaagactaaatttgcctgtaaatgtgcactcacgctctgctggaagacctaccatcaaccttttacaagagcaaggtgctgagaaggtactgctgcatgcatttgatggtcggccatctgtagccatggaaggagtaagagctgggtacttcttctcaattcccccttctatcataagaagtggacagaagcagaaacttgtgaaacaattgcctttaacttctatatgcttagaaacagattcacctgcactaggaccagaaaaacaggtacggaatgagccctggaacatttctatttcagcagaatatattgcccaggtgaaagggatctcagtggaagaagttatagaagtgacgacacagaatgcattaaaactgtttcctaagctccgacacttgctccagaaatagcttcaaaaccatccattacaaaatcgaatcaactgcagggggcagcatttgaaaaatagaaatgttctgatgaagaatctgaactgaagaagctgttttatagggttatagaagattgtaattgtagagaaatatttctcttagaaataaaactgggcttggatcctgaaaccctgggttctgattctagccttgtgctgcttttcaattagccgagttctggcaggatattgggaaaatactgctacttcttacattgcccttttatatagaaccaccacctgaactgaaaccattgctactgggaagggtggctcccacaggaagagtataagcactactgtgatgaggatggagtaagctaaagtatacttttttttttttttgatggagtttcgctgttgttgcccaggctggagtgcaatggcacgatcttggctcactgcaacctccacttcccaggttctagcgagtctcctccctcagcctcccaagtagctgggattacaggcatgtgccaccatgcccagctaattttgtatttttagtagagacagggtttctccatgttggtcaggctggtctcgaactcccgacctcaggtgatccgcccgcctcggcctcccaaagtgctgggattacaggcatgagccactgcgccagcctaaagtgtgttcttaccacctatttttcttcccataggagttagccagtgaagggagaatgtctggttttctatgctgtcagaaatctcttttctaggtttgtaaaattgaacttttagtacttcgaattatttctctttaagataaaaatgcatacgatttttacactgatcttagatttttgacttatgaggccagtggtttaaacaatcattattgaataccaagcccaaaagtttagttaatacaccaattgtaagttctggtctgaattttgtcaacatatttagaatgtaaatggcattattaaaaatgtatctgatttctctgtgaacagtaatatttcatatttttaagtttaaaaatgttagtgtaagccaggcacagtggcattcacctgtagtgccaaccactcaggaggctgagatgggagaccttttaagcctgagtttgagtcaggcctgggcaacatagatgtgagcacctatctctaaaaatgtaaataaataaaaatctcaaaaaaattaaaaatctcaagtgtaaaaacagttctgtagatagatggtagtgatggtagcacatcaatgtgaaggtatttaatgccactgaactgtacacttataacgaattaggataaattttatgttatgtgtatttactacaattttttaaaaatcgtatatgtagtttaacaggtgtggtcaatatcaaaacttaggtatttaatcttgttaaattatataagcagaaaatgctggaaaaagtacctgtcatagaaaaaaataaacttcctaaatcaaagt

SEQ ID NO: 32597 - DNA, 5613 bp, Homo Sapiens
ggacgcgggacccgtacagcggcctccgccgcaccgggacagcagccgccgccgctgccgccgtcctcccctgtctacccggagctgtctcgagctgagccccctaccgggccggatcccgagataaagcctagccatggctgctgtttattctggcatttcccttaagcttaaaagcaagacaacttcctgggaagataaactaaaactagctcactttgcttggatttctcaccagtgctttcttccaaataaagaacaagtgttacttgattgggcaagacaatcattggttgcattttataagaaaaagcttgaactgaaggaagatattgttgaaaggctttggatctatatagataacattttacatagcagaaaattgcagaatctcctcaagaatggaaagaccattaatcttcagatttccctagtcaagatcatcaatgagagagtagctgagttctctctttcgggatcccaaagaaacatctgtgctgtccttcgatgttgccagggcatcctgtcgacacctgccctggctgtcatctacacggccaaacaggagctgatggtggccttgctgagccagctttgctggtcggcctgcaggcagcccgaaggagctgtggtagcccagttgtttgaggtcattcacctggcccttggccattatctcttgatcctgcagcagcaggtcaacccaagacgtgcctttggggatgtgactgctcacctgctccagccgtgcctggtcctgaggcacttactctctgggggcacatggacgcaggctggccagggccagctgaggcaggtgctgagccgggacatcaggagtcagattgaggccatgttccgaggagggatttttcagcctgagctactgtcatcctacaaggaggggctcttggaccagcagcaaggggatgtgaagacgggagccatgaagaaccttctggctcccatggacaccgtgcttaacaggctggttgatgctggctactgtgcagcatcccttcatacctctgttgtggccaactcagtggccttgctgtataagctctttctagattcttactttaaggagggaaaccagcttctctgcttccaggttctccccaggttgtttggctgcttgaagatttcacacctgcaggaggagcagagcaaagccctgtccacatcagattggaccacagagcttttggttgtggaacagctactaaactcagtggccaacaacaatatctacaacatcgctgccgacagaattcggcacgaagaggctcagttccgcttttaccgccacgtggctgagctgctgataaaccatgcacaagcacccataccggcctggttccgctgtctgaagactttgatatctctgaatcatttgattttggagccagacctggatgacctgctggcttcagcgtggatcgatgccgaggtaacagagtttcgaaccaaaaaagcccaggaggcgcttattcgtactgtcttccagacttatgccaaactccgacaagtgccacggttgtttgaagaggttttgggggtgatctgtcgtccagctgctgaggcactgaggcagcctgtgctggcctcgggcccctccacggtactctctgcatgcctcctggagctgcctccaagtcagatcctggacacgtggtcccttgtgctggagaagttccagtctttagtcttgccctatttgcagagtgatgccgacatggccctgaaatcactgtcactgagcttgctgctgcactgcatcatgttcaacatgaggagcctggacagcagcacgcctctgcccattgtcagacggacacagtgcatgatggagaggatgatgagggagctcgtgcagcccctgctggcccttctcccggacaccccaggcccagagccagagctgtggctgcagaaggtcagtgactctgtgctcctgctctcttacacttgggcccaggtggacgctatgttcagtttgaactgtagccagtatcactctatgtctgggccccttataggtgttgctctggagatctcgaacctcccttcgttgctcccaggtgtaaaaacacagcattggaagaagatagagaagtttacagctcagttcagctctcttggtacatattgcttagaacagctgtacctgcagaaaatgaaaaggactttaatgcaaactagtttccggtctgaaggagccatccaaagtttgaggtgcgatgctgcctttattattggttccggcagaaaaagcttgaatcagagaacgacggcttcctgggatggccaagttgggatggtgagtggactcacataccctgtagcacactggcacttgattgtgtcaaatctcacaattttaatatcctatctgtgtccagatgatgtgggatacctggccagtgtcctgctgagaactttacccatgggcaaagcccaggaagtctcaatagatgaagaggcatacatcacactggaaaaaatatccaaagccttccttcatagccctctctttccagagatgcagtcccttcattctgctttcttaacgtgcgtaaccacaagttgctccagcattctgtgttctggtgcccagcgtgactcaggtcttgtcagtcagcagcttccctggctttttgaaaaggaccacatggttgtgggtcattgggaaaacagatttgcaaaagctggacccgaaggtatagaacctagaggagaaattgcccagaacttactgtccctggtcaagagtgacttccctatccagctggagggagagcagttggaaagcatcctggggcttttggaagtgatttctgccttacagctggacagcctcttgccaccctatcatgtgcattattttcttgtgttactgtccatggccgtcaccaaactaggatgctcttgctcctcctcactggctctcaagttcttgacgacttgctaccaacttcttggttacttgcaaaaggggaaaagtgctcgctctgtgttcaagatcatgtatggtagtgatatttttgaggttgtactgacctcattgttcagagctagtagtaggttccttattgagatggatgatcccgcttggctggaattcctccaagtgatagggacgttcttagaggagctaatgcagatgctcatccaaatgaagctgagcttggtgctcaattttagaaaaatcaccgcattcctctctagttccaaaccatacacggaggcagcttcaagcaaacaattagaaaatcagaacccccagggcaggcagctccttctggtgtctttaaccaggttgtgccatgtcctgggacctttcctcaaagagcagaagctgggccaagaggccccagcagcactgtctgagctgctgcagcaggttgtgctgcagacaggagctgtgctgcagctctgctcagtgccgggggcccggggctggcgccttccctcggtcctcatctcatccgtcagcacgctcttggaagccgacctgggtcagcactgcagggatggaggggccgacatttcccaaggaagcgacaggacgctgctctcccatgttgccctctaccagggtgtttactctcagatactgttggagttgccagctctcgcgggacatgatcagtcttttcaggcagccttgcagtttttgactctgttctttttggccccagaactgcatcccaaaaaggactccgtgtttacctccatgtttcattctgtgagaagagttcttgcagatcctgaaattcctgttcaggtcactcaggatattgagcctcatttgggagccttgttcacccaaatgttagaggttgggacgacagaggacttgaggctggtgatgcagtgtattctccagggactggatgtcagtaacatgtggaaagcagatgtgcaggctgttgtgtcagctgttacactgctgaggctgctactgaactgcccactcagtggagagaaagcaagtctgttgtggcgtgcgtgtccccagatagtcacagctttaacactcttaaaccgagaagcttctcaggagcagcctgtgtccctcacagtggtcgggcctgtcttagatgtcctggctgcactgctgcggcagggggaggaggccatcggcaacccccaccacgtcagcctggccttcagcatccttctcactgtccctttggaccatctgaagccgctggagtatggaagcgtcttcccgaggctgcacaacgtgctcttctcaatcctgcagtgtcaccctaaggtaatgctgaaagccatcccttctttcttgaactctttcaatagattggtgttttcagttatgcgggaagggcggcagaaggacaaaggaagcatagatgacctgcctacggtcctaaagtgtgcacgcctggttgaaagaatgtacagccacatcgccgcacgagctgaggagtttgctgtgttttccccatttatggtggcccagtacgtgttggaggtacagaaggtgaccttatatccagctgtgaaaagtctgctgcaggagggcatttacctcatcctggacctctgcatcgagcctgacgtccagttcctgcgggcctcgctgcagccgggaatgagagacatctttaaggagctctataatgactatctcaagtaccacaaggccaaacatgaaggagagaaaagatatacggcctaaggctatgggacagaagtgccgccagtgacactgtccagaggctttggctgcatggtctgaaagagctggagaatgaaagacttaagatgttctaattcgtagtattggtatacatagaaaatcctttggggtttatgtagtatattttgatgtattttacatcgtgtttttcttactattttttaatacatagttttatgcagtaagtattgcaatagaatcctgaaaattgaccctgggatgagattaattcaatagaaaaattgctgactcttgggacctttctgtgtttggttctcgtcttggctcagtggtttggtgttccctcgtctgcactggaaactacataaaacttggctttttactttgggtacatgggcgtataattcagccctgtttaaatatacttgcctttcaaattcttcaagtaacatgggaagtattcttgaaatgtcacattttctgccttccctctaagtatgctttctgaagaagtcagggaaagttagagtctgtggcctgaggtgtctgctctgggtggcgatagtgggcacctcaggcaggtcggtgacgtttagcacaggtgccagggctcctgcctgctcctcctgtgttagctctgtgaagttcatttaggaatttttttttcctatgcagtttaagaaataatcctaattgttttttcttattacctaagcaatatatttttattatagcaacctcagaaaagaaaaataaaaggataatttaaaaaactcattcatagtctcagttacccagataacctcggttgtcaccttggagtatcttgttgtagtccctttactatgtgtatgtatatagatgtgcatataaatatatatagtagctaaattggatcataaatgcatttttttaaagtt

SEQ ID NO: 32598 - DNA, 6550 bp, Homo Sapiens
gagggttgggctccttggtaccatgtgggaagcgctgtgaagagttgttgccttccaagatatacccaaattcccagttccagcccgtgtcattaaaactccgctggcgtgaaagatgacgtccttagcccagcagctgcaacgactcgccctccctcaaagtgatgccagcctcttatctagagatgaagttgcttctttgttatttgaccctaaggaagcggccacaatcgacagggacaccgccttcgccattggatgtactggcctggaagagttgcttggaattgatccttcctttgagcagtttgaagcaccgttgttcagtcagctagcaaaaaccttggagcgaagtgttcagaccaaagcagtaaacaaacagttggatgaaaacatttcattattccttattcacttgtcgccttacttcctgcttaagccagcacagaagtgtctggagtggttgattcacaggttccatatacatctctataatcaagatagcctcattgcttgtgttctgccataccacgagacaagaatatttgtgcgagtcatacagcttctaaaaattaataattcaaagcacagatggttctggttgttgccagttaagcaatctggagtgccgttagctaaaggaactttgattacccactgctacaaagatcttggattcatggatttcatttgcagtttggtgacaaaatctgtgaaggtttttgctgagtacccgggcagctcagctcagttgagggtgctcttggctttctatgcttctaccatagtgtcggcgctggtagctgcagaggacgtatcagacaatatcatcgccaaactatttccctatatccaaaagggattgaaatcatctttaccagattacagagctgcaacatacatgataatatgtcagatttctgtgaaagtgaccatggaaaatacctttgtgaattcattggcatcacagatcatcaaaacattgaccaagattccctctttgatcaaggatgggttaagttgcttgatagtgctcctgcagagacagaagccagagagccttgggaaaaagccattccctcacttatgtaatgttcctgatcttattacaatacttcatgggatttctgaaacttacgatgtcagtcctcttctgcattacatgcttccccatctggtcgtctccatcattcatcatgttacaggagaagaaactgaaggaatggatggtcaaatctacaagagacacttagaagctatacttacaaaaatatcactgaagaacaacttagaccatttgttggctagccttctatttgaagagtatatttcatatagttcacaggaagaaatggattctaataaagtgtctttgcttaatgaacaatttcttccactcattaggcttttagaaagcaaataccccagaacattagatgttgtattagaggaacacttaaaggaaattgcagatctgaaaaaacaagagcttttccatcagtttgtttctctttctacaagtggaggaaagtatcagtttttagcagattctgatacttctttgatgctcagcctgaatcatccacttgctcctgtgagaattctggccatgaatcatttgaaaaagatcatgaaaacatcaaaggagggtgttgatgaatctttcataaaagaagctgttttagcccgattaggtgatgataatatagatgttgttttgtcggctataagtgcttttgagattttcaaagaacacttcagttcagaagtgacgatttcaaatcttctgaatctctttcaaagagcagaactttcaaagaatggagaatggtacgaggtacttaagatagccgctgacatattaattaaagaagagatactgagtgaaaatgatcagttgtcaaatcaggtggttgtatgtttgctgccatttatggttatcaataatgatgatacggaatctgctgagatgaaaattgctatatatttatcaaaatcaggaatctgctccctgcaccctctattaagaggctgggaagaagctcttgaaaatgtaattaaaagcacaaagccaggaaaactaatcggtgtagcaaatcagaagatgattgagttgttggctgataatataaatttaggagatccttcttcaatgttaaagatggtggaggatttaataagcgtgggtgaggaggagtcctttaacctgaagcagaaagtaacgtttcatgtgatcctgtctgtgctcgtctcttgttgttcatctttaaaagaaacccactttccatttgcgataagagtcttcagtttgttgcagaaaaaaataaagaagcttgaaagtgtcattactgcagtggaaatcccctcagaatggcacattgaactgatgttagacagagggatcccagtggagctgtgggcacattatgtagaagagctcaacagcactcagagggtggccgtggaggactcggtttttcttgtattttccttgaaaaaatttatttatgcactgaaagctcctaaatcttttcctaaaggtgatatatggtggaatcctgaacaactgaaagaagacagcagggactatctgcacttgctcattgggctgtttgagatgatgctcaatggtgccgatgctgttcatttcagagttctgatgaaacttttcataaaggtgcatctagaagatgtttttcagttattcaagttctgttctgttttatggacctatggttctagcctttcaaatccactaaactgcagtgtgaaaacagtgctgcagactcaagctctttatgtgggctgtgcaatgctttcttctcagaagacacagtgtaaacaccaactggcatccatatcttctccagtggtgacatctttactcattaacctgggaagccccgtaaaagaagttcgtagggctgccattcagtgtctccaggccctcagtggagtggcatccccgttttatctgataatagatcatttgatttctaaagcagaggagatcacttcagatgctgcctatgttattcaggatttggctactttatttgaggaactacagagagaaaagaaactgaaatctcatcagaagttgtctgaaactttgaaaaacttacttagttgtgtgtatagttgcccatcttatatagcaaaagatttgatgaaagtacttcagggagtcaacggtgagatggtgctttctcagctattgcctatggctgaacaactgctagaaaagatccagaaggagcccacagctgtgctgaaagatgaggccatggttctgcatctcactctgggaaagtataatgaattttcagtttcccttttaaatgaggatccgaagagtctagatatatttataaaagctgtgcacacaacaaaggaactttacgcgggaatgccaaccattcagatcacagcccttgaaaagattacaaaaccattttttgcagccatatcagatgaaaaagttcagcagaagcttttaagaatgttgtttgatttattggtgaactgtaaaaactcacattgtgctcagactgtcagcagtgtttttaaagggatttccgttaatgctgaacaagtccgaatagaactggagccaccagataaagctaaacccttgggcacagttcagcaaaaaagaaggcaaaaaatgcagcagaaaaaatcacaagatctagaatctgttcaggaagttggaggttcttactggcaaagagtaactctcatcctggaattactgcagcacaaaaagaagctcagaagtcctcagatattggtgccaactctttttaacttgctatcaagatgtttagaacccttgccacaagagcagggaaatatggaatacaccaaacaattaattcttagttgtctgctcaacatctgccaaaaactatctccagatggtggcaaaatacccaaagatattttagatgaggagaagttcaacgtggagttgatagttcagtgcatccgcctttcggagatgccgcagacccatcaccatgcccttttacttttgggcactgttgctggaatatttccggataaagttttacacaatatcatgtctatttttacatttatgggagccaatgtcatgcgcctagatgatacttacagttttcaagttattaacaagacagtgaaaatggttattcccgcacttattcagtctgatagtggagattctatagaagtttcaagaaacgttgaagagattgtggtaaaaatcattagtgtatttgtggatgcgctgccacacgtcccggagcacaggcgcctgcccatccttgttcaacttgttgatacactgggtgcagagaaattcctctggattctcctcatcttgctttttgaacagtatgtcacaaaaacagtgctggcggctgcctatggcgaaaaggatgctattttagaagcagacactgaattttggttttcagtctgttgtgagtttagtgtccagcatcagatacaaagcttgatgaatatcctccagtacttactaaagctgccagaggaaaaagaagaaaccattcccaaagcagtgtcatttaataagagtgaatcacaagaagaaatgctacaggtttttaatgtagagactcacactagcaagcaactgcggcattttaaatttttgtcagtgtccttcatgtctcagctcctgtcttccaataattttctgaaaaaggtagttgagagtggtggtcctgagattttaaaaggccttgaagagaggttgctggagaccgttctcggctatatcagtgcagttgcacagtccatggaaaggaacgcagacaaactcaccgtgaagttctggcgcgcgctccttagtaaagcttacgacctgttagataaggtcaatgccttgctgcccacagagacattcattcctgtgatcagagggctggtgggcaatcccctgccatctgttcgccgcaaagcgctggaccttttgaataacaagctgcagcaaaatatatcctggaagaagacaatagttacccgtttcctaaaactggttccagaccttttggccattgtgcagcgtaagaaaaaggaaggggaagaagaacaagcaatcaacagacagacagcattgtataccttaaagcttttatgcaagaattttggtgcagaaaatccagatccttttgtcccagtgctgaacactgctgtgaaactgattgctccagagagaaaggaggagaagaatgtcctgggaagcgcgctgctgtgcatagcagaggtgacctccaccctggaggcgctggccatcccccagcttcccagcctgatgccatcgttgctgacaacaatgaagaacaccagcgagctggtctccagcgaggtctacctgctcagtgccttggctgctctgcagaaggttgtggagactctcccgcacttcatcagcccctatctggaaggcattctctcccaggtgattcatctggagaaaatcactagtgaaatgggttctgcgtcacaggctaatatccgtctcacatctcttaaaaagacactggctaccacacttgcaccccgagtcctgttgcccgccatcaaaaaaacttacaagcagattgagaagaactggaagaatcacatgggtccgtttatgagcatcttgcaagagcatattggggtgatgaagaaggaagagctcacctcccatcagtctcagctaaccgcctttttcctggaagccctggacttccgagcccagcactctgagaacgatctggaggaagttggaaaaacggaaaattgtatcattgactgtctagtagccatggttgtcaaactttccgaggtcacattcaggcccctgttcttcaagctgtttgattgggctaaaacagaagatgccccaaaggacaggttgttgacattttacaacttggcagattgcattgctgaaaagctgaaagggctttttactctgtttgccggccacttagtgaagccttttgctgacaccttgaaccaggtgaacatctccaaaacagatgaagcattttttgactctgaaaatgaccctgaaaagtgctgcttgctgttgcagtttattttgaactgtttatacaaaatcttcctttttgatacccagcattttataagtaaagagagagcagaagccttgatgatgcctctggtggatcagctggaaaacaggcttgggggagaagagaaattccaggaacgggtgacaaagcacctgataccatgcatcgcacagttttcggtggccatggcggatgactctctttggaaaccactgaactaccagattctgctaaagacgagagactcctcgcctaaggttcgatttgctgctttgattactgtgttagcactggctgaaaaactaaaggagaattatattgtcttgctaccagaatccattcctttcttagcagagttgatggaagatgaatgtgaagaagtagaacatcagtgccaaaagactattcagcaactggaaactgtcctgggagagccactccagagctatttctaa

SEQ ID NO: 32599 - DNA, 2272 bp, Homo Sapiens
tcagtcggggagtggaaggagatgtggggtgggggtgagaaaatgcttctgcctgttgttcttgaaggatagactatgggtgggcagagagaactgggggcagaaatggaattagatgtgattgggttatgcagtcaactagaggtctccttcccgccctctctccacacagagaggaacctctgctccttagctcttacagcaggactgtggcatctagtcacttcaatactagttcttgctcttcacagaggtagatttttctttaccctacagcactgttgggcatccctcccatcacatgggtctgtgggtgagatatgttatgctgttcctccctcgggaaggttggtattgaggggtgccttgctccagaggcgccagcccagcatctgtggtgagttggctaagatccagagtgacctgctcagagctccccagaggccttcactctttggggcagtctctctagggtcactttctgaatgtaccttctacctaaagtatacaaacacaaagagccagctgagctggttctagtgtgaaagccgtaagtgccacccagcaggcgtttgaaaacaagaaatcattcttctgtggaaggagaatgtgccatctcagctaccctcagtccgccaggcagcccagtctgtgtattcatatgaagttgtgaaaaccatgagtgtgtgccatggccatcgtgtctacacacagccactattgttcctgtgggctagtctccagcaaattaaaacactggcatggcctaggaagggcgttgcgagctcctaaatggaaagcttctctgggggtagggagatgaagagccaagatgctggtgaagcaggtgcagtgaggatccaaggcaaggaattgccctgagggaggtggctgcatatggagaaaggcagttctctgtgggcaaggccagcttgcttcaggctgtagagggaatttggtctgaagcaacagggcatgaactgtgactttgagctgccaggttgtcttcatctcagaactttcctatcctggcactctcgttacctttcttctataccttggcctctgtaactgcagtccaaaacaagttacagctgccttaatccactgagattctctatgaggatgtacagaaaagttttcctgtaataattttgcttatatgctaactcttttcatgttagcaaagaatattctatgaattagaatgttactgtggtagatctaaaggagaatgaacagaaggtgctggaggacctgttaaacaatctctggctattaaaaaacatcaagatgagaattaaaggcatatcctgatatacttgcctgcttgcacatgaggctgggagatcccatgcctgttgaagttaactctagccctgacctctattgatcttttgggaatgagggctgatttgaaggtgctgttgcaggatttcatttagctgctgccagttcaagtgacctgtccccagggctgcagctgtatccacctgattgcagtaggtgagggctaacagcagaatttaaagtggaccctgggctgtggagcaaagtgactatccatttggacttttggataatgtggcaggagtcccagctgtttaatttctagtcacattttccagaaagttgttctaagttgagattactgacaagatttctcaagggcaggaccagatatgtgagagacttctagttcagagctgacccctctaagcctctgacacttaaacacgagtcctgctgtccccagcacacaactgcactgaagccttgttcctctcggctggtgtagagctcatctgcatgttgtgtgcagataccagtagcctccctgcttgaacaggcctctcctaggctaggcaggtgttcagaggcatgaaggtctgggcaggggaagggcgtcttctgaaatgggagttaccaggtttttaaatgctgctattgttttatttaccatttaaggtcttttctattatatctgagtaactagtcagtttttcttacagtgctcatagcagttgtatttgaattgtattttcagtgaaatttgttttacattgccatttaaaattggcctttaacagcttcccaactagcttataagatttttttttttaatgaaaacataacccatgaggctcagatgctgttgaagaaataaatggtatgttgctgctgacagtagtgcttgcctattgtaacagcattggttctgctgtagcctcggtgaccatttaagttgaataaatctgtcattttcacccac

SEQ ID NO: 32600 - DNA, 5292 bp, Homo Sapiens
gaggcaagatgacttctctgccccaagcttggaacagctaaagggaaaaacagtgcaagatgagaacaacaaaggtctacaaactcgtcatccacaagaagggctttgggggcagtgatgatgagctagttgtgaaccccaaagtgttccctcacatcaagcttggagacattgtagagattgcacaccccaacgatgaatacagccctctgcttttgcaggtcaagtctcttaaggaagatttacagaaggaaactatcagtgtggaccagactgtgactcaagtgttccggctgagaccttatcaggatgtctatgttaatgtcgtagaccctaaggatgtgacccttgacctagtggaattaacttttaaggatcagtatattggccgtggggatatgtggcgactaaagaaaagtttggtcagcacatgtgcctatatcacccagaaggtggagtttgctggcatcagagcacaggctggtgaactgtgggttaagaatgagaaggtcatgtgtggctacatcagtgaagataccagggtggtgtttcgttctacgtcggctatggtttacatatttattcagatgagctgtgaaatgtgggattttgatatttatggggatttgtattttgagaaagctgtgaatggtttccttgctgatctatttaccaagtggaaggagaagaactgtagtcatgaagtgacagtggtcctgttttctagaactttctatgatgcaaaatctgttgatgaatttcctgaaataaaccgagcctcaattcgacaggatcacaaggggagattctatgaagacttttacaaagtggtggtgcagaatgagagaagagaagaatggacttcacttctcgtaaccattaaaaaactcttcatccagtatccagtgttggtgcgactggaacaggcagagggctttcctcaaggagataattctacctcagcacaaggaaactacctggaggccatcaatctgtcattcaatgtgtttgataagcactacatcaaccgcaactttgaccgaactgggcagatgtcagtggtgatcacgcccggggtgggtgtctttgaagtggaccgcctactcatgatcctgaccaagcagcggatgatagataatggaattggtgtggatttggtgtgcatgggagagcaaccgttacatgctgtcccattgttcaagctccataatcggagtgctccccgtgattctcgtctgggcgatgactataatatccctcactggataaaccacagtttctacacatccaaaagccagctcttttgtaatagtttcaccccacgaataaaactggcaggaaagaagcccgcctctgagaaagcaaaaaatggccgtgatacatctctcgggagtccaaaagaatctgagaacgcccttcccatccaagtagattatgacgcctatgacgctcaagtgttcaggctgcccggcccatcccgggcccagtgcctcaccacctgcagatctgtgcgagagcgagagagtcacagtcgaaagagtgccagctcctgtgatgtttcatccagcccttccctaccaagccgcacactgcccactgaggaagtgaggagccaggcttctgacgacagctccctaggcaagagtgccaacatcctgatgatcccacacccccacctgcaccagtatgaagtcagcagctccttgggatacaccagcactcgagatgtcctggagaacatgatggagccaccacagcgagactccagtgcaccagggaggtttcacgttggcagtgcagaatccatgctgcatgttcgacctggtggatacacgccccagagagcactgattaaccccttcgctccctctcggatgcccatgaagcttacgtccaacagaaggcgctggatgcacacttttcctgtggggccatccggagaagccatccagatccaccaccagacccgacagaatatggcggagctacaaggcagcgggcagagggatccaactcactcctctgcagagctgctggagttagcatatcatgaagctgctggaaggcacagcaattcccgccagcctggtgacggcatgtccttcttgaacttcagtggaacagaggagctttctgtcggcctgcttagcaacagtggtgcaggtatgaatcctaggacccagaataaggattctctagaggacagtgtttctacctctccagacccaatgccaggcttctgttgcacagttggagtggactggaagtctctcactactccggcgtgcctcccccttaccaccgactacttccctgaccgccagggcctgcagaatgactacacagagggctgttatgatctccttccagaagcagacatcgacaggagggacgaagatggtgtgcagatgacagcccagcaggtatttgaagagtttatttgccaacgtctcatgcagggctaccaaatcatagtgcagcccaagacacagaaacccaatcctgctgtcccgcccccgctgagcagtagcccactctatagccgaggccttgtgtcccgaaaccgccctgaggaggaggaccagtattggctgagtatgggcagaacgttccacaaagtgacgctgaaggataagatgatcacagtgacgcgataccttcccaagtatccttatgaatctgcccagatccactacacctacagcctctgtccttcccactcagactcagagttcgtctcctgctgggtggaattctcccacgaacggctggaggagtacaagtggaattacttagatcagtatatctgttctgccggctctgaagacttcagcttaattgagtccctgaagttctggaggacccgcttcctgctgctgccagcctgtgtcaccgccaccaagcgcatcacggagggggaggcccactgcgacatctatggggacaggccccgtgcagacgaggacgagtggcaactcctggatggttttgtccgctttgtggagggcttgaatcgcattcgcaggcggcatcgctcggatcgcatgatgcggaaagggaccgccatgaaaggcttgcagatgactgggcccatttccacgcattctctggagtcaactgcacccccagtggggaagaagggaacctcagctctctctgccctgttggagatggaggccagtcagaagtgcctgggagaacagcaggcagctgtgcatggtgggaagagctccgcccagtcagccgagagcagcagcgttgccatgactcccacctacatggacagcccacgaaaggtatctgtggaccaaacagccactcctatgttggacggcaccagtttgggcatatgcacaggccaatccatggacagaggcaacagccagacctttgggaactcccagaacataggagaacagggctactcctccacaaactccagtgacagcagctctcagcagctggtggcaagctccttgacctcatcctctaccctgacagagatcctggaagccatgaagcacccctcgacaggagtccagctgctctctgaacagaagggcctctcaccgtactgcttcatcagcgcggaggtggtacactggttggtgaaccacgtggaggggatccagacacaggcgatggccattgacatcatgcagaaaatgctggaagagcagctcatcacacatgcatctggcgaagcctggcggaccttcatctacggcttctatttctacaagatagtaacggacaaagagcccgaccgagtggccatgcagcagcccgccaccacctggcacacagcaggagtggacgacttcgccagcttccagcgcaagtggtttgaggtggcctttgtggcagaagagctcgtgcactctgagattcctgcctttctcctgccctggctgcctagccggccagcctcctatgcaagtaggcacagctcctttagccgaagttttggaggacggagccaggcggcagcacttttagctgccactgtcccagagcagaggactgtgaccctggatgttgacgtgaacaaccgcacagaccggctggagtggtgcagctgttattaccatggcaacttttctctgaatgcagcctttgagatcaagctgcactggatggcggtgaccgcagcagtactcttcgagatggtccaaggttggcatcggaaagccacctcctgtggcttcttgttagtcccagttttggaggggccttttgcactgcccagttacctgtatggcgacccccttcgtgcccagctcttcatcccactcaacatcagctgcttgctcaaggagggcagcgagcacctgtttgatagctttgaacccgaaacgtactgggatcgaatgcacctcttccaggaagccattgcacacaggtttgggtttgtacaagataaatattctgcctctgcttttaacttccctgctgagaacaagcctcagtatatccacgttacaggaacagtgtttctgcagctgccctactccaagcgcaagttctcagggcagcagcggcggcggcggaactccaccagctccaccaaccagaacatgttctgcgaggagcgggtcggctacaactgggcctacaacaccatgctcaccaaaacatggcgctccagcgccacaggggatgaaaagtttgctgatcggctgctgaaggacttcacggacttctgcatcaaccgtgacaaccggctggtcacgttctggacaagttgcctggagaagatgcatgccagtgccccgtgaggccaggctgcacctgtgctgggggaaggtgggtgagccactgccctcaaacccggggcggaggattccaggcaggctctaggagtcaggtgtccgtttgctgctatcagtgagtgggggccattgttttttgtttgtttgtttgtttgtttgtttgtttttggcccccacgacaagtcttctactctagaagaaagactttggaagcagctgctgctgctgccaccactcctgtcagcaagtgctcagagcaggtgggaggcacagattgtccgtgggagggctccagtgtctgggaagagggcaggcggcccccatgaatgtcctcggaagggggtggctcctggtagcatccttttccttcaccatctatgggatattaggggcagaatctgccacttcttgcccaggagtgtgcacagatgtaagataattttgtgaaataatgtaccatagactctcaccaactgtatatacctgtacatatcagaagcaaataaagagctccacgtgc

SEQ ID NO: 32601 - DNA, 5257 bp, Homo Sapiens
gcgcagcgtccggcggcgtcgcgggcggcgggcggcggggccgcgggaggggcgcgggggcagacaaagccgcggtaatgaatggagcgtccgcccgcgccgccgtcgtccgcagccggccgggagccgccccagaggccgggccgaggtaatgcacaagggtcacgtgtatgctctcaagatgatcaggcagatcctgtcctcaggaccagaagcacgtctctgctgcacacattgttgtctacaccatgagtgtttagtagcaggactcttggaaagcagtgatctatgctgtaagaccatgagtcacagattctttttttcagtactatttatgattagccatatttctagaaacatcctgaaagatggaattatgacgaaaaagtgaagataatctacattcgggggcacaaatgagcacttggatcagtgttttatgaacctaagatacagccggagtagttatggtcagtcatggagaataacttgaaaacttgtcccaaagaggacggtgatttcgtttctgataaaataaagtttaaaatagaagaggaagatgatgatggaattcctcctgatagtttggaaagaatggactttaaaagcgagcaggaggacatgaagcagacagacagcggtggggagcgagcgggcctcggtgggacgggttgcagctgcaagcccccggggaagtacttgtctgcagagagtgaggatgactatggcgcgctgttctcccagtacagcagcaccctatacgacgtggccatggaggccgtgacccagagcctcctttccagccggaacatgagctccaggaagaagtctccagcctggaagcatttttttatctctccccgagacagcactaaagcaatatgcatgtactgtgtgaaggagttcagcagaggcaaaaacgagaaagacttgagtaccagttgtctcatgaggcacgtgaggcgcgcacacccgaccgtgctcattcaggaaaatggcagtgtgtctgccgtgtcctcgttcccctctccctcactcctgcttccaccacagcctgcggacgcgggtgacctcagcaccatcctctcacccatcaaacttgtccagaaagtggcgtctaagatcccgtcccccgatcgaataacagaggagtctgtgtctgtagtttcttctgaagaaatctcctctgacatgtccgtttcggagaagtgcggcagagaagaagccctggtggggtcgtctccccacctccctgctctccattacgatgaacctgcagagaacttagcggagaagagccttccacttccaaagagcacctctgggtccaggagaaggtccgctgtctggaagcacttctacctgtcgccactggacaactccaaagctgtctgcattcactgcatgaacgagttcagccgggggaagaatgggaaggacctgggcacgagctgcctcatcaggcacatgtggagggcacaccgcgccatcgtgttgcaggagaacgggggcacgggcatcccgccactgtactccacccctcccactctgctgccttccttgctgccgccggagggggagctcagctctgtgtcctcgtctccagtaaagccggtcagagagtccccttcggcctcctcctcccctgacaggctgactgaggacttgcagtctcacttgaaccctggagatgggctgatggaagacgtggcggccttctcatcttccgatgacataggggaggcctcggcgtcctctcctgagaagcagcaggctgatgggctgagtcctagattgtttgaatctggcgccatcttccagcagaataaaaaggtcatgaaaagactgaagtcggaggtctggcatcacttctccctggcccccatggacagcctcaaggccgagtgtcggtactgcggctgtgccatcagccgggggaagaagggtgatgtgggcaccagctgcctgatgagacatctctaccggcgccatccagaagttgtcgggagccagaagggcttcctgggtgcaagtctggcaaactctccgtatgccactttggcctctgcagaaagttcctcttccaaattgactgacttgccaacagtggtcacaaaaaacaatcaagttatgtttcctgttaatagcaaaaagacctcgaagctgtggaatcatttttctatttgctccgcagactccacaaaagtcgtgtgcttgcactgtggccggaccatcagccgggggaagaagccgactaacttgggtaccagctgtcttctgagacatttacagcggttccatagcaacgtgctgaaaactgaggtctcggagacggctcggccctcctctccggacacccgggtgccgcggggcacagaattatcaggcgcttcctcttttgatgacaccaatgagaagttttacgattctcacccagttgccaaaaaaatcacaagtctcatagctgaaatgattgcacttgacctccagccatattcttttgtagacaacgttggctttaacaggctgcttgaatacttgaaacctcagtactccctccccgccccttcctacttctccaggacagctatcccaggtatgtatgataatgtgaagcagataattatgtcccaccttaaggaagctgagagtggtgtgatccacttcacgtctggaatatggatgagtaaccagacccgtgagtacctgaccctcacggcccactgggtttccttcgagtcgccagcccggccgcgctgtgacgaccaccactgctcggcgctgttggacgtgtcgcaggtggactgcgactacagtggcaacagcattcagaagcagctggagtgctggtgggaagcgtgggtgacctccaccggccttcaggtgggcatcaccgtcaccgacaacgccagcatcgggaagacgctgaacgagggggagcactcgagcgtgcagtgcttcagccatacggtgaacctgatcgtcagcgaggccattaagagccagcggatggtgcagaacctgctgagcctcgcccggaagatctgcgagcgggtgcaccggtcgcccaaggcgaaggagaaactggccgagctgcagagggagtacgcgctgcctcagcatcacctcatccaggacgtcccgtccaagtggagcacttccttccacatgctcgagcggctcattgagcagaaaagggccattaacgagatgtccgtcgagtgtaacttccgagagctgatcagctgcgaccagtgggaggtcatgcagtccgtgtgccgtgcgctaaagcccttcgaggctgcgagccgggagatgagcacgcagatgtccaccctcagccaggtcatccccatggtacacatcctcaacaggaaggtggagatgctcttcgaggagacgatgggcatcgacaccatgctgcgctctctgaaggaggccatggtgagccgcctgtctgccaccctccacgacccgcggtacgtcttcgccacgctgctggatcctcgctacaaggcctccctgtttacggaggaggaggcggagcagtacaaacaggatttaatcagggaactcgaactcatgaattctacctcagaggacgtggctgcctcccacaggtgtgatgctggctccccgtcgaaagactctgccgcagaggagaacctgtggtcacttgtggccaaggtgaagaagaaagacccaagagaaaagctgcctgaagccatggtgcttgcgtatctggaggaggaggtgcttgaacacagctgtgacccgctcacctactggaacctgaagaaggcgtcctggccggggctgtccgcgctggccgtcagatttttgggctgccccccaagcatcgtcccttcagaaaagctgttcaacacacccactgagaacggtagccttggccaatccaggctcatgatggaacattttgaaaaacttatctttttgaaagtgaatcttcccttaatatactttcagtattgaaactcacgacggcaccactaggccagaggcgtggctgccccagcgttagcagcctgtaccaggtctatgacccgctctgcccacggctgtgtacgacatcagaccaggcactctcagggccgctctccagctcaccacagtgtctccacgtgccttaccccttctccttcaggccaagtttcgcggggtgttttattaagacgtccactagaaatagcttgtcctgtcaactatgaaatatggtgactagattttaattcataaccgtaaagttttttaaagttttgggttagtaatttgttttactagaatgacaaagaagatgtaaaccattttattctgtaggctttttactcaattatgtacaaaccacaaatcaggtactgtattttagtgaagcattgctttaattgcaacagaatagcttttgtggctatcaaatgaaatctgtaaataggaggtggagggcaagccatcctgactgagcagtttttaaccgcaggttctaaagtgtcccgcggagtacagataatattctggaaggtaactgtttactacgacagagacgtggcatttggaaacgaaacttagatgtttcatggagcttattttgagaactttcccatttcaggtttctgcattcaggctttacatggtcagttaactcagagataccccagctgtttatcatcagctcctctgaaatgtgatccctttgtaactgtgctcatcacttcgccagtgcgttcaatgacacgctgatggcaggtggtccctgctgaaacccccacgcctccgcttcagcatctccacgctctgaagctgtctttcaaaatgtgtgcactgacccccttgtttgatcaaatttgtgtaaaatttttttagaagagatggcttattaacagggaagaagcttgttatattccagttgtaagaatagccttagtgtttagatttttttatgatagggaagatgcggccatcactgggatattttcaaatcccaaggacatcagagtgaagtgtcagttgtcagatgattttaaaagttatgtcttcagagaaaaaaagattcattttctcattttaaaccaattaaatattctgagtgagactaatcactcatttgcctacgaccttttagaaaagttgttttgttgaaatactgtacgtacgcttaatctaaatttgcattgactatgttttagtgtatttataaatggtgaactcagtttctgaaattaaacttcttatttgcaatttt

SEQ ID NO: 32602 - DNA, 4319 bp, Homo Sapiens
tgagaagaagcgcttccggcggtcttagatcactaatcaacaaaccagctttcggggtctgacgcgatccttgcctcaggcctctcgaggtccagacagccgcccagcccgctctgcgacgcagcagtgaatagtgtggtacctccttgtctcggttcaggtccagacctccccgtcttccggctgccctgaacgtcaggcgacctcaggaccctgtgattggcgcctgcgccggcggaccgtgaccgaggaaacccctggagggacttgggcattccttgggctccgtgcctgttcttcgtgctcctttcgggcaaggatctcacattatcagtctttgaccgacacagaatgcctggcatttgataaatgtttgttgaacttgaagagacatatggacaatgaatctgcaaagatactggggagagataccaatatcatcaagccagaccaacagaagttccttcgatttgctcccacgggagttccgtctggtggaagtccatgacccacccctgcaccaaccctcagccaacaagccgaagccccccactatgctggacatcccctcagagccatgtagtctcaccatccatacgattcagttgattcagcacaaccgacgtcttcgcaaccttattgccacagctcaggcccagaatcagcagcagacagaaggtgtaaaaactgaagagagtgaacctcttccctcgtgccctgggtcacctcctctccctgatgacctcctgcctttagattgtaagaatcccaatgcaccattccagatccggcacagtgacccagagagtgacttttatcgtgggaaaggggaacctgtgactgaactcagctggcactcctgtcggcagctcctctaccaggcagtggccacaatcctggcccacgcgggctttgactgtgctaatgagagtgtcctggagaccctaactgatgtggcacatgagtattgccttaagtttaccaagttgctgcgttttgctgtggaccgggaggcccggctgggacagactccttttcctgatgtgatggagcaggtattccatgaagtgggtattggcagtgtgctctccctccagaagttctggcagcaccgcatcaaggactatcacagttacatgctacagattagtaagcaactctctgaagaatatgaaaggattgtcaatcctgagaaggccacagaggacgctaaacctgtgaagatcaaggaggaacctgtgagcgacatcacttttcctgtcagtgaggagctggaggctgaccttgcttctggagaccagtcactgcctatgggagtgcttggggctcagagcgaacgcttcccatctaacctggaggttgaagcttcaccacaggcttcaagtgcagaggtaaatgcttctcctctttggaatctggcccatgtgaaaatggagcctcaagaaagtgaagaaggcaatgtctctgggcatggtgtgctgggcagtgatgtcttcgaggagcctatgtcaggcatgagtgaagctgggattcctcagagccctgatgactcagatagcagctatggttcccactccactgacagcctcatggggtcctcccctgttttcaaccagcgctgcaagaagaggatgaggaaaatataaaaggaaaagagggagatgttttgtccagacctactagacccaacagaaaaggtttttgtattagaatctgtttccttaaaaattgatttgactcctgttcttaaacacaagtggtttttcctaattccagaggaactggacgtcaccaaacaaggttgcattttacttttgcatccagtttttatagttttccacaaccaagccacccttcacagataaaatatgatgctggcatggcaatcagaccaaagcactgtccccaattgttgtcttaactatgactagacatgttatacagccatttatcttgtacaactgagaagaatcatactttgacctaccttgtagagatgtgaggatttagatgtttgctaacttcaaaactgtgcttgaatagactaataatatatgctcatatcagatgtcagttttcatttaacttgattcatttttggctcaggtcattgggaacccattactaatacctaacaggaaatagctaaacacaacacaccttatctattagtcaccttcttaaaactgtttttgctacttttgaagtgtcttatttataagatcagaggtctgacaccttttttgcttagacagctctctatctcatccatttattttcttctctagacttactccatctctcctcatccttttgcctttgttatttctgctcggactcacatactttcaccatatacatattttcaattgtttctttccttttctcctttgtgagcaaagcaaacaagtactgtccaaggacagccttgtgcatatttcatttgttgcatttgcttggtcatcagaggacagcagtccattaagcacactttgctgcttctactgtaaaggcagcctttaaaacatagcaatatgcacctttcaactttacatcatgtcctgaacaacatcactgtggttactcatccatcagactatctgtatatataagtactgaatcagtatttattaagtaaatgatgtagcactgtagtgattaggaatcattagcaaatgtgttgcttcatgccttggtgatggatgccagcatgttaaactgctgaagtttgattttctgatgcaaaatatatcttgtaaaatttagaccactcctttaatgcagaccaaaataaggcacagctttaattcattattgaatgccttaaatgtcccaggtattgagaataaatgaatatgatacaaatgaggttatagtttaacatataattttaaatttgccaattgtaactctttagcacatttctctaaaccctttctgtcacagtcttttttttaatttatttatttatttatttatttttgagatggagtcttgctctgtcacccaggctggagtgcaatggtgcaatttcgactcactgcaacctctgcctcccaggttcaagcgattctcctgcctcagccacctgagtagctgggattacacgcacatgccaccacacccagctaatttttgcatttttagtagagatgaggtttcaccgtgttggccaggctggtctcaaaactcctgacctcaagtgatctgcccgcctcgggctcccaaagtgctgggattacaggcgtgagccactgcacctggcctctgttgcagtcttatcttcattttcctttgtttataatgaaagtggcgattaggcagttagtttccataaagtggccgtatgggaatttagttcattcatccagcaaacattgagtaccaattatttgctaggtcctgtgcaaggaatacaaaaatgattaagacttcttccttacccttttggagcttgaagcataaggaagacaagttattctgtaaggaagataaagcattcaaaagtactacagagaaaaaccaagtatgcttgagttttgcgaatgttctcctcttaaagaatagcttcaaattttgagaccagtggttcccactaagtatagaacattaaaattaatactttataataaaacacttttattgctgcagaatgttaaactgcataacaggcaccagatggtcaagacgagggaaatatgagaaggcaaatgatgtgaggattagtatcttgagattcacctggtctggaattatgtcataggctactatgcatcagaatcacatggagggctttctaaaacagactgctcagcccacccccagggtttctgagttcataggttataagaggtaagttgaacaattccccagatgatgctgatgctcctggtccacaatgtgagaaccactaagttggagtactgactcatagagataaaattctttgaaagaaatgtactgttttaagatactgtaaaatgtggaggcagggcaaacgtttataagggctgttatgtatgaaatgtgcctctgacccaaatccacggactttgcgaaaatcaccaaggagactttgcattaagttcagagtacaatacaaactgggcctagctctgtatttagtcagtatgtgcacgtgggaaactttagtaaaatatcacctccttattgagacaagtttggacatctggccttaagcctctgttgaacaggagaagtgaagctgtttgcaattatataattttctaatttgaaatcatgacaagcagtcttagaacaaagttaaaattaaaaagtctttatccaagtcaccaatg

SEQ ID NO: 32603 - DNA, 6900 bp, Homo Sapiens
atggcggatcggacggcgccccgctgccagctccggctggagtgggtgtacgggtaccggggtcaccagtgccgcaacaacctgtactacacggcaggcaaggaggtggtctactttgtggctggggtcggggtggtttacaacacccgcgagcacagccaaaaattcttcctgggacacaacgacgacattatcagccttgccttacacccagacaaaactctcgttgcaactggccaagtcgggaaggagccatatatatgcatatgggattcctataatgtccagactgtgtctcttcttaaagatgtccatacacatggagttgcctgcctggcttttgactcagatggacagcgtttagcctctgtggggttggatgccaaaaacacagtctgcatttgggactggaggaagggaaaacttctggcgtcagccaccggccattctgacaggatttttgatatttcctgggatccatatcagccaaacagagtggttagctgtggagtaaaacacataaagttttggacactgtgtggaaatgccctgactgcaaaaagagggatatttggcaaaacaggggatcttcagaccatcctttgccttgcatgtgccaaagaagacatcacctactctggtgctttaaatggtgacatctatgtctggaaagggctcaatttagtccgcaccattcaaggagcacatagtgtaagtattaccttgtggaaatctgtgggtgacctaccaaataaggctggaatctttagcatgtatgcttgtgaagaaggctttgccactggtgggcgagatgggtgtatacgactgtgggacactgatttcaaaccaataaccaaaattgatctcagggagacagaacaaggatacaaaggtgtggtactgatcacatcagccccacagccaactcccatctacagagttaggacagtcagcgacgccctccgttatacatcagtctcagattcccgccccatccttaccaagatcaaagcacatctggctggcctctctatccggagcgtgtgctggaaagcagaccgccttctagcagggacccaggacagtgagatatttgaagtgattgtgcgagagcgagacaagccgatgttgatcctacagggccactgcgagggtgagctctgggctctggccctgcaccccaagaagcctctggctgtgacaggcagcgatgaccgctctgtcaggctgtggagcctggctgatcatgccttgatcgcccgctgtaacatggaagaggcggttcgcagtgtagctttcagccccgacggatctcagctggccctgggcatgaaggacggctctttcattgttctccgagtcaggcacgtatcaagcttaacagtcactcgtttcttaaaagatatgacagaagtagttcacatcaaagatcgaaaagaagtcattcatgaaatgaaattttctccagatggttcttaccttgcagtgggatccaatgatggcccagtagatgtctatgctgttgcccagaggtataagaaaattggagaatgcagcaagtcccttagtttcatcacgcatattgactggtccttggatagtaaatacttacaaactaatgacggtgcaggagaacgattgttctacagaatgccatctgggaagcctttaacaagtaaagaagaaattaaagggattccttgggcctcctggacatgcgtgaaaggccctgaagtgagtggaatttggcccaaatacactgaggttactgacatcaactcagtggatgcgaattacaacagctcagtgctggtgtctggagatgattttggactggttaaattgtttaaatttccttgtctcaagagaggagccaaatttagaaagtatgtgggccattctgcacatgtcacaaatgtccgctggtcccatgactttcagtgggtgttgagcacaggaggggctgatcactcagttttccagtggaggtttattccagaaggtgtcagcaacggcatgctggaaactgcaccccaagaaggtggagctgattcctacagtgaagaatctgattcagatttatctgatgtgcccgaactggactctgatattgagcaagaagctcaaatcaattatgatcgccaggtcgcacctaaaactttaaaatatattttgaagaaaaatgtgcaagtttacaaagaagatctacctcagctaaagcaacaaagtaaagagaaaaaccacgcagtgcccttcctcaaacgagaaaaggctcctgaggacagcttgaaactccagttcatacacggttatagaggctacgactgtagaaacaatctgttctacacacaagctggagaagtagtctaccacattgctgcagttgctgtcgtgtataatcggcagcagcactcccagaggctgtacctggggcacgatgacgacattctcagcctgaccatccatccagtgaaggactatgtggctactgggcaggttggaagagatgctgctattcatgtgtgggacacacaaactctaaaatgtttgtcgctgttgaaaggacaacatcagagaggagtgtgtgcacttgatttttcagccgatggaaaatgtctggtgtcggttggtttagacgattttcacagtattgtattttgggactggaaaaagggagaaaagatagccacaacaagaggacataaagataagatatttgtggtaaagtgtaacccacaccatgttgacaaactggttacagttgggataaaacacatcaaattctggcaacaagcaggtgggggcttcacttctaaaagaggaacttttggaagcgttggaaaattggaaacaatgatgtgtgtttcttacggacgaatggaagatctagtgttctcaggagcagctactggagatatttttatttggaaagacattctactactgaagacagtgaaagctcatgatgggcctgtgtttgctatgtatgcactggataagggctttgtaacaggtggaaaggacggcatcgtggagctctgggatgatatgtttgaaagatgtttgaagacttatgccattaaaagatcagcattgtcgactagctcaaaaggcttgcttttggaagataacccttcaattcgtgccatcactttgggacatggacatatcctggtgggaacaaaaaatggagagattctggaaattgataagagtggcccaatgacactgcttgttcaggggcacatggaaggagaagtgtgggggttggcagctcaccctctcctgcccatctgtgcaacagtgagcgatgataaaacacttcgcatctgggaactatctgcccagcaccgtatgctggcagtacggaaactcaaaaaaggtggaagatgctgtgccttttcccctgatgggaaagccttagcggttggcttgaacgatgggagtttcctggtggtaaatgctgacactgttgaagacatggtctctttccatcacagaaaagaaatgatctctgatattaagttttcaaaagatacgggaaaataccttgccgtggcatcccatgataactttgtggatatttacaacgtacttacaagcaaaagggttggcatctgtaaaggtgcttctagttatattacacacattgactgggactctagaggaaaattattgcaagtgaattcaggtgccagagaacaacttttttttgaagctccaagaggcaaacggcatataataagaccttcagagatcgagaagatagagtgggacacatggacctgtgtcctggggcccacctgtgagggaatctggccagcacatagcgatataactgacgtaaatgctgccagtcttaccaaagactgttcccttttagccaccggagatgattttggtttcgttaagcttttttcatatcctgtcaagggacagcacgcaagattcaagaagtatgtggggcacagtgcacatgtcactaacgtgaggtggctgcacaatgactctgtgctgctcacggtgggcggcgccgacacagccctgatgatctggaccagggagtttgtggggacccaggagagcaagctggtggacagcgaggagtcagacaccgacgtggaagaggatggaggctatgacagcgatgttgctagagaaaaggccattgactacaccaccaagatttatgctgtgagcatcagggaaatggaaggcaccaagccacaccagcagctgaaggaagtttccgtggaagaaagaccacccgttagccgagcagctccccagcctgagaaactgcagaagaacaatatcaccaaaaaaaagaaactggttgaggagctggctctagaccacgtgtttggctacagaggtttcgactgtcgaaataacctgcattaccttaatgatggcgctgacatcatcttccacacagcagcggctggcatcgttcagaacctctccacaggccctagagagaaggcggccatgttgacaccagcctctgtaaccgacagccatggagaaaagcaagagacagggtggagccagagcttctatctggagcacacagatgacatcctctgtctcacagtgaaccagcaccccaagtacagaaacgtggtggccaccagccagatagggacaacaccttccatccacatatgggacgccatgaccaaacacaccctctccatgctgcggtgcttccactccaagggggtgaattacatcaacttcagtgcaactggaaagctcctggtgtcggtgggagtggaccctgagcacaccatcactgtctggcgatggcaggaaggtaaaccagcactgggctttctgtccctccagggtgtctgcctgtgggtgtcgagcctgtgggctcgaacccagatctgcctcactccgaagcctgccgtaggcactgactgctgctgggcaagtggaaaacagggcactggggatcctggtatagctgccccactgatgccagtgcatcccagggtcccagggccaggaggaggctggccagggactccagggcccattagtgaaggggctctgaggaggttccccgatgttggcagccctcctcctcggaaggcagcagcctccccgacatctgtcttagccaccttcctacccaagggtgccaaggttgccagccgagggggtcacctggagcgcatatttgtggtggaatttcgccccgactcagacacgcagtttgtatctgtcggggtcaaacatatgaagttctggaccctggcaggcagcgccttgctttacaagaaaggggtcatcgggtccctgggagctgccaaaatgcagacgatgctctccgtggccttcggtgctaacaatctcactttcacgggtgccatcaatggagatgtctacgtctggaaggaccacttcctcatccggctggtggccaaggctcacacaggccccgtgttcacaatgtacacaacccttcgggatggactcatagtgaccggcggaaaagagaggccgaccaaagaaggaggtgctgtaaaattgtgggaccaggagatgaagcgctgccgggcctttcagctggagaccgggcagctggtggagtgtgtgcgctccgtgtgccgtggaaaagtgagcacagccagctcccctgggggctgggccagggaagggggaagtgtagtgtttcaattacaacagggaaaaatcttagtgggaaccaaagacggagaaataattgaagttggtgaaaaaaatgctgcttctaacatcctgattgatggtcacatggaaggggagatctggggcctggccactcacccttccaaggacctcttcatctctgccagcaacgatggcacagcccggatctgggacctggctgacaagaagctgttaaacaaggtgagcttgggccatgcggccaggtgtgcagcctacagccctgatggggagatggtggccattggcatgaagaatggagagtttgtcatcttgttggtgaacagcctgaaagtttgggggaaaaaacgagaccggaaatctgctatccaagatatcagaatcagcccagacaaccgattcttagccgttggttcttctgaacacacagttgacttctatgacctcactcagggcacaaatctgaaccgcattggctactgcaaagatatcccaagctttgtcattcagatggatttttctgcggatggcaaatacattcaggtgtcaacaggtgcctataagcgccaggtgcatgaggtccccctggggaagcaggtaactgaagccgtggtcattgagaagatcacctgggcctcctggacaagcgtcctgggagatgaagtcattggaatctggccacgaaatgcagacaaggctgatgtcaactgcgcatgtgtgacccacgctggcctgaacattgtcacaggagatgactttgggctggtgaagctctttgattttccatgcacagaaaaatttgccaaacataagcgatacttcggtcactcggctcacgtgacgaacatccgtttctcttatgatgacaagtatgtggtcagcactggaggagacgactgcagcctgctgtgctggctacttctggcacttatagcccttgagatagtaccgccagcagctccctgtgaagtgctaacaccccttcaaagcagcaccaacccaattgtgaacaagctaggagtaaaagactgtatttgtgtggcgatgtctgtaaaatgccagaagcctcttatgttattgctgctgctgctaccagccagcaactgcagaggccatgctgaggtgcctccttgccaccagccgttgggaaatgcctaccatgctgccccggatgcacaagctcaaaacgctgcagaagttacacaactgctcccataa

SEQ ID NO: 32604 - DNA, 5547 bp, Homo Sapiens
ctcctgcacggcgagtgctggagcacgacgtaccgctcgctcggtcagggcgccccctccgcccgcctcctgcttcctcctccgctgcctgccgccgccgcctccaccattgtataatgctcggggcgcgcaggcagagaacggcggagtcttagcttcagcctcgcctgctgcccgctccccggcgccaccctcgggcccctggagcggggcactccgcatggagcgggagtagctgaggagtgggcggaaacccctcctgatgcgttagttcccaggtggagctgcatgtgatatatgttgggtaaaggaggaaaacggaagtttgatgagcatgaagatgggctggaaggcaaaatcgtgtctccctgtgacggtccatccaaggtgtcttacaccttacagcgccagactatcttcaacatttcccttatgaaactctataaccacaggcccctgacagagcccagcttgcaaaagaccgttttaattaacaacatgttgaggcggatccaggaggaactcaaacaggaaggcagcctgaggcccatgttcaccccctcctcccagcccaccaccgagcccagcgacagctaccgagaggccccgccggccttcagccacctggcgtccccgtcctcccacccctgcgacctcggaagcactacgcccctggaggcctgcctcaccccggcctcactgctcgaggacgacgatgacacgttttgcacctcccaggccatgcagcccacggctcccaccaaactgtcacctccagccctcttgccagaaaaggacagtttctcctctgccttggacgagatcgaggagctctgtcccacatctacctccacagaggcggccacggctgcgactgacagtgtgaaagggacctccagcgaggctggcacccagaaactcgacggtcctcaagagagccgcgcagatgactcaaaactgatggactctctgcctgggaattttgaaataacgacgtccacgggtttcctgacagacttgaccctggatgacatcctgtttgctgacattgatacgtccatgtatgattttgacccctgcacttcctcatcagggacagcctcaaaaatggcccctgtgtctgccgacgacctcctcaaaactctggctccttacagcagtcagcctgtcaccccaagtcagcctttcaaaatggacctcacagagctggaccacatcatggaggtgcttgttgggtcctaagacccagggacccagcgactatgcccacccagaccccagagcgttcccataaccctgacagttctccacactgtgcatgcacccttgcttgcctttttcagagaaaaagaaaattttacaacaggatcacactagtttttgctttgagcagagttggagtgccttcatccaagtatgaccacttttaatacacttttttgagtggttcctcagagacctactaccctggtataggaaagaatccatttgaagacaatgttgcaatgttgaatgacaaaaataaacagttcaagtgaagcacaaggattaagttggaaaagctgtaaattgcatgtgcatatttgtctattttttctataagttttattgcaagaggtaaagaagaaaactatatatatatatcttatttagataatctcagtaccttttctggcatttttgccctgtataggttgacttggcaattcggcctttttagaggcattaactactcctcgtaagtgttgcatttacatggctgtttagaaaactgctgcccaaatttattttatatttttgtacagattctgcagtttatgatattgtttttctaaaaacaaatgctgtttatacatatgagatagctattttgataggatttgctcacatagttcctgcaaacttcagatgtacaagttgcacttgtacttttatagagttgtaatgttttatatgtgtatggtgcaagagaaaattggatcaaatcaatctgcagttgatgtccccaaatgcaaacacaggcacacacatgcacacacccataaacacacacacagtgctttaagaaagggccaggtgatatcacacccaaatttcacaagcactgaccccctggcaccaacacccgccagtactgtgacttccaaagccagagccacatgtgctcatcaaacttgcattaagcagttggcgggagatggctgtggagctgggggtttaagtgatggttctcttttgctccctcttttgagggtaaagctactgtctttcttaagagtgtatttatgccaagtttgcgcttttaattgtttttattttgttttttaatgaaaacccagatctttcctttttggcataatttttatgatgacctgaaattttacatccgaacaaaattttacatccgaaaagcaaccaacttcttcatggaactcagccctgttgcaatgcttagggcccttaaagaagaaaatctccccagaaggcatccatcatgttgcttaattgtcttctgcagcttcctttccctagagctttccctgtgttgctaagagctgaaaatggcatcttcgtgatcaccacagtgagcttggctcgcctcggccggcccgggatgcactcttacaacatgtgtgactcttgaacctggagttcatcacattacgtcacagcttcccatctggttgctttcctgagtcagctacttcacacttgtcaaggctgttttaccccaaaactcagacaggactttctatgcatgttttccctcctccccccaattcccccccccatcaccttatctcccaggacacacttgagaagtagctttttattcctagtggtgtacatttaattttaaaaaggttgcaatgtatcatgcttgttgccgaaactgtttatggccttcttgtttcagttttttcttttcttccaatggtactttagctgttgagtgcaggttacaacctatattgttatgcagatggcttctttaggaataacttttatatttatttaaaaatttttaaattatgggatgttttgttgttgttgttgtctttgttgttggtcatttgtcaatattcagtcaccaattctgctcacttcttgccatggataaaattgggtctttctggctaattaaaaaagacaactttataaaatggcactttaagcaagccatagttagttttatttttgtaatgcacatggcaaagcaaagacgtttgtgatgaaggaactgctcatctaagcaaaagatttgagtatgatatgataaaggctttctacattctaatttactttttccccccacttgaatgtgttttaaaggctaattatcagctcagtagagcagtgagaaactgatcaaattgcacttgttctcctacaagcaacctccacgcagacacctcgtactgctacaggtgtgtcatttcctttaataggaccagggaccatgtaactgaggtgagggttgtagtagatgcttccagtgtcagtatgcctgttaattttaagagcttccctttcttgcagagaacaagtctgcccagattccatgctttctataactggaggacctggcaaacctgccgcatgctgcacacatctacctacgtacacatatacaatagtattgatgattctgaacaataacagggtaaaacagttggtttgccattgttaaaaactgatttacagtaacttacaacaactgtacttttgttggattagcaaatcatgtgtttaaacaaatcccatatgttgggcaacagttcaaataagcacggagaagtgttgcccaaacttggttctctgactcttatgtatttgtaaggctgggcttcaaaatcaaaacaaaaaccccaaaaacagcaggcaaatgctttttaactctgacaccgttgccataaatccctgatactcaaagtctaacaagaaagacatggaaaattagcagcccattttcagaaagatcaaaatgatctagggttctaattgcttttgcatcctattcttacaaagtgatgtcccaacagggaacagtaggagctggagtgggatctccaagtcccagtttgagtgtgggatgtgcttccagcagtgccttccctttatgaaagacatcacatggcatccagggccaggcaggcagcttgaggtgcctttacgagaaaaccgagctggggctgggagaggacagttattgacactgatgtgcaatgaagtgacaagatgagagcagaatcgtaagagctttgaatttgaagtgagtttttttccccccataagttatttattccttttttctgtgtaaatatatttattttactgtggagcgctaacatctggatcgtaacatgtgcagaatgtatggtaggaatgtattctcttgtaggaatgtaaatctgtattaaaagggggtccaagccaggcccccaggtcttctcattgtatgcacagtccgcattcatttttactcttctctaatatgggtctatttgaaatatgcaaaaggtatgaggaatgttttaatacctccaaatttttaagaaaagcatcaaagggttgatattttttaaagtttttttagtagcactttctctggatgacagaaggagcaaccacatgggcacccttgttcataccaaagggtgagcagtggccagagcctcctctgcacctctcgagtgtctttaccaattgagctttttatcgccatagccccttggagtgccccagctgccctgaggtcaatcaaggaaaatttcttaatgaaataagctccaaagagccaaagtatcaacttacagatcgtttttaaagcttaaatttatgaaccacctttgtggtaaacaatgaattatgaataccgcagggcagccttcttaaatgacaaatgtaaaaaaaaaaaaaaaaaagactctacttcgtgcagcaattgctactctatacgaattgtcttaatttgaaaaccttgctgttacaaattggacctttatacattttctgaaaacaatgaaaagagtatatttaaccttttctggctgtaaatggttaccttcctgtaactgccccgcacctggaggcatggagttgtgtgcatcctgcttatgtacaattgttttcagtgtttctaagaatgagtctgaatggttcttgaaaattagccaggatcaaatgctattgcagacaaagccaataaaaagttggacttcttttggggataacaagttttggaagagaaatgcaggccatatgtgcgcatgaccgagattttgaaaaaagatgtacatagtgacatgtttggtgcatggtttttgaggagggcttttgtcaaaaaggaggtataacctttcccccacagacctgagagctgtgccttttctatgcaatattacagacgttacatcggaacccagatggctgtattcacatgtaggtttgggctgtaatctaaacaattggacagattaaatgtacatggaaatgagcagtcttacttttgtagttttatattatacaataaacagttaaaagatg

SEQ ID NO: 32605 - DNA, 2999 bp, Homo Sapiens
acacacacacacacaaaaccaagaggcagcagttgtttatcacgacctcaactcagtaaggcctgagattctttcgaaaaggagctttgcttcccatgacgcagagggaagtgtcaactgggatatttctggtaaaactgaaagcaagaaaagcagggtgctagcccctgtgggactgagggtggaggctgggggagtttgggtgccatcctccagtgacagatggatggacctttcatctaagagaaaggaggagacacgttggcaaatcagcctcaagcctaagattgcttgtgaagcaatcataaggaggaacaaaaacagacacaaaaacagagggaaagagtgaaaagacaagaagggcgcaaactgtgacagactcaccgcttcactaactactcacttaaactggaagcaaaatgtccctaaaattgccaaggaactgggatttcaacctgaaagtggaggctgcgaaaatagctcggtcaaggagtgtgatgactggcgagcagatggctgccttccatccatcgtccacccccaacccgctggagaggcccatcaagatgggctggctgaagaagcagaggtccatcgtgaagaactggcagcagaggtactttgtgctgagggcgcagcagctctactactacaaggatgaagaggacacgaagccccagggctgcatgtatctaccaggatgtacaatcaaggagatcgccacaaacccagaagaagctgggaagtttgtctttgaaatcattccagcctcatgggaccagaatcgcatgggacaggactcctatgtcctcatggccagctctcaggcggagatggaggagtgggttaaattcctcaggagagttgctggcacaccctgtggagcagtgtttggccagcgcttggatgagactgtggcctatgaacagaaattcggcccccatctggtgcccatcctggtggagaaatgtgcagagttcatcctggagcacggccggaatgaagagggcatcttccgtctgcctgggcaggacaacctggtgaagcagctgagagacgcttttgatgctggggagcggccctcctttgacagagacacagatgtgcacactgtggcttccctgttaaagctctacctccgagacctcccagagcccgtggttccctggagccagtacgaagggttcctgctctgtgggcagctcacgaatgcggatgaggcaaaggctcagcaggagttgatgaagcagctctccatccttcctcgtgacaactatagtctcctgagctacatctgcaggttcctacatgaaatacagctgaactgtgctgttaacaagatgagtgtggacaacctggctactgtgattggtgtgaatctcatcaggtcgaaggtcgaagaccctgccgtgatcatgagagggactcctcagatccaaagagtgatgactatgatgatcagagaccatgaagtcctcttccccaagtccaaggatatacccctgtcaccccctgcccagaaaaatgaccccaagaaagctccagtggcccgaagctctgtaggctgggatgccactgaagacctccgaatttctaggacagacagcttcagtagcatgacaagcgactctgatacaaccagccccaccggacagcagccgagcgatgcgtttccggaggacagcagcaaagtacccagggaaaagccaggagactggaaaatgcaatctcgtaaaaggactcaaacactccctaaccggaaatgtttcttgacatcagcttttcagggtgccaacagcagcaaaatggagatctttaaaaatgaattctggtcgccttcctcagaggctaaggcaggggaagggcacaggagaacgatgtctcaagacttgcgccaactttctgactcccaacggacttccacctacgataacgtcccttccctgccagggtcccctggggaggaagccagtgcactctcttcccaagcctgtgactccaagggagatactcttgccagtccaaactctgaaactgggcctggaaaaaagaactctggagaagaggaaattgattctttgcagaggatggtccaagagctacgaaaggaaatagaaacacagaagcaaatgtatgaggaacagattaaaaaccttgagaaggaaaattatgacgtttgggctaaagtggtgaggctcaatgaagaactggagaaggaaaagaagaagtctgcagccctagagatcagcctccgcaacatggagcgctcccgggaggatgttgagaagaggaacaaggccttggaagaagaagtcaaggaatttgtcaaatccatgaaggaacccaagaccgaggcttaagggtcccaggagtactgcagggacagccccagagaggcccaactctggcccctttctcagtgctatctgatgacggggaaacaaaattattctctgagagggaaaggacatttgagggaaacatcaaatttccccataaataaatgaatggagtttgcaggaaggtgagggtgagcagagatgtgtgtggacatctctgaccatccatcgctgtattcaaatggattgttttattccattctggtctcaggcatgaccacgtccagtgaagacatttgaggcagcacatctcaggacccaggcaatagactggccccaactcaggctggactaaggtgtgattaattctttgttttttgtgtggaacagctcaccttgtcagacagcctcagggcatctctgagacacaggggcagaaaatgacattcatcttttgagtcctcatccatggagtgctgtgtttggggggctgcatctgctgaagcgagaaccccattctgccaccccaccaggatgcccattctccaggacttctccaacttactattagactaaaccagaacaagcaacaaactgtatttatgcaagcaaaattgatgagaaaattatattcaaataaagcaaaaattaaaaaaaaaa

SEQ ID NO: 32606 - DNA, 19291 bp, Homo Sapiens
atggctaaggtaacttctgaagaactgaatattataattcagaatgtaatgacctgggttgtggctacagtgaccagtatattgtacccagccatcacaaagtatgaaaaaagattgcaaaataatacatacccagtatctgatgactccatcctctcttcagatagttcaagtttctgtagcacgtgcagtgaagactttacatatagaagctacacatctgcaacaactaaaacatttcaggcagaaccctgtgcatttgtagttgacacgtcagtaaggagaccaaccacacctataaaacctcctcctgcacatgtggaaaaaacagttgtggggaaaacatgtcacataaaaggacaatctataatctctaaacataaatataataaaaccaacttgctatattcataccctaagctcagaagttgtaaatcagatagtcaccttttagcatcatttgaaacaggcacaaaaaaatctaaggatgctaccactgaaacagatagcttagggagttcattgcattgtgataaaacagcaaaagccatggatgaaatgaagaatttaaaaaatgtttttgttaactttaaatgttacttgaaaggggaaactgaagtgattttagaaagcattttgcgagaaataatgtctgatttaacccaggccattccctctctctcttctgttactgctgaagtttttgttgaacaatgtgaacgtgaaaaagaaatcttgctttccaatgctcatattccctcagttgcttctgagattgtggaaaatatgcttgagaagttagagtctgcagttgagaaaaaatgtgttgagatgttttcacaagatttgtcagtcgacattaaaccaagtttagcagccagtgatgaacttctcacatcatctaatggaaaacctttgaaaaattcaatgcctcatactttggacccaatgtgtgatattgcagaggacatggtgcatgccattttagaaaagctaatgactcttgtttcttttaagcaaaatgaatttcttcatcttaaagacacaaataagctttcctgccagcaacataagacagacccaatatgtatgttccttcaaagagctggcaaaaataaatctagtcttgaatctgatgaagctagtttaattgtcaatgaagaagtacaaaatttaatatcaaatattttttcccagtcttctttggttgcttatatagaggaagcaatcaatgctatactaggttatatacaaactgaactaaataatgagagaattattgcatctgaagaaaccgtagtactccttcagctacttgaggacatcctttttcagctccatcaggaaccagtaaatgaaagttttcaaaaaagtaggcaacctagaataagtagtccttctgacaccaaagaaaagtacagactcactggcactagattatcaaatagtcctaggtctggaagaccatttccacctataaatgttccaggcatggttctttattctgatgatgaaaatgaggaaatagacaatattgtaaaaaatgtgcttgattcaactttcaaagatgaaaaagtaaaatcacaagaacagattcctaatcattggtttacaaagggaaacacttgttttgaatgcaaaagaaatatcaaaccacctacaaagcctggttctagaagcaaagctgcatttcatgattgggaattaaagactgagccaccatctactaatcatgaagatattttaaagaaaaaactttcttcgaataaagacatttcaactttcagccaagatcaaaagcatcaaatagaaaaggcttcagaaaacatagtcacaagtattttaaaggaaatgctcaaggacatatcttccgttccttttggtcacttagacagcaaaactggcagtgaagcttcagttcttgtttcagaaaagcctcaaggactgtcacatcaagaatggatagaccagatgttttctgtttcagaaatcagtacagtggctcaagaaataacagattctgtgttaaacatacttcataaggcatcaaactacatttccaataccactaaaagttccatttcatcatcagttcatcagatttccttacataattctgacactgaacacatagtcaaagaagcaccaaataaatacccattaaaaacatggtttgacagtgaaaagaaaatgaaatatttatctttatttgacgttgatcctgaaaagcctccctggttaaaatctggaaaaagtgaacctaaacctgtagatgacattaatgataagatcattcgtacaatttttaaaagactgaagtcatttatttgtccaaaattgcatatgggcttcaaatcttcattacgatctcaacttagtaagtacacagctaaaatagtaaacattgttttatgtgctatccagaatgaactggaacttcacaaggaaaacctaaatcttagggagattgaccataccaaatcccttacagataaaggattttttgctaatactgataaaaaattagaatctcttgtcacgagtattgatgatgacattttggcgagtccattattaacctgtatttatgatatgttgttatcaagtgaaaatgcacatcaaagaagcatttcactctcttctcgtaagccaaagtctgcaactgacagtgttgatgtacaaagcattttgccaaataggcaagataaaaaatcttttcacaaatatttggctactccttgtactcaccacagtgtcaatggtggaaaccatattaaagagaatgcaaaattgcaagtgttagaaagaattggggaaacactacatgaaatgttaagcaagctcctggggacccatcttcattctcagctatcttgtagtcaacaaagcagagagatgaccaataagaatcagaaaatggctgctgcattgcagtctaatattcagttaatttctaaagcaattttggattatatccttgcaaaattatgtggtgttgacatggataccagttttgcaagttgtggattaaaagctatctcagagtctcttgacattgacaacccatcatttgcttcaattattgagaaaatggccaaatccaccaaaataatctccagcatagtttccagaagggttcaggaggacaataaagaagagactaaaagcaaggcaaaacctgttgctcctgtgtcttccaaaacaccaagcacaaaagaaatgcatccaaataaactaaaagctgtagcttcagatattcttaatatggtttttgctaaactggaagggtttgccaacggacatttagaaattttgggtgctattaatgatggaaataagaaaagcaataagataggctgggaatatgaaagcaccaatatttccagagacacacatgaagcatcatttctgtctgctttatatatgcatgcaaagaaggtatcaagtgctattttgaaggttattcaaacagaattaaatgtgacctcatcagatttgaagacaagtgtagaaaacccaccacctgagactcaaatacttaagtatgtagtcaagttaattttagatgcagtatcttccgatatgtttaatgaaatggaatctgaagggggaggcattgaaacttatcgatacaggccaacatatggaagtcttcctggaggagctgaatcagattcatttctagaagatgatgcatatacagcgaaaaaaattattgatgagagatccccacaaagagaagaagtgaaaacacgttctcttaaacaatgggctctcgaaaaaaccttaaacaaaattgaagtaaaactcaaagaaccacatatatctccaattgctcccattataagaaatattttgaatgaaatttttcaaagtactttaatcaatcaattaaatgtcctttctctctcccactctaattttaatggcatgcctcacaatgttgatgagccaactccccaaacatctgttcaatttatggataaaatgatggatcctttactttcggaagcagatataaccatagtaacagataatattgttaggactgtatttcacaaactttattcagctgccatgacagaaagaaatgtaagggaaaataggtataaaactatcactttttcagcaaatgtttcttctcatgaacacacctataaaggaaagtcctctgtcacggctttggatgaaaatccatgtacttttcagtctagattcagcgttgctgacaaggagacaaaggtaaatctagctgaagatattgtacaggcaatattaacaaatttagaaacttttgctacttccaaagtaaaatctctcttttattctcaagtcaactttacagttccagtggctttacctattcagcaagatcacagtacattgagcaaagcattatcagccaaagattcatattctgatgagcaattttcctgttgctcagtagatcataccaagtcaggaaagaccaacttgtgccaactgtctttgtctaaattaaatacttatgcactacaagtggctagaagaaatttacaaggaatcaaacaggaattagataaagaaagggaaaatccttttttaactcatgacattgggatttctgaaagtattgcaagtcaaattgttaacgcattgttagacattatatcacgtaaaggcaaatgtgacaaaaacagttctgacaaagagatcgatttagatcagcaaaaaggtgttattgaaaagctgctcaatgagaccaaatatcgaaaagtacttcaacttcaaatacaagataccattgaaggtatcctatgtgatatttatgaaaaaaccctgtttcagaataatctctcatttgccacacccactctgaaatgtagcatagctgataaacattcagaagaaaattctgaaatgttcatggagggtgcaaataagattattcctaagctttcagttcctaaatcagatgtcattttgatatccaatgatatagtgaatattgttcttcataatctcagttctgctgccacgcttgtcataaatgcaaagaatcctacttctgcaagattgcccctgacattttgtgatacgtttccaaaaatagactgtcaacagcctcttaaggggtcaaaaactgaaagaaaaacagagcgtttttcatattcaagaaatcagaaatcagcttatgctgatgataatcagataactgtagtagagaaagaagacactcagaaatctgctactgactcatgtgaggaaaatgctaacttcattactaaaactatttttaaacgtttggaatcttttgccacagaaagaatagattcattaattacccttgctttccaaagtaaagaaaagtcatttgttatcccagaattggaaaattgtaaacaaaatgacagcatcttttatgattcaagccaagtggaatcagatgtaaatgtcctgaaaatatcagcaactgaaaccattctcagccaagagcttacagatttcacttttgttggtcgcagagaaaaacttggatccacaattcacctatcgcaagctaggcttaagacatatgctgacgtcattgccagtgccattttgaagcttattaaaaatgacttagacttagaaattcaaaagatatatccatatcaaaacaatattttgttccaagaaaacatcattgtgagtgaaattgttgacagtatgttaaagatgttagatgataaaagatctgtaaaggaaatttgttttaattcaaaagaaaattctaacttttcacaattagctttatcaaatgaaatattgctgggtcacaaagagaaggaaagaagtaccaaacaatctctatttacaaagtatccattagagcaaaaccaaatgatattggaaaacaaaaggcagataattgttttggaagaaatatttatgagaaatggagaatcaaaaaacaaagaaaaaggtgaactgctcattgcagtggaagaacttttgaataagttgtatcaaagagtaagggaagtcacaggccatttgcctccacttaatgaaactgccaactttatatctaattctaagattaaaacatcagacacaacacagaaaaacagttttcaatcacatattaacagtgtagcaaatgacatagttgaaagtgttttggggaaaatgtacttggtagttgtgacatcattatatgaaaataataaaagtaggacagaagttgaaatatctgaccacaatgattccttactaatgaaaccattaaggtttagagaaactaaacaagcaggaaaaataagtaattcccctagatatgcgatatcacaggcttattcttatgtcgacagtcaaaatatctctgtgatggaaaacactcttttgccatatttaccattgcaagtgaagaaagacttaattcaaatggttctcaataagatcacaaattttgtctcacttcctttaaaggtgagccctaaggacaaccctaagccatgctttaaagcacatttaaaaacaagatcaaaaattaccactttgcctaaatttacaaaaaaaacacacttaggactgagtgctgctaaggccaaaagcaaaaccaagttaggtcctggagagaagaccctaaaagacagcagatccaagactgccattgggttgtcacacatcatgtcagctggagatgccaaaaatttactggacacaaaattgcccacttcagaactaaaaatatatgccaaggatataataattaacatcctagaaacaattgtgaaggaatttggaaaggtaaagcaaaccaaagctttaccatctgatcaaatcatagcagcaggtaaaatagttaatacagttttgcaagaattatatgttaccaataactgcaatttggcttacccgatgaaatcctcacatctcagactttcacaggggaatataggcacaggatcccttcctaaacaacaagcatgtttttacttggagaatgtttcttcacagctagagcacatttttcctagagaaggtatatttaaaaaattgtttgacaagtggcaaacagaatcaaatgacaaggaaaatgaaaaatgtaagctattgatgatagctgaaaatgttttgactgaaatttcaataaaagcaaaagaattagaatattctctttcacttttaaatttgccccctcttgagaattgtgaaagcaggttttataatcattttaaaggagcttctactagagccgaggatactaaagcacaaattaatatgtttggaagggaaattgttgaaatgctacttgaaaaactacagctatgctttctgtcccaaattcccactccagatagtgaagaaactctatcaaacagtaaagaacacattactgctaaaagtaaatatggttttccaaacaagcatagcctcagcagtttaccaatctataacacaaagacaaaagaccaaatttctgtgggctccagcaaccaaattgttcaagagattgtagaaacggttttaaacatgttagagtcatttgtggacttgcagtttaaacatatctccaaatatgagttttctgaaattgtgaaaatgcctatagaaaacctttcttctatccaacagaaactgttaaacaaaaaaatgttgccaaaattacaaccactgaaaatgttttctgataaatccgagtcaaatactattaatttcaaggaaaacatacagaatatccttctacgggttcattcattccattcacaattacttacatatgctgttaatatcatcagtgacatgcttgctgtaattaagaacaagctagacaacgaaataagccaaatggaaccatcttcaattagcatattgaaagagaacattgtagcaagtgagatcattggcacactaatggaccagtgtacttatttcaatgagtctttgatacaaaacctttcaagagaaagtttgttccaaggagctgaaaatgcctacactgttaatcaggttgaattagcaactaatatgaaaatgttcacatcaaagttaaaggaaggtagtttggggattaatccttcacaagtgagtaaaactgggtttgtgttttgttcagatgaagatatgaaagaaaagtacagggtttcatcagatttacccacctctgtcagatcctctgtagaagacacagttaaaaactcagagccaacgaaaaggcctgattcagaaactatgccatcgtgttctactagaaacaaagtacaagaccacagaccaagggaatctaactttggtagttttgatcagaccatgaaaggaaatagctacctccctgaaggcagtttcttacaaaagctgcttaggaaagcaagtgactccacagaagcagcattaaagcaagtcttgtcattcatagaaatgggaaaaggtgaaaatctaagagtgtttcattatgagaacctaaaaccagttgttgaaccaaaccaaattcagacaaccatttcccctctcaaaatatgtttagctgcagaaaatattgtcaatactgtgctatccagctgtggctttccaagtcaaccacacactaatgagaacagggaaataatgaaaccatttttcatatcaaaacaaagctctttatctgaagtatctggagggcaaaaggataacgaaaaaagtttgcttagaatgcaggataaaaaaatcaactatatacctgaggaagaaaatgaaaaccttgaagccagccgggaagattcttcttttttgcaaaaattgaaaaaaaaggagtacccaaagatagagactgtgaaggaagttgaagcctttacttttgctgatcatgaaatgggttccaatgaagttcatctgatagcaagacatgtcaccacatctgtggtcacatatttgaagaactttgaaactacagtttttagtgaggaaaagatgtctgtttctacatggtcaaggaaaaaatatgaatcaaaacagttcctaagaaacatatacgatgattcttcaatttatcaatgttgtgaacatctcactgagtcagtactttaccatttaacttcgagcatttctgatggcaccaaaaagggtagagaaaaagagaaagcatgggaaattcaagaagcaacatttagcaagattatttcaattcattctcaagtgtttgagagcaggtcaatttccattggagaacttgctttatgtatttctgaaatcattattaaaattctttttaataataaaattatacaggctgacattgcacagaaaatggttgccatacctacaaaatacacttactgtccaggaatagtttctggtggctttgatgacctctttcaggatctcttagtaggagtgattcatgtactgtccaaagaaatagaagtagattatcactttgaaagcaatgtaagaaacaaatcattttctatgcatagaaataatagtgtacccctttgcaacaaaatcaatagacaggcaagccccagagactggcaattttctactcaacaaattggtcaactttttcaaaaaaataagttaagttatcttgcatgtaagttaaacagcctggttggtaacctaaaaacaagtgaatccaaagaagtagtcaataaagtttttaatattgtttcagatttattttcaccagatgaatgcctagatacgggtatggattctggtaaaatacaaagaacatatttctactcctcgaataatgagcaacctaatagcatacttaccaataacctacagctctcctcaaaatcagtttttcttctcaatgttgtatgtgagaaacttatcagaatacttttggaagaatgcacaagcactgcttttcctgataaagggtctgtttcagaggaaacatcagcagaagaatgtcaacttttaaaaatgcttcaaagtgtagaagatggaaaatctgattatcgtaagggaggaatggactgtgaatgccttcaagtagattacatgtcagaccttttggagaatgtggcagaaattgatcaagacttattgacatcagactctatgcttactattatttcccacagcttggttaaatcattgatggacaaattatctcacagcatacaacaagctccggaaagtctaccttttgcaaataagcatttgaactacagaacaagagaaatacagtctagtttcataaaagcaagaaagtcagaattaatagaattaggacagagtaaaagttctttagaactcaggagctatgatagtaattctttgacagtatccctgaataatcccagtgtggttagctccaaaatacaagcaccatttaacaagcattgtgcagtaaaatcctcttctgtgtcaccttttgaaagacagagaacaaaggaaatggataaggtagccattcataataagctacatcaggaaggtatatatgctggtgtttattcagccacatttttggaaggaataatttcagaattgttttttaatctctctatgtcattgtggggcaaaaataaaaacatcactgtgtcctggctcaatgagatgaatacattatttgtcaacaatgtagtgaatgaatttaataatgctcaagtcactgttctacggaatgctgaagaaaggctgtgttttccaccagttcatacagaaactgttagcaaaattgttgactcagtttattatgatgttttacagcagtatgaattaaaagtggcctgtggtaataatccggtatacgacaatgcctcaatagcagaacaaataacaaatggcatattgttagagattttagactacaaactgccatcttgcttcaaggaacatctcataccccattcatattaccctctcaaacctgaaattatattgcaaaagcttcaaagtaacctaacagaatttacttctctacccaggtcttcatcagactatagtaccatgttatcacattcatttttagaagatgtcataagaaggcttttatctcagctaattcctccacccattacatgttcctctttaggaaaaaaatatttaatgagttctgattttaatgaaatgtccacttgtataataaataaggttatgtcagccatttcaaaacataaaatctggttcactatatatgataatcaatatctatatactggaaaaaacctccaaaagatggtggattctgtatattgtaatattttgcaaatgtctgactctcttgtttcaatacaaaaaagtatagtaagccgaagcccaattatgattgaccaaatagccagctttatcatccaagagattatcgaaaatcatcttcaaccatttttgagtggagaggttttatgtcatccaaggactccactggatccagtgtctactattgttacacaggttctgagtgaagtgatagagtcacacagacctcagaagcaatcacctttagatattcaccttgattcatttgtaagggagattgttgccagacttttgtcaaagattttcagcccaaagcataacactgaaattgagttgaaaaacatgacccaaagaatagtaaactccataaataggcatttcaataaagctaaaattcacattctctatgatgacaaagaacaggctttcttttctttcaatacagatattgtggatgaacttgccacctcagtttatagaaatgctttaaagcagcatgggctagaccttgctgttgataaagagtctgaagacagtggcatttttgtggaaaatattaccaatttaattgtagcagctatttcagattaccttcttcatccactgttttctggggatttttcagcttctacctattctaattcagtggctgagaatattgttcaggacatccttagtaacatcagtaaatctactgagccaagccagagtgtacctctatataacaccttgctgccatacacatttttagaagatatgatcagagtactattatctaaattattttcttctgcatctagcctggttctaaacagagacacccaaaaagatatatcaagagtgaatttcaatgacattgcttcaaacctagttagtgatattaggatgaaagtttcccaacatgaaattcgattttcaaaagaggaagaagaaaccaagtttatttattcagaagatgatattcagcaccttgttgattcagtatttgcaaatgttgtgcaaacctctggttctcaagaatcagctgtgcaaaatatcacaagcagtaatgacattcttatagatagaatagcaggtttcatcattaaacatatctgtcaaaaacatcttcagccatttgtgagtggaaaatcattatcttcatcagacacatattttgatgatgagagaaggcagttattttataccagtgtttactcttcaacattcttggaagatgtaatctctggggttttaagaaaaatattccacagggtagtaggcattgtacaaacaaaatccataagagattcagaagatgaactgtttgagaaagctgaagaactcatacatttgattacaggggaattctcaaaagcccaagttagcattatagataatactgaggaaagactgtgtttacctccagtggagagggatgtagtcaaaacaattgttgacatggtgtacagcaaagttttgcaagaatatgaaatggaagtcgtgcccaataaagattttctaaatgacacaaagacattggctgcaagaataactaatatcatcctggctgaaatttttgatttccaaattcatccagatcttatagcaaatctgccttttaaatcacattccaaactcagtgcaaatgttttaatacaaagagttcaatatgatataagtaaatcaagattccaaagacaagcttcaacaatgtataccactatgttatcacatagtcatttggaaaaaatagttactcagcttacatctcagataagtccattgaacaccagtgcagagcagtcagatactactaaatcagacttaagtaatacagtgataaaactgataaatgaaattatgtcaataatttcaaaacatgaaatatgtattattaaatatgggaataaaaaacagagtatgatttcagcaaaagatatccagtctatggttgattccatttatgctgatctttctcattcaaatatataccagtccattacaaaagataaaaagagcataagtgacatacctgtttcaaaaatagcgagttttataataaaagaaatctttaaccatcatattcaatcatttttatctgaagataaaactctccttttggcagcagttgatcaaacttataaattgaaagcaatagatcctaaacaaagagaattatcttttattgtgaactcatctgtctttttggaggaagtaatttctgagctcttatgcaaaattctttatgcattttcacataacatgttggttactgaaaatccagatagagtgaaactgaaacttaccaggattgttacaacattggtaaattcaattgttctggagttcaccacatcagagattttagttgcagataactttgataaaaatttgtgtttctcagaaagatacaaagaaatggttcaaaaaatagtcaactcagtatatggaaaagtattagatcaatataaatctctgattcaaatacatagggttatacaaagtgacacaatatgttttggtaggaaaatatattatttgctattggaagaaatatatgattatcaagtgcagtcattagtttcaggagaattagagtcttcttcttattcgtatccccaagctgataatatcatcagaaatgtgcttaacataatcacaaaggatagccatgccttgccaccatatattactgtgttgcctcattctcttttagaagatatggtttacaggcttctagggcatgtcttcccttcaactcacactgaaaatgaactaaaagagaaaaagtttccaccggatgatgaatttgtggaggcagcttcaaaattgactgatgaaattataaaagaaatttctgaacatgagattcgactttccatggcagaggataatgcagaaagtatgcagttagaacctattgaaaatttggtcgactccatatgtaataatattttgaaaacatctgaattccaagctgaagtacaaaaagatgcagacaaaaaaggatgctcattcctcagtaaattagctggttttattatgaaagaaatcatgtatcatcatttacagccatttttacatggtgaagaatcatctttcagtgacttatctgattatgaccatgtctctgaacttgctaaatctggtaaagaaaagacacagccttctctctattcagctacatttttggaagacataatcattgaccttgttcacaaattttgttctctcctcattattactgaagattctaagaaaaatgaaatggcagagctagatattatgggcttggctctaaaacttgcaaattctctgataagggaatttaagaaaagtgatattaaagttttaccaaatgctgaaaaaatgttttcttttccaccaattgataaagagacagttgataaaatatccaattttgtatatgaacagttcatagaaaaatgcacatctcatgatattcaaaaaggtgatgaaagtaacattgctatagggatgattgctgctctaacccagaaggcaatatctgcattcaggattcaaccacttttttcaggagactggtcttccaccttcttttcatttctaaatccagataatatcacccaaagggttcaacacctaccacaaaacacctttacacaaataagcagatgtgcaaaagagaaccaactttctttaccagatcaatcatataaagatacttcttccaccccagattgcaaaaacatgatgagcactttggaaataaatagaggtacaatgaatagaaagaaaagttttaaaaccaaggacacatcagtgaaaaaaggtgacatccaaaatccagtacttagctctataaatgcaattatgaaaagcggcatgattaacctaacatcagggttggctacaggtgtgacaaataaaaaggaagtggatgaaaataaagtgggaatttgtactcaaaaacatagtgagaatgtatcaaaagttacttcaactaccactgtgaaaagtaaagatactcaggagccaaatttgagtgaaacatttaataataatgaaattgagaagaaaagaaatttaattccaacagataaaaaagggaaagatgatgagatatacacacatttttcattaataattgatgatacagaatatgagaaggaagtacttggatcagattctgaaataggctataaaaagaagattgacaatgcaagggaaagctcatttaaaaaagatgacaagctctttcagttatcctccttgaagtccaagagaaatctagggactacaacagatactttggaaataagaattcgaacatcaagcaatgaggggagaagagactctccaacacaaacgtgtagggatgaggaacaccactcagattatgaacatgttcaaaatgtcattgaaaatatttttgaagatgttttagaactatcttcttctccagaaccagcatattattcgaaactcagttatgaccaaagccccccaggtgataatgtattaaatgtaattcaagagattagcagggattcggcacagtctgttacaacaaaaaaagtatcctcctcaactaacaaaaatatctctgccaaagaaaaagaagaggaagagagagaaaaagagaaagtaagagaggagattaaaagtgaacccagtaaaccagatgatcctcaaaaccaacgagaaagtaaacctggaatttttcccgctaagtttttagaagatgttattactgagatggttaaacaattgatcttttcttctataccagaaacacaaatacaagatagatgtcaaaatgttagtgataagcaaaatcaagccaaactctatgacactgctatgaaactcatcaattcactgttaaaggagttctcagatgctcaaattaaggttttcaggccagataagggaaatcagttccctgggggtaaagtgtcttcagttcctaaagtacctccaaggtataaagagccaactacagatgaagcaccatccagcattaagataaaatctgcagataaaatgccacctatgcataaaatgatgagaaaaccttcttcagataagataccatcaattgacaaaacattggtcaataaagttgttcactcctctgtttgtaatattttaaatgactatggatctcaagactctatttggaagaatataaacagtaatggagaaaatttagcaagaagactaactagtgcagtgataaatgaaattttccaacgtcaggttaacttgatattttgtgatgaggtttcagtttcagcatgtttgcctctggaatctaaggatgttgttaaaaaggtccaaaagttggcccaaacagccagcaaagaatgtcaaacttcatcaccatatacaataatattacctcataaatttttggagaatgtgatttctgctcttttctccaaaattttctcaacaatatccagcacaaaaacaaaagaacctgaggacaatttgtccacagaactgaatttccttcaaatgaagttagtaagtgcagttgcaacagagatctcccaagataaatatatgactatacagtatgtagaaaccttacaatctgatgatgatgaaattattcaattagtggttcagtctgtttataataatctcttgccacagtttggatcacaagagattatacaaaattgtgtaaccagtggatgcaaaatcctttcagaaaacatagttgacttggttctacgagaagtggctagcaatcagctgcagagctatttttgtggagagctaactccacatcagtgtgtggaagttgaaaacatcgttgaaaagatccttaaagatgttttccaaactactgatgtgcccctacctaaaccttcacatgctgataagctgtcttataacataatagaagaaattgctgtgaaatttttatcaaagcttttatctatatttccaaaagtacataaagaaagaacaaaatctctagagactgatatgcaaaaaataacttcaaaagtactaaattcagtccaagaatttatctccaaaagtaagattaaacttgtaccacccaccaaggaatcacctactgtgcctgtagctgataatgcaactattgaaaacatagttaattctatttataccagtgttttaaagcactctggctcttatacttctgtatttaaagatttaatgggtaaaagcaatgtcctctctgatacaataggctttttaatggtgaatgcaatttcgaattctgaatttcaacctcaagtagaggaagaagtatcaaattcagaattagttctggaagctgtcaaaattatggaaaaagtgatcaaaattattgatgaacttaagtctaaggaaaagtcttcatccagaaaaggtttgacattagatgccaaacttttagaagaggtgttggccttgttcttggctaaactaataaggttgccaagttcctcaagcaaagatgaaaaaaacttatcaaagactgagttaaataaaattgcatctcaactgtcaaaattggtaacagctgaaatttccagaagtagcattagtctaatagcttctgatcctgaagagcactgtttaaatccagaaaatacagaaaggatttatcaggttgtcgattccgtttatagtaacatactgcaacaatcaggaaccaacaaagaattttattatgatataaaagatacaaatacagcctttcctaaaaaagtggctagtttaattattgatggagtttcaagttttccattagatacaattaactcaacaatttcaaatgctgatctctctggagagctagacgttaatagaattgttcaaaaggcccaagaacatgcttttaatgtgattcctgaattagagcaagaaaagttagatcaaaatttatctgaagaggaatctccaattaaaatagttccacatgttggaaaaaaaccagtcaaaatagatccaaaaattatttcagaacacttagcagttatttctataaaaactcaacctcttgagaaacttaagcaggagtgtttgaaaagaactggacatagcatagcagaactgagaagagcatcaataagtgggagaaattactccttaggatcacctgatttagaaaagagaaagacagaaagacgtacctcattggataagactggaagactggatgtaaaacccctagaggccgttgctagaaattcatttcagaatataagaaagcctgatattacaaaggtggagctcttaaaagatgttcaaagtaaaaatgatcttattgttcgattagtagctcatgatattgatcaagtgtatttggaaaattacataaaagaggaacgagattctgatgaagatgaagttgttttaacacagacttttgcaaaagaagaaggcatcaaagtatttgaagatcaagtgaaagaagtcaagaagccaatacaaagcaaactttctcctaagtcaacactaagcacgagcagcctgaaaaaatttttgtcactaagtaaatgttgtcagaccacagccagtgcaaatattgaaagtactgaagcaatctcaaatcaggtaatagaatccaaggagacacatgttaaaagagctgttgctgagcttgacatggccacaccaaagacgatgcctgaaacagcctcttcatcttgggaggaaaagccccagtgtaagaaagaagaaaagaatcttgttactgaaccaacacattacttcatacacagaattatgagttcatcttcatacaaccaagaagatctcatttcatctactggtgaggctgaagattgtcactcagacccaagtgctaaaatattagaagaaagttctcaggaacaaaagccagagcatggaaacagtgttaagtttatcaccatctttgaaagatccaaggatgttcttggcagtgcaaatccctcaaaggaagtcatttcagaaactcccaagcccgatgtctccaaacaaggatctaaaatgctgacaaaaatgtcttcaactttgtcaaaggtgttttctcaatgtaacaccaatatttccagatcttcctcaccagctcaccaggatgaacactgaagcttttgtacctgatataagtatgcttacttcttttagaaaataaaatggtttttaaagcata

SEQ ID NO: 32607 - DNA, 1669 bp, Homo Sapiens
catatttccagctataatccatcatatttccaggtgtatcccttcccttaaaagtaaaaaaggagaaaatcactttgctgtgtggaagtgctttgtgtgttttataaaatccacataaaatgttcgtggttcaaggagtggctgccgcatttctaaggcaaataagcttatccctgaagaagcttgaagatctgactctcaagaatctttgtgttctggatgaaaaaggaatcattattttttaactcccctgctcaagtcagtgacttccactggcacccaatccattggttataagtacccatgaattgccttgccaattataggcaggataacctaggaggaccaaccaaaaccaaactcctggtaagctttattagccttttctacaatgtgtctcagtttctctttcacaccttggagtggaagacaatctctactcacactgttgtggtatgtgtctgtctgtctcagatgtgtgtataaggtgtatttctcagctcggtatctgaagtaatttctttttcttttcttttttttaaagactgctgtcttaaggcttaaaagtaatttaaggttttgttttttgttattttaagagttgcagtttctttggagacaacaaagtactttttttccaaagatgaaaaaggcatattcagactttctatgttatgttccataattgttttgcttatcactgtataacattctcattatcatgggctactttaagctaatcagttgcattttggggtcctcatttagaagtcaatctggaaaaaagatggctgtaaaacttagataaaccagtatgctatttctccttccttgtctgcctttacagatgtttcctctttctctctctcttccctgactatctctctcaatgatcattgacagctcccgcatcccctctttcactcagcttcactccaccatgaccagagcacctctcctgctactatgtgttgccctggtgctgcttgggcatgtgaatggagccacagtaagaaatgaggacaaatggaagccactcaacaaccccagaaacagagatctgtttttcagaaggcttcaggcatattttaagggcagaggtcttgatcttggaacatttccaaatcctttccccacgaatgaaaatcctagacctctctctttccagtcagaacttactgcttctgcatctgcagattatgaagagcagaaaaactcctttcacaattatctcaaaggctgaaagtttcttctgagctcaggtgtctggctattttaaaactacagatgaagcttctcattagaaaaattcaaccattgtcatagctaaactttcatggagtttctttccccctcacttttatttttcagtttgtaatgattttattccacatttccatatttacatataaatcgctggaactatgatttctatgcatatttatggagtttttttcctatgaaaccataaatattgatgtagagcaccgcatgtatttgtaggagttacaaaaacatcacaaactgaaaaaagattataatctaaattagatgtttctttaagcttgtttttaaaacttgtcttttatgtttattatcttttatcgaccaatatatttttttaaagggacatgctcacttttagtatagtaaaattcattatatgtga

SEQ ID NO: 32608 - DNA, 936 bp, Homo Sapiens
atggagcgcgagctggaggcgctggcggcccggcttgcgcgccctgccgagccgcccttccaggcgttggtggaagcggcggggggccgcgggcaggtgctgctggtgggcgagctgtgggagcgcgaacagagccgcgcgctgctgcgggacttcgcacgggcggccgggccagaggacgcggtggcgccggggctgcggctgctggaggcgctgttgcgcgccgtgttcggccgccaggcgggggggcccgtgcaggcggccgcctactgccccggcctcccggcctcctgcctggccgtccaggcggccgcctgcagggccctgcaagccgccggagccgggcaaccagtggaaggagcctgggagaggccaggcctccccggactgctagcctgcttttcctggggtccctggagccggaggaagaaccaggatgttgctgcctgcagaagctcagctcaggaagacttccaggaacctgaggaggagctgccactaacagccatatttcccaatggagactgtgatgaccttggaagggggtcaaaagcctgtgatggagtcgtacacactcctgctgagcccaccggagactcaagatgaaggctggacccttgcgctgtccctggctctaacctacagactggggcctggctccgtcttactggcccccaggtctccatggagactgcagaaacccccgcctgctggaggcctgccacactcacagttaccagctagacagtggggcttactaagacaagcaggacctaaaacagtgtctcccctgggaacctactccccacccagcatttgctaagtctgatcacagggaggttattttgtctctctgtctcggtttctctgagccactgagacagatggctgtccgctttgaggctctgcagagctgtggcaccccatggtgtgtct

SEQ ID NO: 32609 - DNA, 3997 bp, Homo Sapiens
ggcgacgccgacgcgagtctggcggctgctgcttgcgactgcggaggccgggcgaggccggtgaggacgcggcgggcgagcgagaggccgaggtgttttcttcactcatggtgaagaatgggggagatagaaggaacatacagagtcctgcagactgcagggatgcgcttgggtgcccagacccctgtgggagttagcacccttgagcctgggcagactctcttgcccagaatgcaagagaagcacctgcacctcagagtaaagctgctggacaacaccatggaaatatttgacattgagcctaaatgcgatggccaggtattactgacacaagtgtggaagcgtttaaacctggtagaatgtgactacttcgggatggagtttcaaaatactcagtcctactggatttggcttgaacctatgaaacccatcattaggcaaatacgaaggccaaagaatgtggtgcttcgcctagctgtaaaattttttccacctgatcctggtcagctacaagaagaatatacaagatacttgtttgccttgcaacttaagagagacctgctggaagagcgtttgacctgtgctgacaccacagcggcccttctcacgtcccatctcctgcagtcggaaataggagattacgatgaaacgctggaccgagagcacctcaaagtgaacgagtatttgcctggccagcagcactgccttgagaagatactagaattccatcagaagcacgtgggccagacacctgctgagtcggatttccaggtgctcgaaattgctcgaaagttggaaatgtacggcatcagatttcacatggcttctgacagggaaggaaccaagattcaactggcagtttcccacatgggtgtactcgtgttccagggcaccaccaaaatcaacactttcaactggtccaaggtccgtaaactaagcttcaagaggaaaagatttcttatcaaacttcatccagaggttcatggaccttaccaggacacattagaatttttgttgggtagtagagatgaatgtaagaacttctggaagatttgtgtggagtatcacaccttttttagacttttggaccaacctaagccaaaagcaaaagccgtcttcttcagccggggctcctccttcagatacagtggaagaactcagaaacaactagtagattatttcaaagacagtggaatgaagagaattccatatgaaagaaggcacagcaagacccacacgtccgttcgagctctgactgcagacctaccaaaacagagcatctcattccccgagggattgaggactcctgcctccccatcttcagcgaatgccttttactcgctctctccctccactctggtcccctctggcctgccagagtttaaggacagcagcagctccctcacagatccccaggtttcctacgtcaagagtccagctgcagagaggcgcagtggagcagtggctggaggccccgacacaccatcggcccagcccctcgggccccccgcactccagcctggtccaggcctttccacgaagagtcctcagccttctccctccagccggaagagccccctgagtctgagccctgcatttcaggtgcctttgggcccagctgaacagggctcatccccactcctgagccctgtcctcagtgatgctggcggagccgggatggactgcgaggagcccagacacaagcgcgtgcctgcagacgaggcctacttcatagtcaaagagattctcgctacagaacgaacatacctcaaggatttagaagttattaccgtgtggttccgcagcgcagtggtgaaggaggacgccatgcctgcgactctgatgacgctgctcttctccaacatcgatcccatctatgagttccacagaggcttcctgcgcgaggtggagcagaggctggcactctgggaagggccctccaaagcccacacaaaaggcagtcatcaacgaatcggggacatcctgctcaggaacatgcgccagttaaaggagtttaccagctacttccaaagacatgacgaggtcctaacagaactggaaaaggctaccaaacgctgtaagaagttggaggcagtgtacaaggagtttgagctgcagaaggtctgctacttgcctctcaacacgttcctgctgaagcccatccagcggctgctgcactaccgcctgctgctgcgccgcctatgcggacattacagccccgggcaccatgactacgctgactgccatgacgccctgaaagccatcacagaggtgaccaccacactacagcacattctcatccggctggagaacctgcagaagctaacggagctgcagcgggacctggtgggcatagagaacctcattgctcctggcagggagttcatccgtgagggctgccttcacaagctcaccaagaagggcctgcagcagaggatgttttttctgttctcagatatgttgctgtacacaagcaaaggagttgcagggaccagccacttccggatccggggcctccttcccctccaaggcatgctggtggaagaaagtgataacgagtggtctgttccacactgtttcaccatctacgcggctcagaaaacaatcgtggtggcagccagcactcggctggagaaagagaagtggatgctggacctgaactccgcgatccaagcagccaagagtggcggtgacacggcccctgcactgccaggccgcactgtgtgcactcgtccccccagatcccccaacgaggtatctctggagcaggagtcagaagatgatgctcggggtgtccgcagctccctggaggggcatggccagcaccgggccaacaccacaatgcacgtgtgctggtaccggaacaccagcgtgtccagggcagaccacagtgcagctgtcgagaaccagctttcaggatatctgctaagaaagttcaaaaacagtcatggctggcagaagctctgggtcgtctttaccaacttctgtttgttcttctacaaaactcatcaggatgactacccactggccagcctcccgctgctgggctacagcgtgagcatccccagggaggccgatggcatacacaaagactatgttttcaagctccagttcaaatcccacgtctacttcttccgggctgagagcaagtacacatttgaaaggtggatggaggtgatccagggggccagcagctcagccgggagggccccaagcatcgtgcaggatggcccccaaccctcctcagggctggaggggatggtcagggggaaggaggaatgacgctcaacctgcccaggtttggacacaactacaaagaacagcaggacacagaggtgacctctgtcctgaggcttctcaacagatgggaagtggctgtggtctcactggatccccactggcaccagcagtgtgggtgggcctcatgtaacatctgggaggggcttcatccccccacccaggacctagtgcatgccagcagctatctggggccctgggaaaaatgtgcgagtcttgagcgcggagccgctcaagccacagctcccaggcccctggctcaaagacgcagacaaggcctgagcagtgctctcggcatcggaccaaagcctgggcacaccctgcctctctccccagagcagggtccctgccgaggactggcctagagcaagcactggaaaagaggccctgccatacaccctgcgtacccactgccaggaccctctcagacaagcgtggcacagccatgctgaccttccatctggtgaaccaagtggcagccccaggggcctgccctgcaggtcacagctaaacaagtctggcagaagccacgcttgttccccatgtacctctagagaagcagaaaccaaagtccccctgtgccctgggagggtggggccgtctaatttattactgcccagcattccttccaacgggaagtagatgggcgactgctttgttcacacacatttgattaaaaataaacaaacagcatctcccc

SEQ ID NO: 32610 - DNA, 2334 bp, Homo Sapiens
gactgagcactgggagactccaatggggagaaggggaggaacaagcaaaaagatggagaaaaagctaccaccagtgacctaggagaaccagggggctggcatcctgcagccacatgcacatggaagatcactttgattgccatgtggagagtgaactgtgggaggaccccagtggaggcaggaagactaaaccagaagacagtcacagtagtccagataagagatgcatatgttatcaatcgccatgtgaagaagatgcttgcttcccctttgccttctgccatgattgtgagtttcgcgaggcctccacagccatgcttcctgtactgcagaactgtcttcgattagatattacttcttctgaacaatcttccttgatgacccagctactttacatctctggatggaatcctcctctttgctctaatggcatggtgtgcagaagtcagctgtgaaaaggaggaatgaaagcaagtgaaggatgcccttcataaggaacaagcgatctctctaaaaccaatcctagagtatggcttcagattctgctcccatttctcaatgattatgagttttgtgccacatcttctccccctttatccctacaatatttgcatttcatgtttttattctcttactgcctgagcaatttgaaactctcatatttaggcaattcccagatctcgttcttaaagcattgtgattccctttcagcttttcagaggcacgtgtgctggggaaggcactgagtcctccctgtcaatccaatttgtgataaggatttccccaggtgcacccattccatagtccctgtgttgctctgagcctggttggcatccttttgggaagcatttgtattgctttttcatctcagaaaagatactctagtcacaaaccagtcatctgcctgttaagctgtatttagaacaaatcactccgaagcaaaacaacgatgacaacaacaaaagagccacacttatttctttctagacttttaacaaaatgtttgatgttgtggagatttccaaacaattaatgtgaaattgggtactgttgttcacatgatttatttaccatatatagagaattcagctggagtgctactgtcaatgatgctcccaatgaaatttcagcagagagttggaaaatcagcaaattgtttatttccaaagaggaattacattttcaaaggataaaagttaataggagtcatagtgctcaaaaaccacacgatataggaaaacctaccccactccaccaaagggcacatcttgctttgaacacttgatttcatattaacagttcatgagttattcaaagcaggggaatctcctgcaggttgggaaatatcctagtgcttttcatagccttccatgtcatggatcagggacacacacttgtgcacatgtgtgcacagacacaaaacagagagaatgcttaacaggagcacattttacaaaagtgagatcccaggcctggaaaatcccaaactcttataaattttacaaatccaaaatggaatattcaaaaagaactcaacctgtttctcttgagtaacttttcagactctcattacaggccccatgaggtcagtcagatttctgttctacaggatactgcaaaaagagaccagaaatttaaaaaggagtgatggtaccacacaaaatagtaaaaatgaaatagagaaggtgtgaagttagatccttgatttatgtgtggaaagctagtgccaagaatattgttatgggcctggctcctagaggcaagatttgttagcaaaaactgtctctaaatatttatgctcagctaaataattgctaaataattccggatcccagctggaaatctaggatcaggactagcctaaattagtagatctatgtgatagtatattggtattttatccagaaagtacttgctcaatgataggttcaacttcagcatataattcatatacttttataaaagccttttcatggcattacatagaaggcctttccttggaaatatttccataaaataaacaaagcacttaaatcagtccattcaatagcatttgttttaggattattaaagaaatacagagttttgacttccgcagtgtgctaacatggattattctttcatttgctgatccttgtatgtgcagtaggatgttgaaagtgggggtggtggcagcatatttctacatcaccttggactttacctttctgagaatcaacataggtttctaactttttttatggccctgactggtgcttcagtaaacccacgaataaaagcagtactccaatctgcagagactctagaagaaaatactttctatgaaccaaaaaa

SEQ ID NO: 32611 - DNA, 3037 bp, Homo Sapiens
gtggagagagtgcgaggtcaggccatgaacttgggagatggtttaaagcttgaaactgaattactggatggaaaaaccaagctaatattgtctccatatgaacataaatcaaaaatttctgtgaagatgggaaataaggccaagattgcaaaatgtcctttaagaacaaaaactgggcacattctaaaatcaacacaagatacttgtattgggagtgaaaaacttttgcaaaagaagccagttggttcagaaacatcacaggcaaaaggtgaaaaaaatggaatgactttttcatccactaaggatttatgtaaacaatgtatagataaagactgtcttcatatccagaaagagatttcacctgcaacccctaatatgcagaagactagaaacaccgtaaatacatctctagtaggtaaacagaagcctcacaaaaaacacatcacagctgaaaacatgaagagcagtttggtgtgtctaacacaagaccaactacaacagattttgatgactgtaaaccaaggaaatagatctctttccctgactgagaatggaaaggaggcaaaaagtcaatatagtctatatttaaacagtatttctaatcagccaaaggatgagaacattatgggattattcaaaaaaactgaaatggtttcatctgtcccagctgaaaataaatctgtcttaaatgaacatcaggagacatctaaacagtagagaatgaatggaaaccagctgatatattcagtactctgggggaaagggaatgtgatagaagttcgttggaagcaaaaaaagcccagtggaggaaagagctagatgaacaggttgctttaaagaagaaagaaaaagaagtttctgaaaaatggaatgatccttggaaaaaatctgaaagtgataaaataatatgggaaaaacatcaaattcttgaccaatctagggaaacagtactgctggagcaccctttcagtgctgtgaaacaagaactgcaaagaaaatggattgaagagttgaataagcaaatagaagatgaccgtcaaagaaaaatagaggaaaaaattatatattcaaagggtgaggaacatgacagatgggcaatgcactttgattcattaaagagttatcctggttctcaatctcagctgttctctcagtcaacacacaaacaacctgagtacttctgtgtctctcctgacactcaggagctggctgatgtcagcagtgtttgtacacctacaaccggaagccaggttgaaccttcagaggaggagcatatagcaaaacctattaaggatgtggttatggcaaacagtaagaaaacaaactttctccgttctatgactgctctcttggacccagctcagattgaggaacgagacagacgacgacaaaaacaattagagcatcagaaagccatcactgcccaggtagaagagaagcgcaggaagaaacaactggaggaagagcaaagaaagaaggaagaacaagaagaggagcttcgcttagcacaggaacgtgaagagatgcagaaacagtatgaagaagacatacttaagcaaaaacaaaaggaagaaatcatgactctcaagacaaatgagctattccagacaatgcagcgagcacaggaactggcacagagactaaaacaagaacaaagaatccgagaattggcgcaaaagggacatgacacttctagactgattaaaaatcttggtgttgatacaatacaaatggaatataatgcatctaacatttcaaattcaagacatgattctgatgaaatcagtggtaaaatgaatacatatatgaattctacgacttctaagaaggatactggtgtgcaaacagatgacttaaatataggaatattcaccaatgcagaatcacattgtggatcattaatggagagggacatcacaaattgttcatctcctgagatttcggcagaacttattggacagtttagcaccaagaaaaacaagcaagaactaactcaggataaaggagccagcttagaaaaagaaaacaatcggtgtaatgaccagtgtaatcagttcacaagaatagagaaacaaacaaaacacatgaagaaatatcctaaaaggcctgattggaatataaataagccacctaaaaggtatattccagcatcagaaaagtaccctaaacagcttcaaaagcagagagaagaaaaaaaagtaaggaggcagatggaattgcttcatttggtagaaaaaaataatcctgggcacctctctcaaaacagaggcatttcaccagaaatttttcattcatctcatcaagaaacggagtcaaagttgaggtggcatctagtcaaaaaggaagaagagcctctgaatattcattcattcagcaaggaaaggtctccatcatcaccagttccagtagtgaaaaacagaacccaacaaactcaaaatacattacatttaccactaaaaaacagtagctatgagagagagaatttgatctcaggaagtaatcaaacagaattatcatctgggatttctgaatcatcccattttattccgtatgttcgaacaaatgagatctattaccttgatcccgatgcaccattgtctgggccttcaacccaggaccctcagtaccaaaattcacaagactgtggccaaaaacgacagctatttgattctgactgtgtcagggatccacttcttaatcctaacatggtgaaaaatagggatcgacagcaagcaatccttaagggactttcagaactgagacagggccttctccagaagcaaaaggagttggaaagtagtctcctgcctttagctgaaaatcaagaagagagttttggttcttcattttaaatgtagaaaatcaaatccttcacatttgatttgtgtcttccaaattataaaatgtgctcactggctcaactgtatttttcaaatagcctagatttacttatttttttaaatgctcattaaaaacttgtatactatgtagtaaaatgctgtacttgttctatacaataaaacagatacttcttttg

SEQ ID NO: 32612 - DNA, 4075 bp, Homo Sapiens
actttttgtaaacgccccgcacagcctggaccggcctgcccccgcccagcgagcctcaggggcccagccgacagccaggctcacgcgcccttgaaatctgccggtactcgctctgcgggctgggctgggagatgacgaggaccccggtggggtctgcccgcacccggccaaagcccaggaagctcgggccccagcgaggaaaggcgctccaagcctcctcgcggctttcagaatccccagccctggtgaagaagaggatgcctgatgcgtgcaccctgggaagggctggaatcggtctccccaagatgtgccttcacatggctgtccggcattcgaaggctcagaaaacagggccgggaatcctgcaacagcggcagaagccgcccgcgcctcgggcttccggcggcccagctctactagggaagcgtcgcggctgctctgaggcaggcagcgcttcgctagaaccactcagctcgtcccgcgccgccgccggctgcctgaaccaggttccgctgtcccctttcctagcgggaccccgaaacacccggcggcttcccgctcctgagcgggagagaatagagcttgctgcaaccctctgcttggagggatggcctctgcggtgcttggctagcaaagggaagcttcactgtgtctattagtacatccccatacactccacgcctcaacaactgtcagcactcactccctcccggcccctcacagggccctttgcacccacacctcagggactcggtgtccctccactcaggtcacgttactccatccacttctctctccttctccctctgtcaactccaaatcccctctagttctccctcccctcctacttctctcacactcaccagctacacgtactaattcagattttgcacatgttggtggaaaacatgtcaagccaatgtgcagaccctaaggcttttcacacgctgctcactttcgcatctcacggtgcagaaggaccaatgggctccaggtttacaagcctgactccgagaagcctgttgattctctgatgtccttggcctgtgattcgggtgactgggctgccacctgggtgttttcatgatgggactgccgcacagaccacagagaagctcaggtactgagcacgttccagatacactttaacatgcacaggccactcacacaggctttatctctgtctcgaaactctgctgagtttgctgctcagaccaacaaggtgcagcagcagacacccacatagcaccaggtctgaagccagtgggtattagtctgcctggttgggattagcaaagtcagttactcacatatgtgcttgggagagaataggggagtggagagagagagagagatattgaggaagaggaaagagaagcgacctcctactctgggaagaactcacacatgagagctgtttcctgttgttaagtgtctcactgagctcccctctttctcccccaggaagggcttgagaggcagtagaccagagctctgggctcctctttaccttgctgatgttggggtatgagtcctccaacaccattttgtcccaaggagtatgtgccccatcgtcaatcaggcagaatgcagggcagttgtcggcctttttcatggtggaggccaactgggaaaaaggcagaagggtctgggtcctgggccaagtgaggccctcttccctccaaagacccgtgggatgctctcagaggcggattctagggtggtgggagctgctgacaagtttcctctgatatccctcatgacatctatggcccaaagccattttgttcagctctgaacagtgagtgccttgccagtaggcctcaggcttgctggggaacatgatgtgttcttaaaagttgccttgttgcctttctccacacccagactgtaagcgctgatgggcagagactctgccctccacttctcactcagtgctccccaccaggatgggcttaatgccttttaatagaattagaaaatggttctgctggacagaattgggaaatgccactttccttataatgaagttataatgaagttagaatttccaagaaagggactgtagctgaggaaaagcggtttgatcattgacagccagctcaggatctgagagttctttgccatttggggttattatagctgcatggccatggtgctgaaccttaggcaagggcaaggacacctccctagttcccagtcatggtgaggacctgtctgaaacattcaaactagactttactggaaacagagaagtctctgcattcagggcagctggcttgcaaggtaaggcctgcagtctccacccgcacgctaacccatgaggggatgccagagagagcccttcccccttggtcctcattcctggctcaattttctcccacaaagcgggcactttctaaagatgataggcaactgccatggaggaaggcagttttagatgcctagctggcacaaagtccagaggaagggagggagaagggctgagttttgtattactgttctacctttggagattttcctcatgccaagatagggtgtgtgtgtgtgtgtgtgtgtatgtgtgtgtgtatgtgtgcactataactttatgaaacactttttttttttttgagacagggtctcactctgttgcccaagctggagtgcagtggtgcaatcttggcttaccgcagtctccacctcccaggctcaagtgatcctcccatctcagcctcagcctcccaagtagctgggactatgggtgtgagccaacacactcagctaattttttttttttttttttggtatttttggtagagacagggttttaccatgtgggcccaactggtcttgagctcctgagctcagggtgatttgcctgcttcaacttcccaaagtgttgggattacaggtgtgagccaccatgcccagtcagttttttattttttatttaaacagttttgggggaacaggtggtttttgcttacatggataagttctttaatggtaatttctgagattttggtgcacttgtcacccgagcattgtacacggtacccagtgtgtaatcttttatccctcatccccctcctacgcttccccccccgagtccccattatataattctttttttcttctttttgagacagagtctcactctgttgcccaggctggagtgcagtggcatgaacttggcttactgcagcctcctgagttcaagtgattctcctgcctgaacctcctgtgtagctgggactacaggcatgcaccaccatgcccagctaatttttgtattttttgtagagatggggtttcaccatgttggccaggctagtcttgaactcctaacctcaagtgatctgcctattttggcctcccaaagtgttgggattacaggcgtgcgccactgcgcctggtccattatgtcattcttatgcctttgcatcttcatagcttagctcccacttataaatgaaaacacaggatatttggttttccatacttgagttacttcacttagtataatggtctccagctccatccaggttgctgtgaatgccattattttgttcctttttatggctgagtagtattccatggtgtatatatatcacattttctttatccactcattggttgatgggcatttagccttgttccatatttttgtatgcagtataacttacagatggtaaacaatatacagcttgatgtattctgacatgtaatgcagtatgtaaccaccacctggatcaagatatggagcatttctggcacttcagaaggttccttcatatctttttccaatcaatattgcctcaaaagggaaaccatatttggatttctatcaccataaataacctttgcctgccttgagcctcgtataaatggagcatatagcatgtatgcctttatgtctagttttttctgtgcaacatatttttaatattcactggtcttgttgcatgtgtcagacatttatttctttttattgctgtgtaatattctagtatttgcttatccatccatatgttgagggacatttgtttccagtttttggatatcataaataaagctgctgtgcacattgttg

SEQ ID NO: 32613 - DNA, 3566 bp, Homo Sapiens
atggcagcagcttcatcttcatcagcatcatcattctcactggcatgtgctgccagatttgccaacaatgtccatagcttgacccaggatttttcctatgactctatcaacagtgggctgcgtaaggagcaagggcgtcaaatggtcctcagtgttcaggcccggaacaacgactctccatccataatgggggtgggccgtgcggacggcaccacgtggaacgagggctggcgaccattgctaatcccagagagggccacctgtggccagggctcccaagccctgtgtcccatcactgatgccaagaggtcacagctgccacccctgcagggccaccagaaggcaccacctatagcaagcatcagccacacctcacccctgcagagagataaaacagcagtaacaggaacctgcctgtggcggcccactgcccagaacccccacacccagggggtgccttgcccggcccctggccgtctcacccgggcgtcgggtccacttgcaaccttcagagctccttccacaccatcaggtttagttgaatctccagtaccaggcaaggtgccttgcccagagcagaatcaagtacaactggacaagagctggcacatgtgtggtcagatgctgggcgtggccccaccccatgccagccaggaaccattgatatttaaatgtggcctttggctaaatggtaagtgccaaggtacctccattgataatggggatggtgacttcgagcacaagctctttgaaagccttagaagacgtacaaccataaacattttgtttccatatgaaaaaggaatagacacccgcttcttaatccctgcctcggaggcagctcccacggcgctcaacggactcctgaccttcatgaacagaccacggggccggcagcacctgcatcagcgtctgtctggcttcctcttcaaaacccaacagactccatctgggccccagaaaactgccctgatgctacagatgccgggagctctcctgccgccgtgggagggggagctgagctgccggagcgtgcgcactgggccagcgggcggccggggcagggctggggtcccggcgctgagcgcccccagccgcgccgggcagcctggcgcctcgctgagtcggagcaacccccggcaggagctttcaggctctggtcaagcctcgggacccgggaagctatccctgccctcgggggctcgagcctggagtggggcttgcagaaaaggaaagggggctggcctaaaggcaagaagagaaaccccccgagggaccttgctgttccgtgttcctacgacagggtacatgatattcctgaatgagcagagaagtcagctgagggccacacaccccgatctgcctttcacagaaatcatgaagatgctggctgttcagtgggcccagctgtctcaggataaaaagggggagatgaactcaatgacctctactgcgggacctccaggcagctcttcagctccctgtgcaacaagaaggaacctgctgcaaaggcagcacctgcagcgcctctcaggtaaccagcctgggccaggcggctcagccgcaaacgctggccttgactccacctgcgccagaggtcaccaacaggcggcccacgtgacacctcttgttattaaaatgcaattttaagacagactctagtcaagcccacttaccaccaggtgggtgtttaggacagggtaggtcttccactatatctgttttcctcttagttcgccaggcccgcctgctctgggccacgcaggacacggacgtcagcttctcctggagcgctcgctcactttattccatctctacgagctcctcaagtatcccagagcatccccaggcctgtggccacctcgggtctggatgccgcattctctgacctgtggcacattctgggtgcccatgattatgatgaggttctgtgcccatgtggcctcagggctcttgagaccacccttcaaccaggtctttgctcacctgtctcctgcccagggacgccacccaggtcaccggtgcaaacctccagcccctgcccgtttctctccatgagtgcattgccacctcgcagcctcttccacttgctcattcctggtgttattgcctgtctcccactggaagagaaggccctcaagttcagcaactgttttgcctgttttgttcactgtggtgaaccccgggcctagaaccacgcctggcactcccagtaggtgctcaataagtatccaatgagtggacaaatgaatggatgtgttcaacaaatgaccctagagcgtgtattccttccagggacagagcgaggtactggggacacaggaaggacgaggcagagctccgcgctgacgaaaccaagggccaagcgtgcgagtgaatacgaacatcctggcgttaaaacgtcttgcattctagtgaaatgagacccattggacacagagaagccccaccacaattgcatctgtgtaaaatcgagagaaagatcgtgaaaacagccatggcaggggaatttaaaaaagatcctgccacgtactcatagcacctggagcctctggaggaagaggagggacaaatgaggtcaagtcagaggaggaagctgagggccccgagtcccttctgctcagatgtccgcatccagagaggagttctgcttctctcaacctgtgtttcttgcaagagtttatctataaattgctgaaaaatgggtaatcaagttcagcaactccctggcatctgtgatgacctatggtttgtaatcctagtcagaatcacctacatagaggatataatattaatcagaacaaaacagaaaagtcgctagaggaataacaatagtaaaatttacaatcagatgaagaataaagttttcaatgaggcacagttctaagcacttcatacaaataacctgtcttaattctcataaaagtactgcaaggcaggtgataatatcatctccttctaaagataaaatgcagcacagagaggttaagtaacttgtccaatgttgaacagctagtgagtggtcaatctgagatttaaatccaggctgtctgggtccaagaactctgttcttcactacttctcaacaacatcaactatgtaaaatgacacacatacataaacccacatcaatggtaatggtggtaatctctggccggcaagatgaaagaagatgttatgcaattcttcagtcctttctgtgtctgccacattttccccaatggatagatgtcacttaaattatcagaggaagaaacaaactctattaaaaggaatttcaagggccgggcaagatggatcacacctgtaatcccagcactttgggaggccgaggtgggcggatcacctgaggtcagcagttcgagaccagcctggccaacatggcgaaaccctgtctctactaaacatacaaaaaaattagccgggcgtggtggcacatgcctgtaatcccaactacttgggaggctgaggcaggagaatcacttgaatctgggaggtggaggttgcagtgagccaagatcgcaccactgcactcaagcctgggcgacagagcaaggcttcatctc

SEQ ID NO: 32614 - DNA, 1397 bp, Homo Sapiens
gcgagtggttaaaagacagttggtgtcggttcggcttctcgggtcggattccgcggtcccaacccttccccatggccgaccctgaggagttgcaggtttcttcgccgcccccgccgcctccctcttctccctcctcttcagacgcctctgcagcatcttccccgggcggcccagtgagtttgggctggccagttccgagcaggagcagcggcccaacggtggaccagctggaggaagtggagctgcagatcggagacgcagccttttcattaaccaaacttcttgaagccacatctgcagtatcagctcaagtggaagaacttgccttcaaatgtacagaaaatgcacgtttccttaaaacgtggcgggacctcttgaaagaaggctatgattctttgaaacctgatgactgatttggcatacttcgttgtttaataatgactgcaataattcatacttcttatgtcatattttgtacatgtaccacacatataggatgacctctgtccagcagttctgtatatactcagaatgaaatttttcttggttttcttggtttttgtgaaagcagaataccgatgctatttttgttgcggaccagtacttgtttgtccttaaatactttatgcctctgaactttcatagaatcctttatgaaagttaacttcatcaatagacggttaatattaatagagccacagtgctaccagtagcaaactaggtagaccattatttgttttgcaacaagatgctaagcatggcagactttgaagttgcgtttcatcttaaggaccaagggaggtaactttaaggttgccagtggtggatccagctccgttaggctaagttgtctacagctaatgattgtgtctttattctatatccccagcacctaaaacagggtcacacaacattcactaaatgtttgttgaataaaagagttaacaaacataattgaaagctttttttcttcctatatttagcatgaagactgtcattgtttctctaggaaatgtatgaatctgaacttttttgacttgaagaaaaacattctttttttacagagatttggactttgatgataggttttaaaaatatatgataaatattttttgtacttgtttgattttttttttaaagactttacttcagaaagggaaagactgtttagaaagaatgcatattttttccctatttatttctgtggttactgcttttgcagtttaacagtgtttgtatttgatatttgtatatgtttgattgctatctttaaagtgccttatcagatttatggctctgtgctattactttttgagctttgcaagttgtgtacataataattctaaagaagttactttgtttgcaatgcatcaaatttaaatgatgtgatttttttt

SEQ ID NO: 32615 - DNA, 6693 bp, Homo Sapiens
cttgccatcgtgagagattggtacatgatgtgtaaattcagttcagcatatgtttcttcattatgaaaccactagcaatcccagctaaccatggagttatgggccagcaggagaaacactcacttcctgcagatttcacaaaactgcatcttactgacagtctccacccacaggtgacccacgtttcttctagccattcaggatgtagtatcactagtgattctgggagcagcagtctttctgatatctaccaggccacagaaagcgaggctggtgatatggacctgagtgggttgccagaaacagcagtggattccgaagacgacgacgatgaagaagacattgagagagcatcagatcctctgatgagcagggacattgtgagagactgcctagagaaggacccaattgaccggacagatgatgacattgaacaactcttggaatttatgcaccagttgcctgcttttgccaatatgacaatgtcagtgaggcgagaactctgtgctgtgatggtgttcgcagtggtggaaagagcagggaccatagtgttaaatgatggtgaagagctggactcctggtcagtgattctcaatggatctgtggaagtgacttatccagatggaaaagcagaaatactgtgcatgggaaatagttttggtgtctctcctaccatggacaaagaatacatgaaaggagtgatgagaacaaaggtggatgactgccagtttgtctgcatagcccagcaagattactgccgtattctcaatcaagtagaaaagaacatgcaaaaagttgaagaggaaggagagattgttatggtgaaagaacaccgagaacttgatcgaactggaacaagaaagggacacattgtcatcaagggtacctcagaaaggttaacaatgcatttggtggaagagcattcagtagtagatccaacattcatagaagactttctgttgacctataggacttttctttctagcccaatggaagtgggcaaaaagttattggagtggtttaatgacccgagcctcagggataaggttacacgggtagtattattgtgggtaaataatcacttcaatgactttgaaggagatcctgcaatgactcgatttttagaagaatttgaaaacaatctggaaagagagaaaatgggtggacacctaaggctgttgaatatcgcgtgtgctgctaaagcaaaaagaagattgatgacgttaacaaaaccatcccgagaagctcctttgccttttatcttacttggaggctctgagaagggatttggaatctttgttgacagtgtagattcaggtagcaaagcaactgaagcaggcttgaaacggggggatcagatattagaagtaaatggccaaaactttgaaaacattcagctgtcaaaagctatggaaattcttagaaataacacacatttatctatcactgtgaaaaccaatttatttgtatttaaagaacttctaacaagattgtcagaagagaaaagaaatggtgccccccaccttcctaaaattggtgacattaaaaaggccagtcgctactccattccagatcttgctgtagatgtagaacaggtgataggacttgaaaaagtgaacaaaaaaagtaaagccaacactgtgggaggaaggaacaagctgaaaaagatactcgacaagactcggatcagtatcttgccacagaaaccatacaatgatattgggattggtcagtctcaagatgacagcatagtaggattaaggcagacaaagcacatcccaactgcattgcctgtcagtggaaccttatcatccagtaatcctgatttattgcagtcacatcatcgcattttagacttcagtgctactcctgacttgccagatcaagtgctaagggtttttaaggctgatcagcaaagccgctacatcatgatcagtaaggacactacagcaaaggaagtggtcattcaggctatcagggagtttgctgttactgccaccccggatcaatattcactatgtgaggtctctgtcacacctgagggagtaatcaaacaaagaagacttccagatcagctttccaaacttgcagacagaatacaactgagtggaaggtattatctgaaaaacaacatggaaacagaaactctttgttcagatgaagatgctcaggagttgttgagagagagtcaaatttccctccttcagctcagcactgtggaagttgcaacacagctctctatgcgaaattttgaactctttcgcaacattgaacctactgaatatatagatgatttatttaaactcagatcaaaaaccagctgtgccaacctgaagagatttgaagaagtcattaaccaggaaacattttgggtagcatctgaaattctcagagaaacaaaccagctgaagaggatgaagatcattaagcatttcatcaagatagcactgcactgtagggaatgcaagaattttaactcaatgtttgcaatcatcagtggcctaaacctggcaccagtggcaagactgcgaacgacctgggagaaacttcccaataaatacgaaaaactatttcaagatctccaagacctgtttgatccttccagaaacatggcaaaatatcgtaatgttctcaatagtcaaaatctacaacctcccataatccctctattcccagttatcaaaaaggatctcaccttccttcacgaaggaaatgactcaaaagtagacgggctggtcaattttgagaagctaaggatgattgcaaaagaaattcgtcacgttggccgaatggcttcagtgaacatggaccctgccctcatgttcaggactcggaagaagaaatggcggagtttggggtctctcagccagggtagtacaaatgcaacagtgctagatgttgctcagacaggtggtcataaaaagcgggtacgtcgtagttcctttctcaatgccaaaaagctttatgaagatgcccaaatggctcgaaaagtgaagcagtacctttccaatttggagctagaaatggacgaggagagtcttcagacattatctctgcagtgtgagccagcaaccaacacattgcctaagaatcctggtgacaaaaagcctgtcaaatccgagacctctccagtagctccaagggcagggtcacaacagaaagctcagtccctgccacagccccagcagcagccaccaccagcacataaaatcaaccagggactacaggttcccgccgtgtccctttatccttcacggaagaaagtgcccgtaaaggatctcccaccttttggcataaactctccacaagctttaaaaaaaattctttctttgtctgaagaaggaagtttggaacgtcacaagaaacaggctgaagatacaatatcaaatgcatcttcgcagctttcttctcctcctacttctccacagagttctccaaggaaaggtggcagtggcaatcagctgagatcttttggctccgggcagttggacttaaccagttcctcctcttctcttggaagtgagaacagtaacaagaataacaatgcaccacggacctatgggataggctatactttggctcccagtggtactgtggataatttttcagattctggtcacagtgaaatttcttcacgatccagtattgttagcaattcgtcttttgactcagtgccagtctcactgcacgatgagaggcgccagaggcattctgtcagcatcgtggaaacaaacctagggatgggcaggatggagaggcggaccatgattgaacctgatcagtatagcttggggtcctatgcaccaatgtccgagggccgaggcttatatgctacagctacagtaatttcttctccaagcacagaggaactttcccaggatcagggggatcgcgcgtcacttgatgctgctgacagtggccgtgggagctggacgtcatgctcaagtggctcccatgataatatacagacgatccagcaccagagaagctgggagactcttccattcgggcatactcactttgattattcaggggatcctgcaggtttatgggcatcaagcagccatatggaccaaattatgttttctgatcatagcacaaagtataacaggcaaaatcaaagtagagagagccttgaacaagcccagtcccgagcaagctgggcgtcttccacaggttactggggagaagactcagaaggtgacacaggcacaataaagcggaggggtggaaaggatgtttccattgaagccgaaagcagtagcctaacgtctgtgactacggaagaaaccaagcctgtccccatgcctgcccacatagctgtggcatcaagtactacaaaggggctcattgcacgaaaggagggcaggtatcgagagcccccgcccacccctcccggctacattggaattcccattactgactttccagaagggcactcccatccagccaggaaaccgccggactacaacgtggcccttcagagatcgcggatggtcgcacgatcctccgacacagctgggccttcatccgtacagcagccacatgggcatcccaccagcagcaggcctgtgaacaaacctcagtggcataaaccgaacgagtctgacccgcgcctcgccccctatcagtcccaagggttttccaccgaggaggatgaagatgaacaagtttctgctgtttgaggcacagacttttctggaagcagagcgagccacctgaaaggagagcacaagaagacgtcctgagcattggagccttggaactcacattctgaggacggtggaccagtttgcctccttccctgccttaaaagcagcatggggcttcttctccccttcttcctttcccctttgcatgtgaaatactgtgaagaaattgccctggcacttttcagactttgttgcttgaaatgcacagtgcagcaatcttcgagctcccactgttgctgcctgccacatcacacagtatcattccaaattccaagatcatcacaacaagatgattcactctggctgcacttctcaatgcctggaaggattttttttaatcttccttttagatttcaatccagtcctagcacttgatctcattgggataatgagaaaagctagccattgaactacttggggcctttaacccaccaaggaagacaaagaaaaacaatgaaatcctttgagtacagtgcttgtccacttgtttacaatgtcctccttttaaaaaaaaaaaatgagtttaaagattttgttcagagagtaaatatatatccatttaatgattacagtattattttaaaccttaagtagggttgccagcctggtttctgaaaaaccaaatatgccggacagggtgtggccacaccaagaagacgggaagacctggcttgtgaccctggcttcccatgtccttctggtctcacccgcgaagtgccctatcctggaagtatgaaatgttagccaattaataccaagacacctcatctgctccttccccagtggatggggttcttctgtaaaactgtttgcacatggccaggggagggaactaggacccttgtgtcctgtctgagccttatggaggcaggacggtgtcattggcggatgtgtcctgctccattgagatggatggcaaaccccatttttaagttatatttctttgatttttgttaatttagaggtgtaggttttgttttttgtttttttgtttttttttaagagaaacatttataactggatagcattgcagtgaaagcagcttgggatgttggagctaatgccagctgtttatactgctctttcaagacagcctccctttattgaattggcattagggaataaacaagcctttaaacgtgataaaagatcaaaaacctggttagacatgccagcctttgcaaggcaggttagtcaccaaagactaacctccaagtggctttatggacgctgcatatagagaaggcctaagtgtagcaaccatctgctcacagctgctattaaccctataatgactgaaatgacccctccactctatttttgtgttgttttgcacagactccggaaaagtgaaggctgccaatctgagtagtactcaaatgtgaggaactgctggtcttggattttttttccattaaattcagctgatcatattgatcagtagataaacgtaaatagcttcaaattttaaaagtggaattgcagtgttttttcactgtatcaaacaatgtcagtgctttatttaataattctcttctgtatcatggcatttgtctacttgcttattacattgtcaattatgcatttgtaattttacatgtaatatgcattatttgccagttttattatataggctatggacctcatgtgcatatagaaagacagaaatctagctctaccacaagttgcacaaatgttatctaagcattaagtaattgtagaacataggactgctaatctcagttcgctctgtgatgtcaagtgcagaatgtacaattaactggtgatttcctcatacttttgatactacttgtacctgtatgtcttttagaaagacattggtggagtctgtatcccttttgtatttttaatacaataattgtacatattggttatatttttgttgaagatggtagaaatgtactatgtttatgcttctacatccagtttgtacaagctggaaaataaataaatataacat

SEQ ID NO: 32616 - DNA, 6184 bp, Homo Sapiens
ggcgaggggtgcacggcggccacctgagtggcgcggcggtgtcaggttcttgctcaagtaccaactctatggacccaggacaggtttgtcccatgacctgctgtgaacagtgtgttgtctgatagaagattcggttggcaaaccatctctctattgccttacagagcaagcaaagaagatggatcgattgaagagccatctgactgtgtgctttctaccttctgtgccctttttaatcctagtatccactctagccaccgctaagagtgtgactaacagcactttaaatggcactaacgtggtcttgggctctgtgcccgtaatcattgccagaactgaccatatcatagtcaaggaagggaacagtgccttgattaactgtagtgtttatggcatccctgacccacagttcaagtggtataattccattggcaagctgctgaaagaagaagaggatgagaaggagagaggaggaggaaaatggcaaatgcacgacagcggcctcctgaacatcaccaaggtatccttctcagaccgaggtaaatacacgtgtgtggcttctaacatctacggcaccgtgaacaacacggtgaccttgcgcgtcatcttcacttctggagacatgggtgtctactacatggtcgtgtgcctggtggccttcaccatcgtcatggtcctcaatatcacccgcctgtgcatgatgagcagccatctaaagaagactgagaaggccatcaatgagttctttaggaccgaaggtgcagagaagctgcagaaggcatttgagatcgccaagcgcatccccatcatcacctccgccaaaactctagagcttgccaaagtcacccagttcaaaaccatggagttcgcccgctacatcgaagagcttgccaggagcgtgcctctgccgcctctcattatgaactgcaggactatcatggaggagattatggaggtggttgggctggaggagcaggggcagaattttgtgaggcatactccagagggccaggaggccgcagacagggatgaggtctacacaatccccaactctctgaagcggagcgactcccctgccgctgactcggacgcctcatcgctgcacgagcaacctcagcaaattgccatcaaggtgtcagttcacccgcagtccaaaaaagagcatgcagatgaccaagagggtggacagtttgaagtcaaagatgtagaggagacagaactgtcggcggaacattcccccgaaactgcagaaccttctaccgatgtcacgtccaccgagctaacatctgaagagccaacacctgttgaggtaccagataaggtactgccgccagcttacctggaagccacagagccagcagtgacacatgacaaaaacacctgcattatttacgaaagccatgtctaataccaaccccgaaaagctatgcatatcaagaaaatcaggggctgctccttgtaatacagatgtagtacgcacttgccgctaagccttaccaggagactctcatcccttaggtaggagtgatgccactttaaaaggagaaacacctgcctgcagtgaatgggactggaatttccccagtagagaagggtgcgagaaacatcagggtgcagaattgataccagacagaaggtgtctatgtgataatgagtttcagaggctgatctctgccaaataccttaattggtgatgccttcttggcaaagagtacaccactgtaagatattctgagttcaagaaccctgtccagtgccccctgcattgcttttccttttaaaaagtataggtctgctacaatagcaaatgcacgtacgtgggttttttgcagtttcttctcagttttaattttgcttttcctttataatggggtcattgttattaatactaattgttctttctggtttagtcctcattgccacttttgtccttatgtttccctagaacacgtacctcagagactttggtatcagtcaccagtaccagggctgatatctacaagtcacattacatttgtcatgttccaaagtagttacgaggcttgttatttttttttcattccccaggcctatttccatagatagctttttttgtttgtttccaacgaagctgctgttaaacgaaactgagaaaaactttgccccggaatagcactttaatagtcaaaaatgtgtttacctgtctgattgagtgagccttttggtgagctcagctgagatgtagagggagattgtaaaaggttaaatatacccacaccacccatgaaagtcactgtttaagttacatcatcctccaaataaagactgattctttacctggaaaatatattgcttccaaagacatcagattcagtggattcctgtaggttatagaatattggcttccaaacaggcttgcagggaccatatgctgttggatgacatataaccaggtccacttttatgaactgcatagctgacttggttgtccttaaagaggaaagcgaaaggttagggtaatagcaaagggaactgtgccatcagattttatgccaaaactgttgaataattatgcagtcctgcaagaaagtggttatatgtgaggtgcgtgatgttatggaaagaagacaaaattagtcatccaaaggcttaatacccactgtgccaataaccagctgcctggctttggacaagtctggacctcaggtcccttatctgtagaaggggcagatgacatgagctctgagcactgttgaaatggtatcactgtcacacagaaccaaaccaatattcacatccttgctccttttcacaatgactttaaagatttttgctttcatctcttggtccacctaacattttcatgcttcattacttaaataagaatgttggttttgagaaatagcattttaaacaaattgtggatcttctccttccaaaaaaaccattaggaccacatctgcaattaagatttaatattggtgagaatgagtggttttatttaattttcccttaaaagcaaaggagacagtaatcttaataaattcataggggccgtggccacatcaggtaatggggttatgatgtccaagattgcatggatcacattggtgatgagagcagacccagatgtttagtcctcactctgtcaccatctgaggaggtgaccttggacaactcccttcctctctctgggatttaatctttttcatctgtaaaatatgcaggtagtactcgagggtctacaggatcccttctagttgaaacatttatagttcacagaaagtttgcagtcttccaggataaccaacccccgttgcatgagacaagcaaaaaatgggtccatgaaattggatacttttgccatccaaactttacaacaaacattatctggctctgtaattgagagcagtgggcttggttttaaacctagccttgattagtttgtttatagataactgttgtggaaggtgatagaactagtcatggagtttgatgagacatctcttgaaaaggactgaactgttgacttctggttagaagtgctttgggcagtcacataaagaaatgagcagtgagaaatcaggagaaattatgactcctgttgggctttctggactagcattgtatgtttttgggttgcagaaaagttttaacaccacctcttagaatataaaaattttccagttgtcatggaggtccacagattcattaccatgggtttatatgcccaaagcaacaacagaggacttaagttcattttgtgatactgtatggatgttaccccatcctattcagttgtcattccacccaaacccatgtgtaggtttccacatggaaaggagaaggcatccattccacctagacattgaatagtgataataagctaaaagtgggcagattttcagtggagcaagagcagaaatatgcggccaaagaatgtttcctgattggttttgctgctttagactgcagtggggagagcttatgtagattttcaaaactttctccctctttaaggcatcataatgctctcggttttgataacaactgacataaagggaggttgacttaaaatgggaatttctccttccaaaaatgctacactcttcctatccatcctacagcttctttatgaaatgagaggccctcctgctagaatatgaaatgcagaagacctcatgactttcagctgatttttcaaagataaagtgaactgttcagcttcatagaaattcatgcgagtgtgactgaacgtgtgtgcatacacactcgtgcacattggactcatttgggcagttttaaaagcttcacactaaatccaaagcctcgtcctttgggtcgtatgtagtcgtttgtaaaatcaatttctggcttctgagtcatcctggtcatatctctagcaatgtttttcttgaaattctgaaaatgattcacatatgtgtgtacatttaattcacttagatgatctgtaaacttggatggtatttattctaaatggggaaaacaattttatatggaaaaatctatgtaatttataatggttttgttttatatattatattttcatatctctagggcacatctatcctcatctttttgtataccatacttagcaaaaagaaatactaatacttgactaaaatctctaggaaccaaacgtgatacatgtgatatatagcttctagaaatcgctctaaaaatctctgaatgtctcatccatcccaagcattattgtgctgtgtcattatgtccagaatgatttgtcttggatgcttatgagcatttgtttttcacaactaaggttgaaagacctgacatctcacacaatggggttctggaattcccctttcctcctttatctgtttttattgtttgtttcatttttaattgcaccagtctatgttgtcgaaactttgttttgaagggcaaatgtgagataacaagaaagcaatgtgatggaaagactggatgaatttacctatggctatgtaaattattttaatggactgataagatgtttcaagtctcatgcttggatctttatttattggtgatctaggatctgctcagctctttagcacatgaagaaaatcaggtacaaaggacatttgcatgtttggaacagcatgctctaagccccgtgcagccaacacaaattaacttgactgtagaaacaccaattccagctgctggaagaaatggtttagaaaggcaaaccagataccttttattctgccctaggaaatacagtgttgatcagtgctaaaactcttcagtggcagtcactgtggttcttttaactggggatttcctttcagtgtttcatttggtaccaaaacagaacatttaccttacatttcagatactctgttttctcagcattgttcagatactttcctttaccgctcttcacgtacccttttggcattgagtaattctataaatgtttctatccttggtttttaaaccaagttattcatactcttaaaatatctaccaaatctcattgtattttcacatattttgagcatcaagatactggtcattttaaaaaatccttcagtaaatagcacagtttattttcctaatgacatttttagggtttcttcattgatcaaccaggtttgggttacacaaatcaattgtgggggaaaaatcaaataaaacaattgcttattatattttccaaaggactgagcatttatcttttattcacgaagatatcatatgaggatgataatgatctttaacagattttttagagatagaatttataaagaggctgatactaagaatactacaatcaaaattgaagctagagaatgtaaaaatagaaagtaaatagttctaagaatattctggcataaattatttttatttagccaataaaatagcctccaaatgtatatctcagacaccatagagctgctaacaatgagaatcaaggaagatgcttgcacttagatttcgtttgttgtatttcagtagttctggatgtcctttgttaaaattggaaaatggaaaaatgtctcgacagaaatgtcaatctggtgattctgtgaactgtaaaatgttcacttttaaaaataaagttgtaaacaagttactcatataagttggtattacagtagcaaaaacagaaaaccatgtgatccatcctgtattttgattgatgctttaataaagggtttgcacagctgtg

SEQ ID NO: 32617 - DNA, 1802 bp, Homo Sapiens
atgccaggcaagcctgccttccatgctccctccaccatcgtcctcctcggggagctaacacagctgcttgggctggataataacccaagaagtggacccccagccgctctgctggggcacgcgtggacagcgcgcgggcacttccgcttccggcaacggcgccggaagcacgggtccgggccctcccgcggggcgggtactcgtctcccggccgagcgacttcagctcggggacctgccccatggccgctccccagcaggacagggaaaccgccgaggtggggggcttcttgtccgtcccagcccccccaactcaggccctctcgctgcccctggcgaccaccgcgtgcgcccttccccagggcgggcgcagtcctggacgcctccgccgagcgtgactgcgtgcattttctctcctttcccttcccaacctgcggagagaagacagccccagagccgctgtctccatcctctgctgatgcctgctgtctttatgttggcctcgtcgtccgcactgcagtgtggcaggggcgtccctcgtttcccgcggactgaggtgggcgccgggcattcagtaaacgaagaaaccaaagcggagaaggttgggaatcaaacgtctgtcatacctgccaccagcagacaagcggctttgggtacctcctggacccaaagacgaactcagcccctccaggagcgcagtcattggcaccctcgtgggaacaatgccagtgggatgggtggccaccggatgtttccggggcccctcagaggcccagcagcgcaggtcttggagaatgaatgtgggtcactgggccgcgctgcagagggccggtcctgagtcgcttcctggaggagaggcccatggccagcacttggcttcgcctggaggaagaagcacgtgctaaaccacgagcgttcagggtttgtctgtttgataaaagatgctggctttgacacaccaactgacaaagtctttcataggttggagctgctaggttgtgcccctgcccctcctgaaaattagccacacgaaaggaagggtctggaaggtggcagggaagccagcagagaccagggaagtggcagcagcatggggcaggggcacacaggaaggagatggagcttgcgggagcccccactgccactccgacagggagccctgccccgtgccctgctgatgttgacactgaccccggctctattatttcagtttttccttgtaatttctgaaaatctagcaacaagttgagcaatgaaaaaaagtaaaaaagttaaaattgtgttagaaattatgactgtaaagaaattttgaaactaatgaagaaaaaattgccaaaattgccaaagcttttaggactcttaaaaatatagtaacattgagtattatgaactaaagactcatactattatatcagtgtctggtagtgaatttggatggaggactgtctagtaacttcttaacaaaacattgattagaagtctttcttggcggggcgccgtggctcacgcctgtaatcccagcactttgggaggcgaggcaggtagatcatgaggtcaggagatcgagaccatcctggctaacatggtgaaaccccgtctctactaaaaaaaatacaaaaaaactaggcaggtgtggtggtgggcccctggagtcccagctactcgggaggctgaggcaggagaatggcgtgaacccgggaggcggagcttgcagtgagccaagatcgcgccactgtactccagcctgggcaacagagcgaggctccgtctcaaaaaaaaaaaaaaaaaaaaaaaaaaaaaaaa

SEQ ID NO: 32618 - DNA, 3191 bp, Homo Sapiens
aaaccttggcttcagcccggccgccgccaggcgttggcatcgccggggagagccttccggactccgggcggcggctggctgggggcgcgttccgaggcgccctcaggcagggcgcgggggcagagcctcgcctgggttctggaggctgcggggccatcgctccagatgcgaaagccatggagttgagctgcagcgaagcacctctttacgggcagatgatgatctatgcgaagtttgacaaaaatgtgtatcttcctgaagatgctgagttttactttacttatgacggatctcatcagcgacatgtcatgattgcagagcgcatcgaggataacgttctccagtccagcgtcccaggccatgggcttcaggagacggtgacggtatctgtgtgcctctgctcggaaggttactctccggtgaccatgggctctggctcagtgacctacgtggacaacatggcttgcaggctggctcgtctgctggtgacgcaggccaatcgcctcacagcctgcagccaccagaccctgctgaccccatttgccttgacggcaggagcactgcctgccttggatgaggagctcgtgctggctctgacccatctggaattgcctctagagtggactgtgttgggaagttcttcacttgaagtatcttctcacagagaatctcttctacacctggctatgagatggggcctggctaaactttcccagttcttcttgtgtctcccggggggagtccaggccttggctttacccaacgaagagggtgccacaccattagacttagctttacgtgaaggacactccaagctggtggaagacgtcacaaattttcagggcagatggtccccaagcttctcccgagtgcagctcagtgaagaagcctccttgcattacattcactcatcggaaacgctgaccctgaccctgaaccacacagccgagcatttgttggaggcagatattaaactcttccggaaatacttttgggatagagcctttcttgtcaaggcctttgagccagaagccaggccagaggaaagaacagctatgccctccagcggtgcagaaactgaagaagagattaagaattcagtgtccagcagatcagcagctgaaaaggaagatataaagcgtgtcaaaagcctggtggttcaacacaatgaacatgaagaccagcacagcctagatttggatcgctccttcgatatcctaaaaaaatccaagccgccctcgacattgcttgctgcaggccggctttcagacatgctgaatggaggtgatgaagtctacgctaactgtatggtgattgatcaggttggtgatttggatatcagctatattaatatagagggaatcactgccactaccagccctgaatccagaggttgcactctgtggcctcagagcagcaaacacacccttcctacagaaaccagtcccagtgtgtacccacttagtgaaaatgtcgaagggacagcacacactgaagcccagcagtccttcatgtcaccatcaagttcgtgtgcttccaacttgaatctttcttttggttggcatggatttgaaaaggaacaaagtcatctaaagaaaagaagttctagccttgatgccttggacgccgacagtgaaggggaagggcattctgagccatcccacatctgttacactccagggtctcagagctcctcaagaactgggattcctagtggggatgaattggactcttttgagactaacactgaaccggattttaatatctccagggctgaatcccttcctctatcaagtaatctacagtcgaaggaatcactgctttctggagttcgctcacgttcttattcttgctcatcacccaaaatttctttaggaaaaactcgtttggtgcgtgaattaacagtatgcagttcaagtgaagagcaaagagcttacagcttatcggagccaccaagagaaaacagaattcaggaagaagaatgggataaatacatcatacctgccaaatcagagtctgaaaaatataaagtgagtcgaactttcagtttcctcatgaataggatgactagccctcggaataaatcaaagacaaaaagcaaggatgccaaagataaagagaagctgaatcgacatcagtttgccccaggaacattctctggggttctgcagtgtttggtttgtgataaaacactcctggggaaagagtcactgcagtgttctaactgtaatgcaaatgtgcacaaaggttgtaaagatgctgcgcctgcatgcaccaagaaattccaagagaaatataacaagaacaaaccacagaccatccttggaaattcttcatttagagacatcccacagcctggtctctccttgcacccttcttcctccgtgcctgttggattgccgactggaaggagggagactgtgggacaggtccatccattgtccagaagtgttccaggcaccaccttggaaagcttcaggaggtcagccacatccttggagtctgagagtgaccataacagctgcagaagcaggtctcattctgatgagctgctacagtccatgggctcttctccctctacagagtctttcataatggaagatgttgtggattcttctctgtggagtgacctcagcagtgatgcccaggagtttgaagcagaatcttggagtcttgtggtggatccctcattttgtaataggcaggagaaggatgtcatcaaaagacaggatgtcatttttgagctaatgcaaacagagatgcatcacatccagaccctgttcatcatgtctgagatcttcaggaaaggcatgaaagaggagctgcagctggaccacagcaccgtggataaaattttcccctgtttagatgagttgcttgaaatccacaggcatttcttctacagtatgaaggaacgaaggcaggaatcctgtgctggcagcgacaggaattttgtgatcgaccgaattggagatattttggtacaacagttttcagaagaaaatgcaagtaaaatgaagaaaatatatggagaattctgttgccatcataaagaagctgttaacctctttaaagaactccagcagaataaaaagtttcagaattttattaaggcaagtattttaaaactttattacaaagtgataaatcagcatggagaaatagtttatgcttgtttcttaatgatttaa

SEQ ID NO: 32619 - DNA, 1904 bp, Homo Sapiens
gctgcactgggtgtcaagcgccacggggtttgatggggactccttctggttccaccctcgcccactcacttctcgggctggccataatgctgcacagagccccggccagccattaatatcaggcgcaggagaaaacccagtaaaatcacttaccagtcttccacctccggtgctgatctagcaagagcctgacccgctggccagactcaagctctgcaccaggtattaccaccctggcgacggctccggagcgtcactgacaaccacccggaaatggtactatcgcttccggggctgcctagcgcgcggcgggaaattgtttcccagagcccggattcgtgaagcagttgagtgctgcagcggcagtcgtcgcccctgccgccgctgccaccgaaggaagcatcccagacaccgggaagatggaagatggtaccccaaagcatatcatccagatgacaggatttaagatggaagaaaaagaagcgctagtcaaattacttttaaaactagattgcacttttattaagagtgagaaatacaaaaattgtacacatcttatagctgaacgcctatgtaagagtgaaaaatttttagcagcttgtgcggcaggaaagtggatactaaccaaggactatataattcatagtgccaaaagtggcagatggcttgatgaaacaacttatgaatggggatataaaattgaaaaagattcccgttattcacctcaaatgcaatctgcacctaaaagatggcgtgaagaactgaaacgcactggtgctccaggagccttccacagatggaaagttgtcctccttgttagaactgataagcgaagtgattctcttataagagttttggaggctggaaaggcaaatgttattttaccaaaaagttcaccaagtggaataactcatgtgattgccagtaatgcaagaattaaagctgagaaagaaaaagataactttaaggctccattttatccaattcagtatctaggggattttcttttagagaaagaaattcagaatgatgaagattcccaaaccaattctgtttggactgaacatagcaatgaagaaacaaacaaagatttcaggaaagatgcaggatttcttgaaatgaaaggtgccttaagagagaccatgtatagaacccagaaagaaatgcaaaatcatgaagatgttaatgttggttctattttgattcaacatcacaaaaaagaaaaattcagtggttccagtaaagatttgaaatttgttaaaatgagaaatacctttggaagccatacatatgaaaatcagaaggaaattaagaaaaaagatgaagatattcagaggagttatactttgaggagaaaacgcaagaaaggaaaagaaagcaattgcaagaaaggcgttgaacatgaaaaaataaaaagtaccttaagaaggcacatatataatagagatcagaaagaaatgaagaattctatttttgctgaatatgccaaagaatcaaaagccatggctattaagacagatgtggatgttgttgaaataaaaaataccttaaggaagcacatatatagagctcaggctgtcagatacaactgcattagaatagataaacaaccagtgtacaacgtagagagaatggagttgatttcctgcagtgttttctggagactagcactagaccctagtcctgccgatcacaccaggggaggtgttggtgctactgatgtggtcagacctgctgctggtttcccatgccatatagccgcaactgcaaggcttaaactcagctgtcctatcaaggcaggagactgggtgggattgacagccacctgtgaagactcacctgctaggatctggctggctgtcttggtcgctgatcatgtccgaagaagtacaccactttcttaa

SEQ ID NO: 32620 - DNA, 2870 bp, Homo Sapiens
cggaagcagaggcgttggcggcgtgaggctcaggactgtacatcagaggaagccaaaagccagctggaatacttcctgaatacagttttaatcttgtttgcaattatttcgaaggggagaaatcatctggatcagaattaagatgctctggtttcaaggaaatagcatgcaacttgccagatcctcctttggactcttcttgagaaattgctctgcctctaagacaactctgcctgtgttgaccttattcacaaaggacccatgccccctttgtgatgaagccaaggaagtactcaagccttatgaaaacaggcaaccctacaaggatcagaagctgccaggaacaaggagaagacgctccccttcctcaccttcccacccccacatggcttctcagtcggggaaaagatacaacttaactttaaaccaagtcttaagttttgattatgacatgggattagatgcaccaaaaacaatttcaagtgactgtggggcattctattgcctgagaatgttcaagagtcctgatatgacctgttgtttttatcctaaacagtgaaaaattcatccaccaaatatataggaatagagggagacagaaagatgctttctgaaggtatcccatatttagagtattggttacatatacctaatgttggttttaacctatagctcttcaataaacttactcatcaattcttatttcagagaggaatatggtcatgtgactaggaatcctgcagatcttcagcaaacccatgggtcccaacagctggcaaaatgaaaggtagatacctacaaacatggcatctaaaaggtggtttgattatcccactgtcaagtatcagtgttatgtcacctattactgtgattttcatgtgatgtttgtagcagcaattacttttcctttctgaaattatgtttgcaaagatcaatttgtttttatataaagattaactttgatataagaagctcatcattcacctccaaaggaaaaggtgatacaagcttcctttttttcccccttcaagctaatgccttatgaaggagtggaatagtttgggacttcatattgctgctctagaatagtgcctctttcttccacatgtctcttcataacattatgagcttactggaacacatagctctttggccagtttattgcacgaaacaagggtatactcagactggggttttttaaataatgcagcaatctcatggacatctgacagtaggaatcacaatacagccaggcttcagaagtacaattaaagaaccacccaaaactgaaacatcacccttctcacagtgccttggcttattttcttccttgttctctcctggctcacagctcccctgcttacacacactatctgcttcctcatagctgcagcctgcttatgcccatcattactgctaacctttctgttcagcaatacagcaccctgagcctctcaggcttctctattctgaaatcctaaaaggaattttactcagcttatattttacaaccaggcacccatgacctaagttggctgaccaaatctatagaaggagccacctttaggacagaagcctatccctgggccaactggctatggaagcggtatgcaaatcacagtcactgcccactggcagaggccagaagcaggacaggcaatgaccagcaactctggcacgcctccaaaaagcttaagaatgtgacattctaccatactcaagagaagtcaggagggacacattggtaagttcacttatatcctactccataggagtaataaggacatgaaccaaagcaatgggagtcagacagaaagagatatcaggagatatttaggagtgaggttgacaaaacttcatgactgactggatgggtcggtagtgatgtggagaggggagtagagagaaagcatggattctgggataactcccagttttcttgcttacactactgggtgaattctgatactttttattccctgaggcagagaatgtaagaggaaggaaaagttagttttgggctgtgcttggtggatgggaaaggtaagacatggtgaattctccatgcttgtgggatatcaaggtaaagataaaagttagaagtgcaaaacaaaggtctggggttaaggtatacatttgagagcccactgagtatggttggaaatgtggccacctggcatataaggagaaaagcaagctattcccaaaccatggagaatactaatcttgacccatgagaatagaggaagttgctagtgaaggaaaatgagagagtggtggtggaactaggaatgggagaagctcatccaatttacattacgtgatgccttttgtgatttgatagtggcaggtattattccaagcactggggataaaacaacaaacaagatagccaggattcctactctcagagtcttgcattttaagggagagacagacaataaagatatcgtatcagaggaaaataatcatgaaagtcagggaggagcttttcccagagtaactgacagtatcaaatagcaagagagttaggatgaggactgaacagaagacatcagatttgaaaattagaaaatcagtgctgctataggaagaatagtccccaaagatacccaggtcctaattcctggaacctgtcacttatatgcataaaggactttgcagatttaagttaaggatcttgagatgggaaaattatattgcattatctaagcaggtcctaatgtaatcacaggtgtctctataagagggagtcagaaggagatttgactagggtaaagagagtaggaaattcgacaatggaagcaaaaggttggagtgatacaagaaagcagccatgagccaaggaatgtgaatggcctccagaagct

SEQ ID NO: 32621 - DNA, 1367 bp, Homo Sapiens
atgttaaaaaccaagttcattggtcagcagtgtgtcaggttggatgctgtgggcgcctggcctctgaaggtcactcgaggctcactgtacagctgtcgcttgccaggcagcccgagagagttctggcgagggctgcgggaaggaaagggggcggcgtccttcacagggagggtgcagctgacctccctccccttgtgcagactggaaaagaatggcccagatcctctggactcctcagatgagcggattcagagagaagcttttgagagcgtgctggcggagacatttttcacaaaagagcccttgcggtgctggtgtccgtggcgtgcctgggtggaaaatgagcttatatatgaagaagtcagcgagtggacaaagccaggcgcaatggatagcaaagatgtggaagtctcctcgattcaagttacaagaaaaccgcagcatggagtctgctctcagctgttggggaattaccgatgcctttgactaagtcaagactgacttttccagaatatcacccaagagatagagccgtccctgtccaagtttgtgcgctagcccttcatggaggtcagagaggaagaaacaaaggcagctgtggcctcggcggtcacagtgtcagaacgcacaagccccataaagaggtttcacgcaggccacccatcccttttcattctccagcagaacaggacagagagcgttctgttctgcggaaggtcttccactctacaaggcaatccctccagctgctttgctgtattgtgctgtctcctgtcacactatgaatgcagtgacctcagccagcaacagggagaacccccctgcctcccgaacaaaggacctcacgtgaaatcctgagctcagagcttacagatatgtgtgcgctttcactttacatcggccgtgacttccaaacaacttcaggaaactttaggatctctgaggtatactggagatgacagcagcgtagaatgttcatttggatttagaacagaaatgcttattttatatttggctgctcccaaactgtccccagacttcctctccagtggttaccctccactgccctggatgtcccacgtttacactccacactcacacctccaccttaacaaagtcctccactgggtcaaaccatacatcgcttcgtctctgtagtgatgacttcctgtcctctgctctgtggataaagaccccagataaagatgcctgtgttgctcaactcttgtaaatactcttgagacattttgaaagcagaaggaaaggagacagacggggaaaataaaagggatggtctgcttgtgcggaaacgttttgagaatgcccttccctaagagagaacagtaaaagtgagcaatacttcctga

SEQ ID NO: 32622 - DNA, 2801 bp, Homo Sapiens
aatcaagagccagcccggtttctgcaagcacacaggagcagaagagaaaccagtgaagacttcaccgctgcatatcaggccagcgacggctgctcggtgacggcgctgctctgccaccaagaaaaaccccaaacccactgatcccacaaagaggggagaaaaaggaaggcttcatgctgaagaaggagaaatacaaacgtgtatgtgccggtttgcctctggtcgttaccgtggaggcattcacacgcctgtccatttggcattattatgagcgatccccagacagaagaacttaaggtcaagttttacagagataaccaaggacatcttaaaggagacaggctgtgcgatcattggaagagggaagctgtggatcttgcattcatgcatttggatgaagatgacactggaaactgcacgttgcaggttgaggtggccaagtatcaacggaatgggaaatatgaggcttcaggaaggaagtgcgcgaaccacaggaaggctccgtctctacggcagaagcggccacgccgcagcccatccaaacgccgcgacacgagtgagttgtcctcatcgaacacatttcatcctgtggattttgaggatggccagagaagaccttcaaggagagtcaagtttggaccaactcggaggctcattgtctttgacagacacccagctggtgaacctgtgtcctggaggaatgcaggagcagctgctcattgtattcaaacctttgatggaagggttggggtttcgccatgttgcccaggctggcctcaaactgctgaactcaagcaatctgcccatcttagcctccaaaaatgctgggattccaggtgagagccatcacgcctggctatttttaaaaagagtcttgctctgtcatccaggctggagtgcagtgacacagtcatggctcattgcagccttgaactcctggactcacgtgaccctcttgcttcagcctcctgagtagctggaattacaggtgcgtgccaccatgcctaactaatgtatatttttaaattttttgtagagatgggtctcattatgttgcccaagctggtcttgaactcctggcctcaagcagttatcccatctcagcctcccaaattgctgggattacaggcatgacccacagtgcccagccattaattttttttttttttttttgacggagtctcgctctgtcacccaggctggagtgcagtggcacaatctcggctcactgcaagctctgcttcccagcttcacgccattctcctgcctcagcctcccgggtagctgggactacaggcgcccgccaccagacccggctaaatatttgtatttttagtagagacagggcttcactgtgttagccagggtggtctcgatccgccacctcagcctcccagagtgctgggattacaggcgtgagccaccgcacccggcctcagacaacatgactttattactggaaaccaactaagaaaaaattatgattaggaggagaaaacagcaaacggtcggggtcaaaaaccaatattcagcaatcaatagcttttaccaatcaaaagaacttttagaagatataattgaagacaaaatcctatttataatagcaaacaacagcaaaagcaaggaatgaacttagtcaatgtgcactgcctgtaggagatgacctcgtgatcggcatgcccgccttggcctcccaaagtgctgggattacaggagtgagccactgtgcccaaaaaaataaattttgtaatgtttcacttaacaaaagagatacattctgagaaatgtatcattaagtgatttcataattagttgatttcattgtcacgcaaacatcatagaatgcacttacacaaacctagatggtacagcctactacacacccaggctttatggtagagcctattgcccttggctataaacctgtagagatgttactgtactgaatactgtaggcaactgtaacacaataataggtatctctgtatctaaacatggaaaaggtacagtaaaattactgtattagtccaggtgcaggcagctcatgcctgtaatctcagcacttggggaagctgaggtgggtggactgcttgagaccaggagttcaagaccagcttgggcaacataatgagatcctgtctctaccaaaaattaaaataattagccaggcgtggtagcatgtgcctgtagtcctagttactagggatgctgaggcaggaggatcacttgagcctagtgaggtatgatcatgccactgcacccagctggggcaacagagtgagacctcatctataaaaataataaaataaatcttaaataaattttaataaacaaaacatggcattataatcttaggggaccaccatcgtacatgcagtccatcactgattgaaacatcatgcaacatataaccatatatgttaatggctgttcaattaaaacttcatagtcctaatgtaaatttaaaaagacaaagaagaaaattaagcaacaggcccagattcaacttttctatgaaaaatagaaactgtcatgttgagtcataaaataaaaaaactagcaaatccagctctatgctcagagaattaccagaaaataaaattacatgaagcttgaatatagggagatggaaagatattagacaaatattaaagaaaatctgggccaggtgtggtggctcacacctgcaatcccagcactttgggaggcccaaggtgggaagattacttgaggcaaggggtttgagaccagcccgggcaacatagtgaaactctgtctctttaaaaaagaaagaaaagaaa

SEQ ID NO: 32623 - DNA, 6805 bp, Homo Sapiens
gctgccgcgggcggtgggcggggatcccccgggggtgcaaccttgctccacctgtgctgccctcggcgggcctggctggccccgcgcagagcggcggcggcgctcgctgtcactgccggaggtgagagcgcagcagtagcttcagcctgtcttgggcttggtccagattcgctcctctggggctacgtcccggggaagaggaagcgaggattttgctggggtggggctgtacctcttaacagcaggtgcgcgcgcgagggtgtgaacgtgtgtgtgtgtgtgtgtgtgtgtgtgtgtgtgtgtgtgtgtgtgtgtaagacctgcgatgacgacgaggaggaacaagtgggacggcgagtgatgctcagggccagcagcaacgcatggggcgagcttcagtgtcgccagcagtgaccacagttcttgaggccaaatctggctcctaaaaaacatcaaaggaagcttgcaccaaactctcttcagggccgcctcagaagcctgccatcacccactgtgtggtgcacaatggcgccccccacaggtgtgctctcttcattgctgctgctggtgacaattgcaggttgtgcccgtaagcagtgcagcgaggggaggacatattccaatgcagtcatttcacctaacttggaaaccaccagaatcatgcgggtgtctcacaccttccctgtcgtagactgcacggccgcttgctgtgacctgtccagctgtgacctggcctggtggttcgagggccgctgctacctggtgagctgcccccacaaagagaactgtgagcccaagaagatgggccccatcaggtcttatctcacttttgtgctccggcctgttcagaggcctgcacagctgctggactatggggacatgatgctgaacaggggctccccctcggggatctggggggactcacctgaggatatcagaaaggacttgacctttctaggcaaagattggggcctagaggagatgtctgagtactcagatgactaccgggagctggagaaggacctcttgcaacccagtggcaagcaggagcccagagggagtgccgagtacacggactggggcctactgccgggcagcgagggggccttcaactcctctgttggagacagtcctgcggtgccagcggagacgcagcaggaccctgagctccattacctgaatgagtcggcttcaacccctgccccaaaactccctgagagaagtgtgttgcttcccttgccgactactccatcttcaggagaggtgttggagaaagaaaaggcttctcagctccaggaacaatccagcaacagctctggaaaagaggttctaatgccttcccatagtcttcctccggcaagcctggagctcagctcagtcaccgtggagaaaagcccagtgctcacagtcaccccggggagtacagagcacagcatcccaacacctcccactagcgcagccccctctgagtccaccccatctgagctacccatatctcctaccactgctcccaggacagtgaaagaacttacggtatcggctggagataacctaattataactttacccgacaatgaagttgaactgaaggcctttgttgcgccagcgccacctgtagaaacaacctacaactatgaatggaatttaataagccaccccacagactaccaaggtgaaataaaacaaggacacaagcaaactcttaacctctctcaattgtccgtcggactttatgtcttcaaagtcactgtttctagtgaaaacgcctttggagaaggatttgtcaatgtcactgttaagcctgccagaagagtcaacctgccacctgtagcagttgtttctccccaactgcaagagctcactttgcctttgacgtcagccctcattgatggcagccaaagtacagatgatactgaaatagtgagttatcattgggaagaaataaacgggcccttcatagaagagaagacttcagttgactctcccgtcttacgcttgtctaaccttgatcctggtaactatagtttcaggttgactgttacagactcggacggagccactaactctacaactgcagccctaatagtgaacaatgctgtggactacccaccagttgctaatgcaggaccaaatcacaccataactttgccccaaaactccatcactttgaatggaaaccagagcagtgacgatcaccagattgtcctctatgagtggtccctgggtcctgggagtgagggcaaacatgtggtcatgcagggagtacagacgccataccttcatttatctgcaatgcaggaaggagattatacatttcagctgaaggtgacagattcttcaaggcaacagtctactgctgtggtgactgtgattgtccagcctgaaaacaatagacctccagtggctgtggccggccctgataaagagctgatcttcccagtggaaagtgctaccctggatgggagcagcagcagcgatgaccacggcattgtcttctaccactgggagcacgtcagaggccccagtgcagtggagatggaaaatattgacaaagcaatagccactgtgactggtctccaggtggggacctaccacttccgtttgacagtgaaagaccagcagggactgagcagcacgtccaccctcactgtggctgtgaagaaggaaaataatagtcctcccagagcccgggctggtggcagacatgttcttgtgcttcccaataattccattactttggatggttcaaggtctactgatgaccaaagaattgtgtcctatctgtggatccgggatggccagagtccagcagctggagatgtcatcgatggctctgaccacagtgtggctctgcagcttacgaatctggtggagggggtgtacactttccacttgcgagtcaccgacagtcagggggcctcggacacagacactgccactgtggaagtgcagccagaccctaggaagagtggcctggtggagctgaccctgcaggttggtgttgggcagctgacagagcagcggaaggacacccttgtgaggcagctggctgtgctgctgaacgtgctggactcggacattaaggtccagaagattcgggcccactcggatctcagcaccgtgattgtgttttatgtacagagcaggccgcctttcaaggttctcaaagctgctgaagtggcccgaaatctgcacatgcggctctcaaaggagaaggctgacttcttgcttttcaaggtcttgagggttgatacagcaggttgccttctgaagtgttctggccatggtcactgcgaccccctcacaaagcgctgcatttgctctcacttatggatggagaaccttatacagcgttatatctgggatggagagagcaactgtgagtggagtatattctatgtgacagtgttggcttttactcttattgtgctaacaggaggtttcacttggctttgcatctgctgctgcaaaagacaaaaaaggactaaaatcaggaaaaaaacaaagtacaccatcctggataacatggatgaacaggaaagaatggaactgaggcccaaatatggtatcaagcaccgaagcacagagcacaactccagcctgatggtatccgagtctgagtttgacagtgaccaggacacaatcttcagccgagaaaagatggagagagggaatccaaaggtttccatgaatggttccatcagaaatggagcttccttcagttattgctcaaaggacagataatggcgcagttcattgtaaagtggaaggaccccttgaatccaagaccagtcagtgggagttacagcacaaaacccactcttttagaatagttcattgaccttcttccccagtgggttagatgtgtatccccacgtactaaaagaccggtttttgaaggcacaaaacaaaaactttgctcttttaactgagatgcttgttaatagaaataaaggctgggtaaaactctaaggtatatacttaaaagagttttgagtttttgtagctggcacaatctcatattaaagatgaacaacgatttctatctgtagaaccttagagaaggtgaatgaaacaaggttttaaaaagggatgatttctgtcttagctgctgtgattgcctctaaggaacagcattctaaacacggtttctcttgtaggacctgcagtcagatggctgtgtatgttaaaatagcttgtctaagaggcacgggccatctgtggaggtacggagtcttgcatgtagcaagctttctgtgctgacggcaacactcgcacagtgccaagccctcctggtttttaattctgtgctatgtcaatggcagttttcatctctctcaagaaagcagctgttggccattcaagagctaaggaagaatcgtattctaaggactgaggcaatagaaaggggaggaggagcttaatgccgtgcaggttgaaggtagcattgtaacattatcttttctttctctaagaaaaactacactgactcctctcggtgttgtttagcagtatagttctctaatgtaaacggatccccagtttacattaaatgcaatagaagtgattaattcattaagcatttattatgttctgtaggctgtgcgtttggactgccatagatagggataacgactcagcaattgtgtatatattccaaaactctgaaatacagtcagtcttaacttggatggcgtggttatgatactctggtccccgacaggtactttccaaaataacttgacatagatgtattcacttcatatgtttaaaaatacatttaagtttttctaccgaataaatcttatttcaaacatgaaagacaattaaaacattcccacccacaaagcagtactcccgagcaattaactggagttaattgtagcctgctacgttgactggttcagggtagttccccatccacccttggtcctgaggctggtggccttggtggtgcccttggcattttttgtgggaagattagaatgagagatagaaccagtgttgtggtaccaagtgtgagcacacctaaacaatatcctgttgcacaatgcttttttaacacatgggaaaactaggaatgcattgctgatgaagaagcaaggtatttaaacaccagggcaggagtgccagagaaaatgtttccccatgggttcttaaaaaaaattcagcttttaggtgcttttgtcatctcccgcagtattcatcctcatgggaccatcttatttttacttattgtaatttactggggaaaggcagaactaaaaagtgtgtcattttatttttaaaataattgctttgcttatgcctacactttctgtataactagccaattcaatactgtctatagtgttagaaggaaaatgtgatttttttttttaaccagtattgagcttcataagcctagaatctgccttatcaggtgaccagggttatggttgtttgcatgcaaatgtgaatttctggcataggggacagcagcccaaatgtaaagtcatcgggcgtaatgaggaagaagggagtgaacatttaccgctttatgtacataacatatgcagtttacatactcatttgatccttataatcaaccttgaagaggagatactatcattcttatgttgcagatagccctctgaaggcccagagaggttaaataacttcccagaggtcatggccaagaagtagtggctccaagaactgaatgcaaattttttaaactgtagagttctgctttccactaaacaaagaactcctgccttgatggatggagggcaaattctggtggaacttttgggccacctgaaagttctattcccaggactaagaggaatttcttttaatggatccagagagccaaggtcagagggagagatggcctgcatagtctcctgtggatcacacccgggccacccctccctctaggtttacagtggacttcttctgcccctcctccttttctgtccttggccatctcagcctggcctctctgatccttccatcacagaaggatcttgaatctctgggaaatcaaacatcacagtagtgatcagaaagtgagtcctgtcttgtcaccccatttctcatcagaacaaagcacgagatggaatgaccaaccagcattcttcatggtggactgcttatcattgaggatctttgggagataaagcacgctaagagctctggacagagaaaaacaggccctagaatatgggagtgggtgtttgtagggctcacaggctaacaagcactttagttgctggtttacattcaatgaaggaggattcatacccatggcattacaaggctaagcatgtgtatgactaaggaactatctgaaaaacatgcagcaaggtaagaaaatgtaccactcaacaagccagtgatgccaccttttgtgcgcggggaggagagtgactaccattgttttttgtgtgacaaagctatcatggactattttaatcttggttttattgcttaaaatatattatttttccctatgtgttgacaaggtatttctaatatcacactattaaatatatgcactaatctaaataaaggtgtctgtattttctgtaatgcttatttttagggggaaatttgttttctttatgcttcagggtagagggatttcccttgagtataggtcagcaaactgtggcctacagcctgtgtgtgcacgccccatgagccgaaaagtgggtcttatgttttcaaatggttaaaaataaataaaaaaatttgaaacatgtgaactatatgacattcagatttgtgttcataaataaagttttattggaacatatcc

SEQ ID NO: 32624 - DNA, 5212 bp, Homo Sapiens
cttcactggccctcatcacttctcaccgcgccctccagcttcacccgtacaggtagccccgccgccgcgcacctgccttcgctcccgcaccggtgacagtggatagtggaaacaggagatcgtggatcctccttcaaaaatggaggatggaaagcccgtttgggcgccacaccctacagatggatttcagatgggcaatattgtggatattggccccgacagcttaacaattgaacccttgaatcagaaaggcaagacatttttggctctcataaaccaagtgtttcctgcagaagaggacagtaaaaaagatgtggaagataactgttcactaatgtatttaaatgaagccacactgctccataatatcaaagttcgatatagtaaagacagaatttatacatatgtcgccaacattctgattgcagtgaatccatactttgacatacctaaaatatattcttcagaagcaataaagtcatatcaaggaaaatctcttgggacaagaccacctcatgtctttgcaattgctgataaagcttttcgagacatgaaggtgctcaagatgagtcagtctatcattgtatctggagaatcaggagccggcaaaacagaaaatacaaaatttgttctaagatacctgactgaatcctatggaacaggtcaagatattgatgacagaattgttgaagctaacccactcctagaagcctttggaaatgcgaagactgttcgcaacaataatagcagtcgatttgggaaatttgtagaaatacattttaatgaaaagagctcagttgttggaggatttgtttcacattatctcctagagaaatctaggatctgtgttcaaggcaaagaggaaagaaattatcatatcttttataggttgtgtgctggtgcttctgaagatattagagaaaaacttcatttgagttcaccagataattttcggtatttaaaccgaggctgcactagatactttgctaacaaagaaactgacaaacagattttacagaaccgcaaaagtcctgagtaccttaaggcaggttctatgaaagatcctctgctagatgaccatggtgattttattagaatgtgcacggctatgaaaaaaattggtttggatgatgaagaaaagcttgatctcttccgggtagtagctggcgtcctgcaccttggaaatattgattttgaggaagctggcagcacttcaggtggttgtaatctgaagaataaatctgctcagtctttggaatattgtgctgaattactgggtttggaccaagatgatcttcgagtaagtttgaccacaagagtcatgctaacaacagcagggggcaccaaaggaacagttataaaggtacctctgaaagtggagcaagcaaacaatgctcgtgatgccctggcaaagacagtgtatagccatctttttgatcatgtggtaaacagagtaaatcagtgttttccttttgaaacatcatcctattttattggagtcctagatattgctggttttgagtactttgagcataacagttttgaacaattttgcatcaactattgcaatgaaaaacttcaacaattttttaatgaaaggattctgaaggaggaacaagaactctatcaaaaagaaggtttaggtgttaatgaagtgcattatgtggataatcaggactgtatagatttaattgaagccaaattagtgggaatactggatattttggatgaagaaaatcgccttccccagccaagtgatcaacactttacatctgcagttcaccaaaagcacaaggatcattttcgactcactattcccagaaaatctaagctggcagttcataggaatatcagagacgacgaaggcttcattatcaggcattttgcgggggcagtgtgctatgaaacaacccagtttgtggagaaaaataatgatgctttacatatgtctcttgaatccttaatatgtgaatccagagataagtttatacgggaattatttgaatcatccacaaataacaacaaagatactaaacaaaaagcaggaaaacttagcttcatcagcgtgggaaacaagtttaagacacagttaaatttgcttctggataaacttcgaagtactggagcaagctttattcgttgcatcaaacctaacttaaagatgacaagccaccactttgaaggtgctcaaattctgtctcagcttcagtgttcagggatggtgtctgttttggacttgatgcagggtggttacccatcacgagcttcatttcatgaactctacaacatgtacaaaaagtatatgccagataaacttgcaagattggatccaagactattttgtaaggctttgtttaaagctttgggcttaaatgaaaatgactacaagtttgggttaaccaaagtattttttagacctggcaagtttgcagaatttgatcagatcatgaagtctgaccctgaccacttagcagagttggttaaaagagtcaatcactggctcacatgcagtcgctggaagaaagttcagtggtgctcactctcagtcatcaaattgaaaaacaaaataaaatatcgagctgaagcctgcattaaaatgcaaaaaactattcgaatgtggctttgcaagaggagacacaaacctcgcattgatggtctggttaaggtgggcacactgaaaaaacgacttgataaatttaatgaggtagtcagtgtgttgaaagatggaaaacccgagatgaataaacagatcaagaatctggaaatttctattgatactttgatggccaaaattaagtccactatgatgacgcaggaacaaatccagaaagaatatgatgcactggttaaaagctcagaggaactcctcagtgcattacagaaaaaaaaacagcaggaagaggaagcagaaaggctgaggcgtattcaagaagaaatggaaaaggaaagaaaaagacgtgaagaagacgaaaaacgtcgaagaaaggaagaggaggaaaggcggatgaaacttgagatggaagcaaagagaaaacaagaagaagaagagagaaagaaaagggaagatgatgaaaaacgcattcaagctgaagtggaggcacagctggcccgacagaaggaggaggaatcccaacagcaagcagttctggagcaggagcgcagggaccgggagctggccctgaggattgcccagagtgaagccgagctcatcagtgatgaggcccaggccgacctggcgctgcggagaaatgatggaacaagacccaaaatgacaccggaacaaatggccaaagaaatgtcagaatttttgagtagaggtcctgctgtactagccaccaaagcagctgctggtactaagaaatatgatcttagtaaatggaaatatgcagaactacgtgataccatcaatacttcttgtgatattgagctcctggcagcttgcagagaagaatttcataggagactaaaagtgtatcatgcttggaaatctaagaacaagaagagaaatactgaaacagagcaacgtgctccaaagtctgttactgattatgattttgcaccatttttgaacaattcacctcagcaaaacccagcagctcagattcctgccaggcagcgggagattgaaatgaaccgacagcaacgcttcttccgcatcccattcatccgccctgccgaccagtacaaagaccctcagagtaagaaaaaaggctggtggtatgcccattttgatggaccatggattgcccggcaaatggaactccatcctgacaagccacccatcctacttgtggctggtaaggacgacatggagatgtgtgagctgaatcttgaggagactggcctgactcggaagcgtggtgctgagatcttgccaagacagtttgaagaaatctgggaacgctgtggaggcatccagtaccttcagaatgcgattgagagcagacaggctcggcccacctatgcaacagccatgctgcagagtctgttaaagtagatgttgcacaccagccttacagctgggagcctttgccatggtacttaggtagggtgtgtgcccccagatttaaccattccataatcatgttagagttacttctataaagtgaacagattttattaatcacggcttttggtgaatttgtttaaggttaattatggtagcaaattttggacctaaacattatttttctgtatcccgctgtaattcccaaaactctcattattctctaactattacacatgggcatattctgatgtttctcatcctttgccagaagactaccttacatccatcgtaattgttctctaggaaaagagaacttttttcaaaattcaaaatactttttaaggatggcacagtaccatataactggagtaataaaacatgagcttacattcttacaataactaaaccacttaaaatgatcaaggcactaatgttttggtctgaaaagctgtgtactttatagacattttcagacatttttggaaatttccattaaaggtggaaaatctatttttttcctcctttgcagtgtcttagtttgaatgaaacacttcgaagttctagaattctagaaagagccttaatgtatttgatgtattctgtgataagaggtactaatagtatccagcacagatttgcttttctttgctagcacaatgtgtgttgctgtcagaatattctttttatattctgtggaaaaataaaggaaattcagattgtttaaatgcctaaaagttttgagataagttttgtttcaattagaaaaggaaataggttttaggtggcatagtggcttaactggactgaattcaaatattctttcaacttcatctcaatagtgatttttgtatcagaatcttgtccaagttgtttcattgatttagtaagtgttctgcttccaacatctttctttttaagaaattcctagtgtcttttttggcctttgaggttttggtaattgtagacctgtttcataagctttgtaattcagaaatccttgtatttagtaagtgcttgttttacataactgataattttaaaatgttttctttgtgtgctgttagtattgattcaaatgtcagcagctttaagcctaatatttatgactttcacatttggaatttaaagacaaaaatacatcaaggagttatgctgacataattctaaggagttttgttgtattttagaataaaattataaagt

SEQ ID NO: 32625 - DNA, 5597 bp, Homo Sapiens
cgcgcttccgggttggctgtggctgtggctgcggcggcggcgcaggagcagaaaccggtgcggcgcagaagccccagaggcgggcggggcggagcggagggccagcgggccccggcgtgggtctcccgccaggccgccggatttaacccttagtggcttctgaagaaaatggcagaaacatcgccagagccttctgggcagcttgttgtacactcagacgctcacagtgacactgtgctggccagttttgaggatcagaggaagaaaggcttcctctgtgacattactttaatcgtggagaatgtacatttccgggcccacaaagccttacttgctgccagtagtgaatacttctcaatgatgtttgcagaagagggggaaatcggccaatccatttatatgctggaaggcatggttgcagacacctttggtatcctgctggaatttatctacacaggttatctccatgccagtgagaaaagtacagaacaaatcctggctactgctcagttcttaaaagtctatgacctggtaaaggcttacacagacttccaaaataatcatagctccccaaagccaacaactttgaacactgctggtgccccagtggttgttatctctaataagaaaaacgatcctccaaagcggaaacggggaagaccaaaaaaagtcaatacattgcaggaggagaaatcagaactggctgcagaggaagaaatacagttaagagtgaacaattcagttcagaatagacaaaactttgtggttaaaggagacagtggtgtactgaatgagcaaattgcagcaaaagaaaaggaagaatcggagcctacttgtgagccaagtagagaggaggaaatgccagttgaaaaagatgagaactatgatcccaagaccgaggatggccaggcaagccagagtcgatacagcaagcggaggatttggagatccgtcaaacttaaagattacaaacttgttggggatcaagaggaccatggttcagccaagaggatctgtggaaggagaaagcgccctggaggccctgaggcccgctgtaaagactgtggcaaggtctttaagtacaatcactttttagcaatccaccagaggagccacacaggggagcgacctttcaaatgtaatgagtgtggaaaaggctttgcccagaagcactcgctacaggtccacaccaggatgcacacaggcgagcggccgtacacctgcaccgtgtgcagcaaggctctgaccaccaagcactcactgctggagcacatgagcctgcactcaggacagaagtcttttacctgtgatcaatgcggaaaatatttcagccagaacagacagctaaagagccattaccgagttcatacaggccactcattaccggaatgcaaagactgccatcgcaaattcatggatgtgtctcagctaaagaaacatctgcgaacacacacaggtgagaagccatttacttgtgaaatctgtggcaaatctttcacagcaaagagttctcttcagacccacatcagaatccatcgaggagaaaagccatactcctgtggcatttgtggcaaatccttctctgactccagtgccaaaaggagacactgcattctacacactggcaagaagcctttctcctgccctgagtgtaacttacagtttgctcgcttagacaacttgaaggctcacttgaaaattcatagcaaggagaagcatgcttcagatgccagcagcatttctggcagtagtaatacagaagaggtcaggaatattcttcagctacagccatatcaactctctacctcgggagagcaggaaattcagcttctcgtaaccgattctgtacataacatcaatttcatgcccggtcctagccagggaatcagcattgtgactgcagagagttcccaaaacatgactgcagaccaggctgctaatcttaccctgctcacgcagcagccagagcaactgcagaatttaattctttcagctcaacaggagcaaacagaacacattcagagcctcaatatgattgaaagccagatggggccctcacaaacagagccagtgcacgtgatcactctgtccaaggaaacactggaacatcttcatgcccatcaagagcaaacagaggagctccatttagctacaagtacttcagatccagctcagcacctgcagctgacacaggagcctggtccgccaccacccactcaccacgtgccccagccaacgccacttggccaggagcagagctgacctgtaaacacgtttgactgcttgattgggctcttcttataagccagctctgactggattttgaacgcttgaaatcaggctctccacaccattgacttgcagatgcttctgtgagagctgtgatggctaactgatgtttataatgccctccatccaggtagcaagatgtgtgtatgtcttgtctaaggtactgatttgtattgagcatttcaatattattgaatggttttcattttaatctgcaatgtctcataaagactcgggtagtttttctttgggggcattgatctcagtttttctgtaaggtttaaatgttcacagccataggttatggtcttgccaacctccccagttatgtttttttgttttctaggacaaagggagtcattttggttgaactgggcagaatggtttgttctattttcttatttttcttaggcaacacagttgttaccacaagacaagtcagggctaaatatgacagatcacaatgtatggggaatttgcccttttaataatttccagtcccctaagacaaagtaaccctcaacgttttatctttatgcagtacagtgggcttattgtgttaacacttcagaaagattcaaactcataaactcagtattttaactcaaaattcatgtaacaagatagccaaaagcataggatttcttaaaattctgaattcgtcttttctgagaaacataaatttacatatttttcaacagaaggctatcaaaattttaattaagtttaaaatacaaaattggatcaagacattcaccctaaattctgaatttttgtcagaaaagagatttgattttcatgaaggtaaagctttcttcactattctggaacataaaactttattcagtgtaatttaagtcttatatatactctactgaattctaactgatctcctgaaaatgttgatctacgtgttgtgtctgataactttctggagatggaagcttataattcatttttattgcagactagttaaatcccacaaagtgaatatcttctcctaatctttccttttttagagacagggtctcactgtatcacccaggccagagtgtagtggcacaatcattgctcactgtaacctcgaattcctgggctcaagcaaccctcccaccttagcctccctagtagctgggactacagggatgtaccaccacacccagctaatcttcatctaatcttaaaactttgagcctcagagactttgtagccagcatgtgtctgtaattgtatgatttttaaatcatcatcaaaagattaaattatgtttgggttaggttttcaagctaagcttattgaattcttttaccactttcatgtaagctggtaggggatttttgagaaaagaaggtgggcactagtatatctaaattaacaatgctgatggggagtagggggtaatctactctaaaattaatagagcctttccatcaattgttttgttttagacatccttgatttctccctaaatcaaataagttatttggaggttagagtaatagagaattcttcaggtttgagagaagataaaaacattttggttgcatatttgctaagctatattttattatatgtaattcacaaaacttccaaaatgatatatatcttatatgtatcaaccaaactaatgttaaatcaggcctgactagagcaaagataacaattttttacaaacactgttaagccctaagtattatttcaggttctcgtttaaactgtttaattttattcttaaaacacaaagtttttaccaacttttcaaagcccaccaatccacattttctccaggaaattaaatatttaagtaagtgagtgtttactcactctggatagctaggtgattattcagaaaatacggttacatagctatttataagtcaagtttcactggctctataacagtctacctctacactaagagaactataacatgaacaacataggtcactttaaatgttctagtagcaacttttaaaaacataaaaagaagcaggtgaaaatgttaataaaagtttatttaatccaacatttgccaaatatttcaacatataaaaatatattagtgagacattttacattctctttttcatactaagctttcgaaatctggtgtgtattttacactttctgcacatctccatttggatgctaatgttcattggacatacttgatctgtatttagatttcatacaacttacagttgaaaacagattctcatatcaagtagctaagacaaaagtttttttcaagaattgaaataagtatcagtttaaaaatttatattaaatttattaaaattaaaatccagttccttgttgcatgggacacagtgcaaatgcttgataagcacatgtggctagtggctgctatattggacagcatgggccacctgtttctaacttgagcatcagtcctagctatgcctgaattatttgaccagctgtcaaagagaaacaaggaaatgatagctttgttaatctagcctctttctttgtcccacatatacattctacccctttgaataaaaaagttcaatgacgccgggcgtggaggctcatgcctgtaatcccagcactttgggaggccaaggtgggcggatcacgaggtcaggagttcgagggcagcctgaccaacatagtgaaaccccatctctactaaaaatacaaaaattagctgggcgtggtggtgtacccctgtaatcccagctactcgggaggctgagacaggagaatcacttgaacccaggaggcggaggctgcagtgagctgagatcacgccattgcactcaagcctggcgacagagcgagactccgtctcaaaaaaaaaagttaaatgacttgagtacccaaaagaaatgtcgtgaacatgaaagtacttctcatgtgtccttgagaaatgatgttgctagtgcagtgtttcacaattcattttctactaaatgtgtaccattttttaaattgttttaacagaaatatagagtgtgtttcttaggaaatagaatgttatgctttggggctcctgaaacacctcgttttgaaggtgaatctttggttttctcccagaagagggtctgccttgggatgattggagctcttaccatcaaaatcagttattcaagtgcttgcccagtgcttcttgaaactcacctctactctgtattttctacagttggttcttgtgttataaatgttgtgagcaacagattaaatgatgctgaggaatgaaaaaagattctcattataaatgcttacctaggattctcattatagatgcttatctaggttttcataaatgggaatgtaacaat

SEQ ID NO: 32626 - DNA, 3081 bp, Homo Sapiens
atgagtcagccaccaatcgggggcgctgcccctgccacagcagcagcttctcccgccgctgcagccactgaggctcgtctgcacccggagggcagcagcagaaagcagcagcgagctcagtcacccgctagaccgagggacagttcgctgcgacagacaatcgcggccacccggtccccaccgccgccgcccaggggctggcgagggaaaggcgtacgcgctcagcagaggggcggcagcggcggggagggggcctccccttctccatcctcctcttctgcgggcaaaaccccaggaaccggcagcagaaactccggaagcggcgttgcggggggcggcagcggtggtggagggagctactggaaagaaggatgtctgcagtctgagctcatccagttccatctcaagaaggagcgggcggcagcggcggcggccgcggctcagatgcacgctaagaacggcggcggcagcagtagccgcagctccccggtgtctggcccccctgccgtttgcgagaccctggccgtcgcctccgcctccccaatggcggcggcggcggagggcccccagcagagcgcagagggcagcgcgagcggcgggggcatgcaggcggcagcgcccccttcgtcgcagccgcacccgcagcagctccaagagcaggaagaaatgcaagaggagatggagaagctgcgagaggaaaacgagactctcaagaacgagatcgatgagctgagaaccgagatggacgagatgagggacactttcttcgaggaggatgcctgtcaactgcaggaaatgcgccacgagttggagagagccaacaaaaactgccggatcctgcagtaccgcctccgcaaagccgagcgcaaaaggctccgctacgcccagaccggggaaatcgacggggagctgttgcgcagcctggagcaggacctcaaggttgcaaaggatgtatctgtgagacttcaccatgaattagaaaatgtggaagaaaagagaacaacaacagaagatgaaaatgagaaactgaggcaacagctcatagaagttgaaattgcaaagcaagctttacagaatgaactggaaaaaatgaaagagttatccttaaaaagaagaggaagcaaagatttgccaaaatctgaaaaaaaggctcaacagactcccacagaggaggacaatgaagatctgaagtgccagctgcagtttgttaaggaagaagccgctttgatgagaaagaaaatggccaagattgataaagaaaaggacagatttgaacacgagctccagaagtacagatccttttatggggatctggacagtcctttgcccaaaggagaagccggaggccctcccagcactagggaggccgagctcaagctacggctaaggctggtggaggaagaagccaacatcctgggcaggaaaatcgtcgaactggaggtggagaacagaggcctgaaggcggaactggacgaccttaggggcgatgacttcaacggctcggccaacccgctcatgagggagcagagcgaatccctgtcggagctgcggcagcacctgcagctggtggaagacgagacggagctgctgcggaggaacgtggccgacctggaggagcagaacaagcgcatcacggcggagctcaacaagtacaagtacaagtccggcggccacgacagcgcgcggcaccacgacaacgccaagaccgaggccctgcaggaggagctgaaggcggcgcgcctgcagatcaacgagctcagcggcaaggtcatgcagctgcagtacgagaaccgcgtgcttatgtccaacatgcagcgctacgacctggcctcgcacctgggcatccgcggcagcccccgcgacagcgacgccgagagcgacgcgggcaagaaggagagcgacgacgactcgcggcctccgcaccgcaagcgcgaagggcccatcggcggcgagagcgactcggaggaggtgcgcaacatccgctgcctcacgcccactcgctccttctacccggcgcccgggccctggcccaagagcttctccgatcggcagcagatgaaggacatccgctcggaggccgagcgcctgggcaagaccatcgaccggctcatcgccgacacgagcaccatcatcaccgaggcgcgcatctacgtggccaacggggacctgttcggactcatggacgaggaggacgacggcagccgcatccgggagcacgagctgctctaccgcatcaacgctcagatgaaggccttccgcaaggagctgcagaccttcatcgaccgcctcgaggtgcccaagtctgcggacgaccgcggcgccgaggagcccatttccgtgagtcagatgttccagcctatcattttacttattctcattcttgtattattttcatcactttcttacacaacaatatttaaacttgtcttcctttttacactgttttttgtactgtaaatctttcatcatttaccattcattgtagtattttcagtttgtttattttgttcacccttcaagacaagaagtaaaagaagtataatttctgtagtaaccaatgctataaaaacactgaagactgcttatttctttaaaaagatacaactcatcttaccaagaccaaattcaataagaagcccaaacactaaaatatttcaggctttattttaaaggcaagtgagactgcttcaaataaaacaacttcaagcttccaagaaacagttaagaggaggcagagaagagcagaaacacttctttgctgacacttacactgttgccatggacctacataagcagtgggagaacacagagactaactggcataaggaaaagatggaattactggaccagtttgacaatgaaagaaaggaatgggaaagtcaatggaagattatgcagaagaaaatagaagagctttgccgggaagtaaagctttggaggaaaatcaatatcaatgaaagtgctaagatcattgatctttaccatgagaagaccattccagagaaagtgatagaatcttccccaaattaccccgatttaggacaaagtgaatttataaggacgaatcacaaagatggtctg

SEQ ID NO: 32627 - DNA, 4711 bp, Homo Sapiens
gcggatccccgaactgcgcggcccgactcgagtccgccatattggatgccgcagccgctgctgccagcgcttcctcctctgtcttcgccgagcggggctggttcctgcggcccgagcggcggggagcgccccctcctcgcggccacgcagcagcccgcgtctcgctctccccacccagtgcagtggccgccgcctcttccgccgccgggctcggggcctccgcagcgacaacatggaggccgtgaagaccttcaatagcgagttgtattccctgaatgactataaaccacccatttcgaaagcgaaaatgacccaaattactaaggcagccatcaaagctattaagttctataaacatgtggtacagagtgttgagaagtttattcagaaatgtaaaccagaatacaaagtacctggactttatgttattgactccattgtgcgacaatcccgacatcagtttggtcaagaaaaggatgtgtttgcacccagatttagtaataacatcattagcactttccagaatttatatcgttgccctggggatgacaagagtaaaatagtgagagtactaaacttatggcagaagaataatgtatttaagagtgagattattcagccccttttggatatggcagccgggattccgcctccagttgtcacacctgttttggccagcactaccactgctatgagcaatactccaggaactcctgtgacacctgttactccggccaatgtggtccaaggcttacctgatccgtgggtatctcagataacaaatacagatacacttgcggctgtagctcagatcttgcaaagtcctcaaggccagcagcttcaacaattaatacaaaccttacagatacaacaacagaagccccagccttccattctgcaggccctagatgctggtcttgttgttcagttgcaagctcttacggcacaacttacagctgcagctgcagctgccaacactcttactcccttagaacagggagtctcctttaacaagaagttgatggataggtttgattttggggaagactctgagcatagtgaagaacccaaaaaggaaattccagcttcacaactttctcacgtttcagaatctgtgaacaattccatttttcatcagatagcagaacaactacaacagcaaaacctagaacatctcagacagcagctcttggagcagcaacagcctcaaaaggccactcctcaggatagtcaggaaggaacctttgggtcagagcattcagcgtcaccatcacaagggagtagtcagcagcattttcttgaacctgaagtcaatttggatgattccatagatattcagcaacaggatatggatatagatgaagggcaagatggagtggaagaggaggtctttgaacaagaagctaagaaagtggcggttcgctcaagatcaagaacacattcacgatctcgttcaagatcaccaagaaaacgaaggtctaggtcacggtctggctctagaaagcgtaaacacagaaagcgatcacgctcccgctcaagagaaagaaagaggaaatcatcacggtcgtattcaagtgaaaggagagccagagaaagggagaaagaacgacagaaaaagggattacctccaattagatctaaaacactaagtgtatgtagtactactctctgggttgggcaagtggacaagaaggcaacacagcaagacttaaccaacctgtttgaagagtttggacagattgaatccattaatatgattcctccccggggctgtgcttatgtctgcatggttcatcgacaagatgcatttcgagctcttcagaaactcagttctggatcatataaaattgggtccaaggtcattaagatcgcttgggctttaaacaaaggtgtaaaaacagaatacaaacaattctgggatgtggatcttggagttacatatataccatgggaaaaagttaaagtggatgacttggaaggttttgcagaaggaggcatgattgatcaggagactgtaaatactgagtgggaaactgtgaaaagctcagaacctgttaaagagacggtccagacaactcagagcccaactccagttgaaaaggagacagtggtcacaacccaggcagaggttttccctcctcctgttgctatgttgcagattccagtggcgccagccgtgcctacagttagtttagtcccaccagcatttcctgtgtcgatgccggttcctcctcctggattcagtccaatccctccacctccttttttaagagcaagttttaacccttcacaaccaccacctggtttcatgccgcctccagttcccccacctgttgtgccaccccctacgattccaccagtagtaccaacatctttagtgcagccgtcattatccatgacaccggaaactgtgaaagatgttggatttggtagccttgttataccaggcggttctgttgccagcaatcttgctacttccgctctgccagctggaaatgtttttaatgctccaactaaacaggcagagcctgaagaaaaagtacctcatcttatagaccaccagatttcttctggtgaaaacaccagatcagtgattccaaatgatatttcaagtaatgctgcaattttaggaggacagccgccaaatgtgacaagcaattctggaattctgggagtccaaagaccaaatgtatcaagtaattctgaaattcttggggtccggccatctaatgtttccagtagttctgggattattgcagcccaaccaccaaatattctaaataactctggaatattgggaatacagccacccagtgtgtcaaatagttctggacttttgggagtgctacccccaaatatacctaacaattctggacttgtaggagtacagccaccaaatgttccaaatactcctggacttctgggaacacagccaccagctggacctcaaaacttaccccctttaagtatccctaatcaaaggatgcccacaatgccaatgttagacattcgtccgggactaataccacaggcacctgggccaagattccctttaatacagcctggaattccaccccaacggggaatcccacccccatcggtacttgattcagctcttcatccaccaccccgtggaccttttcctccaggagatatttttagtcaaccagaaagaccttttttagctcctggaagacaaagcgtagacaatgttactaacccagaaaaaaggataccacttgggaatgataacattcaacaggaaggagatagagattaccggtttcctcctatagaaaccagggaaagcattagtagacctccccctgtggatgttagagatgtggttgggcggcctatagatccaagagaaggtcctggacggcctccactagatggtagggatcattttggaagacctcctgtagatataagagagaatcttgtgaggccaggtatagatcatcttggtcgaagagaccactttggctttaatccagagaagccctgggggcatagaggagattttgatgagagagagcatcgggttctaccggtctatggtggtccaaaaggcttacatgaagaaagaggtagatttcggtctggaaactatcgatttgatcctagaagtggtccttggaaccgaggatttggacaagaagttcacagagattttgatgaccgcagaagaccctgggagaggcaaagggatagggatgacagagattttgatttctgcagagaaatgaatggaaatcgtcttggacgagacagaattcaaaacacttgggttccccctcctcatgctcgggtttttgattattttgaaggggccacttctcaacgaaaaggtgataatgtgcctcaggttaatggtgaaaatacagagagacatgctcagccaccacctataccagtacagaatgatcctgaactttatgaaaaactgacatcttcaaatgaaataaacaaggagaagagtgacacagttgctgatatagaaagtgaaccagtggtagaaagcacagaaactgaggggacataatcatcactcagtaggtaaaagataccttttgtaaagttgtcatctctctgtaatagataatggctgactggaccatagttgttcacttttgtctgccagaattaagttaatctgatgttcatgttcacctttctcttaaaataattgtacaactgacttgtatagacattgttcttaatatgaacatggtaggtaaactttttttttatttttttctgataaaatacaaatgttggccccagattcttttaacgtcaaggaaatgaataacagcttgtcagagacttcctatggaagaaagaattttttagatactatcattaggttggatatggtaatagatatatttcagaatagcaagtggtggtatatcttatccatatctttaggctgctgcagaattttaaggttatagataaagctgtgatattttatgcaaagactggctctaggtatttgaggagcacaatacagagattttaaaaagtgattttgtaaaatctacactacggtctctgtttctccaaagtaagtgtttgtgatttgttcctcatactgcagtgagtaaaaaagaaacaagaaaacaacaacataaatattaaagtacgtttcaatgttgggtgaattttgtttttagatgccaataaaacttatttgtttgat

SEQ ID NO: 32628 - DNA, 8614 bp, Homo Sapiens
ggcattctcgtggctcactacagcctcaacctcctgggctcaaatgagcctcccacttcagtgcctcctaagtagctaggactacagcatagcttggaggagactgcagcctcggactctcacctgcctcttttctgcgccgatgggagttccagaacggcggcggtggccacaggtctgatagcccagccgcagtgccaaggacgtgcagggcgaggccttcttgggcagctttgtggccagcgggatggggccctcggcctcgtcccatgggagcccagtgccactgccctctgacctgtctttccgctccccaacccctagcaacctgcccatggtgcagctgtgggccgcccacgcccatgaaggcttctcccacctgcccagtgggctgtacccatcctacctccacctgaaccacctggagccccccagcagtgggagccccctcctcagccagctgggtcagcccagcattttcgatacccagaaaggtcaggggccaggaggagacggtttctacctgcccaccgcgggggctccgggctccctgcactctcacgcgccctcggcccggacccctggcggcggccactcctcgggcgccccggccaaaggctcgtcgtcgcgggacggtccagccaaggagcgggcgggccgcggcggggagccgcctccgcttttcggcaagaaggacccgcgcgcccggggcgaggaggcctcggggccacggggcgtggtggacctgacccaggaggcgcgcgccgagggccgccaggaccgggggcccccgcgcctggctgagcgcctgtcgcccttcctggctgagtccaagaccaagaatgcggcgctgcagccgtcggtactgaccatgtgcaacggcggcgccggggacgtggggctgcccgcgctggtggccgaagcggggcgcgggggtgccaaggaggctgcccggcaggacgagggcgcgcggctgctgcggcgcacggagaccctgctccctgggccgcgcccctgcccctcaccgctgcccccgccgcccgcgccccccaaggggcctcctgcaccccccgcggccacccccgccggcgtctacaccgtcttccgcgagcagggccgtgagcaccgcgtggtggcgcccaccttcgtgccttccgtggaggccttcgacgagcgcccggggcccatccagatcgcatcccaggcgcgcgatgcccgggcccgcgagcgcgaggctggcaggccaggggtcctgcaggcgccccccggctccccgcggcctctggaccggcccgagggcctgcgcgagaagaactcggtcatccgctcgctcaagcggccgccccccgcggatgcccccacggtgcgggccacacgcgcctccccggacccccgcgcctacgtgcctgccaaggagctgctcaagcccgaggcggacccgaggccctgcgagcgtgcgccccgcggcccagccggtcctgcagcccaacaggccgccaagctcttcggcctggagcccgggcgccccccgcccaccggccctgagcataaatggaaacccttcgagctgggcaacttcgccgccacgcagatggccgtgctggccgcgcagcaccaccacagccgcgccgaagaggaggccgccgtggtcgctgcctcctcctccaagaaggcctacctggaccctggggctgtgctgccccgctcggcggccacctgcggccggccggtcgctgacatgcactctgcggcccacgggtctggagaggcctcggccatgcagagccttataaagtacagtggcagctttgcccgggacgccgtggccgtgcgccctggtggctgtggcaagaagagcccctttggaggtttgggcaccatgaaacccgagcctgcgcccacctctgcgggtgcctcccgagcccaggcccgtctcccacactccggaggccctgcagcgggcggcggccggcagctgaagcgggaccccgagaggcccgagagcgccaaagctttcgggcgcgagggctctggtgcccagggtgaggcagaagtgcgacacccgcctgtgggcattgcagtggctgtggcccggcagaaggacagtggcggcagtggccggctggggcctgggctggtagaccaggagcgctctctgtcgctgagtaacgtcaaagggcacggccgagcagatgaggactgtgtggacgaccgggccagacaccgggaggaacggctgctcggggcacggctggaccgggatcaggagaagctgctcagagagagtaaggagctggctgacctggcccgcctgcaccctaccagctgtgctcctaacggcctgaaccccaacctcatggtgacggggggcccggcgctggcgggctcaggtcgctggtctgccgaccccgcagcccatctggccacgcacccctggttgccccgctcgggcaacgcatccatgtggctcgctggacacccctacggcttgggtcccccatctctgcaccagggcatggcccctgcgttcccacctggcctggggggctccctcccgtcagcctaccagtttgtcagggacccccaatcgggccagctggtggtcattcccagtgatcaccttcctcactttgcggagctgatggagcgggccaccgtaccgcccctctggcccgccctgtacccgccgggccgcagccccctgcaccacgcccagcagctgcagctcttctcacagcagcacttcctgcggcagcaggagttcctgtacctgcagcagcaggcggcccaggccttggaactgcagaggagcgcccagctcgtgcaggagcggttgaaggcgcaggagcaccgggcggagatggaagagaaggggagcaagcggggcctggaggctgcgggcaaggctggcctggccaccgccggccccgggctgctgccgcggaagccccctggcctggccgccggccccgcgggcacctacggcaaggccgtgagcccgccaccatcaccccgcgcatcccctgtggctgccctgaaggccaaggtcatccagaagctggaggacgtgtccaagccacccgcctacgcctaccccgccacccccagctcccaccccaccagcccgccgcccgcctccccaccgcccaccccgggtatcacccgcaaggaggaggctcccgagaatgtggtcgagaagaaagacttggagttggagaaggaagcccccagccccttccaggccctgttctcagatatcccgcccaggtacccgttccaagccctgccaccgcactacgggaggccctaccctttcctgctgcagcccacggccgccgccgacgcggacggcttggcccctgatgtgccgctcccggctgatgggcccgagcgcctggcactctcacccgaagacaagcccatccgcttgtccccctccaagatcacagagccgctgcgggagggcccggaggaagaaccgctggctgagcgggaggtgaaggcagaggtggaggacatggacgagggccccacagagctgccgcctctggagtcgccgctgccactgcccgccgcggaagccatggctacccccagccctgcagggggttgtggaggtggcctgttggaggcccaggcgctgagtgccaccgggcagagctgcgcagagccctctgagtgtccagactttgtggaggggcctgaaccacgggtggattccccgggccggacagaaccctgcaccgccgccctggacctgggggtgcagctgacacccgagacactggtggaggccaaggaggagccggtggaggtgcctgtggcggtgcccgtggtggaggcagtgcccgaggaaggcctggcgcaggtggcaccgagcgagtcccagcccaccctagaaatgtcagactgtgacgtgcccgccggggagggacagtgcccgagcctggagccccaagaggccgtgcctgtactcggcagcacctgcttcctggaagaggcaagctctgaccagttcctgcccagtctggaggacccactggctggcatgaacgccctggcggcagctgcggagctgccccaggccaggcctctgccctccccgggtgctgctggagcccaggccttggagaagctggaagcagccgagagccttgtcttggagcagagcttcctgcatggcatcaccctgctaagtgagatcgcagagctggagctggagaggaggagccaagagatgggaggtgcggagcgggccctggtggcgcggccctccctggagagtctgctggcagctggcagccacatgctgagggaggtgctggatgggcccgtggtggacccactcaagaacctgcggctcccgcgggagctgaagcccaacaagaagtacagctggatgcgcaagaaggaggagcggatgtatgccatgaagtcctccctggaggacatggacgccctggagctggacttccggatgcggctggccgaggtgcagcgccagtacaaggagaagcagcgtgagctggtgaagctgcagcgccgccgggactccgaggacaggcgcgaggaaccccatagaagcttggcacgcagaggccctggcaggccgcggaaacggacccacgccccgagcgccctgtcgcccccccgcaagagagggaagagcggccacagtagcggaaagctgagcagcaagtctctgctgacatcagatgattatgagctgggagcagggataagaaagagacacaaggggtctgaggaggaacatgatgccctcatcggaatggggaaagccagggggaggaaccagacttgggatgaacatgaggcctcgtcggacttcatcagtcagctaaagattaagaagaagaagatggccagcgaccaggagcagttggcaagcaagctcgacaaggccctctccctcaccaagcaggacaagttgaagtcgcccttcaagttttcggacagtgctggggggaaatcgaaaactagcgggggctgcggcaggtacttgactccttacgacagcctgctggggaagaacaggaaggcgctggccaagggcctcggcctgtctctgaaatcctccagagaaggtaaacacaaaagggcagccaaaaccaggaagatggaggtggggttcaaggccagaggccagcccaagtcggcccattccccgtttgcctcggaagtgagcagctactcttacaatacggactcagaggaagacgaagaattcctgaaggacgagtggcccgcccaaggcccctccagctccaaactgacgccttccctcctgtgtagcatggtggcaaagaacagcaaggcagctggtggccccaagctgaccaagaggggcctggcggccccccggactctgaaacccaagccggccaccagcaggaagcagccgttttgtctgctgcttcgagaggccgaggcgcgttcctccttcagcgactcttcggaggaatcgtttgaccaagatgagagctcggaggaggaggacgaggaggaggagctcgaggaggaggacgaggccagcggtggtggctacaggctgggtgcccgggagcgggccctgtcaccgggcctggaggagagtgggctgggcctgctggcacgcttcgccgccagcgccctccccagccccacggtgggtccatccctgtctgtggtacagctggaggccaagcagaaggcccggaagaaagaggagcggcagagcctgctgggcacagagttcgagtacaccgactcagagagcgaggtcaaggtgcgcaagcggtcgcctgcggggctgctgcggcccaagaaggggctgggggagccgggaccctccctggccgcacccacgcctggcgcccgcggtcccgaccccagcagcccagacaaggccaagctggcggtggagaaggggcgcaaggcccggaagctgcggggccccaaggagcctggcttcgaggcggggcccgaggccagcgacgacgacctgtggacgcggcgccgcagcgagcgcatcttcctgcacgacgcctcggctgctgcacctgcgcccgtcagcaccgcgcccgccaccaagaccagccgctgcgccaagggcggccccctgagcccgcgcaaggacgccgggcgtgcaaaggacaggaaggaccccaggaagaagaagaaagggaaagaggctgggccaggagctgggctgccgccgccccgagctcctgccttgccctctgaggccagggctcctcctcctcctcctcctcctcctcctcatcctcctcttcctcctcctcctcttcctcctcctcctcttcctcttcgtcttcctcctcttcctcctcctcctcttcctcgtcctcatcctcctcctcctcctcctcttcctcctcttcttcctccaccacagacgaggactcttcctgcagctcggacgatgaggcagcccccgcccccacggctggcccttccgcgcaggcggcgctccccaccaaggccaccaagcaggccggcaaggcgcggccctcggcccactccccaggcaagaagacgcccgcgccccagccccaggcgcctcctccgcagcccacacagcctctgcagcccaaggctcaggccggggccaagagccgacccaagaagagagagggcgtccacctccccaccaccaaggagctggccaagcggcagcgcctgccgtccgtggagaaccggcccaagatcgccgccttcctgccagcccggcagctctggaagtggttcggcaagcccacccagcggcgtggcatgaagggcaaggcccgcaagctcttctacaaggccatcgtgcgcggcaaggagatgatccgtatcggggactgtgccgtgttcctctctgccggccgccccaacctgccctacatcggccgcatccagagcatgtgggagtcgtggggcaacaacatggtggtccgcgtcaagtggttctaccaccccgaggagaccagcccgggcaagcagttccaccagggccagcactgggaccagaagtccagccgcagcctcccggcggccctgcgggtctccagccagaggaaggacttcatggagcgcgcgctataccagtcctcgcatgtggacgaaaatgacgtgcagacggtgtcgcacaagtgcctggtggtgggcctggagcagtatgagcagatgctgaagaccaagaagtaccaggacagcgagggcctgtactacctcgcgggcacctacgagcccaccacgggcatgatcttctccacggacggcgtgcccgtgctctgctgagcccgccgggccctgcgggccacctgtgccccgagggcggccagggacccatctccatcactgccatggcgcggagaccacgtgcgttgtgtgcatgcgagcgctcctgcaggcgtgtgcatggggccaggtgtgcacgtggatgcccgggtgagtgtgtgtgcatgcacgtgtgtgcacgcatgtgcacatgcctccagccccaccttccaacccctcagtgcccccaggacaggggcccctcttagctatcagggtatggccggaccggcccttcctgcccagcacgttgcaagcacttggccaggccggccctccaggctgctgctgcgtgggggcccgggtgcccccaggtccatgcagactggggattcggtggggaggggcgcttctaaggaaccaaactgacgctcactctgggcttcccaagcacccttagcatggagcccaccccaaggcctcccaccgtgcatgggacagggcagcccgatgccagctggcctacctgactgtgccaggggccctgcccccaccctctcaggatggcctagacttggggaacagagccgggtggggttgcagcccggagtgtctgtcaaaggcaccaggtggagagggcccggcacaggcccaccctggtccaaaccctcacactacagaaaaccccaatggtgctgaaactgtcgcccggccacgcctggcccctccccacccaggagggaggtggcacttcttaacctgtacagttttattgtaccaagagactcgccccgcccctgtatcataagcctttaaatggagtcaactttttaattatatatataaagataaatatatataaatatatatataaactttttaaaactgtgaaaaatagctatgaaattataaaaaaaaacattctgacgtgcagaatattattttttatttcctgttagattatagtgtctagcaccggcttcaccggcctcccagtccccagcacaccccccgcccaccccaccaagtgtactgtactcaccccccaggatagagaagtgtttgttagggagagaagagggagaggcaggagccggcccaagcccagggtccctgcttgggccccagaaagcacttaaccaggccccaagccttcaagggaaaccaaggcctcaaccagacaatcttgagggaaggaaaagccagactttgggtttgttttttgggggaattattggtttttttttttatgtttcttttggaattttgtttgttggcaaattctgtgtgatcttttttcataaaaaaaaagaaaagatttaattggaaaaat

SEQ ID NO: 32629 - DNA, 3741 bp, Homo Sapiens
atgaccatagttgacaaagcttctgaatcttcagacccatcagcctatcagaatcagcctggcagctccgaggcagtctcacctggagacatggatgcaggttctgccagctggggtgctgtgtcttcattgaatgatgtgtcaaatcacacactttctttaggaccagtacctggtgctgtagtttattcgagttcatctgtacctgataaatcaaaaccatcaccacaaaaggatcaagccctaggtgatggcatcgctcctccacagaaagttcttttcccatctgagaagatttgtcttaagtggcaacaaactcatagagttggagctgggctccagaatttgggcaatacctgttttgccaatgcagcactgcagtgtttaacctacacaccacctcttgccaattacatgctatcacatgaacactccaaaacatgtatagctaggcacttccgttttggaaaccaagaagatgcccatgaattccttcaatacactgttgatgctatgcagaaagcatgcttgaatggcagcaataaattagacagacacacccaggccaccactcttgtttgtcagatatttggaggatacctaagatctagagtcaaatgtttaaattgcaagggcgtttcagatacttttgatccatatcttgatataacattggagataaaggctgctcagagtgtcaacaaggcattggagcagtttgtgaagccggaacagcttgatggagaaaactcgtacaagtgcagcaagtgtaaaaagatggttccagcttcaaagaggttcactatccatagatcctctaatgttcttacactttctctgaaacgttttgcaaattttaccggtggaaaaattgctaaggatgtgaaataccctgagtatcttgatattcggccatatatgtctcaacccaacggagagccaattgtctacgtcttgtatgcagtgctggtccacactggttttaattgccatgctggccattacttctgctacataaaagctagcaatggcctctggtatcaaatgaatgactccattgtatctaccagtgatattagatcggtactcagccaacaagcctatgtgctcttttatatcaggtcccatgatgtgaaaaatggaggtgaacttactcatcccacccatagccccggccagtcctctccccgccccgtcatcagtcagcgggttgtcaccaacaaacaggctgcgccaggctttatcggaccacagcttccctctcacatgataaagaatccacctcacttaaatgggactggaccattgaaagacacgccaagcagttccatgtcgagtcctaacgggaattccagtgtcaacagggctagtcctgttaatgcttcagcttctgtccaaaactggtcagttaataggtcctcagtgatcccagaacatcctaagaaacaaaaaattacaatcagtattcacaacaagttgcctgttcgccagtgtcagtctcaacctaaccttcatagtaattctttggagaaccctaccaagcccgttccctcttctaccattaccaattctgcagtacagtctacctcgaacgcatctacgatgtcagtttctagtaaagtaacaaaaccgatcccccgcagtgaatcctgctcccagcccgtgatgaatggcaaatccaagctgaactccagcgtgctggtgccctatggcgccgagtcctctgaggactctgacgaggagtcaaaggggctgggcaaggagaatgggattggtacgattgtgagctcccactctcccggccaagatgccgaagatgaggaggccactccgcacgagcttcaagaacccatgaccctaaacggtgctaatagtgcagacagcgacagtgacccgaaagaaaacggcctagcgcctgatggtgccagctgccaaggccagcctgccctgcactcagaaaatccctttgctaaggcaaacggtcttcctggaaagttgatgcctgctcctttgctgtctctcccagaagacaaaatcttagagaccttcaggcttagcaacaaactgaaaggctcgacggatgaaatgagtgcacctggagcagagaggggccctcccgaggaccgcgacgccgagcctcagcctggcagccccgccgccgaatccctggaggagccagatgcggccgccggcctcagcagcaccaagaaggctccgcgccccgcgatcccggcacccccgctaccaaagaaggcgcctgggaggccatggccgtcgcccccgaggagcctccgcccagcgccggcgaggacatccggggaccacgcccgggacgctcaggacccatcccagagcttgggcgcacccgaggccgcagagcggccgccagctcctgtgctggacatggccccggccggtcacccggaaggggacgctgagcctagccccggcgagagggtcgaggacgccgcggcgccgaaagccccaggcccttccccagcgaaggagaaaatcggcagcctcagaaaggtggaccgaggccactaccgcagccggagagagcgctcgtccagcggggagcccgccagagagagcaggagcaagactgagggccaccgtcaccggcggcgccgcacctgcccccgggagcgcgaccgccaggaccgccacgccccggagcaccaccccggccacggcgacaggctcagccctggcgagcgccgctctctgggcaggtgcagtcaccaccactcccgacaccggagcggggtggagctggactgggtcagacaccactacaccgagggcgagcgtggctggggccgggagaagttctaccccgacaggccgcgctgggacaggtgccggtactaccatgacaggtacgccctgtacgctgcccgggactggaagcccttccacggcggccgcgagcacgagcgggccgggctgcacgagcggccgcacaaggaccacaaccggggccgtaggggctgcgagccggcccgggagagggagcggcaccgccccagcagcccccgcgcaggcgcgccccacgccctcgccccgcaccccgaccgcttctcccacgacagaactgcacttgtagccggagacaactgtaacctctctgatcggtttcacgaacacgaaaatggaaagtcccggaaacggagacacgacagtgtggagaacagtgacagtcatgttgaaaagaaagcccggaggagcgaacagaaggatcctctagaagagcctaaagcaaagaagcacaaaaaatcaaagaagaaaaagaaatccaaagacaaacaccgagaccgcgactccaggcatcagcaggactcagacctctcagcagcgtgctctgacgctgacctccacagacacaaaaaaaagaagaagaaaaagaagagacattcaagaaaatcagaggactttgttaaagattcagaactgcacttacccagggtcaccagcttggagactgtcgcccagttccggagagcccagggtggctttcctctctctggtggcccgcctctggaaggcgtcggacctttccgtgagaaaacgaaacacttacggatggaaagcagggatgacaggtgtcgtctctttgagtatggccaggtgtggttccgttgcacagttaagcccttagcgtttattgaaggcctaagtgacacaggactgagggcagcactacctgtgtcaccaaagccctggaacgtacagctctag

SEQ ID NO: 32630 - DNA, 4528 bp, Homo Sapiens
accaacaccctgttccggagcaactctctggcctcaaagtccatggagtcttttctgaaggtggccgggatgcagtacctgcacggcgtcctgggccccatcatcaacaaggtgtttgaggagaagtacgtggagctggaccccagcaaagtggaagttaaggatgtagggtgttccgggctgcaccgcccgcagaccgaggccgaggtgctggagcagagcgcgcagacgctgcgcgcccacctgggggccctgctgagcgcgctcagccgctcggttcccgcgtgccccgccgtggtgcgcgccaccttccgccagctcttccggcgcgtgcgcgagcgcttccccggcgcccagcacgagaatgtaccgttcatcgccgtcaccagcttcctgtgcctgcgcttcttctctcccgccatcatgtcgcccaagctcttccacctgcgggagcgccacgcggacgcccgcaccagccgcaccctgctcctgttggccaaggcagtccagaacgtgggcaacatggacacgccggcttccagggccaaggaggcttggatggagccgctgcagcccaccgtgcgccagggcgtggcgcagctgaaggacttcatcaccaagctcgtggacatcgaggagaaggacgagctggacctgcagcggacgctgagtttgcaggcgccacctgtgaaggaggggccactcttcatccacaggaccaagggcaagggccccctcatgtcctcctccttcaagaagctctacttctccctcactaccgaggccctcagcttcgcgaagacgcccagctccaagaaaagcgccctcatcaagttagccaacatccgggcagcagaaaaggttgaggaaaagaactttggcagctcgcacgtcatgcaggtcatctacacggacgacgccggcaggccccagactgcctacctgcagtgcaagtgtgtgaatgagcttaaccagtggctgtctgtgctgcggaaggtgagcatcaacaacaccggactgctgggctcctaccaccctggcatcttctgtggggacaagtggagctgctgccaccaaaaagagaagacaggtcagggctgcgataagacccggtcacgggtgaccctgcaggagtggaatgaccctcttgaccatgaccttgaggcccagctcatctaccggcacctgctgggcgtggaggccatgctgtgggagaggcaccgggagctgagcgggggtgcagaggcaggcacggtgcccacgagccctggcaaagtccccgaggactcattggcccggctgctccgggtgctgcaggacctccgcgaggcccatagctccagcccggccggctccccaccctcagagcccaactgcctcctggagctgcagacgtgaggcccgccctacgctcccttgctgagtcccctgccaagcgctcggagcccctccaggacactctgcaccccctcaccccggtcctcctcattagggtgcagggcctaggtctcttccaagtgggggaggggggagagtcaggaataaggggatccccagaagtgcagagctgagcaggcttgggcctgtcatggctggcctgaagtgtccccagctccctacagccgctgtagccatcactgcctctccagggaccctcctctcctgcctaggacagacccagccagaaccactgctaggatgggccacacccaggggtctggcctccagggacctagagaatgggagggagaacggggccccaggagacccggccgccaccccacccgctacccttgggtgccacagggctgtgctgttgccaacagtaaacctgctgttactgtccaggctctggggtcttgtgatgagggtctggggagaaagtgggcccggggggaccccggaggctgtcggtggatgtgccgatgatggggctgacagtatgggctctgggcatccctgttcccccctctttcttccccccactcttctggggtcgggggttcctttcccttcccagttgctgtccctgggtcccctctttcatgtcccacaggccacagagcccagtgtgtccaaccagctgttctctcctcaaagcagcccccaagcaagtcccttctctagggtgtccctgaggacagcacagatgcgggactcagagaccccattcctcttcacgcagcccttaccccaagccctctagctgtgtggctggcagtgttggccacgtaggggctcccatccccccaccattgtgtcacataggctgccaggctcagctcccagctgcgtccacagtgacctggatcagggtggggacaaggactggaccctccttctccagaaggccttcagctcttgccttgccatgcagtcacctccttccccctctgaccccagatcccaaaggtgcaccgttgccccagcccctttctggccccatggggtttctctgatgccttcatcatagaggcccggggctggtccgatggttggcaaaacttgactccggcccagtccccactcttggggacttagaacccctggtgtcctgggatctggcctgcctttctttggtcagtccctgtggtcccccaccagctccccctcccatagggctgcccaccaagccctgcccccagcccaagaggagcccccactgcctgcggggcagtgatgtctggccaccggctcacaccaatgacttggtcctggggtggcagaagcagcaggtgacaggagcagggcccctgtccctctcttctggccctgtggtacccaggccacacgttgtgcccgctcttagggctgaccggctgcagggaccaccagccgctgctactgtgggccgccccggggcagggtgggcagggcttttgtgggttatgaggacacagaagtccctgaggcccccagacctggcacagccaacctccttcctcccccggttgcccccaactctaaagcctcctccctcccagtgtccactggctccaggctcctcacaacagcagctcatagacacagggcgtctccaggtgtcccagccctccagatgtttctagctctccagatgggcgctgttttcacgtctgcctgcatccattcattccttcattcctcacctttatcctgttatctctatttttttaagctaccaggaaggaaagggaagaagagatcacgaaactgggacccccagaagggaggagtgggctttgaacttagacatctacctcagagctcaaataggttgtttaaaatcacattcaattttcagatgaaggggaactttatagttttttttgtttgtttgtttttttgagacagagtctcactctgttgcccaggctggagtgcaaatggcttgatcttggttcactgcaacctctgcctcccaggttcaagcaattctcttgcctcagcctcccgagtagctgggactacaggcgtgtgccaccacgcccagctaattcttgtatttttagtagagacggagtttctccatgttggccagactggtctcgaactcctgacctcaggtgatctgaccgccttggcttccgaaagtgctgagattacagttgcgagccactgtgcatggccagaactttataataattaaaagagacttgaagctgggtgtgacggtgcacacctctagtcccagctactcgggaggccaaggcagaaggatcaccttgaggccaggagtttaaggccagcctgggcaacatagcaaaacctagtccctaaaattaaaaaaaaaaaaaaaaaaaggaaaataaaggagacttgaaatttttgaactaaatagtggtgatggctatacattgtgaatgtaattaacaccactgagttaaacacttaaaatggttaaaatggcaaattgtatgttatacctattttactacaataaaaagtataaaaaagaggcaagatatttaggtgacttacagcaaccaattgcaacaaaacaaaatgttaagaaatgatctttttatgaggcaattggaaatttgaacactgatcaactataggatgattggaattattaattttgtaaaggtgtgataagatactgcacttggctgggcacagtggcacatgcctgtaatcccagctacttggcaggctgaggtgggagaatcgcttgagctcaggagttcgagaccagcctgggcaatgtggcgaaatccccgtctttacaaaaacaaacaaacaaacaaaaaagatattgcagttgtgttgtaagcgtccttatctttcagagctacatagtggaatgtttatggaatatttaggataaatgatatacgcatttgggatttgctgcaaaatgacccagagtcaggggtcagggggagaggtagagatgagacaagaggtagaggggagaggtagaggtagccacgagctgataattacagacaagagatgcggagtatgtgggggctcattatcctgcatagtctatctttgtatatctttgaacttttcaagaataaaaaagcttaaaaagtat

SEQ ID NO: 32631 - DNA, 1662 bp, Homo Sapiens
atgccaggagctgggctgctgccaccccaagctcccgccttgccctctgaggccagggctcctcacggcatctccctgactgctgccagaaggagcaaagccaaggccaaagggaaggaggtgaagaaggagaacctcagcaaggggggcgctgtgagcaagctgatggagagcatggcagccgaggaggactttgaacccaaccaagactcgagcttctctgaggacgagcacctgccacgtggcggggctgcggagcggccgctgaccccggaaagtcctagaagtttggctgagggcagcagtaaggtgagggcagacgtcatgatggaggatggtcgctgtgagtgtccggtgatggctggaacccagagcttcatgccaggcccagaggctgctggtcttgagaccgtgcactcaccagacatataccgcgtggtggtggagggtgagcatgggaaccagccccacatctactgtctggagcagttgctgcaggagattatcgatgtgaggccagctgccactcgcttcttgccacaagggaccaggattgcagcctactggagccagcagtaccgctgtctctacccaggcaccgtggtccgagggttactggacctggaggaggatggggacttgaccaccgtggagtttgacaacggagacacaggcaggatccccctctcacatatctgcctcctgccccctgactataagatccaatgtgctgagccatccccggccctcctggtgccaagtgccaagcgccgcagccagaagaccagcaaagacaccggggagggcaaagacggtggcacggctgggtcggaggagccaggagccaaggcccgtgggcgtgggtggaaacccagcgccaaggccaggggtgacagagctgctaccctggaggaagggaacccaacagacgaagtccccagtacccccttagccctggagccgagcagcaccccaggttccaagaagagccccccagagcctgtggacaagcgagccaaggcccccaaggtgcgccgggcactgccgcagcccagtcccgcaccacccgccttcaccagctgcccagcacccgagccatttgtggagctgccagctcctgccaccaccctggccccagcacccctcatcaccatgcctgccacacgccccaagcccaagaaggcgcgggcagccaaggagtcgggtgccaagggccctcggaggccgggggaggaggccgagctgcttgtcaaactggatcacgagggtgtcatgtcacccaaaagcaagaaggctaaagaggccctgctgctctgggaggatccgggggcggggggctggcaggagcccaagagcctcctgagcctgggcagctatcaccctgcggccggcagcagcgagcccaaggcaccctggcccaaggccaccgaccgggacctcgcccaggaacccgggccggggctcacgttcgaggactctgggaaccccaagagcccggacaaggcccaggctgagcaggacggggccgaagagtccgagagcagcagcagcagcagcagcagcagcagcggctcggagacagaaggggaggaggaaggcgacaagaacggggacgggggctgtggcgccgggggccgactcttcctgcagctcggacgatga

SEQ ID NO: 32632 - DNA, 1237 bp, Homo Sapiens
aaagtcctgtaatcttatgttcatgggcttttacacaatggagttactgttcatcatgggggtaccgtggacaagcccagagctgccggcgagtcatgccatccttacacgtttctccttggaagacgtgaacttatgaattcaacaggtgaagatttacaacttgataaatcagcttcatgagagccacctgagctgaagattcccttgagaacaagtactgtcctgtggtttcatggcctttcttccatttgtggttcttgcgaagtggaatttaaatgacatcttatcaagatggataaaccctagtttcccagtgctggaatatagaaaatggatggacaagtaaatcccactcagcacccatagtccaggcatggggacctcaacacacctgagccccagacatcacctttcattctggacctaccatgaaagacttctgaatccaggaagagagactgactgggaaacatgttattcagagatggggcctcagtatgttgccacggctgaccttgaactcctgcactcaagggattttcctgccctggcctcccaaagtattggtattacaggcatgagccattgtgcccaccgtctctggttcttaaccttctacttccctcttccagttttaaagaatgcttgtaattacatgggctctcctagatactccaggataatcttgttttaaggtcagctgatgagcaacattaattttatctgcactcttaattcccccttcctatgtaattgtgctgtgtaacataggacatgagcaattggtgggggtgggggttattactttggccaccacagtattttatgccaggtactcagctaagcactggtgaattaagcatgaataacacacactccctaatctccatccattcatgggaggagcacctcacctgccatgctcctgagaatctggggagtcaaagaagtcttccatgaggaggtgatgccaaagcggacaagtgacagagtcgaagctagctaggaagagagtagaggtttaaggggaagcgtattataagcagaggatatcacccacttcagagactcccagaggagaaagagtgtgtgttcaaagggcagatgaggctcagttggactccatagcagatgaaatggagaggggcaagcaatgaggctgccttgcaaggcagggcagagcaggggctgttgaagggtttggacttaatccctgaggcaaggagaagtgatg

SEQ ID NO: 32633 - DNA, 1918 bp, Homo Sapiens
gcgggtggggcggccgggcctgcgctggggacggctctggggactgcggccggcgccgggacctggaggggacgctggggccgaagcagcatgtgacaccgaccaggattcagccctgatggaggctgaggaggcccagcatggagcctctcctcccatctctgccatagaggaattcagcattatccctgaggctcccatgaggagcagccaggtctctgccttggggcttgaagctcaagaagatgaggacccatcctataagtggagagaggaacacagactctcagcaactcagcagagtgagttaagggatgtgtgtgactatgcgattgagacgatgccctcttttcccaaggaaggttctgcagatgtggagcccaatcaggaaagccttgtggctgaggcctgtgacactccggaacactgggaggcagtaccccagagcctagcaggccgacaagcaaggactctagctcccccagagctctgggcctgccccattcagagtgagcatctagacatggccccattttccagtgacctgggaagcgaagaagaggaggtggaattttggccaggacttacttctttgacattgggatctggacaggcagaagaagaagaggaaacctcttcagataactctggtcagaccagatattattctccctgcgaagagcatcctgcagagaccaaccagaatgaaggcgctgaaagtgggactatcaggcagggggaagagctgccatctgaggagctgcaggaaagtcaagggctcttgcatccccaggaggtccaagttctggaggagcagggacagcaggaagcaggatttcggggggaaggaactctgagggaggatgtttgtgccgatgggctattaggggaggaacagatgatagagcaggttaatgatgaaaagggagaacagaagcaaaaacaggaacaggtacaagatgtgatgcttgggagacaaggagaaagaatggggctcactggggagccagagggtctgaatgacggtgagtgggagcaggaggatatggagaggaaggctcagggtcagggaggtccagaacagggagaagagaggaagagggagctgcaggtgccagaagagaacagggcggactctcaggacgaaaagagtcaaacctttttgggaaaatcagaggaagtaactggaaagcaagaagatcatggtataaaggagaaaggggtcccagtcagcgggcaggaggcgaaagagccagagagttgggatgggggcaggctgggggcagtgggaagagcgaggagcagggaagaggagaatgagcatcatgggccttcaatgcccgctctgatagcccctgaggactctcctcactgtgacctgtttccaggtgcctcatatctcgtgactcagattcccgggactcagacagagtccagggctgaggaactgtcccccgcagctctgtctcccttgctagagcccatcagatgctctcaccagcccatttctctactgggctcctttttgactgaggagtcacctgacaaggaaaaacttctatcagtactttgatatgtcacagtttcatgtttatccagttcaatgtatttttaaatttttccttgagacttctttgactgatagattattgtgaagtgtgtttttaaatttccaaatgtttagggattttcatatctttcttatgctgatttccaattggattccctacaatgatttctggttttcatctgctctggatgattactatctcttttaaatttgttgtggcgagttttagggcctaggacagctctatcttgccatgtgtttcgtcagcactcaaaaaaaatatgtgtattctgctgttactgtgtggaatattctgtaaatgccaaatagattcttttggttaatggc

SEQ ID NO: 32634 - DNA, 1656 bp, Homo Sapiens
atgaccgagctggcgtcctccgggggcgggtcccctgcgggggacggggaggagggtctgggggacgagcgaggcctggtcatccaccaccctgcagaggagcagccctaccgctgcccgctgtgcggccagaccttctcgcagcagcccagcctggtgcggcaccagaaggcgcacgccggagcgggccgcgcggctgccttcgtgtgtcccgagtgcggcaaggccttcagcgtcaagcacaacctcgaggtgcaccagcgcacgcacaccggggagcggcccttcccctgccccgagtgcggccgctgcttcagcctcaagcagaacctgctcacgcaccagcgcatccacagcggcgagaagccgcaccagtgcgcgcagtgcggccgctgcttccgcgagccgcgcttcctgctcaaccaccagcgcacccacgcgcgcatgcccgcgccgcacccgcgccgccccggcgtcttcggggagcggcggccctacttctgcccccgctgcggcaagagcttcgcgcgcgagggctcgctcaagacccatcagcgcagccacggccacgggcccgagggccaggcggcccacttaggacgcgtgctatgatgcgcccggggcctgctgccgacggctgcttcccgccccgcacgtgcgtccccgacccctggagatggccctgggccgcagctccctctctagatgggatcccgggagaggggcagcgctggcttgggctcttgaaggtgtgggccgccgccaggctccggccgcccgctcgcgttcctccctcgggaccctctggctggctgcgcacagctgcttccggctcctgccatggttctccttctctggcccatccggcctagagcagttgcagagtgggcaggatcttaagacccgataggtgcagaacccatctggacacggagaccaggaatggagttccatggaggcctggctggcactgcacccgggcatgaggacacatccagtaagaagacctgcctcaagaggtgcactgcggtgaccagtggaggtgactggttggagcctggaattggaagcagattccaagctctggtggacaaactctccaggcctggtgggaatcacagctggggcagacctcatcctggctgcctggccacaggcccccactctctgccactggtggtaggacgatgcctgtgtggagagctggcttctctgctcccgcctggtccaccacttggctagagttcagagacaggaagtgattggtctaagctaacacagcaagttggtggcagacctggttctagaggcaaaaccttcttccagatgtgaatgaaacctgcaggcttcattttcctttctgagcagtgcttcttagctctttggagacacgaagcccttggaaaatctgatgaaggttacggaccttccctaggaaaacagataactgacgtagactcaaaaaccccaagcaatttcaggagccactggactccctgaatgaaacccatccctggactccaggctaagaacctcagccctggggacttcacctgctgccctttccttacctgtcacacattgagccccgagtcaaggccactgtacaagtagtgcccctccctccccctggccaagcctccttcccttgttcag

SEQ ID NO: 32635 - DNA, 4816 bp, Homo Sapiens
gggaaggagagagagaggggagggcggcaccgcccctagccccgcgctccggaagtgaagcggccagaccaccagctaatggatgcggagcggagggcccgctgaccgctctccgcgcctggagcagcttggcttggctggagctaagagccagacacaccactgtgtggaggtgggtgatgtcttcctgtgctaaaaggtgaataaataagctcctcacctctcgcggaacactcgggaacacatcaacaggggtccaagccgccctgctgggaggcttctcttcaagagttctgggtcccagagtggaaggcattttcccatcaactggagagagacgaaacatcagagaccaggaggctgtggagaaagcagctgtcccaggtgcctcaactatcagagaagggtcagcgtcacgtggctgccagcatctttgagaaaatcactggcaatcggacttcagagctgcgggcacaggtgtggttagaactgagatacgacctgcccacctgggtcaggcctaaagacaagaagtcctgagttcttgccactgagtaggccagggtcatttgtccagaaaactttgtgactgtctttgagtgacctagtctgggacccattcattggtgggttctaaggttagaagctcatccaggatattttcaatattaagtcagtgcatagctgcaccactaacaaattggtgcctgtagagtcagagtgggtcaattcttaggacaatggcgctggcactgttagaggactggtgcaggataatgagtgtggatgagcagaagtcactgatggttacggggataccggcggactttgaggaggctgagattcaggaggtccttcaggagactttaaagtctctgggcaggtatagactgcttggcaagatattccggaagcaggagaatgccaatgctgtcttactagagcttctggaagatactgatgtctcggccattcccagtgaggtccagggaaaggggggtgtctggaaggtgatctttaagacccctaatcaggacactgagtttcttgaaagattgaacctgtttctagaaaaagaggggcagacggtctcgggtatgtttcgagccctggggcaggagggcgtgtctccagccacagtgccctgcatctcaccagaattactggcccatttgttgggacaggcaatggcacatgcgcctcagcccctgctacccatgagataccggaaactgcgagtattctcagggagtgctgtcccagccccagaggaagagtcctttgaggtctggttggaacaggccacggagatagtcaaagagtggccagtaacagaggcagaaaagaaaaggtggctggcggaaagcctgcggggccctgccctggacctcatgcacatagtgcaggcagacaacccgtccatcagtgtagaagagtgtttggaggcctttaagcaagtgtttgggagcctagagagccgcaggacagcccaggtgaggtatctgaagacctatcaggaggaaggagagaaggtctcagcctatgtgttacggctagaaaccctgctccggagagcggtggagaaacgcgccatccctcggcgtattgcggaccaggtccgcctggagcaggtcatggctggggccactcttaaccagatgctgtggtgccggcttagggagctgaaggatcagggcccgccccccagcttccttgagctaatgaaggtaatacgggaagaagaggaggaagaggcctcctttgagaatgagagtatcgaagagccagaggaacgagatggctatggccgctggaatcatgagggagacgactgaaaaccacctgggggcaggacccacagccagtgggctaagacctttaaaaaatttttttctttaatgtatgggactgaaatcaaaccatgaaagccaattattgaccttccttccttccttccttccctcccttcctccttctctccttctctcctcctctctcctctcctctcctctctttccttccttccttccttttttctttttctctttcttctttatttcttgggtctcactctcatcacccaggctagagtgcagtggcacaaaaatctcggctcactgcagccttgacttcccaggctcaggctcaggtgatcctcacaccttagcctcccaagtacctgggactacaggcacgcaccaccatgcctagctattcttttgtatttttggtagagacagggttttgctgtgttgctcaggctggtctggaacccctaggctcaaatgatgtgcccaactcggcctcccaaagtgctgggattacaggcatgaaccgccatgcctggcccttgatttttctttttaagaaaaaaatatctaggagtttcttagaccctatgtagattattaatgaacaaaagattaaactccaaatattaaatagtaagcctgaaggaatctgaaacacttgtacttccaattttctttaaataatcccaaatagaccagaattggcccataccatagaagaaagaattggcagtcaaaaaaaaaaataccttttgtaatgtttgaaaaataaagctgtttgacttgtcaggtgttttcctttctcaaatcagcaaattctctctgagtgcctggctttgtgagacactgtacaaggagttacaagactacagctataacctgcagttgagcagttataaacctacaaaatgggccctgccctcagagaggttccagtctagatgaggagctgatctagacaggtaaaaggctaactaaccctttgtgtaaataagttcatcaccccagtaaaagtgtcatcacccagtgaataggaccacctctgcctgcagatttttgttgttgttgttgtcattgttgttgttgttttaacctgggaagtgttcttcctgcctttctgctaggtgtcagatagatggtcccagagctaggtgctgtgtcaggccctgaagacacagatgactcaacctaagctttactttccagaggtccacagcctgagaggtgtccccaaagaaagggggacatgaggggactgcatgcttgagagcagggttgtttagggcaggtttggatttagtgagcaggctggtttgcttagagaaggcttttagtggcaacaaaggatgaagaggagagaaaaggaactcacatttattgagggcctactgtgtgcaaagtgtttcatgtatatctcattgaatgtatacagccaccctgttgtggtataattttgctctttataaagagaaagaccgaagctcagatgagttaagtggtctcctcaacaccaaaatgccaagaagtgatggagcctagacagaagcccagaactttctgactcacactagtccatcctctaccatcacgatgactttcaaattgtgctctgcagttctgcagattttctagcagtgccatctccaaaatgtgttttaaactctttatttttttaattattattagtattattttgagactgagtcttgctctatcacccaggctggagtgcagtggtgcaatctcagctcactgcaacctccgcctcccaggttcaagcgatttcgtgcctcagcctcccgagtagctgggattacaggcacccaccaccacgcccagctaatttttgtatttttagtagaaatggggtttcaccatgttggccaggctggtctcgaactcctgacctcaagtgatccactcacctcggcctcccaaagtgctgggattacaggtgtgagccaccatgcctgggctaaactctttaagtctctagtaaatgcagctagattcaaatgggctgataaccaaattttaacacatcagcattcaccaccaggtttacttttattttcagattggctcattttgtgcagaccttagagcaaagtttcctttatggtatctgtgtacgtatccaaacttcttttaattgttcacagattttaaaagcggtagcaccacatggttgtgtagatcagacctgtgtatttagatcagacctgtgtatcacgtaagtgtgtgagtgcagtgcagatgagcaccatttagttatatgtgctaggcaaatctccaacacagttgatgtgtagtcttgtggtagatttgtgcatactgtaagcaaattgcttagcttctctagacatcagtttccacatctgaaaaataagaagatgagagtacacggttgttatgaacaaatgacttaatgctttttaagcacgttgcatgacatctggaacacagaaagccctcaatacattgaagctcttaggattttcacgatgttcctgtctgctcaatgcatgctttctttattgttctgacagttgtgtggtaacaagctaatatgcttccagttgacttccagtctaccctggtgttagaaaccgtttcatctcttattgtaaatttgagtgcttgttgttttttatatttgtgatgactcttccagcagttgttgacaattgttagaggtttgacttttaaataattacttattttttctgattgtggttcagtttaactgaagaatatcctgagattgtaagaaaagcattttttaaaaggtatcacttgtgatcatttatctttctaaattctatttttaatactgttccaccaaagtgatgcagtggttaccatgacaccctaatttcatgtgtttttgtatttatgaaaatagtttcattgtcatttattggcggtatacaaagtaaaatgttataaatgtgaagttataaaataaatatatgctaataaaatcctgagtttttctgtttcct

SEQ ID NO: 32636 - DNA, 4131 bp, Homo Sapiens
ggtgcgcgccgcggcttgggggagagttgagcgcttttcccccctcttttttttttttttcctcttcttcttaaacaaaccacaaacggatgtgagggaaggaaggtgtttcttttactcctgagcccagacacctcactctgttccgtctaagcttgttttgctgaacacttttttttaaaaaaggaaaaagaaaaggagttgcttgatgtgagagtgaaatggacgtaagattttatccacctccagcccagcccgccgctgcgcccgacgctccctgtctgggaccttctccctgcctggacccctactattgcaacaagtttgacggtgagaacatgtatatgagcatgacagagccgagccaggactatgtgccagccagccagtcctaccctggtccaagcctggaaagtgaagacttcaacattccaccaattactcctccttccctcccagaccactcgctggtgcacctgaatgaagttgagtctggttaccattctctgtgtcaccccatgaaccataatggcctgctaccatttcatccacaaaacatggacctccctgaaatcacagtctccaatatgctgggccaggatggaacactgctttctaattccatttctgtgatgccagatatacgaaacccagaaggaactcagtacagttcccatcctcagatggcagccatgagaccaaggggccagcctgcagacatcaggcagcagccaggaatgatgccacatggccagctgactaccattaaccagtcacagctaagtgctcaacttggtttgaatatgggaggaagcaatgttccccacaactcaccatctccacctggaagcaagtctgcaactccttcaccatccagttcagtgcatgaagatgaaggcgatgatacctctaagatcaatggtggagagaagcggcctgcctctgatatggggaaaaaaccaaaaactcccaaaaagaagaagaagaaggatcccaatgagccccagaagcctgtgtctgcctatgcgttattctttcgtgatactcaggccgccatcaagggccaaaatccaaacgctacctttggcgaagtctctaaaattgtggcttcaatgtgggacggtttaggagaagagcaaaaacaggtctataaaaagaaaaccgaggctgcgaagaaggagtacctgaagcaactcgcagcatacagagccagccttgtatccaagagctacagtgaacctgttgacgtgaagacatctcaacctcctcagctgatcaattcgaagccgtcggtgttccatgggcccagccaggcccactcggccctgtacctaagttcccactatcaccaacaaccgggaatgaatcctcacctaactgccatgcatcctagtctccccaggaacatagcccccaagccgaataaccaaatgccagtgactgtctctatagcaaacatggctgtgtcccctcctcctcccctccagatcagcccgcctcttcaccagcatctcaacatgcagcagcaccagccgctcaccatgcagcagccccttgggaaccagctccccatgcaggtccagtctgccttacactcacccaccatgcagcaaggatttactcttcaacccgactatcagactattatcaatcctacatctacagctgcacaagttgtcacccaggcaatggagtatgtgcgttcggggtgcagaaatcctcccccacaaccggtggactggaataacgactactgcagtagtgggggcatgcagagggacaaagcactgtaccttacttgagaatctgaacacctcttctttccactgaggaattcagggaagtgttttcaccatggattgctttgtacagtcaaggcagttctccattttattagaaaatacaagttgctaagcacttaggaccatttgagcttgtgggtcacccactctggaagaaatagtcatgcttctttattatttttttaatcctttatggacattgtttttcttcttccctgaaggaaatttggaccattcagattttatgttggttttttgctgtgaagtgctgcgctctagtaactgccttagcaactgtagatgtctcggataaaagtcctggattttccattggttttcataatgggtgtttatatgaaactactaaagactttttaaatggcttgatgtagcagtcatagcaagtttgtaaatagcatctatgttacactctcctagagtataaaatgtgaatgtttttgtagctaaattgtaattgaaactggctcattccagtttattgatttcacaataggggttaaattggcaaacattcatatttttacttcatttttaaaacaactgactgatagttctatattttcaaaatatttgaaaataaaaagtattcccaagtgattttaatttaaaaacaaattggctttgtctcattgatcagacaaaaagaaactagtattaagggaagcgcaaacacatttattttgtactgcagaaaaattgcttttttgtatcactttttgtgtaatggttagtaaatgtcatttaagtccttttatgtataaaactgccaaatgcttacctggtattttattagatgcagaaacagattggaaacagctaaattacaacttttacatatggctctgtcttattgtttcttcatactgtgtctgtatttaatctttttttatggaacctgttgcgcctatttatgaaataataaatataggtgtttgtaagtaaatttgttagtatttgaaagaggtttctttgatgttttaacttttgctggcaaaaaaaaattcacgcttggtgtgaatactttattatttagtttttacagtaacatgaataaagccaaacctgcttttcatttagcagcaaattaaagtaaccagtccttatttctgcatttctttggttgatgcaaacaaaaaactattatatttaagaactttatttcttcatacgacataacagaattgccctccaagtcacacaagctccaagactaaacaaacagacaggtcctctgtcttaaaaaggttacttcttggttctcagctggttctagtcaattctgaaccaccaccccccgccccccgcaaaaaagtaaaagtcaaaccaaacttcctcaagctgcatgcttttcacaaaatccagaaagcatttaagaattgaactaggggctggaagaagtgaaagggaagcatctaaaaatgaaaggtgagtaaccagatagcaaaagaaaagggaaagccatccaaatttgaaagctgttgatagaaattgagattcttgctgtcttttgtgcctctacaagctactactcattccagaattcctgggtcttccaagaggattcttaaggtaccagagatttgctagggaaccaaaagtgcttgagaatctgcctgagggcttgcatagctttcacattaaaaaaagaaaaagctagcagatttactcctttttaggggatcatatcaagaaagttagtctggttggaaaccaagagaatggctgatgtctctttcttggaatatgtgaaataaatttagcagtttaactaaatacaaatatatgcattgtgtaatccactcagaattaaacagacaaaaggtatgcttgctttggaatgattttaggcattgtacaaccttgaatcacttgagcatgtaataactaataaataatgcagatccatgtgattattaaaatgactgtagctgagagctctaattttcctgtcttgaaactgtataagaactcatgtgattaagttcacagtttattgtttgtctgtttagtattttagaaatataccagcactactaattaactaatgtcttttatttattatattatgataaagtaaaaatttcacttgcattaagtctaaactgagaaggtaattactgggaggagaatgagcagctttgactttgacaggcggtttgtgcaggaaagcacagtgccgtgttgtttacagcttttctagagcagctgtgcgaccagggtagagagtgttgaaattcaataccaaatacagtaaaaacaaatgtaaataaaagaaaacacatcatcaataaaactgttattatgcgtg

SEQ ID NO: 32637 - DNA, 2770 bp, Homo Sapiens
agggtgcgtcaccggagcagatgcccggggcggttggaggctcccgggctcccgctgactcatcagaaaggcctgccgcgcggcccggggggcgggggaacgtgggggaccgcggggagctgccgggcaggcggcagccgaggtcgtttgaggcgcgcagagccggaaaaccccacggagacggctgggcgggggcggggcgatcggcactgaccaggtcacctgcagcgcgggctgacggcgggcgactgaaggagggagcaagtctcccacccccagcagccggcggccgcttccgaagtctgcccccttccactgcggagcggcgccccgcgggcccccagccagcgcgcccgaggcgcccccgccccgtgtcgctcgcgctgcgttattgggagaaggcggttcctgagcaccagcacgggcctcggtgacaccggaggtcgctggggtcttccccttccccttaagactctgggtctgtctgtgggaagagctttcattccccaccccactctatgccgaccctctccgggggaggctccactggcactgtagacaccacgtgctgggtaaaaaggcctggtcccagcgcttccctgtcactgactgctaaccacaaggcgccgtggcactcaggaaatgcggcaggggggctggagaactatcaggaaggggtgtgggcagagaagaggcttccaccctgtcttggaacacggacacagtccatggcattcaaaagaggtgggaggctcctctgtgcacgtgccttccgcccccgggacaggtggaggaggggatttgactggtcctcaccctctgcatttatagtctgggcacaccttgggcagtgccgcaggagggcgctgtggagtacaggcacatgcagaaggtgtggcgagggcttcctggtggagctggcagtagggcagggaccttgaaaaggaatgatttgaacagatcggaaaagacattccagacagaaacaaatgcctgaaacccaaaccgagaagcaggaaagagcagactgcgttctcggaatggcagggagtccagtttgactggaagacctgaggctcagaggcgcatcacggcccagatgcagaccacagaggcaggcacagtggcccaggaggaccgaggacctggagtcacggggttccgcccgctgcccctggggaaccgagtcatgccagttcccagacagatgaattccttccaagaattccacagtcctgctcaatcctagccgccaagcctcctggccttggatggctgctgtctaatgcagatcctctttcatccagatttcaaatatttttcctattctgtcctttgatcactaacgtttatgtttatctacatcagcatccctcaatcctgacggcactctgaaattatctaggggtgctttaaaaaagaaaaatgttgatgcatggccctcctccaggaaatctgattttattggtctggggtggggcccaggcatcagcagacttttaatgagcagttagagaggagaaccactgatggagatggtcaccagggagtgtccaggtcagaccgccacagaagagtgcagcctcctggccttcagacccaactgggacaaaccctgagaacagccttggcagacctccaggggcagctggactccctgaggctggatgttgcagcctctcccaggcatccactctgcagctgaggccaaagtttccaacgggaagggagggagagtctccgagtctgggccttgccactcctcactcagcatctgaccatccccacctcctggatctacagggttcatagaggaggacccagaagagggaaagtcaggctgaggaacttggcctccctgctgcaagggaaatgacatcggttaccaaggaggtgaccagctatccttttccaagactgaaaagcagaaatacggccctgaggctagagggtctaagagaacaataggaagaatttcctgacaaaggacaatgttgcctaaaggactcaggaagctctgtgaaaacaggagactcccgagcagagcaccagacccttctccaccaggcagtgtttttcccatatgacaggtgagaaaactgaggctgagagacatgtaataacttgctgaagcagcaaccagcacaccatatagctgaaatctgtagatcagcagttaaaagtggtagggcaagtcctctctgactttcagcgctaagagcctaggattctgtgtttttctgcttaagcctgggaatcagagtcctacaaaagccgcgcctaatcctgggggtgtgggctttaaacccagagagaaagcatgttattggaatactcctgcacttttctccctttgaatcccaccacggaaagaaaattctgtgacgtgtacccagtatttattggagggtatttcctagcaagaaaatgagggcgattgaccaggcacggtggctcacgcctgtaatcccagcactttgggaggtcaaggtgagtggatcacatgaggtcaggagttcgagaccagcctgaccaacatggagaaaccccgtctctactaaaaatacaaaattagccgggcgtggggtggcgcatgcctgtaattccagctactcctgaggctgtggcagcagaatcgcttgaacccgggagacagaggttgcagtgagttgagatcaagccatcgcactccagcctgggcaacagagtgagactctgtcaaaaaagaaagtgtggtacatctatactaatggagtactatttagccgtc

SEQ ID NO: 32638 - DNA, 2263 bp, Homo Sapiens
atgaggcaaagaggaaactatggcctaaatggagtgccgaatagagagttggactttttgagtcacggaagctggctggaggggaagaatgctgagaaaggggaaagcctaaagatgttgggtaaaagattattgatgaagtggagacctggggaagatgggggcttgatgaatattttctgtcatggacaccttctttatgtggtttgttttctgagttctatttgttgctttttcctagctctccactgtggtttgaatccacggggtattgatcaccctgcccatgctgaaggtattaaactgcaaattgaaggtgaaggtgtggaatctcaatccattaaaaataaaaatttccagaaggtgcctgaccagaaaggaactcccaagcgactgcaggcagaagctgagacggctaagtcagctacggtgaagctatctaaaccggtggctctatggacccagcaggatgtctgcaagtggttgaagaaacattgtccgaatcagtatcagatctacagtgagtcattcaaacagcatgacataactgggcgagccctgctgagacttactgacaaaaagctcgagcgaatggggattgcccaggagaacctccggcagcacatcttacaacaggtgctccagctgaaggtgcgagaagaagtcagaaatctacagttactcacacaaggtaccctattgcttcctgatgggtggatggatggggagattagaagaaagaccaccttactattaggacagacaggagtcagggagaatttgttattgtttcttcacagaatttccatcatagaaaatagtatacagatttaagattacttccctttgaaaacttttttcatagctcactagggagaaggatgcacaaataagtaatggatgagcaaacagaattacctgagctaacttcaaggtggtcacgtacagttgtatggattgtgtactgcacaaccccagagaataccagtcacatcaatcagggtacgattgcactcactagagttgtataatgtgcagcctgcacaactgtacagtccagctgtagctatcttcacctgcgccaattgtgagggcgctttagcatttgagtgattcaatagttacgatgaccagtgatataagtggagtttttgttgtatttttgttttgcttttcaccggttagtgggagaaaaacattttagatatgtattactatacatgaatgtattatacacacacactttagagattgtaagaaccccatttagcttcttgaaagtggaataatttttataatagactatagtgaatctaaaactacactgttaagagtatataattcttaacaggaattataaataacttcaatatgatgagagcacttaagatctcaataactgtggaagtgacaaaataaagctagaattcgaagaaagccttaagttacactatatgtaactgatatgtctacatgagatttggatgctatcaaccttcattggctataaactttatttgttttattttagcgtccattgtacatcgttttaaatgaaaggatgataaaatatgtgtttttgagagccttgagtatttgtcattctgcagaatattgtaattgcatgcataccgatattggagaaatctgggtcagccaagtttcatgttattgcatttagattaacctagtaatagtccatttgcctagaggaaataatgtgctccctgaaagatgactattctagaaggataaatatagatttcaagtgatcgtaaaatagtattgtttgtctcatatgcattatttgcattttgtcctcagagatttccaatggtgaatttactggtatactaagtgatttaaatttgaatgtgaaatactgataggcttttaagcttcttttaagaagtagatagaaatacgaagattatgataagaaagtctgtcacagtgctatttggaaaacggaaaatttacaagcaacctagaggtccagcaatgtgaaaagaatcaagtaattctgcttaaattcataagattcagtataatgcccagttattaaaattacatctttaaagaatacatgacaacatgggaaattacgtaagtcatacaaggtgggaggaaaggtcatgtgtaaaattgtatgcataatataagcccaattttgtaaaaaccatatattcttatatgtacagaaaaaaaggactgcaagtaaatatgccaaccattttaataaaggatctctctggattgtggg

SEQ ID NO: 32639 - DNA, 5870 bp, Homo Sapiens
gcaccacagaccagtctgtcctggtgttggatgttaaaagtggagccacaaagaagccatcttatgtgggacaggcttgggtgtgagaccagagctgtgggtagcagcatgttgggtcaggatgaggggcagaggaaacactttccacctcttggatatggattttatcctgccctgattcaggagatccccatctgttaagtaaggggaaagatgattttgttgtcttttgtttcagattctaatgtaggaactggtgagaagaaggtgactgaagcctggatttctgaggatgaaaactcacataggacgacgtcagacagactcacggtgatggagctcccctctcccgagtctgaggaagtccacgagcccagattaggggagctcttgggaaatccagaaggtcagagcctggggagttccccctctcaggacaggggctgcaagcaggtgacagtgacccattggaagatccagacaggagagacagctcaagtgtgcaccaagtcaggaagaaaccatattctgaattcagaccttcttctgcttcagagagagctcatagagggggaagccaatccttgcaatatctgtggcaaaaccttcacgtttaattcggacctagttaggcatcggatttcgcatgctggggagaaaccttacacgtgcgatcagtgtgggaaaggctttggccagagctcacaccttatggagcatcagagaattcacactggagagagactctacgtctgtaatgtgtgtgggaaagacttcattcactattcaggtctcattgagcatcagcgcgttcattcaggagaaaagcccttcaaatgtgcgcagtgtgggaaggcgttttgtcacagttcagacctgattaggcaccagagagttcacaccagagagagaccttttgaatgcaaagagtgtgggaaaggcttcagtcagagctccttacttattcgccatcagaggattcacacgggagaaaggccctatgagtgcaatgaatgtgggaaatccttcataaggagctcgagcctcattcgccattatcagatccacacagaagtgaaacagtatgaatgcaaagaatgtgggaaggcattccgtcatcgctcagaccttattgaacaccagagaattcacaccggagagagaccctttgaatgcaatgagtgtgggaaagcctttattcggagttcaaagctcattcagcatcagaggatccatactggggagaggccttacgtatgcaatgagtgtgggaagcgcttcagccagacgtcaaacttcacccagcatcagagaattcacactggagagaaactctatgaatgtaacgagtgtgggaaagctttctttctgagttcataccttattcgacaccagaaaatccacactggagagagagtgtatgaatgtaaggaatgtgggaaagcgtttctccagaaagcccatctcactgagcaccagaagatccactctggggacaggcccttcgaatgtaaagactgtgggaaagccttcatccagagctccaagctgcttctgcaccagattattcacactggagaaaagccctatgtgtgcagttattgtgggaaaggctttattcagaggtcaaacttccttcaacaccagaaaattcatactgaagagaagctctatgaatgtagtcagtatgggagagattttaactcaactacaaacgttaaaaataatcaaagggttcaccaagagggactctccttgagtaaggcccccatacatttgggtgagaggtctgtagataagggggaacacacaggtaacttataaaataattactttcccgcccagtgagtgatgtttggaaatgcgtggaattaggattcatgtggtttctaagatttggacatgtcagaattttgtgagtcatggatggggctgcttttgcagtgggtgccacctgccactgtgcagccctactcggctcagcccttctcctcagctgtgagcactgtcctcaggagagtcacagggcttgacacctgactctgagctggaacagtaggggcagggagaagacaggtctcaagaaaaggtttttaagaagtttcatccccagttaagcagagtccatccttgacttaaatcccttattacagcacaactgtgtatctaatcttacgatttaggagaatgttacctaggacattttgatgtgttaagttgaagaaaggtaactcgtgtatgaaccccgagccatttccctgttgtcctgaggaggaactccaggcctcccatcgtgtgccctaaggcctcctgcgtcctggagccctgcctcccactgcctgacttcctgccacacggttaatgctgcagcaacaccgactgcttcatcttccctgtgctccacgtggcttcctacctctctcgcctttgttcttgttgaagggtctcttctcagctaattaactctgaatcatggttcaagacaagcctcaggcatcatgtcaatgggtgtttccctcaagcttagttggcagcactctccacacttctgtggctcagtgattactgctattactatatttacttgcatatgtcagaatgatgtgatagactatctctgtcactatgctgttgggttcctgaggacagtgatcatatctgattgatttccatgtgtccactgtctagcacagggcaataaaaaatacacccctaaatctatgtgtaattggcatctctcttgctttgtcctttctatactgccattctaaaaattttcagctgttggctgttttttttgttgtttgttcattttgtatcagtataatctacgattctgttagaagtatcttctcagccctgctactgtctgctgctcctacttagaagttgcaggcaatatcctgtgcacatccacgccctcctgtgtgccaccttacagctcatgcagaactgtctacttgatctggagggcattgacacctggctcagctggaacagtggggacaggaggaggcaggtctcaagagaaggtctttacttacttgtctgtatctttctgtctcactcgaaaggcacagtctcaatgcgctacgtaactcttctgttgtagcagttctgaggttgaactgagctcttgtcattttccatgctctctggctcattgtgtcatttcaaaatgtattgatatctataaggaatagtcctcaatgttgggaaaacagatgagcaacccactaccctgaagtcatccaccgtgtagtggggaagacggagatcacagtagggtgagttaagtatgtgccctcaggtgtgaaggagcacaggtgagggggtgcctgctgtggcacagagctgggaaggccttacagaagaggtgacatttcagctgggccagagatcagtagagagcagctgaagaagaaaatagggtccaggagaggaatctgcagaaacatggagccatgacagatggctttttggctaggactgttcgaaagcaggcgaggtaaatggacagtggacagccgcctcgccaaactgttagtctttacctctgaatttcatctggacatgaaccccaaagtccagttttgtaacgatataatttttttctcatgaggccatattttgagttcttaaatactaccaaccctgaacgtctcaggacaaataattcaaaaaagagatctacattttctggaaaatcagcattactagagatgtttcaaatgtagattttaccagaccattttaatcaactttattgagattcaattttcatatagtaaaacgcctatttaagtgtacaaggttttgaaaaatctatacacctgtgtaaccaccaccacctgtgtaaccaccaccgccagaaccaaaaacgtttctgtcacccaaagaagttcccttttgccttttcctagttaagcccactccagccccagataaccactttctatcctcatagattagtgttgcttggtttagagcctcatacaaatggattcatttactatgtgttcttttgcgtctgatgtctcactttggcatgtttttagactcatccaagctgttttgtgtttcagtagttctccttgctgaatagtattccattgtgtggataagccatcatttgtttattcatccatgtgttaatgggtttccagtctcggctcttaaaactatgagcatttgtgtaaaagtatgtatttgcacatgtgtttttatttctcttgggtaagtacctaggactttaattgctgtgttgtaagtgtcttagttcattcaggctgccataacaaaataccatcaactgggaggcttataaacaacagaaatttatgttttacagttctggaggctgggaagtccaagatgagggtgtcaacatttggtgtctagtgagggcctgcttccttttaagtagatgtctttttactgtgactgcacgtggtggaaagggactagcaagcttaccccattcatgagggctctccccttgtgattctgtcccctccccaagaccccacctcatatcatcttatgggttaggaatttgacatgaattgtgcaaggatgtaaacattcagtccattgcaatacgtgtttctaacttcctaagaaattgtcacacagccctctgtagtggttgaatcattttacactattactacattatgggaagattccagttgctccatatctttgctaacacttggcattgtcagtctcttaaaatttaatccactctagcctccttatgattttaatttgtatttgcccactgaataatgtatgtctatgatttcatctgcttattgcttttccgtgtcgtcttttgtgatgtgtctgttcgtgccttttgcctgtttttaagttgggatgcttattgttgactcaagttctttccatattctgcatgaaaaacatacatgtaatatatagaattctttgtctccatttgtgacaaatattgtgaatattttcatgtttggtttgcctgttcattttcttaatggtgtcttttgaatattttttattaaccaccactcctggccaactgtagttgaactcaggtattggaagggcttccgttttgttcttttcccatttttttttttttgacttctagatcctttgcattttcgtataaaatttgaagtcaacttctatcaacttcaggccaggcccgtggctcatgcctgtataatcccagcactttgggaggccgaggcaggcggatcacttgaggtcaggagttcaaaaccagcctggccaagatggtgaaaccccatctctactaaaaatacaaaaaaattagccaggcgtggtggcaggcgcctgtagaatcccagctactcgggaggctgaggcaggagaattgcttgaacctgggaggtggaggtttcagtgagctgagatcgtggcattgcactctagcctgggcaaccaagagtgaaactgtctcaaaaaacaacttttatcaatgtctgcaaaaagaaagtcttctgggatttatagatcaatttagggagaaatgacattttaacaattctgagttttccaattgttgaacatggtgtactgccccatttatttagatctgttaatttctctcagtttgcagctctcacattttgttaaattcatgtatttaatatttctgcatgctattgcaagtggtaaggttttcaaaaagctgttttctagttattgctagtatatagaaatgcattagacttgtacattgatcttgtatcaagcaacttagatcagttaacttattctagtagcttttttctagattctttagcattttctatgtagataatcatgtcatctgtgaataaagtattttacttttccaattt

SEQ ID NO: 32640 - DNA, 3983 bp, Homo Sapiens
atgaggtgccccccgggggcttcccttgctgctgcccgccaggatctccctgcttgggactacagcatgcgggggaggaggcatctgagctgcaaaaggggcgaatgcgatgtagacacttgggccccgggactcgcctgtgtcatctgggctgggccccacaaacaccacaaacaccttttccaccacgcaatagatggctgctgggctgcccaggggtgtgatgtggagctgggaaacccagcctgggaaggcagcattccaggagctgctttccaaaagaagaatagcctccaccaggaaggtgtggctgagccccagagccccagaaacctgcgggaagctccaaaggggggcctgccagaggatacacaaccaccctacctcctgcacacgggatcctccaaccagacagtgtggcccaagcagcctggctactttcaccttagccagcagccctgggccacactggggatggtcccaaacatggcctgtgctgctgtcacggtgctaaggggcctggcaagcacggggtctttcttgctggacggaggcacaggtgccagaatctatcttttgccctacagtgtcccggcacagcctagatctatggaccccttcaccgggtgctttatcccccaccccccagaactcctgggaccattgagatgcccaggagatgggggggccctgtgcctgtgtcccgttgctgctatagcagccaccacatctaccagctctgcagggtagccaccgggcacggccttgccaggctgacgtcgaggaaagccagccgtgctgtgggtttccttccctctggctctccacttctgcctccctcttccactgtttttggtttgggtttttgttttgttccgttttgtttttttttgagacagggtcagctgtcttgcccaggctggagttcaggggctattcccaggtgtaaccctagctcactgcaacctccaactgctgggcttaagtgatcctcctgcctcagcctgagtagctgggactacaggtgtgtgctcccacgtctggcaagcctctttcagtataactgtatgggtttttctccatctttttttcgtctttacaatttttgttctcaaggacttgggctgtttgacttgagtcttccagtctggattttgctgataagatggaacacctcgagagtgcatctttgttaacatttagacatgcgtcccctcctcgcttgctcagtggaattacgattgcacttggaaatgtatcgtgttgggtgtgttccttaagctgaacttccgtagatctggcaggacatttaacaccagaacacgaagcctgcttcagaagtgactgaaacggcatctgcctcacagtgcatatttaaaaaatgattttgttgtgtgaataattatgctgccatctacagataagtgagatcagaaacattagtttcatatattgtagtttttagtttctgaatacttattggattctttttcttttttttttgagatggagtttcgctctgttgccaggctggagtgcactggggcttggctcactgctacctccgcctcccaggttcaggcaattctcctgcctcagcctcctgagtagctgggactacaggcacccaccaccacacccagctagtttttgtgtttttagtagagacagggtttcaccatgttggccaggatggtctcgatctcttgaccttgtgatccgcccgtctcagcctcccaaagtgctgggattacaggcgtgagccaccaggcctggctccttttccactttcatggaccctcgtgattgcattggatctccccgggtaatctgggatgttcttcctggcctaaggtcagctgattagcaaccttagttcatctgcagtctccattctctttttgctgaatcacgtcaagtattcacaagttccagggggcaggaggtggacatctttgggggacattattccgcccaccagaaaacccaggagcagccacagccccaagacgaggcagggaaggagtgctgctgtctgccggtgaagatgaactgcttctgaccctcccgagcgaggatattgagaagaaagaatttgccaagatgctagtcacacaccaagtacagaggctatgttggtcggctgcagcaaaaagaccactcgcggcgtggcagctctcactggccctgctgcctcttcaagttgactgcagtccatcacccacggtcattattaatttgtttttgcaaaggccaggcaggtgaatctaatggagatggaaaccaccacacctgcttccctggtctctgatgttggtgttaacctctgcaattcctcaagcaaagcactccttctatcaggctcactgtcttgctggagggaggaagttccacaggctctcacttggttctttctgccgtaacaacccttactcctccggccaaggagccaatgtgagcattcagctggcagctaagaatgtgtatcccaataaacagggcagacctacagacccactggacccactagagatggacttgggccacagtgccttccatgacttcagtaaacagaggggtgtggtgatcttgtcaaagtcctggcgtcaatgtcagtgtccggctacacaccatgttcccgtcctcgaaaagcctctctgtacccctctatgttggtgacacaaccctggcaaatggccacagactcctttggggacagagtaggagcgtaactggtgggagtggttggcatgctttgtattgggagagccgcacgccctagggcttccagcctcctcttcagtttggcagctgtgagtctgaatttcactcaaatctggaaactgggtgagagactgtggcagctgctgtccggctggcagagcctgacgtgtctctgatcatactcactgggtcagcaacaccctactgaccttgtccagaatcccacatcccagttgatatcagggcaatcagtttcctggctgttttccccaatatcaacccgggcttacagaagacagtcaccacagagctcctgccaggagttcactcattcgtgcatttcttccttttttttttctttttgagatggagtctcgctctgtcgcccaggctggagtgcagtggagcgatctcggctcattgcaacctccgcctcctgggttcaagcgattctcttgcctcagcctcccaggtagctgggatagcaggtgtgtgccaccatgcccagctaatttttgtatttttagtagagatggggtttcatcatgttgcccaggctggtctcaaattcctgacctcaggtgatctgccctcagcctcccaaagtgctgggattacaggcttcagccaccacacccagcctcattcatacatttcttattgttgttgtttgagacagggtctttctctgtcacccaggatggagtgcagtgttgtgatcatgcctcagtgcagcgatcatggctcagtgcagcctcaaactcttgggctcaagcagtgctccaacctcagcctcctgagtagctaggactataggcacacagcaccatgccccggctatttttttattttgtagagatggggtctcactatgttgcccaggctagtattgaactcctggcctcaagcaatcctcccacctcggcctcccaaagtgctgggattaaaggcgtgagccaccgtaccttgcccttggtggaatctttagggttttctattcatacatataaaatcatatcattggcaaacagagataattttacttcctcctttccaatttggatgccttagatttcttttccttgcctaactgctctgtctagaactcccagcactatgctgaatagagtggcaagagcaggcatttgccttgttcctaaccttagagaaaaatccttcagccttttaccattgaggatgatgtttgctgttagtttttcataaatgatctatatcaggctgaataaatttctatttct

SEQ ID NO: 32641 - DNA, 1944 bp, Homo Sapiens
aaaaagcgtgcgcctcggcctgctaggggtaccccaaggcagacagaaggcccatgagggaaaggtgcagcagtccatctggtgcttgagtgtcaacctaaggcctgatgtctatgttggacctagggttcacctgaggcctgatatccacctggggcctcaatgtccaaacggggcctgatgcccatctgggccctgggtgtccacctgcagcatggatgtccactggtactttatatccaccaggggcctaatgtccacctaagacctggtgttcacctggggtctgatgttcagctgaagaccggatgtccacctggagccgaggaatccactcagggactggtgttgaactggggcctgatgaccacccggggacaaggtacacaccaggcttgttgtccacctgtcaccagatgtccacctgagtcctgatgtccatcttgatcctgtttgtccacattaggcctggtgtccagctggggcctaggtacccactgggggcttcctgttaacctggggactggtgtcattctggggcctaatgaccacctgggttgtattattcacctggggcctggtgtccacttggggcttgagtgtaaccttggacctggcacccacataggattgggtatcaaactggccccttggtgtccagttaagacatcatgtgaacctggcgcctgagtgtccacttggggccaaatgactactgggggcctgaatgtcaacctagaatctgaggtttactaggggcctaggtatccacctggggcctattgtccacctgagcctgggtgtcaacctggggcctgatgtaaacctctagttcagtgtccaccttgggcttgatgtcaacctggagcctgatgtccacctgagtactgatgttcacctttgacctgatgtccacctgtggactgtttatccacccatggcctgatgttcacctggggctgaatgtccaactgtgacttgttgtgcacctggaacctaggcatccacctgcagcctgatgttcagctgggctgggacccggagttcacctgaggcatgatgtccacctgaagcttgatgttcacctgggggctgggtgtccacttggggcccaatatccacctggactaggtacccacctgggatctggtattcactcaagattggtgttcagctgtggcctaatgaccacctgggtcacggtgtctaccttggactgggtgctcacctggagccagtgttcactgggggcctagtgtgcacctgagactggggtatgcacctggggcctggtgtctacctggtgcctaggtatccacttggggcctaatgttcatcgggaatctgatatccacctggggccttgtaattacctgggttctgggcatccacctagggcttgagtatcctcctggggccttgagttttactagggactcgtgtctgccttggacctgagtgtatatctgttgcctaatgtacaccttgagagtgatgtcaacctggggacagatgtcctcttggggtctgagtgtgcacctggtgcctgacgtctgcctagggacttgtgttcacctgacacctgatatccacctggggcctgggtgtccacgaggggctgatgttcagctggagactggatatccacctggggcttggggatccatccagaaactgatgtcaaactggggcctgatgtctacctgcggactaggtatccatgtgaggcttgatgttcatccatggccagacgtccatctgatgcttgatgtccaccttactcctgggtgtctactggagacctcatgtccaactagagcttaggaacctactgggggcctcgtgtaaacctggggactggtatgaagctgggtcctaatgatcccctgggtcatattattcacctagggcctcatgtccacttggggcttcagtgtcaacctt

SEQ ID NO: 32642 - DNA, 2128 bp, Homo Sapiens
gccctgccccacttctggcagcttaggtctcacttaatggctgagggctccaggactcaggcccctgggaaagggcccccactcagcatccagttcctgcgagcccagtatgaaggcttgaagaggcagcagaggacccaggcccacctcctggtgcttccaaaaggaggaaacacacctgctcctgcagaatcgatggtcaatgctgtttggattaacaaggagagaagaagctcactgtccctggaagaggcagattctgaggtggaggggaggctggaggaggctgcccagggctgccttcaggcccccaagtctccatggcacacgcacctggagatgcattgtttggtccaaacctccccccaggacaccagtcatcaagtacatcataggggcaagcttgtgggatctgatcaaaggctccctcctgaaggagacacacacttgtttgaaaccaatcagatgactcagcaaggaaccggaatcccagaggctgcccagcttccatgccaggtgggcaatacccaaacaaaggcagtggaatctggcttaaaattcagcactcaatgtcctctttccataaagaacccacacaggtctggcaaaccagcttactatccatttccccagaggaaaacacccaggatctcccaagctgcccggaacctgggcttatatggctcagcgtgaagctttctattctgccagatgtcttgaccttgaggccacctatggccttatagaagaaccaaggaggcagagccacaacgaggtctctagctatgagcaagaactggactaacctaattataggaattgtgggagacgaacttcacaatggtaacatggttttacccttccaataagaagagacttcccaggccaaattgcccacagtttaggatgaagaggactgtctggtcagtgcagccccattctgacattactatgaggtcctggatatccattccttggggaggaccagtaagacatctgctccatccctggaactggataattttggaacataaaccagggacctagccaacagaatgccttagcaatgcccaggggtcaatgggcgtggcattcttgttttcaatgtcttctgatgatttctcatatattctggagaagacaagctctgagaattcagatgctttttctggtggctatgtctggggggccatctcacttagaagtcacaacactcattggcagtgatcacatcatttcaatttgggcttcccaaagtatggtcacccagggtatgaaggtgagatcaatgctacctaccattttgtgtctttaaggggtctttagaaagggctaatcatctgtcactgctcactgagacatgtacattccagcatcatcacagagttatctccttccttccttccttccttccttccttccttccttctgtctctccctccctccctcccttcctcccttctttccttctttctttcctctcttccttcttgccttctttcctgccttcctgcctatcttttctctctctctctctctgcaaattaagttcttattaaaaactgccaatcattgacgatatataatgatgagatcctgaacaaaagaggcaaagaaatgctcctacttgaaaaatacacattccctatagactgcctcctgtttagtccaacttagatcactcagatccttcctgggatcaaatatatttttaaacctaagacaaagcgaagcaggtgtcacttgggtgatagggaaaaaagcttgtatttcctggttaatgtttagcttttgtaatgctatttaaacacacctaaggtgcctttccctcatctcaggtgctttctctgtaaagtttcactcccacctttcttttctctgcatggccgtccagtcttgcccatctacatccagagctgttaactagtagtgtcattacctgtgaaaaacatgtagaagcttccttgaaccacccagaaatccactcaaatttggggattgtcattccttttgtgaataattaatacaattcagttgttttttaaatattctaataaaaaaggaaattttctcaaaaaaatttcaaaaaaaaaaaaaaaagaaaaaaaaagaaaaaagaaaaaaagaa

SEQ ID NO: 32643 - DNA, 3709 bp, Homo Sapiens
agtaatagcagcaactgctacccagccagattttaattagtttctgttccctgttcagagtaccttgtggagctgagagaatacgggcctgtgtactccacatggagcgccttggagggtgagctggctgaacccctggagggtgtgtcagcttgcattgggaactgctctacagccttagaagagctgacagatgacatgacagaagacttcctacctgtgctcagggaatatattttatactctgactccatgaagagtgtattgaagaagagggaccaagttcaagcagagtatgaagccaaactggaagctgtggctctgcggaaggaagaccgccccaaggtaccggcggacgtcgagaaatgtcaggatcggatggagtgtttcaatgctgacctgaaagctgacatggagaggtggcagaacaacaagaggcaggacttccggcagctactcatggggatggctgacaagaacatccagtattatgagaagtgcctcatggcgtgggagtcgattattccactactgcaggagaaacaagaggccaagtaaagttctttcttgggacggagactcttctacctacacagggcctggcaccctataccggaatgtccctgcagtgccagagacgcagtgctgggaaaacaaccacagaaacatctctcctttgtgtatttttccctcccccacctttcaccccacagtggttttcaattagtatttattccatggtggagtctgtgaggctagaatatctctcagcaagagcagcatacctccatgttgtgaaggcatctgttcagtgaagcactacgaaaatttgaaaccaagggacaagacaacctgcagctgacgctctgacatttcatgacagtttcctctttagggacagctgagttgccagttgtgggagagaacccggggcctgcttttcaaggatgaggaggaggcaggaacagaaggcagctgctgctttctgtggaaacctggcccctctggaattggcctctgtgggcattgactcgtcttggcctaggaggcattggtgcctccctggcaagtccttaacgtacagtacctgtagctgtgagtgtggcctgctgcctgcttgtgatgagtgataccgtcttactgtttctgtttcacatagggacatttaaatcaatgtcaatgtgcgtccatgcttgagtgagcaagccagcgtccttgtcctcctgcaatgcctttgggaagctcaggggaatgctccccaagcttgtttctgacactagaatgcaacagattggaaactttttgtgtaaaatgaaaaaaacaaagtgctggttttttttttttttctgtgaaggtcttcagtgttttgcttgttcactgtcatcagagcagggattagacctgttagggaatatctattgtcttgaagtcagagtagctccccattgttgagatcagtgggcatataccaagctccacccccagtgtcagctttgtgcaatttgcctttacctcaccaaaaatacctactttaatatttcctcctgtgtcctctgaatgtctgggcgagcttttggtgagagggctggtatgtcatgttgttatgatacagtcgaaatttgtcaatgcagtgtgaatgttctcttcggccttgttctgccttgtgatcttttcaattcagtgaataaaccaggaatccattttttcaccaacccaccctgtagattgtcagctttttgtttgagagatgcctggtctcacagttacatgtatcagagtgtgtgtaagttgtctgtgttagaaaggttggggtgggggctttgttgcaggggattagactgttctttcttcatcataatttgagatacatcctgagtatgactgtctaaccctttctgtgtggcagaaaaatatgttttccaggtagtttttactactacagagagtctgtaaataagtgctttaaaaaaataacaaaccaataagatatttgtctcctatataaacattctgtgtatttagcacttgaaaatcaacaaatccagaatttaaaaaaatgccacagacttttcaaagcccaactctacttttttgagaatttgtccgtacctactaatatgccttattcttcttcacctagtgttttaaaagtcctgggtagaaagagttttagaaatgtaatcagttgttcagcttcaataatatagagatctaacatagtcagtcctcaggccccctaaagaaacaagcaagaaagtgagggccatcactagggttggctttggggaggggaaaactaaggactgcttttgccaaatgatatttttgataatgtaaggaaacacagggaccacaaaaccttttttttttttttaagtgtgaaagattagtgccttttggcatacttttgattttagaggatatagtatcggcattgacaaatcacgtagaaacaaagaatgctatagatgacaacagtattaaatgttactcctgattctgcagaacagcttttgaagatactggggggtatcttcaagcctcagagcagcttgtttcagatagaaattctctatgggttgaaatgccaaaaacagaaaacatgatgttgactcatgtaatttagtccattttagcagagcctttagtgttaacaccagtggcgaggagcattgcatattctctgtcagcagcagcactcccacaccaggtggttctgggctctctgtaggctggtcctagtaggtgacacccagcaacacccctgttggacaggattgattgttcgcagtcttagaccaacacttcagtcagaaatgttactgggaggaggaaaggaaaatcactttttttcctccatgtggaaatgaggagagaggaaagtggattgcaaaccaaaatgtgagtcagtgtgatgaagcagtggctctgtcatctcggcctttatccaataacaaaccagcatctcttaaaggcgcttttggcctagacacccctgaagtttggatgaagtctggtggattccctgtctgttgtatttctgtgtgcctgttcccttcattgctgtgagttgggagtgcattgagagatgatgtccatctgatatattcctgtgaaataaactgccagcaaactttctaacttgtattttaactgttaaagaagagattaaaaacttcggctttggacatgtccacattatggactgtcatcttatttttaaaagtcattctttacgtttaaaattttaaaataaaaaccttctgaggtattgatgtagtccaccgtgtaaatgttaccttctctccatgctgccattatgccaaaacaaaagctgtgataaaaaaagtgcttgagagagtgtgttgataagaaagtgatttatttacagatggaagtctttgtttcatgaagctaccaaactttaaaaagaatgtcacccttttttttgtttgttatggaaaccagagattgtaaaatggaaaaagaatcgtttttttgttgactttttgatgctggcacgaggtttttgtccacttttttcatatatctgtgtataaaaaaattgttgtttactatggaattagtattacattttgaggtaaacaaaagaatttgtattgcttgataaatattagcttgtaaatttaaagtttctttacttcaattaacttaaaggaccaataaacccataaaagatgctttcttt

SEQ ID NO: 32644 - DNA, 495 bp, Homo Sapiens
atgaatggagaaaaccaggagaccctgccttgccttaaatccggctcttcaccaacttcagatgagtctgtaatatatgtactctatgtccacaatctgcaggagctccggcgaagtgcctcactggccaccaaggtctttatccagagagactacagcgatgggaccatctgtcagttccagaccaaattccccccagagctggacagccggatcgagcggcagctctttgaagagactgtgaagaccctcaacggattttacgcagaggctgagaagattgggggcagctcctacctcgagggctgcctggcctgcgccacggcctacttcatcttcctctgcatggagacccactatgagaaggttctcaagaagatttcccgctacatccaggagcagaatgagaagatctttgcacctcgaggcctcctacttacagaccctgtggagcgtgggatgagggttgtatccttctgggctattctgtgttga

SEQ ID NO: 32645 - DNA, 3594 bp, Homo Sapiens
atgggacaggcaccgggaccacggcggggacgcgaggactggagccgcgacctccccactgcgagcgagctggcctcccttgcggcgcgccggcgtcggaggggcgacctgcgggggctgggcttcggcggaacccgagcggggcctaccgccccaggccgccgagggagcggcggggccggcgccatggccgagcgaggccgcctcggcctccccggcgcgcccggcgcgctcaacacgcccgtgcccatgaacctgttcgccacctgggaggtggacggctccagccccagctgcgtgcccagctccggcaagcgcggccccagccccccaggtcccgagcaccgggggccgcgctcagcttccgaggacccggtgctgctcagacccggcgggaccttggggctcccgggcggcgctcacctggctcgccgcaaccgcacctgcacacctgcctcaatgcggtgccggccggggttgtgcagcctgactctgaagaagctggtggtcttcaaggagctggagaaggagctgatctccgtggtgatcgctgtcaagatgcagggctccaaacgaatcctgcggtcccatgagattgtgctgccccccagtggacaagtggagacagacctggccctgaccttctccttgcagtatcctcacttcttgaagagggaaggcaacaagcttcagatcatgctgcagcgcagaaagcgctacaagaacagaaccatcctgggctacaagacgctggccgcgggctccatcagcatggctgagaaccgtgcccctggcctgcaggtgatgcaacacccgtctgaaggtggccaggtgctgagcctctgcagcagcatcaaggaggcccccgtcaaggcggccgagatctggatcgcctccctgtccagccagcccattgaccacgaagacagcaccatgcaggccggccccaaggccaagtccacggataactactccgaggaggagtatgagagcttctcctccgagcaggaggccagtgacgacgccgtgcaggggcaggacttggacgaggacgactttgacgtggggaagccgaagaagcagcggagatcgattgtaagaacgacgtccatgaccaggcaacagaacttcaagcagaaagtggtagcgctgctgcggaggttcaaagtgtccgacgagactctggggtctcgggcgcccccagtggggcaatgtgggctgctgcagggaactcacgcgtgcctggcacccgtgcaggtcctggactcggagcaggaccctgcggagcacatccccgaggcagaggaggacctggacctcctgtatgacaccctggacatggagcaccccagcgacagcggccccgacatggaggatgacgacagcgtcctcagcacccccaagccgaagctgcggccatactttgaaggcctgtcgcactcgagctcgcagacggagattgggagcatccacagcgcccgcagccacaaggagcccccaagcccggctgacgtgcccgagaagacgcggtccctgggaggcaggcagccgagcgacagtgtctctgacacggtggccctcggtgtgccaggcccgagggagcaccctggacagcctgaggacagccccgaggctgaggcctccaccctggatgtgttcacggagaggctgccgcccagcgggaggatcaccaagacagagtcccttgtcatcccctccaccaggtccgaggggaagcaggctggccgacggggccggagcacatccttgaaggagcggcaggcagcacggccccagaatgagcgggccaacagcctggacaacgagcgctgcccggacgcccggagccagctacaggtgcagctgcagggggagcaggggcactgcaggcaccagggctggcgtggtggggatgggcgctgtgcttctcttctgggtgtggacagggctctgtgcctccagatccccaggaagactgtgtatgaccagctcaaccacatcctcatctccgatgaccagcttcccgaaaacatcatccttgtcaacacctcggactggcaggggcagttcctctccgacgtcctgcagaggcacacgctccccgtggtgtgcacgtgctctcctgcggacgtccaggcggccttcagcaccatcgtctcacggatacagagatactgcaactgcaattcccagcccccgacccccgtgaagatcgccgtggcgggagcgcagcattacctcagtgccatcctgcggctctttgtggagcagctgtcccacaagacacccgactggctcggctacatgcgcttcctggtcatcccactgggctcccaccccgtggccaggtacctaggctccgtggactaccgctacaacaacttcttccaggacctggcctggagagacctgttcaacaagctggaggcccagagtgcggtacaggacacgccagacattgtgtcacgcatcacgcagtacatcgcaggggccaactgtgcccaccagctccccatcgcagaggccatgctgacctacaagcagaagagatggggagagaagggcaggagggagctggcaccacctggccgctccagcatcatgggagtggtggccacggttgtgaaggttggaattgtggagccatcctcggccacatcaggcgactcggacgacgcggccccctcgggctctggcacgctctcctccaccccgccgtccgcatctcctgcggccaaggaggcctcacccaccccgccctcctccccgtcgccgccggctccttccaggctgcgcctgagggagctggttcgcacgggccctcacgactccaaggggcagcttggagagcagggtgtcggcgccgagctgatggggctgcaggtggactactggacggcagcacagcctgcggacaggaagagggacgccgagaagaaggacctgcctgtcaccaaaaacacgctcaagtgcactttccggtccctccaggtcagcaggctgcccagcagcggcgaggctgcagccacgcccaccatgtccatgaccgtggtcaccaaggagaagaacaagaaggtgatgtttctgcccaagaaagcgaaggacaaggacgtggagtctaagagccagtgcattgagggcatcagccggctcatctgcactgccaggcagcagcagaacatgctgcgggggggctcccactgtcttcttcccacacctgtgcaggtggaagtggatgtggacgagcagcgcctggcggaaggtggtggggtctgctccttccacctgcaggcagccctgggggaaatgctgccctccccaccccccagggctctgagtgtggagggcaggggcaggaatggcgtccctcaggagccagcatggccctggagcccccgagtccctgaggaaagtgttgatgccctccagcatggggctccttctcatcctgtacgcccggctgccacccagcctgtcctcatcgacggcgtggagtgcagcgacgtcaagttcttccagctggccgcgcagtggtcctcgcacgtgaagcacttccccatctgcatcttcggacactccaaggccaccttctag

SEQ ID NO: 32646 - DNA, 4647 bp, Homo Sapiens
atgaaggcgctacttgatgcggcactacgtatgaacccgatcctgaatgagagggaaagactgagacaggctgagcagtgcccgggggctgagcggccggggcgtcccaccgccggcagccacagcttcctcctccgcccgggacctctggccggaagcagtccgttcgccttactagacccgctccaagcctttgagcagttcgtgtgggtccgctcccaagctagggctgggctgttgcgcttgcgccaggggtcgcatgcagtcacgcgctgccgaccgcttccggtgcgccgcgagggccgccgggacgggtctccctggcgatccgtggtgtgccgctactgccggtgcagccgccaaaccggtgcctcggtgacgaccgtgtccctgccgtcttcctcgagctccccggggcttgacccccggggccctcggcaggcatcggtgaggagcctgcggagcgaacctgtgctcctattcttgcccttcaggaccccatatcgcgactccgaggaggggaagcgagaggggctgtcgcgactccgcgccgtgtgtcgccgggcggggccgcggggccggggctccttcagcccccgggatgcgcgcgcgagccctcgcctccacttccttgttgctgctgtcacgactggagccgcctctcgccgacagcggggagcgcgagtgcgccagccatccccctcgtccagccgccgggccaagcgcctccgggaatgtgagcggcgcagcttgcacgctcctccggccatggacgcatcatatgatggtactgaggtaactgtcgtgatggaggaaattgaggaagcctattgttacacctctcctgggccacccaagaagaagaaaaagtataaaatacatggagaaaagacaaagaaacccaggtctgcttaccttctgtactattacgacatctacctgaaagtgcagcaggagctcccccacctccctcagtctgagatcaataagaagattagtgagagttggaggcttctcagcgtggccgagaggagttactacttggagaaagccaaactagagaaggaaggtttggatcctaactctaagctctctgcactgactgctgtggttccggacatcccaggtttccgcaagatcctcccacgctcagattatatcatcatccccaagagcagcctgcaggaggaccggagctgccctcagctagagctatgtgtggctcagaaccagatgtccccgaaaggacctcctcttgtgtccaacactgccccggagacagtgcccagccatgcaggcatggcagagcagtgcctggctgtggaggccctggctgaggaggtgggagcccttacccagtcaggtgctgtacaggagattgccacctcagagatcctcagccaggatgtgctcctagaggacgcttccctagaagtaggggagagccaccaaccttaccagacaagcctggtaattgaagagaccttggtgaatggctcaccagacctccccactggaagcctggctgtgccccacccccaggttggggagagtgtatcagtggtaacagtcatgagggattccagtgagagtagctcctctgcaccagccacacagttcatcatgttgcctctgcctgcctactcggttgtggagaaccccacctccatcaaactgaccactacatatacccgccggggccatgggacatgcaccagcccagggtgctcctttacatatgtcaccaggcacaagccacctaagtgccctacctgtggtaacttcctaggagggaagtggatcccaaaggaaaagccagccaaagtaaaagtggaattggcttctggcgtctcttccaaaggctctgtggtgaaaagaaatcagcaacctgtcaccactgagcaaaattcctctaaggaaaatgcctccaaactgactctggagaattcggaagctgtaagccagctcctgaacgtagctcctcccagagaagtaggtgaggagagtgagtgggaggaagtgatcatctccgatgcccatgttttggttaaggaagctcccgggaattgtggtacagcagtcactaagacgccagtcgtcaaaagtggtgtgcagcctgaggtcactctggggacaactgacaatgacagtcctggagcagacgtaccaacaccatccgaggggacaagtacctccagtccactccctgctcctaaaaaacctacaggagctgacctgcttacccctgggtccagagctccagagcttaaaggcagagcacggggcaagccctcattactggctgcagcaagacccatgagagcaattttgccagccccagttaacgtggggcgaggcagcagcatgggactgcccagggccaggcaggccttttccctgagtgataagactccctctgtgaggacttgtggtctgaagccaagcacactgaagcagctgggccagcccattcaacagccatctggccctggtgaggtgaagctaccaagtggcccatccaacaggacttctcaggtgaaagttgtggaggtcaagcccgatatgtttcctccatataagtacagctgcactgtcacattggatttgggcctggctacatcaagaggccggggaaagtgcaagaatccctcttgtagctatgtctacaccaacaggcacaaacctcgaatttgtcccagctgtggtgttaaccttgccaaagaccggactgagaaaaccaccaaggctatcgaggtgagctcaccactcccagatgtactgaatgccacagagcccctgagcacagcccagagggagatccagcgccagtccacactgcagctgctgcgcaaagtcctgcagattcctgagaatgagtcagagctggctgaggtcttcgccttgattcatgaactcaacagctctcgacttatcttgtccaacgtgagtgaggagacagtcaccatcgagcaaacctcttggtcgaattattatgagtctccgtccacgcagtgccttctctgtagcagcccattattcaaagggggacaaaactccctggctgggccccaggagtgctggctgctgacagccagccgtctgcagacagtgactgcccaggtgaagatgtgtctgaacccccattgtctggccctgcacagcttcatagacatctacacaggtctctttaatgtggggaacaagctgctggtaagcctggacttgctttttgcaatcagaaatcagatcaagctcggagaggaccccagagtgtccatcaatgttgttctgaagtcggtgcaggagcagacagagaagactctgacctcggaggagctgagccagctgcaggagctgctgtgcaatggctattgggcctttgagtgcctcactgtccgagactacaatgacatgatctgtggcatctgtggtgtggcccccaaagtggaaatggctcagaggagtgaagagaatgtgctagcactgaagagcgtggagttcacctggcctgaattcctgggctctaatgaggtaaatgtggaggacttttgggccacgatggagacagaggtgattgagcaggtggcatttcctgccagcatccctatcaccaaatttgatgcgtctgttattgcccccttcttcccaccactcatgagaggagctgtggtcgtcaacactgagaaagacaaaaacctggatgtgcagccagtacctggcagtggcagtgccttggtgaggctgctccaggagggcacctgcaagcttgatgagattggctcctacagtgaagagaagctgcagcacctgctaaggcagtgtggaatcccctttggggcagaagactccaaggaccagctctgcttctccttgttggccctctacgaatctgtacagaatggagctagagctatacggcccccacgtcacttcacaggtggtaaaatctacaaggtgtgcccccatcaggtggtctgcggctccaagtatcttgtgcgaggtgagagtgcccgtgaccatgtggacctgcttgcctcttcccgccactggccgcctgtctatgtggtagatatggccacgtcagtggccctgtgtgctgacctctgctacccagagctgactaaccagatgtgggggaggaaccagggctgtttctctagccccacagagccacctgtgagtgtgtcctgcccagagctcttggaccagcattatactgtggacatgacagaaactgagcactctatccagcacccagtcaccaagactgccacgcggcgcatcgtccatgcaggcctacagcccaatcctggtgaccccagtgctgggcaccactccttggccctgtgccctgaattggcaccttacgcaaccatcctggcctccatcgtggacagcaaaccaaacggtgtccgccagcggcccattgccttcgacaatgccactcactattacctctacaaccgcctcatggacttcctcaccagccgcgaaattgtcaatcgtcagatccatgacattgtacagagctgccagcctggtgaggtggtcattcgtgacaccctctaccgccttggggttgctcagatcaagacagagacagaggaggagggtgaggaagaggaggtggccgcagtggcagaataa

SEQ ID NO: 32647 - DNA, 3468 bp, Homo Sapiens
atgcactccagaaggcgcttcccgcgggccgccagtgcgcaccctcggccacatcagcctccgcctggcgggtgcacccgggccggcgaggaaggggcaaccgtccggaatgtgaaagatgttgcagaagtgttccagaagtggctgaagatagaaggaaaaaagtgccactgcctatcagaaaaaacaaaacaaaacatgggaaatacaaccaccaaattccgtaaagcactcatcaatggtgatgaaaacctggcctgccaaatatatgaaaacaatcctcagctaaaagaatctcttgatccaaatacatcttatggggagccctaccagcacaatactccattacattatgctgctagacatggaatgaataaaatattagggacttttcttggtagagatggaaatccaaataaacggaatgtgcacaatgaaacatctatgcatttgttgtgtatgggacctcaaattatgatatctgaaggagcccttcatcctcgcttggcacgccccacagaagatgatttcagaagagcagattgtctgcagatgatcttaaaatggaaaggagcaaaacttgaccagggtgaatatgagagagcagctattgatgctgttgataacaaaaaaaacacacccttgcactatgctgctgcctcagggatgaaagcctgtgtagagcttttagtaaaacatggaggagacttgtttgctgagaatgaaaataaagatactccttgtgattgtgctgaaaagcaacaccacaaagatttggccctcaatctggaatctcaaatggtattctcacgggatcccgaggctgaagaaatagaagctgaatatgctgcattagacaaacgagagccatatgaaggattaaggcctcaggatcttcgtagactaaaagatatgcttattgtggaaactgcagacatgcttcaggctcctctctttactgctgaagctttacttcgagctcatgactgggacagggagaaattacttgaagcttggatgtccaacccggagaactgctgccaacgatcaggtgttcaaatgccaactccaccaccaagtgggtataatgcctgggacacgctcccatctccaagaactccaaggactacacgctcttctgtcacctccccagatgaaatcagcttatctcctggggatttagacaccagtttgtgtgacatttgtatgtgcagtatctctgtatttgaagaccctgtggatatgccctgtggacatgacttttgtagaggatgttgggagtcgtttttgaatctgaaaattcaagaaggtgaagctcacaacattttttgccctgcatatgattgcttccaacttgtacctgtggatatcatagaaagtgtagtttcaaaggagatggacaaacgatacctacagtttgatattaaggcctttgttgaaaataatcctgccattaaatggtgtcctactccaggctgtgacagagcagtaagactaacgaaacaagggtcaaatacatctggatctgatacactcagcttcccattgctgagagctcctgctgttgattgtggaaaaggacacctcttctgctgggagtgccttggtgaagcacatgagccttgtgactgccaaacatggaagaattggctgcaaaaaataaccgaaatgaaaccagaagaacttgtgggagttagtgaagcctacgaggatgccgccaattgtctctggttattaactaactccaagccttgtgccaactgtaagtctccaatacagaagaatgaaggctgcaatcacatgcagtgtgctaagtgcaagtatgacttttgctggatttgccttgaagagtggaaaaaacatagttcgtccactggaggttattacagatgtactcgctatgaagtcattcaacacgtggaggagcaatccaaggaaatgactgtggaggctgagaaaaaacacaaacgatttcaggaacttgacagatttatgcactattatacaagatttaaaaaccatgagcatagttatcagctagaacaacgccttcttaaaacagccaaagaaaagatggagcaattgagcagagctctcaaagaaactgaaggaggctgtccagataccactttcattgaagatgcagttcatgtgctcttaaaaactcggcgcattctcaagtgttcttatccatatggatttttcttggaacctaaaagcacaaagaaagaaatttttgaactaatgcaaacagacctagaaatggtcactgaagaccttgcccagaaagtcaataggccttaccttcgcacaccccgccacaagatcatcaaagcagcatgccttgtacagcagaagaggcaagaattcctggcatctgtggctcggggagtagctcctgcagactcaccagaagctccaaggcgcagctttgctggtggaacatgggattgggaatatttaggatttgcatcaccagaggaatatgctgaatttcagtatcggaggaggcacagacaacgtcgtcgaggagatgttcacagtctactcagtaatcctccagaccctgatgagccaagtgaaagcactttagatattccagaaggcggcagcagcagccgcaggcctggcacatccgtggtaagttctgcatctatgagtgtgctgcacagctcttccctgcgtgactacacccctgccagtcgctctgaaaaccaggactctcttcaggctctgagttccttggatgaagacgatcccaatatacttcttgcaatacagttatcactgcaagagtctgggctggccctcgatgaagaaactagagacttcctcagtaatgaagcatccttaggtgcgataggcacttctttaccttccaggctggactctgtccccagaaatacagatagccctcgggctgcattgagcagctctgagcttttggaacttggtgacagcctcatgagactaggagcagagaatgacccattttcaactgacaccctgagctcacaccctctcagtgaggcaagaagtgatttctgtccctcatctagtgatcctgactcagctggccaggaccccaacatcaatgacaatcttctcggcaacatcatggcttggtttcatgacatgaaccctcagagtattgccctgattcctccagcaactacagaaatcagtgcagattcccagctcccctgtatcaaagatgggtcagaaggtgtgaaggatgtggaactggtgctgccagaagattcaatgtttgaagatgccagtgtcagtgaaggtagaggaacccagatagaagaaaatcctttggaagaaaatattctggcgggggaagcagcatctcaagctggtgacagtggtaacgaggcagccaacagaggagatggttcagatgtttcaagtcaaacacctcaaacctcaagtgactggcttgaacaagtacatttagtgtga

SEQ ID NO: 32648 - DNA, 486 bp, Homo Sapiens
atgaagcatgcaggcctgggtgaaggaatacctcctgacaactccgggaatgatggctatgctaataatgggtatagtgcccgtgaagaagaaaatgagacactcactgaaaatctgagaagcaaagtaactgctataaaatctttttccattgaaataggccatgaagttaaaacccaaaataaattattagctgtaatggattcacaatttgattctacaactggatttctaggcttctttacaagcctctatgtaaagcacaggctggtgagggccccaggaagagcagcaccgccctcggcacaggcccctactccaagtcctgtgcaggagcaggtcttgcccagcgcagcagctctgcacctctgtggcaccgctctgccaagagggaaggtgcaggccctgcagcccatcgccttggatctgaagaccagccctgtggggctgctaagtcatgaaactggcctcatggagatttcataa

SEQ ID NO: 32649 - DNA, 1143 bp, Homo Sapiens
atgcttagcacagtgtacagtctagcggacccggacctgcggccgctgctcccggtccgcagcctcacaggggagcggcttccggtgctgcctgcgtcatctccgcgcgtccctcagctccgcggctcccggcggaagcggctgcacttccggtccccgcccggagatgtgaaagttcttgaaattaagaataaggcaagaaaattgaacatcgaacccctaagaagtaatctctccaaatattatgtcctgagccagtcagaaatatgtaaagggaagaacatttttttgctgtctcttatcttcagtagcccaggaaatggaacaagacgggacctcattaggaaaacttggggcaatgtgaccagtgtccaagggcatcccattctcacactgtttgctctgggaatgcctgtttcggtaactacccagaaagagatcaacaaagaatcctgtaagaataatgatataattgaaggaatcttcttggacagttctgagaaccaaaccctgaagatcattgcaatgatacagtgggctgtggctttctgccctaatgccctgttcattctcaaggtggatgaagagacgtttgtcaatctaccaagcttggtagactatcttctcaatctgaaagaacacctagaagatatctatgtaggaagagttcttcatcaggttacacccaatagagatcctcagaacagagactttgtccctcttagtgagtacccagaaaaatactacccagattactgcagtggtgaggcctttataatgtcccaagatgtggctcgaatgatgtatgtggttttcaaagaagtacccatgatggtgccagctgatgtgtttgtaggaatttgtgctaagttcattggccttatacccatccacagctcaaggttttctgggaaaaggcacattagatacaacagatgttgctataagttcatttttacatcctcagaaattgcagatcctgaaatgcccctagcatggaaggaaattaatgatggaaaagaatgtacactgtttgagacatcctatgagctcatttcctgcaaacttctgacgtaccttgacagctttaaacgttttcacatggggaccataaaaaacaatctcatgtattttgctgattag

SEQ ID NO: 32650 - DNA, 8260 bp, Homo Sapiens
agagcagtgagcccagtcccgagtcccggagagagctccagcaataggggccatgtcgccgtagccccagcctctcggtccgcagcctcagcagcgtcccagccggctggcttcatgctgcggtgcagctgcaccatgttcctgggttgagggggcaatcgggcacgctcctccccatgggttgcccatcatgtctaatggatatcgcactctgtcccagcacctcaatgacctgaagaaggagaacttcagcctcaagctgcgcatctacttcctggaggagcgcatgcaacagaagtatgaggccagccgggaggacatctacaagcggaacattgagctgaaggttgaagtggagagcttgaaacgagaactccaggacaagaaacagcatctggataaaacatgggctgatgtggagaatctcaacagtcagaatgaagctgagctccgacgccagtttgaggagcgacagcaggagacggagcatgtttatgagctcttggagaataagatccagcttctgcaggaggaatccaggctagcaaagaatgaagctgcgcggatggcagctctggtggaagcagagaaggagtgtaacctggagctctcagagaaactgaagggagtcaccaaaaactgggaagatgtaccaggagaccaggtcaagcccgaccaatacactgaggccctggcccagagggacaagagaattgaagaactgaatcagagcctggctgcccaggagaggcttgtagaacagctatctcgggagaaacaacaactgctacatctgttggaggagccaactagcatggaagtgcagcccatgactgaagagttgctgaaacaacaaaagctgaattcacatgagaccactataactcagcagtctgtatctgattcccacttggcagaactccaggaaaaaatccagcaaacagaggccaccaacaagattcttcaagagaaacttaatgaaatgagctatgaactaaagtgtgctcaggagtcgtctcaaaagcaagatggtacaattcagaacctcaaggaaactctgaaaagcagggaacgtgagactgaggagttgtaccaggtaattgaaggtcaaaatgacacaatggcaaagcttcgagaaatgctgcaccaaagccagcttggacaacttcacagctcagagggtacttctccagctcagcaacaggtagctctgcttgatcttcagagtgctttattctgcagccaacttgaaatacagaagctccagagggtggtacgacagaaagagcgccaactggctgatgccaaacaatgtgtgcaatttgtagaggctgcagcacacgagagtgaacagcagaaagaggcttcttggaaacataaccaggaattgcgaaaagccttgcagcagctacaagaagaattgcagaataagagccaacagcttcgtgcctgggaggctgaaaaatacaatgagattcgaacccaggaacaaaacatccagcacctaaaccatagtctgagtcacaaggagcagttgcttcaggaatttcgggagctcctacagtatcgagataactcagacaaaacccttgaagcaaatgaaatgttgcttgagaaacttcgccagcgaatacatgataaagctgttgctctggagcgggctatagatgaaaaattctctgctctagaagagaaagaaaaagaactgcgccagcttcgtcttgctgtgagagagcgagatcatgacttagagagactgcgcgatgtcctctcctccaatgaagctactatgcaaagtatggagagtctcctgagggccaaaggcctggaagtggaacagttatctactacctgtcaaaacctccagtggctgaaagaagaaatggaaaccaaatttagccgttggcagaaggaacaagagagtatcattcagcagttacagacgtctcttcatgataggaacaaagaagtggaggatcttagtgcaacactgctctgcaaacttggaccagggcagagtgagatagcagaggagctgtgccagcgtctacagcgaaaggaaaggatgctgcaggaccttctaagtgatcgaaataaacaagtgctggaacatgaaatggagattcaaggcctgcttcagtctgtgagcaccagggagcaggaaagccaagctgctgcagagaagttggtgcaagccttaatggaaagaaattcagaattacaggccctgcgccaatatttaggagggagagactccctgatgtcccaagcacccatctctaaccaacaagctgaagttacccccactggctgtcttggaaaacagactgatcaaggttcaatgcagataccttccagagatgatagcacttcattgactgccaaagaggatgtcagcatacccagatccacattaggagacttggacacagttgcagggctggaaaaagaactgagtaatgccaaagaggaacttgaactcatggctaaaaaagaaagagaaagtcagatggaactttctgctctacagtccatgatggctgtgcaggaagaagagctgcaggtgcaggctgctgatatggagtctctgaccaggaacatacagattaaagaagatctcataaaggacctgcaaatgcaactggttgatcctgaagacataccagctatggaacgcctgacccaggaagtcttacttcttcgggaaaaagttgcttcagtagaatcccagggtcaagaaatttcaggaaaccgaagacaacagttgctgctgatgctagaaggactagtagatgaacggagtcggctcaatgaggccttacaagcagagagacagctctatagcagtctggtgaagttccatgcccatccagagagctctgagagagaccgaactctgcaggtggaactggaaggggctcaggtgttacgcagtcggctagaagaagttcttggaagaagcttggagcgcttaaacaggctggagaccctggccgccattggaggtgcagctgcaggggatgacaccgaagatacaagcactgagttcactgacagtattgaggaggaggctgcacaccatagtcaccagcaacttgtcaaggtggctttggagaaaagtctggcaactgtggagacccagaacccatctttttcccctccttctccgatgggaggggacagtaacaggtgtcttcaggaagaaatgctccacctgagggctgagttccaccagcacttagaagagaagaggaaagctgaggaggaactgaaggagctaaaggctcaaattgaggaagcaggattctcctcagtgtcccacatcaggaacaccatgctgagcctttgccttgagaatgcggagctgaaagagcagatgggagaagcaatgtctgatggatgggagatcgaggaagacaaggagaagggcgaggtgatggttgagactgtggtaaccaaagagggtctgagtgagagtagccttcaggctgagttcagaaagctccagggaaaactgaagaatgcccacaatatcatcaacctcctcaaagaacaacttgtgctgagtagcaaggaagggaatagtaaacttactccagagctccttgtgcatctgaccagcaccattgaaagaataaacacagaactggttggttcccctgggaagcaccaacaccaagaggaggggaatgtgactgtgaggcctttccccagaccccagagccttgaccttggggctaccttcacagtggatgcccaccaattggataaccagtcccagcctcgtgaccctgggcctcagtcagcgtttagcctaccagggtccacccagcacctgcgctcccagctgtcacaatgcaaacaacgctatcaagatctccaggagaagctgctgctatcagaagccactgtctttgctcaggctaacgagctggagaaatacagagttatgcttacaggtgaatccttggtgaagcaggacagcaagcagatccaggtggacctccaggacctgggctatgagacttgtggccgaagcgagaatgaggctgaacgggaggaaaccaccagtcctgagtgtgaggagcacaacagcctcaaggaaatggtcctgatggaggggctgtgctctgagcagggacgccggggctcaacactggctagttcctctgagaggaagcccttggagaaccagctagggaagcaggaagagttccgggtatatggaaagtcagaaaacatcttggtcctacgaaaggacatcaaagatctgaaggcccagctgcagaatgccaacaaggtcattcaaaacctcaagagccgggtccggtccctctcagttacaagtgattattcgtctagtctggaaagaccctggaagctgagagctgttggcaccttggaggggtcttcacctcatagtgtccctgatgaggatgaggggtggctgtctgatggcactggggctttctactctccagggcttcaggccaaaaaggacctggagagtctcatccagagagtatcccagctggaggcccagctcccaaaaaatggactagaagagaagctggctgaggagctgagatcagcctcgtggcctgggaaatatgattccctgattcaggatcaggcccgggaactgtcttacctacggcaaaaaatacgagaagggagaggtatttgttatcttatcacccggcatgcaaaagatacagtaaaatcttttgaggatctcctaaggagcaatgacattgactactacctgggacagagcttccgggagcaactcgcccagggaagccagctgacagagaggctcaccagcaaactcagcaccaaggatcataaaagtgagaaagatcaagctggacttgagccactggccctcaggctcagcagggagctgcaggagaaggagaaagtgattgaagtcctgcaggccaagctggatgctcggtccctcacaccctccagcagccatgccttgtctgactcccaccgctctcccagcagcacctctttcctgtctgatgaactggaagcctgctctgacatggacatagtcagcgagtacacacactatgaagagaagaaagcttctcccagtcactcagattccatccatcattcgagtcattctgctgtgttgtcttctaaaccatcatcaaccagtgcatctcagggggctaaggccgaatccaacagcaaccccatcagcttgccaactccccagaatacccccaaggaggccaaccaggcccattcaggctttcattttcactccatacccaagctggctagccttcctcaggcaccattgccctcagctccatccagcttcctgcctttcagccccactggccctctcctccttggctgctgtgagacaccagtggtctccttggctgaggctcagcaggagctacagatgctgcagaagcagttgggagaaagtgccagcactgttcctcctgcttccacagctacattgctgagcaacgacttggaagccgactcttcctactacctcaactctgcccagcctcactctcctccaaggggcaccatagaactgggaagaatcctagagcctgggtacctgggcagcagtggcaagtgggatgtgatgaggcctcagaaagggagtgtatctggggacctatcctcaggctcctctgtgtaccagcttaactccaaacccacaggggctgacctgctggaagagcatcttggtgaaatccggaacctgcgccagcgcctggaggaatccatctgcatcaatgaccgcctacgggagcaactggaacaccggctgacctctactgctcgtggaaggggatccacttctaacttctacagtcagggcctggagtccatacctcagctctgcaatgagaacagagtcctcagggaagacaatcgaagacttcaggctcaactgagtcatgtttccagagagcactcccaggaaacagaaagcctgagggaggctctgctgtcctctcgatcccaccttcaagagctggaaaaggagctggagcaccagaaggtggaaaggcagcagcttttggaagacttgagggagaagcagcaagaggtcttgcatttcagggaggaacgtctttccctccaggaaaacgactccagactgcagcacaagctggttctcctgcagcaacagtgtgaagagaaacagcagctctttgagtccctccagtcagagctacaaatctacgaggcactttatggcaattccaagaaggggctgaaagcttacagcctggatgcctgtcaccaaatccctttgagcagtgacctgagccacctggtggcagaggtacgagctctgagagggcagctggagcagagcattcaggggaacaattgtctgcgactgcagctgcaacagcagctggagagcggtgctggcaaagccagcctcagcccctcctccattaaccagaacttcccagccagcactgaccctggaaacaagcagctgctcctccaagattcagctgtgtcccctccagtccgggatgttggtatgaattccccagctctggtcttccccagctctgcttcctctactcctggctcagaaacgcccataatcaacagagcaaatggcttgggtttggatacttctccagtaatgaagacccctcccaagctagagggtgatgctactgatggctcctttgccaataagcatggccgccatgtcattggccacattgatgactacagtgccctaagacagcagattgcggagggcaagctgctggtcaaaaagatagtgtctcttgtgagatcagcgtgcagcttccctggccttgaagcccaaggcacagaggtgctaggcagcaaaggtattcatgagcttcggagcagcaccagtgccctgcaccatgccctagaggagtcagcttccctcctcaccatgttctggagagcggccctgccaagcacccacatccctgtgctgcctggcaaagtgggagaatcaacagaaagggaacttctggaactgagaaccaaagtatccaaacaggagcgactccttcagagcacaactgagcatctgaagaacgccaaccagcagaaggagagcatggaacagttcattgtcagccagctaaccagaacacatgatgttttaaagaaggcaaggactaacttagaggtgaaatccctaagggctctgccatgtactccagccttgtgacccttgccttccaggaaccatgcaagaagcgcagccaccagaagtccttaaaacagcaggaaaggtgggcctgtcccccttttgtgcagctacctatctgctgaggagcatctgggcctcattcctccaagtccacgggagggtccagaagagggagtcagagatgtatcctggtggagctgggagaaaggcagaaagcctttctgacggctatggaatacgattagccaaggtccacttggcccagcactaagaaaaagatgcgtagtttgcacagaaggttttgtgatcctgcctctcaacagccccagcagcttgggaactagcaagagcacatttcttgcctcatcagctgtcctgagatggaaaactcagtgaatataggaccctgattccgatgaaaggggcacgtggtcccaatgctggagctcctctggcaggttctaaaagcacactactgagcagcggtgccctgccggacactgctggcgggggctcagtgagcactactcacagatccacacctgaccctgttgggtcgagtcaggctgggccttggtctgcactgtagcacctgtgttctttgagttcacatcatgaatgtggtgacttcccagataccatctcaggcttaacctagcacatcctatttcttttcttctatgatatccaaattggactgacctcacttcaaagttgctgtcccattttgtcaccctatcttatctcggggaaattgcagactgatggccagaccaactctgttgaaattcttgcatagagcaaacctgtgctcatttttaagtggcatgggagaggccccaagcctagtaaagcctagtctgtgtcttcacagtgctggtagaatgtgtttgtgtgtataaatatatgatatagatttatatatgttgctaacgccatatattgaaggccaacataactggtggacagggtgggtgacagaaaatgaaagtctttttggtgattgttaaagcaagatgtgtataaagaaataaatagtttttcttt

SEQ ID NO: 32651 - DNA, 2763 bp, Homo Sapiens
actgcagccggaggttctcggcggtggaggagccccgcggcaaagttgcccacggagaggctctgctgcatgatcttgcacacctccttgtcggacagcaggtagggagagcgcaccgggaagctcagtgagggaccaccacctcatccaaggggatcttgcagaagtccttgctgctcctctcgggggcagcgggggaccctcagactcctctctgaacctctcaggattgattgcatagctcctcatgtctttacactcggggccagcacgtggaccttgcactgctgctggtaggagcgcctctgttcctgttccagtgcaggttgcccatgaactcaagggtccagacgcgattgtttttggtgcagaggtagagcaggtgcacttagtggcgaatgagcttgatgcaggacgggtccagctgcttcttgcccagggagtcgctgcagctgtgctgcttgtgcaggttgtcatgggtgaagagcttggggaataggggcaccagcaggcgcgaggtgaagttgccgatggacaggctgctctcgtagatactgtgaagatgctcgttgctgagcaggccgtcggcgccgggcacctccaagttgggctggggatctccaatttgaccaagtcgataggtaccagtcagatcttcttggagcggcaccgctcgcccttgaagctatcctccaccctgattactgagatgtcatcgggcaggctggaggagttgtagcagttgtcgcgtggggggctcgccttcgctgcctgcgtccagccccaggccctgaagcttgtcgttgatgcactgggcgcaccgctgcagccaggcctcctcctcctgcatgtgggggaagtagacctccgtgaagttgcagatgatctgcagcctctgcgggtccagctcctgcttgccgccgtccccgtagcagctgtcctgctcgcccagcttgcggtagtggaagagctcagggaagagccagtggaggaggaagacggcaaactcacctgtgaagaggcttcatgcaggaactaagtgagggcctacatgtccaccacgtggtctgaggcgatggtgctgctccagtccagagacaggccctcctcctcgtctttgtggtccaggaagtggccggggtccactgctcagcctcaagctggcagcctggccaccgggctggctgttctccatctcccgctgggcccagaagtggctgaagaacttattcagctggggcaagcactcggcctgtcacacagccctctccttcaccgaggggtagtagacctccatgtagttgtggatgagctgcaggtgcagtgactccagcttaagcttggcctcaaagctgcaggcactgcagcctcgggagaagttgactgtggctgaagagcttggggaagagctgcaccagcgggcagcaggccaggaccccgcctgacaggctctggtccaagatctgcttaagctccatgcccgtgagctgctacggggtggtgggggtcggctggaatttggccaccatctcagtggggttcaccttcagggagagcaggtccactttgctgtgtagctgggacctgttggacgtgagggtgttgagcatgtagaacatctcctggatcaggaagtagatgttagggtcactgttggtggctgccccagtgctgccacagtcccacttctatggctcattcaggagcctaagcagcgaggggctgttgctggaatttgccttctggaagagctcatacgtgtttagcaggtcccccgagggagggttcttcttctccatgaccttgtgggagatgccatacagaggcttcttgtagtaaggggtggtggcatggttgcggggctcctccttgcctggccacacagagcccgagctcctgccttgccggcctgctctccattgccttggcagggcgagctgttctcgggttccacatgcctgctaggagcgcctctgggatcagctacctcctctccacgctggggatggagtctggctggccattgctgaccagctgagtcctggagggcagtaaagacgctgtccagaaggtgcttctcagaagtcctggaattcacggagcagcctagagcagcatctttggcctctgtctccactctcacttcttagaagttcttctacatcaattttttttggagatggttctgactctgtcacccaggctggagtgcagcagttgctcagagctcactgcatccttgacctcccagactcaaaagagcctagctacttaggagtagctaggactacaggccacggccaccatgcctggctaatcttttaaattttttgtagaggcagaggtctctcattgtgttgcccagacaagtctcaaattctcgggctcaagtgttcctcccaaagtgctgggattaatggcgtgagccactgtacctggccatattttttttttcaaaaaattcatttgtagagtttaaaaagtatcttttgatcaagagttcttattgtatttatgtttgcaaatttcatttcccattctgttgcttgccttttcactctcagtgagttattttatgattacaaatccctaacctcagcctatatctgtctatctaacctatctatctatctatctatctatctatctacctacctacctatctattatctatctacctagatagacagagatatctatagatagctatggtaaattttgaaacacgttccaaatacattataataaattgtgtgttttgct

SEQ ID NO: 32652 - DNA, 2045 bp, Homo Sapiens
agagctgcttgcttaaaagactctggcctccctcttgctccctctctggccatgtgacatgcctgctccccctccaccttccaccatgagtggaagcttctcaaggcctcaccagaagaagatgttggtgccatgcttgtatagcctgcagaactagataggatttcaccatgttgcccaggctggtctcgaactcctgggctcaagcgatctgcccacctaggcctcccaaagtactgggattacaggcgtgaaccactgcccggctgagaaggaggttcttccgcgagagaaggctatgcagaggggaggatctcaggcctgaagggtctagaagcccactggaaggtcttccagacacttgggacatctagctcctgaagagtagaaagaggagctgctgccgaagaggtaagacagagagaggggcacaggatgtggagtccgcccctctgtcctcagggagtttctttggagagagaagagaatgaggctgggctcagaggaagttcctcccactccgtggagctcaaactagtccagtggtggcagctgccctggctggaataaagcatcgacccacagtggcctcacatctctgaggcctttgcaggttaagagtctcctgccatgataccccaccacagtggaacccgttgttgggccagcgtgttctcagggactgggacacgggccaaatactacagccaccaaggccatagcctgtgctctctctgagccgagggaagaacaccctctccggccctgtagttccatttttgtttctttgtttcgtttcctctgctgtcttctccagagctctgcgctgcagctgagagactgggtatctcctagagattcctgacccccacgcaccagccccaccaccagagggcgcccgagcacagagacgccgcaaccggagcaggagccctaaacctgtcagggtgggtcagccctggagtaatcctggagggagggtctgggagagggccccagtgtggggacctgcccggctcaaccaaatgtagtttgttaccttggtggccatctgcagccaggtggccctgccacactgctaaaccagaggatttaggaagcagacagggattcgggaagtggctgaagagcactggaaagacaaactcctgcggtgcaagagtcctggaccaggagtgcggagaactgggggcgctcctctccctgttaccctaggcttgttttctcatatgtaaacaaaggcaggggcggggagaagggaaggactcgatggtacccaggtgcccttcaggctctaaccaaagacatgccccaccctcctggaggaaccctgcggagcgcagagaacggctggagacatagcggccgcggttttccccgcagcgcaggagcgccaggcactgcgctgggtcaactgcggtcagggagtcacctgcccgcgacagcgagcgcgcacccacactctcgaccaacccaggctggcctccagcccactctcgggtcccaacgcccaaacatctcgcattgctggctccgacatctccccacccgccgccaggaatcagcgcagagggagatgcgtcttctgtggcgggtgcggggcgaggaccctgaccccagctctgggaagtgaactgtacggaggagagagctctccatcgtcagctctgcctccgcccctcctgcggcttcacttcagcccggatgccggcgatggggaatagaccagggacgcaggagcacactggaccgggggtggatccacttggggaggcaggcaaccgacccgcgcaccggtggcgcaacctcgttccggtgaccgaagcttgtggaggtagctccactcccggctccctggtccgacatccccctgccacctcctcccccacctccccgagtcttgggagcctggaccccgaaggtgcaaaaagtcaagagcctggaaaactgcactgtgcaaatatattgactttatttgtctcctttcaggagcctcacagacatatccaggtaaaaagatcgttaaataaatgccttcagccatc

SEQ ID NO: 32653 - DNA, 2376 bp, Homo Sapiens
acaggaagctgaaatgcatattgctagatagaagaaccaatccgaaaaggctactttctctatgattccaactacgtgactttctggaaaaggcaaaactatggagatggtaaaaagagaaaaggatttctgctttcaaatccgctgtttcctgaggctgggtgctgagttcagctgcccctggaggagcagcagctctgggccgctggcagggccgcatcctcttcagtctggacaaattccctgcagccaggggaagtggcccatgcctgctgtcctggtatgcaacatcggacctgcatgctggaatttgacccttttcctgcctgacacccagcaaaataaaccccagggaagggatcaatgcctgcaaccggaatccagaagaaagaggagtgacagataagccctgggtcagaggccagtgaggtcaggacctcccagggacggacacacagcccaaggtttgggtgtgagatttcagagccccaggtaataaaaataaaagagttaaggtgcctagcagctcagtccctcacagtgctacctggggcaaggatggaaattcacctcagtttgctgtggttgctattggctgaatcatgtcctcccaaaattcatatgttggagtgtacctcgggatgtggtatctcaggatacctcagtacctcgggatgtggcgttgtttggagaaagggtcgctagagaggtaattaagttaaaatgaggccatgagggtgggcccaaatccaatttaattggcatccttctaaaaaggggaaatttggacacagagagagacacaaacagggagggcgccctgggaacaggaaggcggccacctccaagccaaggaggtcctggagcagatcctcgtctcagagctccagcgggaaccacccctgcccaaccttcattttgaacttctggcctccagagctgtgagacgatacacttctgtggtttaagccgtgtagcctgtggcacttggttatagcagccccaggaagcccaacacagtggccaaaacagagaggacagctggcttgctaacgtcacacagcacactgacgagcagggtcttcaactcactactcaggaacccagtagtcaggggtgagggggaatgcccttccaatatggctagagccagactgtctgggcccaatccccagctttgtatgtattacctaacctctctgtgcctcagtttaccaagctataaaatgggcataatgacagcacctgcctggtgatgctcttggagggatgaaaggaggcaacggtgtgggcatctggacggcaccaggcattgccctgagagctggccatgcggggaatgctccatccttacgccagccaggtgttgccacccctctcttgctgatggagaccaggagggtcgggacagaaggccttgcccaaggtctcacagccaggagcctgcctccactggtccctgtgtggccagtgctgccctgggggctgctgctgtgcactggagggtcagctgcatggaggagccagaggagatggtgccgaggacagagcttgcggccctgtacctggctcccagaggaatgggtcttggagctgctctgcacagacactgaccttgaggagagacaggggcgccactccctcctccactcgctcaggtgagcattcaaagcgtcataggtaaccaggagcactagttggcatggcgatttcagaggtgagtccaatgtggaccctggccctgggaaggtcacagtttgatggaagatgccagactcacacattcactcactcactcattccctcgtgtattcattccgcaaagcttcactcattacctacctggggccaggactcagtctcagagccaaggagagcgtggttgggaggagactcagacgctttccagcatccctgcccccaggtgtctacacacctgtgtactccccaacttggagtgtggcagggctgcaaagagggtggatgtgctcccgtggtgaggttactttatatcgcaaaggtgccggacttctgcaggtgtaattaaggtcctaaccagctgaccttgagttaatcaaaatggagatgatcctgggtgggcccaagctaatcaggtgagccctttcaaaatggccttgaagtcagagactctcctgcaggatttggagatccagccccatgaggaacaggggcaaggaaatgcaatcttccacaaccgagagagcttggaagagggtcccaaacctcagaggagaccccagctccggttggcaccttgactgcagccccatgagacagaagacccagctatgccatgtcctggctcctgacctgcccaaactttaagacaatagataaatgccattttaagctttt

SEQ ID NO: 32654 - DNA, 1070 bp, Homo Sapiens
cccggagagggggagccgcggggacgcagcgacagactcggggtgctggcagcggcagcccacgcctcccagggattgcaggcctgggcgccggggttggaccagtctcccgggcatggcacgccctggttattctgtacccgtgatttgtggcggggcaagacgttaagttgggtgacaccgaggtgagccacggtcctcggcaccagatgaggaaccactgtctcaataaggtctcagtgctgtgtgtgtaatggttaccgtgagagcttccctgcaatccgaatttgtgtgtctcattctcagtgacaccagtgatgctgttaaacaaggacaatccggttcatggattgtgacaacgcacgctgacatcaagcagaccctgccgtcaggtacagagggcaccacagtgaccaggaactgctgtcctttcataccaggttttaggaggctttaccagaaggaatggaaaatgctggtgggcagtaagattgaaacagcatctgaggactggttctgcacaaaaccttaaattcttcaaggactttgacatttgtttattcttgtaacaaattaaaacctatcctgtgtgttggttagagatcttcaaactgtaaataccttgaggcaggagtgaggtttttatcttttaaaggacaggcccctactctcctacgtaatgagtttctaaaaatggatgtgagcaccaatcaatatttctctggttgttaaagtcaagaataaaatggtatttttaagctcgcaactgtgtaggatgaattctgtacacttttatttccctctgttctcctttcctatttgaaagtttattagtttgtggacttgggatcggattattcatgcattattttttgatgttgtatgtctcttggttcttgggtatttttgacacatattctgtcttgtaaccatagttaaacaattgttttagaccaactctctgtgtgtaattggcttcaacactcactgctagtcctttgacgctctgtttttttccattcttgagtaattttaagtcatcacttgggcagttgaaatatattttaaag

SEQ ID NO: 32655 - DNA, 2289 bp, Homo Sapiens
agaaagggcggggtggaggagggggaagggcgggggtgatgccgcgcggtcgcaggcttgggatggtgttcgcgcctccgagacccggacagaggcaagcaggggcgccgtgggtgccagagaggcggaagaggaggcctgatggggtcagcacagtgtttccggagccccacgtatcaacagcccagtgccgggagcgccaggggctccaaggaaactatcagacccattccctgtccccaggaagcttaccatccagcggcacagagaaggctcaccatggactccattcaagaacgaggcaggataggatgtgaataagtgcaaggtgtgagtgactgacagtaagtgcaagggggttcagagaagtggcagctccaagcctgcttctgctgaagctggagggcttatctgtcaagaacccccaactcaggaagctctgctccaagtgagctgagtaaggagagtctgcctccaagttgttcctctgcaggtgactgtgctccatgctaaatcattccttgcacgggcagaagctgtttggcattgcaccagtgtctgattttgtttgaatatggtgcctttggcttaatcagtcagacatgcattcaacaactatttatttatttatttatttatttatttatttattattttgagacagagtctcgctctgtcgccaggcggaggttgcagtgagccgagattgagccactgcactccagcctggcaacagagtgagactgtctcaaaaagtaaataaatagaaactcttggttccatgcgtagtctagcattttgtagcacttctaatcacgaagttatttttaatatttgtttggtctgttatacaaaatgtagactggatggcttataaactacagaaatctctcacagttctgtaggctagaaagtctaagatgaagatgccagcagcctgcttcctggttcatacaaggtcatcttctcactgtaacctcacagtgagaggaagggcctaggggtgactctgggatctcttttatgaggcactaatcccattaatgggggccccccaccctcatggcctaatcacctcccaaaggccccacgattgccttgggtgttaggatttccacatatgaattttaggggaacacagacgttcaggccatagcaaatatcttgcccaaatatctctagttccatccttttggtcactctcagaccagaacatttactgagtgattactatgtcccacaaaattcttatttaaccctcagaaaaaccgtctgggggaagcattgttatcactcctatttcatgagcagttatgtaacttgccccagataagacttggttatggcacagattctgtgttggagccttcagaccactctacttcccaagcaggggaggaacagaacattaaagattttcttggccttggctttcatttcttcatcgtggttctgaaaggaaaattggctacagtcttaaatgtatgtgtgggcccacgctagaagctcagctctcagtgccagccacactgagccctggtctccctaacttccgggcctttactctgcttgtcattgggctgataaccaagatccagcctagagcacaagaagacaaacgctgcgtgatctcgtgtgtagaacctaacaaagtggaactcacagaagcagagagtagaatggtggttgcctgttggaatggggagatggtcagagaatgcaaactttcagttggatgggaggaagaagttccagagatctattgtgccacatggtgacaatagttaataacaatgtactgggcggggggtggtggcctacgcctgtaatcccagcactttgggaagctgaggcagacagatcacttgaggtcaggagttctagaccagcttgtccaacatggtgaaaccccgtctctactataaaactacaaaattagccaggtgtggtggtgtgcgcctgtaatctcagctacttgggaggctgaatcgcttgaacccaggaggtggaggttgcagtgagtcgagactgcgccactgccctccagcctgggtgacacagtgagactctgtttcaaaaaaacaaaaaaagcaatgtactgtatacttgaaaattgctcacagagattttaaatgttctcaccattacaaaatgataaatatgtgacataatgcatatgttaattagcccgatttagtgattccacagtgtatacatataacaaaacatgttgtacaccataaatgtatactatttttatttgccaattaaatatatttttttaaagtt

SEQ ID NO: 32656 - DNA, 2586 bp, Homo Sapiens
gaggcagccatgactggccacttcatgtgctcctggagaagggcttgcaccagccgttttcaggaaagtcaagcagctgttgactcctgagtctgggtgaatttgtgtgaagagcataaggcgctgtttcttaaccaaaacgcttcctcttgcagtgcagatgggatgtgcttctccacaggaggccccacggcttccccacccctcagaggagcgccgtgcgtgcgtctgtgtggaggattggcagctcctgcagtcggcccttggtcctatttggcgacgcctctgccttccccttaattatacagtcatgagccgccctggaatcacggcagctccggatggatcctggatgccagaatgcagcctcagcacggggctgcaggacaggagtgagcgaggggctgcagagccggcggccgcggtgggcaccatggagggggctgccctgggcagcacgggcatgagtctcaaggcccaggtttgagtaacaggtgttgagagcttacttacttttcctgagacacagtttcctcatctcgagagcacggaaaatcattctaacttcagaggattgttgtgaaagttaaatgagattaaagaggtaaagcccatgacgtgcttagctcgtgcttggctcttggtcaatgccagttagcgctgcattttctcccctctccctccctccttctctctttcttttcttctattctccattcctgttttctcccccaccccactccccaaagctctgcgttgagaaccagatgctgtctggtgggttagggccagaggaggaaaagctgcccgccgtgggctgcacccataccctcttcattccaatgacatgaggggaggggaaaggacagaggtagactgtcctcccctacctcctcctaatacaaatggaattcctggaactggaaaacaaagaatacccccataaaaataagacagtacttctggtgcggtgtaataaaggggaaagtaaccctcaatgtcaggaaactccgcacctcccagctcatatttgtgtggaggaaaagttaaatattaatttggactcaactgaatgtggacacaaacaatggtcaccaagtcccggaacaggttgtgtgagcctcttcaggggttcatccagcgctgttttggagaaatctctatttcaatttattcctatacgttagttactgaaaaacaacagacaatcgcaaaagcaagttgcccgttttgtgttccttgagcccaatcatgaagtgccgtcgtgactgggcctcatgacaaacaacttgtaacaagtaacaacagagctcaggtcccagaccgcactgaagctctgtgagacctctcctcatctgtgcatgaacgagtgtctgactctggagcccagcctgctgcttcccagtctggtggtgaatcctccgtagtctgatggaggtttgctcttgttgcccaggctggagtgcaatggcacaatctcggctcactgcagcccctgcctcccaggctcaagcaattcttacgcctcagcctcctgagtagatggaactacagggcatggactggaactcccaatacccctgacatgggctgagtcaacgtggtcatgaacatgtgacaggaggcagcagaagttgcagagaagagtgaggcacgtttgaaaaaggctgaaaaatgtttctgtccaggcaagggtgtgtgctgaatgactcaaggattttttgggcaacacaaaccaacacgagccgtgtgaggatcaggtgacagctgcccaaaagctgacacaaggaacaagcctggaggagtgaggatgggtgctgtgaaggaggttgtgcagctgggcccgcagtcggacctggtgagatcagaggagggggtgccaccagtctgtggacgaagatgagaagctggaatagagcagaaaacaggaggctgccactctccatctttcccaaagtcactccaggagcaagggtgtcatttactgaaatgacagactctccatttcacatttttcccccaagtgcagagtgcagggaagcagatgggctaaatttttagagtcagggttattaatgtatactttacatagtaaactttccccttttaagtgtgcaggcctgaggtttgccaaatatgtgtaggcatttaatcaccaccacgatcaagatgtagaatattcccactatcaaaaagtttgctgtgtcccttgatggtcatgccccattccacagccccagccccagcccctggagattgctgtctgctttatgttccagtggttttatcttttccagactgtatggatgtgaatggaatcagatgtgattccaaggtgttttatcttttccagatgtgaatggaatcagatgtacgaaatcctatggtagggggtcttctgagtctagctccttttgtttagcgtgatgcatttgaaattaatccatgtctcaggcatcaggagttcatttctttttctgctgagtagtatttcattgtatggatgtactgcaatttgcctatccattcacctgttgatgtacatttgagatttttggcaattatgaataaagctgctataaacag

SEQ ID NO: 32657 - DNA, 2214 bp, Homo Sapiens
tattccttcaatgcctaatttttatgaaactgatgagactaagtttctagtctcataagtcatcaaatctagtgtcatgagcagagaggttgttgagatgtatgtggcaaggacaaaggacagctcttcaacaattgcccttcctgtttttcctgtaggaatcgtaacatcatttacatgttatatcgaaatgggccatgtgtgtgtagctggccttttttttcctaccatgtacttgtgtgttctggaatcagtcagctagaaaatatttaccaagtgtcttaggctttttcactgtagtgtgcatttaacgtacacagtaaagaatgaaggctggcactaaactgttagctaatcatccggtgttccatgtgaatgacagaacacggaataaacctgatgacaccaccactttattttgagctaaatcctcatttaagtgagaacaggacaggtttcaccactgcctcctttggcaacttgagtggtggtgttcccaccgagtttatggctgcaaagataggtcttttctcgtatttatgtataaacaggtaccagttttgattttatttaatcatttcatacattaacatacatgacacatcaaaatgagaaatgcacagtttaaccgttcaacagctggccttacttcaaaagaacactatattcatattaaacatttacagtctttccatctaactttacacatgtcctaaatcattttccagcacttctcacatagaagtctagttttgctctttaaaatcaccatctgtatcacccctagtagacgcgagggtttccccaattacatgctgaagagagccagccaccaccccacctaaagacatccaagcagctccagagcctgcctccgaggccaccccttcgccacggcagtctcgattccaagaactgattatctgacactagtgaaccagcactaaaggctgtaggatgtgactacatcacagttccagaaggaagggggaccatggccaagagaagccctaaatgacagaagctcattaaaaccaagtcccccaaacctcctgaaacatcgttagcaaggagctactgctttcctttcttaaacatgttttgggcatgaccacactctggaagtggtgaactgttacacatttggtgtgtgtgtacataacatcaaaaactactgtgtgaaacttgagaatgtctgattaaagatttcaatgtatatctaaaaactaactcaaatcgttgaccagcactttcccagtatcataacaatgcggctgaccctcttctgccttcactttacaccccatcatagcacattatttgtgcacaactagtgaggtctgtgcggctcatcatccccataaccaagtcggtctgtgttgagtcatatcattctgtgctggttttagaagtcaccataggaaacatgaagtcacatcctggtcaaaaaactgtccatttctcaaaaacagagaaaaacctgagatacgaggcagcaactagcgacacttacaggaagggaaagaacaatgacaacacccgcccagccccacccccaaaaagctgctgttgtgaattaaggcttcaaaagaggacccacattgtagctgataaaactcaagccaggaggatgtttgaaagccaatctgcactatcacttgttccagtgacctcctatgttcagctgccaggaccgattccatacagtgattgtaggttgaggactgaggacgcccctttgctctcgctccattttgatttgctttttccactgaagacacgccggccagcgtttccaaaaacagcttggccatggctttgcactctattcacaactgatcaaaactcaatggtcttctcagctttctcaaccgttttattctgaatattccttcctcactaaagcctctctcagccctactagtaaatgtgaaagtctgaggcaatcatagaaacatcagccccatcgcatgccgaggggataaaagccactaaggaaacaggtttcctgcttctcctcagcaatttgtacctttcttaatcttcccataatttacctccctaggaagtttcctataaaattctgccatattattacattttaccaactgtatccatgcagtgaagcagaaagggcaaaaacatctgctttggctgagaatttgaaggtgctgctgctctgctaccaacccaaataaattcacatttggcttg

SEQ ID NO: 32658 - DNA, 1449 bp, Homo Sapiens
gtcggaataaggttgtggctaggaagatcctgacaacccagggccagtgagtgtctcggaagcctgtgaggggcggagacccggcccggggaggtggagaagctcgccggccgcggaagactaggggtgaggctgctgcgaggaagacccggtcagctgtcccttcccccatcggtcctcttaggggaagtggagatgtgggcctcggagctgcgtggcccgggctgtgcggattccctaaacgccgcacttgcgcacagccccttacgtaaccgtcagtgccggggattccctggagggggtcattctattcaaccattatacacaccccgggctcctgccgccgcgccgccgccgcctcacaaaatggcggcgcccatagaggagaccgcggccgcctccccggccccattttgtgggaggcgagagatctgtcaacatggaaaacctctgctgaggatgcatccgagtttggaaaccccacttaagggatggagcctgggggatcacattaaacggaaaatgccaacgacttctaccacctctacgcgtttttagtttttcattttctcgaaggaagcgccagaagcctgtggagtaattgtaactagagggagaacggaaagctgaggtgactgctccggggacttggcgcggcgccttggtggctttggttgctcttccacgctcccggcagctgaccagaatctcttggagggtctcctgggccacctcggccgcgccagtcgtgcagtgagacttctgtagttttaaaatgccacagtccacggcccggtcggcaccgctcgcctgaatcgtgggctttgggaaccttggaggctgctgctccaggaactcgcggtcggccgggagccggggagcttcgttgctgggagcgggcggtattcgcggactccggcggccctggcgggtcgcggccgggatccgagccggggatgacgatgctgatggagctgatggggcaagagtgggaacggagaagtgcagctttctgcaggctgcgcctcaatcgctaagttccactctccatcctctgccgcgctactcctggcatgtggatcaccaagatacaatttctggtcctgtctgttcttattgatgtcctttacagttaataaatttgattgccactaatcagtctgtatctcttgcaaaaacaccacatttagcatccaagtagagtcagagtatgttttttatgagattgtactaaagtaaccttctattacatttcttattaccatattgcatttcctatagtgggcagcatagagcaggtggatcctgacaaagtaatgttagagatgtgctgacagctttacaatagatattctccaactaatttgacaagatataaaataaaatgtagttcgtagttttcaagcattaatggaaagtgttcctattaaaaaattaccaataacagtg

SEQ ID NO: 32659 - DNA, 1378 bp, Homo Sapiens
gggggggctgtggcgtgggggctgaggaggggctaaggcgggaggggcgcctcatcccttcaccctcccttttcgccatgtgggggccctgagcgccgccccagaagaggtcgagggaatgttgtgggctggggcacaccagcacggcagaaactggagaaagcgagagacgtcgccagggacccagggacctctccctccagttccccgggcccgcccggccctgatggccactcacgctatagcgcccactctgtcctgggccatcccgcgccagcagtgtagcccccagcccgggcgcctgaatgctctccctccggatcgctgctcgggtccccactttggcgaccgtgcccccgagtcctgcttccccggggcctgctctgtatcaggcgcctgcgccttcaagggtacccggcccgcctgccctccccaagagccgagtttgcgctcctcccggaatcgtttgagagaaggacaaacttttggcaggatggaaatctagatgagcctgtccggagcagaacacccctgattagccaggcccaccgccatccacatctgctcggcaaagaaggaaggcagcttgttccagaccttggtgagcagctgcagactgcctgcctagaacagcctccttactccagcctggcagggaaggaaggaacctgacttgcttcgcaggatctggaagctcagccggcagagctgagagccgcagttgcatcctggagcctgatgctagaagcagcttccgtctttgggttcttgctgcctcggcctctgctctgttcagtttgctgttgtgtttttctcccccatgttggggtggtggggtacagggaaataaaatgctttctcccaggcccctaatccttccccatgcctccatcagcctcaaagctgctgacagtcatgaactgcaccttccagccctgcccataagctactcaaagcaaattcaaattctcttctggccaggaggaagggcagatgctccctccttcctcaagcctccctggctcattgatccattttgagggcatttgggggtcaaagttgagaccagattgcttcagtttgtataaaattagcatttcttatcacaccaaggccacacctgttctctggcctcacaaaccagtgaggatgtaaaggtttgttgaggtggaggaacagaagtgaaatgagcaatctgctccatttagaagtcagtcgcttcggctgttcattccactaatatttatctagtacctattctgtgccaagcattgtctctacctcagtttgccacaaatatgaaaaaaaaaaaattcttggaactgtgaggcttcaatgtgttgtggaccaatatacaaataaaccaatggaaaagaaa

SEQ ID NO: 32660 - DNA, 1358 bp, Homo Sapiens
atggcgacgtatccaccgcggaggctgctgggagcaagacctttaccctctgaccgccgccgtgacccccgtcgctccggcttccctccaggcggcagcggaaggtgggagcgacgactgcaaaacggcagcgatggggtgggtaggcaggccgctttcagcgcgcttctaacaaggtggagagaggcgcttcacttccctaccgcccttaccgccgctccgtcttgtctcccaccgactcacagggaggcttgctgctcctccgcggccgttacagagagcggggcttctgcggccgctaccgtttccctggggctaggttgcttcgcagaaggctctggccctgagtccgagggggactgcggggtccaggggcgatgaatgctcccgcaacctccggagcttgtgcgcgtacttcagggaccggcaccacgtcaccgtcacctcctgagtagtgagttcccctctgatgaaaccactggtgtgtttactcaccatccccaccatttttttttccccaacctgatggaaggaagtacataatggagagcaagtttttaaagcacggtcgtgtcgtgtgaacttgctctagccaaattaggtttatagcactttttttggctctcattacctccagtccccacataaacaagagtgaccagctgggtcatccgcaagaccgtttgaaattattgtggcttgggtggaaacttaaaggagtgaagtatctgctttccagaaaaatcgttgtcattcaaagtgaaattaaacttgttttctttgcaataattcgcctttatttccttgtatatctgtaaactcttcacttttttgtaattactagacaattcggacttaaaaagagcctcagcatgtgtattttggaattgtgtagcttcataatgtgaaaattattcttttctatttgagtaaagtacagttaatttgaagtaaataaaatttctatttccattggttgtttcttttaaaaagtcaccttttacttacaaaagaatcactgtaatccagtttacatttatcattgaaggtcaaaagcaagaaataggaagaaacacaagcatactataaaataaaaggtaactgtcatgtttttgaaggtaaggtgttttgacatatcagcagacattgtgtgaatttatttcaactcctagtggtactggtgtaggtagaaaatgttttgcttggttattcatttcatcaaacactctacttcactgtttttttttcacttcaggaaaattcgaggaggaacaacacatactagtgtctttcctttctttctccccgtcttctgcaaatagtcccttcctcttcctgctttctcctccttctcatgt

SEQ ID NO: 32661 - DNA, 2071 bp, Homo Sapiens
atcaaaataactctgactatgtgaagatacggtgggaagatgactgaccgcaagacaggaagagagccctcaccgaggaaccaaattggccagtatcttgattttggatttctcaacctcaagaaccatgagaaatgaatgtctgctgttcaagccacccagtcaatgaaaaagtttggaaaccttcatctagaaagtggtctagcaaagtgtggtccatggatgagtttgatctgcaaactgcttgttattggttcatgacaaggtctaccaattgcattttgagagctcagataagcagagagcaatgcaatttgtcacagaaggatgattatgtatatgcactgtcatgtctatttccatgcctaactcaaaggagacacaaggagaaagtgagctcagcctggataaattggagattgtgatgacttctaggaagcctcaggaaagagaaacaaagacaacactggcctgctgctctctgcaatggtgggacccttgtgggataactgttttaggaatgaaggtgtctaccctctctagaaatgaaaatgcaagtttggctgtggttaagtattggatggaggcaaaaagaaactgacatattttcttcttttcaattgtttgattcaccctgaagggcatggctgcttaatttttttctccagagataggtggacagataaagacaggaaagtaacatccacagactgccctctgtgaaggtgacagtgatgaaaggaatgcttgatctgaacactggtaaataaagtgaccgcatatttccctagccaggagagcaatctggctcaaaagaaacgagaacaatgacattactgccaggctgctcctaagcctttggctattctgttcagtgcacaaaaaaaagcagtgaacatagctgtgacctgccttgttggtagtatcacaattctttggggctccactttaagaaattgagacctacctaccttaatccttggggggttaagctttcagactggaatgataactgaactattcatttgcagtaattctgggttttgtgcatattttaaaaaggaataccgggcttgcctatattcattacaacgtcctcccagctttcaaatcttccaatacaatgcctcttctctagtcttttaagcacatcctgtgactggatatgattatgggagatttacatgcatccttgtctattgtatcaaaagatcagggaataaaatgcccatcattaaaaccccaaagtgattggattggcatgaggaatggggatggggctggcatggaagagagggttctgactctgagatttcatgaaatgcaaaacaataggacagctgctcttccataaacagattattattattatttctacctagacagcttgatagcagccattatcttctttctgggtgtcttatcaagttccggctgtgtgcagcatgggtgataaggaaagagaaatgtcacccatgggattgccaaggattatttctatgcactgctgttcagcaacagccaatctctcagaactgagaagaagtcctattgttcacgctgggcagttgctattctgactatcccaagagagcagaaaagggatgtagttgccattgtgcaaaagattgatatttcattactctcagctaaagttctgaaaagcagaatcatcatgaaatatctttgaagagagaaaagacaagggaagaaaagaagaacgaaatgagttcagagctttttagaactgtgagggagtgcgaaaaaagaaaggtgtaatactttcaaacagtggaagttaaaatgccaggcgtgtaagcctcagtgaaattgagcagcatcacgtcaccacgacttgtggtccagctgtttattgcaaagactccatcctgcgttactcatcagaaaatagttaactttgtatctggcattattttaattaaaaaaaaagttaacttactagatttctgtttgtctgtgtttcatacaaggttcttgaatgaaaataatctgttgatatttaacatttttcctttccttctcaatgagaaaataaatgttttattataca

SEQ ID NO: 32662 - DNA, 2961 bp, Homo Sapiens
atgtccgagggctcgcgagtgaagaggaggaaaggctgcgcccgccggtcgcagagctgtcagcaagctccaaaccgcggctgccgcccggagggaagcagacggggagtcggtggcggccgccgagtccgcatgcgcaggctgcaaaggcccttttgggccggtcccgccgcgctaggttggcgagtgggactatttgatcctttccaggttcgccagcgtggtgttacgagaggaaagcgcagccgcagcgtacgaatgggaaggccaaacacggtcccggggagtctgagggaagctgcagggcgcctggaattggggtctcgagtgagccggtaaaaaccgcctcccgctgagcgtcccggaacaaatactgtctgaactgagccgtaagcaagaaacggtcaggagaagctggggcgatctgatgattagaacatttcagggactaccagagagaagtgcgtaattgctctaaggcaggtaggtaattggcctggaaacttgggaacgccccgccccccaccccgactttcagcaaaccaccgtgcccaggaaaaagagcgattgtggaagaccctgtgaagaagagaccaggaaggcactgtggcttaagagagcaaggcgttcctgaatgcagccaacatcaactggtaaacaaaaaactgtgagaacggatcctgaatcttgcgcttaccaggggaaattcaggagagatatgaacctgagcaagatgaggttgaagttactcaatgcggcattaagcctgttcacggccacttcctccggcgtcaccaacacacacactgtacaccagcagtatttttacacggggtatgtgtgttaagtactatcaggtggataattattacttcacctgtatttgctgccttgataccattagagaaactcatgaattataaatagcatagtgaatttgtgattccctgaagatatactaaggtggacttttaaaaaggcttctattccaaagggaactaatatggaggaaatggtttcgagaaagaaaaaagaaaaaacggagtccttgattagttgtggggaaggcaacataatgtaatgtgaagaataaaggagtcagatccaggaaaccccataactattatgaaacatttctaggctgggcgcagtggctcacacctgtaatgctagcgctttgggaagccaagatgggaggattatttgaggccgggagtttgcgaccagcctgagcaacatagcaggatcctgtctctgcaaaaaaatttaaaactagccaggtgcggtggctcgtgcctgttgccctagctactcagggagactgaggcagaggattgcttcaacccaggagtttgaggttgcagtgagctaagatcatgtcactgcactccagactgagcaacagagtgacactttataaaaaaaaaaaaaaaaaaaactaggtttttgaacttgcttaatcaaagaatttgtttaaacttttaagatgcgttgtcagattatctttccctaaaggaataatttctattcctatcagctgtttatattcctgcctagtcaccatcactagatataattgattttcagtttttgccaatctgaggaacaaaaaatgacccttatatgtcaaatttacagtttattttcaaggattttgggattctgatcaaattttggtaccttcatataaaatttggcttttatatcacatcttgtcttctctgctttccaccctcttttatgttgttttttggcttctggccgcatgactataatctccgcttttgtattcacatcaccttctgtcatttttgaccttgcctccgtcttacaaggatccttgtaattaattatattgggcctgctgagataatccaggatattcttcctactcaagttcctcaatttaatcacatctgcaaaaactgccttttgctatagaacaatgacaggagattagaatgtaaacatatttgggggaccgttattcagcttaacacaatacgtcccccttcatcaggtggagcttattttccctccttccttgagtgtgggctggacttagtgactaacttccaaagaacagagtatggaaagggaggaggagagtaacttcatagtacagaaacctggaaacactgtcttggccaggtggtcaaagttaatatcatcaagtcatgttgatagcatatactcccaatatactgtgatgagaagggcaattcacctctgtggtattctcaaaacctataacccaatctagtctaaacatgaaaaaaaaaaaatcaaactaaaattgaaggacattctataaaacacctgatcagtattcctcaaaactatcaacgtcgtggggaacaaggaaagattgaaatactgtaacagaccagaggaaactaaggaaacttaattgatgactgaatgcagtgtgctgtgttgaactggatcctagagaaaatagacattagtggaaaaactactgaaatatgaatagtctcaagtttaatagtagtgtaccattattactttcttagttttgacaaatgtaccatggttatgcaagatgctaacaatacagaaaaataaggggtatttgggacctccctgtattatccttatgcccttacttgaaagttgtttcagcaatagaagtttatttaaaatattgtgaagggcctgagtatttttaaatcaactgcagtgactctcttttgtgtatttgtgtacagatgagtttttctgcatcgaattttatctcctttccttgcagaagaaagagaattagccctttacagagataacagttgcctaagccagctcttttctcctctttttgatgttcttctttttctctcagtttgaaaattgtaggttatttgagtttttaaaatgtctattgctacatacacattctagttatattctagtccaaacaatctagtaaaatatctaaaagaaaaa

SEQ ID NO: 32663 - DNA, 906 bp, Homo Sapiens
ggcgggctccgacttgctgaccttccccacacgcccggcaaccccggctcccgctggcgggcagagtccacgcctacctgttgtgcacaggtgaagccagactttcccgtagtccaggaggaagaacggaccacgctgtttatcagccgaccctgtgccccagtcagccccttctcggcggactccagcccttagggtcaagacacctagcccctcgaccggttctcccaccggcttctttcgcgatcacattgctgccgcgaccaccctcgggatccccgagcgctcaactcatacagcggccctggtgcgttctccttcccagccaacaggcagcccagacacagccccctcgcgcccggaggtgtccccgctccctggatccccgactgcctgcctttgggggtcctcctcagctgagcgtgcgtcccggtccagcaacgttaccggctgctctgctaaccctagcagagtctggaattgccggcggcggcgacagcgaggcattgagggcctcctttgttgcccaggccggagtgcagtggctattcacaggtcgataatgcaatcatggtgcacactacagccttgaacttctgggctcatgtgatccttctgcctcagcctcccagaaataagaagaaaaaaaaggatattaccaacaatggaagaggaatgcagagtggcaacagctccaagtggacctggcagactatgaacactagaatcaccaaggaaacatggagctatgaaatggcaaaaggctgtgtgaaaaccctgacgctttttggttcagcctttaaaaaccaaatgaaaactcaagagatacaagaatgtggttattttgatgaacaactcacaaactagttgaattaaaagaaactggttcaaatgaacacaaaccta

SEQ ID NO: 32664 - DNA, 3108 bp, Homo Sapiens
atacccatagttaccactgggagcagggtgggccgtttacactcctcatcctacctcgccatcaccttaggaagcagccattctccttgtctttactgtagaggaggaagcctggacagcctgcagttgaggggacctgcacaagctcacaggactcttcatcaccatgacaccacgctcaccgcaaaataaaaatgatcaaacctgtcatgatgtcagcagcaccggtgttggtctttgtgggaaagaaaaacacaggccagggctgcagcacgattgtgtctgcccagctcttgcagcctggagaacaccgttggattccctcccacacatgctcccaggctgcctgcctgcctcacttacctgctcagggtggggcttgagggtggcccctgggaagagtaagaactggccaagactgagatgtccttccctcatttaaggtaccgccttttcccttttcccgccatcctgggtgcatggatacttgggattagaaactggactggaaatgtaatctttcttcggtttggggctgagaactggggattagtaggattttgagtttatggcacagccttttcttacaccatttcctaaaaagcagttaagattacaccaggcacagtggcttacgcctataatctcagcactttgggaggctgaggcaggtggatcaagaccagcttaaccaacatggtgaaaccccatctctactaaaaatacaaaaattagctgggcgtggtggcacgcatttgtagtcccggctacttgggaggctgaggcaggagaattccttgaacccgggaggcggaggttgcggtgagctgagattgcaccattgcactccagcagcctgggcaacagcaacgaaactccgtctcaaaaaaaaaaaaaaattacagtcatctcccagaaaaatcaagaaggaagaaccttggaggttcaacctatagaagatatgttctcatggaataaaccaaaaataatttttattttctaaaaaatcaagaacagaagtctctcaacatttaagttttacaaacaaatagaatctgagccactgggttaaacatgacaaacgacacacagtaacaaatattgaagacatcataatgccaaagcaacagaagcagcaccagaaatgttgctgaggccaccatttaattaacgcaagttgaacatatggctttggttacatgtggttccaggccagaggcatggaagtcagtgtttgtgggaaagccaggaggaaaagctcctctccccacctccaccttgtcactccaggttctggtgaccccatctcgggacacggcctcccatttcactcctgcaccaaccccactcttgtaacactgcacatgcaagatgtgagcatcttcaaagtacgaatattgccttcttcattttagaatccatgatgtgcttgtggggagaatgaatgaatgctcaaacatgaatggagagagacagagaggaagtgcaggtctaaccaaggaaaccttctttcctagaaaatcgttgatgagcccggaaagagttggctgaacaacggtaacaattcttttattattatttaacttattaagttattagaaaaagtaaaagagtgagtcgaggtttttggattggaagtagggacccactgagttccctccaggattgtggagtttcttttacagccacatgtggataagaaactaagggccacagaccaaatgacaggtcggatggcaaccctggaaaagtcacacagctcagcctgttggaggaagaggagcagtagaacctgtgtggagcctgacagaacccaagatgccattcacgaaccgagaggtctttcaagatcacacacagttctacgacacagacatttcgtcttcttgccactcagtagcggggcccatccctctgtgcctccaaggagaaagaattgtgccatgaaaaatggaaaactcctgagaagctgttccagcgtcaggagagcagcagacaagctggactggggaagattcttcctgcaagacctgcagagtgtatgacacataaccagcacccaagaaatgtctaccgaggaattaatgaatgagggtcccatacttcctagccatgctgttggcagggattaacatcattgcaattctctgggtagaccttgggaggtttaaaccaaccagtgacccctatcatcctagctccagagattggcttagggatagtcacccaatgcaggccaatgcaaggtgactttgccaggggcttctgggaaagaagtttcctttctctgaggaaatgtgaatgaggacatccataactcaggttgtgtctggcagccatcttgtgatcatctggcaagacagcccaagaataaagccgtcaccatggagactaagaagagacagaaagacactgggtcttcattgtctcgtccagctgttcatgaggccttatctgaagcccacgtgacctccggactactcacttacatgagagaataaagctcttttttgtttagaccaaataaatacataatacaattacataatcccttgattcctttttatgactgagctcagagactatattttgtcattttaaatcacctttgtcttacagtttatttaactgaaacaaataaacaaaccaaaacacgccagtttttcactcctctgtcaaagcctttccaagatcactaagcttgtgatgtcctgggtgaatgaagaagtaacagtgttttcaacaacatagaagcttatttctctctcatataaaagaaggctggagtctggctggtatgggagatacagcatcatcaaagttttatcttttcgtcctgccatccttagaatatggctttcatcttcaagatcacttcctaagctatgaggatgcaaaggtataagaatgacatagcggactttggggactcggtgtggggagaagttgggaggggtgagggataagagactacatattgggtacagtgtacactgctctaaaatctcagaaatcaccaccaaagaacctatccgtggaatcaaaaaccacctatacccccaaaaccactgaaataaaactaaaaattaattaaaaaaaaaaacaaca

SEQ ID NO: 32665 - DNA, 1643 bp, Homo Sapiens
tatttggagataaaaatgacaaaggagaacctcctgaacagcatccagtttgcttttagctttagccatctctctgacctcagtgctgctggactcagttccaagatctaactgtcaaatgctttaggggaaacgggaagagaagtccctggagtaacccatgtgcgcagcctggcactgttttcacttgcctttggaaatgaaggtgcagaaaccatgggaggaacctgatgaaatgcctggtctaacaggaggatgcagagaaagttatgaagagaggatcctgaggaatttgctcctgggccatgaagatgggaagctgagtcagagtgcagttcttcacccaatcccacagccacacgtgcctgcttgctcacgggatcttcccactctcctcgggaaggcttccgagctgcttcctcaggatgtcctgtgatagcagcctgacctgtcaaagccatgcgaataccatctgttcagttatataacttgagatctgggaagaattctcaacaggcaaggtttcactacattgaccaggctggtcttgaacttctgacctcagtggcttctagaagagtgagtctggaaaatactgcccctactttcaaatgggagaaagcctcccttgtactaagtttgcaatcattagaaaactgttgatatacagcaaaagaaactaccatcagagtgaacaggcaacctacagaatgggagaaaatttttgcaatctactcatctgacaaagggctaatagccagaatctacaaagaactcaaacaaatttacaagaaaaaacaaacaaccccatcaaaaagtgggcaaaggatatgaacagacacttctcaaaagaagacatttatgcagccaacagacacatgaaaaaatgctcatcatcactggccatcagagaaatgcaaatcaaaatcacaatgagataccatctcacaccagttagaaaggcagtcattaaaaagtcaggaaacaacaggtgctggagaggatgtggagaaataggaacacttttacactattagtgggactgtaaactggttcaaccattgtggaagacagtgtggcgattcctcaaggatccagaactagaaataccatttgacccagccatcccattactgggtatatacccaaaggattataaatcatgctgctataaagacacatgcacacgtatgtttattgtggcactattcacaatagcaaagacttggaaccaacccaaatgtccatcagtgatagactagattaagaaaatgtggcacatatacaccatggaatactatgcagccataaaaaaggatgagttcatgtcctttgtagggacatggatgaagctggaaaccatcattctcagcaaactatcgcaaggacaaaaaaccaaatactgcatgttctcactcataggtgggaattgaacaatgagaacacttggacacaggaaggggaacatcacacactggggcctgttgtggggtggggggaggggagagggatagcattaggagatatacctaatgtaaatgacgagttactgggtgcagcacaccaacatggcacatgtatacatgtgtaacaaacctgcatgttgtgtacatgtaccctagaacttaaagtataataaaaaa

SEQ ID NO: 32666 - DNA, 565 bp, Homo Sapiens
gcaccctctccaaaggctgccacctccaggaaggacacctggacaattcaccagctcactgctctgcccctccccgctctgcccctcccccaaatgcctggccctccccatgcaggacccgcacagactgggtccccttcccggggctctgagtggtgggggtgacgagagtggaggagctgctggggccctgtgtgtgtgggctggggacaggggagggcatcctggggatggggatccttgggccaggctgctagtcagtggccccaaggcagcccctccccactgcttccccataggcagaggcagccgggaacctggcagtggtggcctttctacagagcctggagggtgcggttggtgcccaggccccatgcccagaagtgctgcctggtgtctaacctgaaggcgtcctgctgcagtataagccattccttcctcccatgacctgctggaggggtctcaggcatgaccccactgctggggctgcttcccagcctgctctcatgtaaagcctgaaggcctttgttgggcaggacggcaataaagtctctgacatcccctc

SEQ ID NO: 32667 - DNA, 2429 bp, Homo Sapiens
gattgctgacacagcagaggggttcaaaatatctggcaattcccaactgcaatattgaggacttttaaagccatatgtaaaagcttcctccacccctctctttataggcctagttaacccagcaactccccgattgggggaaataaaatttaaactctagagataaatggactaatttgctgtgatgcagatcattccgtgggctagtctgtctcctggggctggcaacaattgctaaaatccataagcatgactggtggtaagagtcagtgaggaaagccacaaagctccatgctgtcatggatgctgtttatgggatgcaacggtgaggatgggatggttaatatcgtctgttccctcggaaaacgaagtgttgtaagcgttgctgcgtgaagtctgcccttcccaggctaaaaactgagctttctgaaaggcaaatgaatggtccccctaaccatgcagagagagattccactgaagccaagagagagccatgacatggacccgagagccaaatgtaacagcaggacctaacactggagctcagaaggaagcagaagacacacagaggagcaaggagaaagcaccaaaaggggcagcagaatcaaaggagggagccctgcagggcacagcaagacgcctggggctgcggggtccgcaaggtgcacaggagagaggctcagagagctgggaagcagacaggaaggagagaagcagaaacaggaggacatgaaggaaaacctctgtcaagaaaggctgctggggacaaagatttggagccactcactctccaccgtgacctcctgggaaggcctctgtgcccaattttggatggctgtacttgctataattcatctgtgtctacatctcaatctcccaggaatgattcagctctctcaaagaaacaccaaagaaagagcttccccttctccactccctacctgtcttctacaagagaggaagagaagtagctcctctgcaggtgaagaaactaaaaccttgaagtcaagagaccttcccaaagttcacactgctagaaaagcacaaccagaccttctcacactgccacagtgaacagagagggtatgcacacggttcattagagtcctcccaggatccctccaacctaccctcccattgccaggtagttcttggcactggcacctggaattccatcattaagtatattgttggtcataaagatttgtccccagttaaactttgctataaaaatggatatgtgcatttgctgcctatcactgtcatagaaatggtaagtttcagaaccctccgggcaactgagctgagtgctgccctttattaaagatgatgcctaattaagaggaaattctgctgaggaaggggtagtgcactacagaacacactagaactctggcacagtggagaaagggcagtaagcaggggagtaagaaaaaaggaccgcctgaaagagaggggagccgacgcctatgttctcacagctttatgattttgcctagagctgatctttaatggacacatagcattttgaaatgtatggaaaatcaggttcaagctgcttagcccaaagattaaggcccccacccaccgcccaggctcatctaccccgcttcctgtctcctaggcacatcataagaatcctcgatactaatgaaatggatgatttttcaatccctgcaaaactgcttcaattatttcagcctgtgtgtctgaaatgttaccaccctctgctccaggtcctccgttacccgtcagcccagcatccggctttgcttccataaactagtctttaaaccctgccccaacaagcaaggatccatctgctcccctcaactctcagagcactcagctgtgaccctgctccaacaccagcccgcctggcctgagtcaccagtgaaacaaacaggagatgctatcacctgatgaccactcagcaatgaagtgctccagggcgcttccatgtatatcttgtccctggatatgatcaataggctggaaagctaaaaggattttgcattttttggcaccccccttccacagataaaaacagaggttctgggaagatacatgaattcctggcctgtatgtggaagatactgtcgttttttgtcgaaccgtaagaaggctgtgtcagctctcgagcaatctcactattcccctgtggttgccaagacagctgaataaatcatccatacatttcagtcctcttggagtctacctttcagtcctgctattttcctcctcttgttacaagcttcagaaagaaggtggctctaaactgaactctgactttgaattcttttatacattaacttattcaaatgattgaaagtagattgtttacaaaaatggatacaatagaaatgtaaaaggtcagctccaagaaaaaaatagaagaaaaataaaagtgaaggtcaagaccaggtgaa

SEQ ID NO: 32668 - DNA, 1537 bp, Homo Sapiens
tctcggctcactgcaacctccgcatcccgggttcaagcgattctcctgcctcagcctccagagtagctgggattacaggcacctacaacagaagacaatccataaatgaccatgtgatgggtgctccatcaatgatgaaaggaatgaatgagtaccttttatggcatggtgggaggtggaggtggcgggagcacttgaaggtggaggagattggtacatgcctgccccttgtgactgaatctggaacaggtgcacgtttctgcctgcttcgtgaagcaaactgccaaagtcgaaccaaggccagtcaccctgcagggccctcatctcttttcttgagagagtccaaagactgtgggactaggcctgctggtctgctggtgttctcccatctctgcctctgagcaccctgctggaaaggctaccctgagatgttggtggactggatctctgatctagaaaaaactgctcagaggcaaaagctacaagaggcacgttctggcatgaatgatactggctcttccggcccccagattgcagatccacagagaagactatgggtgaaagatgaccccaggtgtagaacttcatcttaggaagagatcacccaaccagagacttcgtacacatcatttggttgattttagttaacgagagcatggaagatgttggaataattgctaacaatcctggccggggaaattaggaagcccatcctctaattaaaatttaatgtagaggaactgaccatcatgaatgaatggactcaattccttgagaagaagacagataatttcaaactatttcctagaacaagtaaaggcactcagttgtacagagtgaggaggtttccctaggcaagattggtggcagcctcaggatgtatggggccggaggctgttatattctcactgggcgagagaaatggatagggaatgataatgatgaatgagttttctttcaaagtactcactaagggaggctctccattttctttttcctcactaaagtgcctcaaaatgcttaaagaattccactttggaattacttccgaactagtttatattttctatcccatgactctacaattgcacctcatttttaaccaaaaaatcatttcctgcttcatcaaccaccttattcatcagacgtggccctggatgattttcggttgtttccaaaaatgaaattcaacctcaaagcttaaagatttacgctatcgcagctcctgaagaaatgtgccatcaactctaaagatgaagaggagttccagatatattttggtattgaaaaaaatttacgtctcattattttgccatctcatacattttcatatcttcttctcttatattgctttgaagatgaaactcagatctgtataaagtatttcaagcatattaaccaaagagttgtgcttaatccagccacctgtaactaaatttctgtctctatagtgtctcggaaaaaagaaagaaagtggaaaggcaggttgagaaaaaatagaagtgcatataattaaatcatgaaagagtgatggata

SEQ ID NO: 32669 - DNA, 5046 bp, Homo Sapiens
acactctgggcccgagactcctcgctcctcctcgcctcgcctcgcctcgagtctctggctccgacctctctactcccttgtttctgacctgtgctccgtggtgtctctgatctccccctgccgccaggggaaaggaggaacatccctcccaggactcactcacacctattctccaactctgcctacctgctcaattcacctgatgctctgccagtggattgctgatgtctctacattgattcagatttgcacccacatctgaaaatggtcagcaggcagggaccctctgtcaccacaggtggaggaagaggagatgaaagagccttgtctgacaccctggagactgcaagaaggcccttgccagatgtgggcccctccatcttggacttcccagctagcctccagaactggaaactacccagactgtgtcctctccctcttactctcctaaaggaagacaaggaagacaatgacaaatggcgtttgcagcaaagcaacaccaacagccaacttgatgctcaagagagaacgctatgcctcttcctcatggtttccagtgctctacacattctgagaaacttttctggtaataaactatagaaacaatgagactgtgcccatgggagagaccccatctctacaaaaaatacaaaaattagccaggcgtagtggtgtgcacctggattccccagctacttggaaggctgagatgggaagatcacttgagccccggaggttgagactgcagtgcgccatgatcacgccactgtacttcagcctcagtgacaaagcgaaagcctgtttcaaaaaaaaaaaaaagacagagagaaacgggctggggacggtggttcacacctgtaatccccgcactttggaaggccgaggcaggtggatcacttgagatcaggagttcgagaccagcctggccaacatggtgaaaccccgtctctactaaaaatacaaaaatgagcaaggcatggtggtggatgcctataatcccagctactcagaaggccgaggtgggagaatcacttgaatcccaggagacagaggttgcagtgagccgagatcgcgccactgcactccagtttgggcaacagaatgaggctccatctcaagaaacagaaaaagggaaatgatccctgaaagtacactcttttgttgtagtttttatttgcattttgctaacgattagtgatgttgagcaccttttcatgtgtttactggctatttgttttctttttttttttttttttttggagcgatacctattcaagtcctttgttcatttttgggttgcttggtttttgttgttggtgttgagttttttaggagctgcctctatatcctggatatcaattccttatcagatatataacttgcaaatattttctcccattctgccaattaccttttgaatttgttgatattggttttttgatgcacaaagttcttaagttttcatcaaagctaatttgtctattttgttgttattgttgcccccatctttggtgtcagatccaaaaaaattattgccaaatccagtgttgggaagcttttgccatatgttttcttctaagagttttaaaagtttaggtcttacatttaggtatttgatccattttgagttaatttttgtcgatagtgttaggtaagagtccaactttattctcttacatgtggatatccgttttttccagcactatttgtttaaaaaacaaaaatcaaacaaacaaaaacctgtcctttccccattaaatggtcttggcattcttgtcaaaaatcaggctggagtgcagtggcatgatctcggctcattgcaacctccaccttccagattctcttgcctcagcctcccaagtagctgagattacaggtgtgcaccaccacgcccggctaacttttttatttttaacagagacggggtttcaccatgttggccaggctggtctcgaactcctgacctcaggtgatccacccgcctcagcctcccaatgtgctgggattacaggcatgagccaccgcacctggtctgatcaagtttaagactgcattgcaccacagcactgcagcctagacaacagagcaagaccctatgtcaaaaaaaaaaaaaatcatttgatcataggccaggtgtgatggtacatacttataatccgagctactcaggagggtgaggtgggaagatcacttgagcccaggaattcgagtccatcctgggtaacatagcaagaccatatctctaaaaaaattagataaataaaaaaaataagaaatcacttgcagaccaggcacagtggttcacgcctgtaatccagcactttgagaggcctaagtgggcggatcacttgaactcaggagttcgagaccagcctgggcaacgtggtgaaaccccatctctacccaaaatacaaaaaaattaggcaggcatggtggcttacacctgtggtcccagctactcaggaagctgaggtgggaggatcgcttgagtccaggaggcagagattggagtgagctgaaattgtatcacttcactccagcctgggtgacagagcgagaccccgtctcaaaaaaaaaaagaaaagaaatcacttgctcatgtgtgtaagagtttacatgagggcctctgttctatttcattggtctatacgtctgtctctatgccaataccactctattttgatgaatgtagctttgcagtgagttttaaaatcaggaagtataagtcctccagctttattccttgttcatatttcaacttttgtgataatcatttccttgcttttctttatatttttatcacccatgtgtgcaccgcctacaagcagaacctaacaggacagtaatggaggctagggaactggtttgcagagtcccagcccccttccaacatcagagagcagagaaaataagaatgaatttgaagctgaaagtcaataagcaaataactggcattatctaccccttttttctatgcagtagttacacatctatccatcatatttgaataataacagcttcatccctttgcctaatagatgcaactgtcctttgctcaaatgaagatgctctggggccctcccccaaaagcagagacgcaaagtctctacagcaatgggatccctttccgtgtgatgtgaattctcctagttcagccacatgtcctctagagtattctgcaacctaaattatgaaggtcatcaccaacaacaatcctcataaaaaataagagaaaagaaggagaggaaagttaaccaatatttaaagagtgtatataacaaaacaagcaagagaaaacatgcccatggcttctacaatccttgcttctatatctggtcagaagctgatattataactttcctcttccattacccttgaagggttcaagggattctcgtgcctcagcctccagagtagctgggaatacgggtgcccaccaaccaccacacctggctaatttttgtattttttttagtagagacagggtttcaccattttggccagactggtctcgaactcctgacctcaagtgatccccacccaccttgcctcccaaagtgctgggattacaggcgtgagccaccgtgcctggccccaaatctgtattctttatttttattattgttattattattattgttgtttttttttttgagacggagtctcgctctgtcacccaggctggagtgcagtggcgcgatctcagctcaatgcaacctccgtctcccgggttcaagcaattctcctgcctcagcctcctgagtagctggatttacaggcgcccacgaccatgcccggctaatttttgtatttttagtagagagaaggttgcaccatattggccaggctggtctcttggccaggctggtctcaaacccctgacctggtgatccgcccatcttggcctcccaaaatgctgggattacaggcatgagccaccacgcccggcccccaaacctttattcttaaaataaaggtttcaagaataaacctttattcttgaaattagcattctacaaattggaatcctcagaactgtattgctcttttttttttaacttttactattggacacggaaataggacatggcacaccagggagtcccctgggttccagacatagtcctccctgcctttcttttggagttagaacccagcttacccttggcatttgggatcagtcatcccagaaggtaaccccttttttgccctgagctcaggtgagagccttatcttccaggtagtggaaccattgcagtatctcctcgtgaaaggattcctcccttagtgtggcagatgctggcagtgccctcccatgttcctgaagctcttgggttcactggatgaacttccagctgccagaacctgcagctctttatctaaggactctctctggccactggagcctgctgagcaggctgaaagttctggggaattatactcccagccacagcaaccttcagccaatcaccgatggggatcggtgcgtaaatagccagcttcctcatccctcaggtcctgcagcaaacattatgactggctccctgagttccttcttaggattaagctctggttgtccacgtgttttgtttgtttgtttgtttgttttgttgttgttgttttgtttgtttttgagacagagtctcactcttgttgcccaggctggagtgcaatggtgcaatcttggctcactgcaacctccgcctcctgggttcaagcaattcccctgcctcagcctcccaagtagctgggattatagccatgtgccaccacgctcggctaattttgtatttttagtagaaacggggtttctctatgtcggttaggctggtctcgaactcccgacctcaggtgatccacctgccttggcctcccaaagtgctgggattacaggtgtgagccaccgcacccggccggttgtccatgtttttaacttgcttgataacacaccctttatgagcctcctttctttccaatgtcagtctcccactggcttgcttggtattcctagcatcgcttttcaaataaacacttgtgtttctcaaa

SEQ ID NO: 32670 - DNA, 2012 bp, Homo Sapiens
gatggagggttgaatgccaaaacttcgtaatcgtagaaaattctggaaagccgccggcggggcaaggccacgaggatcctcctcgcagcaccgcgccgcgcggggcccaggggccgcgctcacgcccgccgctcggcgcagacacgagtgcccccgacttgagccgaacctctagccgatgccggcgccgccgccgccggggatgcgtaagccgactgggaagcgagggggggaggcggcctgcgcggcaccgcccgacctggccgcggcgggctgagccccaggttccggaggaatgctcgctccccgctggagtcctaccagcccaacacggacctgagccgcgaccacgcgggctgcagcctgcagcacatcagctacccggagaacgcggacgcggaagcaccgctgctcagcacccccgaagaaacacggaatccagagaggcacaggcaccgccccggcgcgcacagctgcactcagcggcttccttcctactacatacatacataggagtgggagccgaggaccacttgttgcttgcggacttcctctagcataaaagatggaaagaaaacacacaccgaagcaagggaccaaaggaacagaaaagaaacgcagagatcataggaaaactgcaaagaaatacttgataatatcttccaaacgattagagaagacataacattcattaagaatacacatatagatgtatatatacgtatgaagaaaacctgcttgatatcacacagtcaggagtcaactgagttggggctttgaacttaggtttatctgatgccaaagtttgtgatgctcttcaaccatttagggtaccgcagagtgtggattttgaatcacctgcatcagcatcattttaaaatatagattctgtggtcctgaccaggtctctgaagtcagaatatgaagtggagctaggaatctaacttcttaacaagttccctagatgcctaagggtatccctgaatgatacagttttgtttgaaagactgaaaagcccaaagctggcccttttgggaaatagcagtaaatcattgatatgtgaaggttcccagcaggaggatgaaaatttacaggaattcggaggaaaatatttcagtggtcattactaaaacgctcagagtcagatacattcagcatcataccgtaagtcccgttagtcaaagcataaacaagcgcagggcctggcatggcttccttcaagttggctgactcagtctgggaggattcactcagcaagaggcagaggaaccaaggcaggatgaagacattgcctgtgctcgtgctgtctcttaccttactgactgtcttctcagagacctccccgattttgacagagaagcaggccaaacagctcctaagatctcggcgacaggatagaccaagcaaacccggattccccgatgagccaatgcgggaatacatgcaccacctgctcgccctggagcatcgcgctgaggagcagttcctggagcactggctgaaccctcactgcaaaccccactgtgacaggaacaggattcatcctgtgtaaggggatcaggaccagcctcgcaagcattttaatagacaacaagctggataatgtcgaagcaagacaaggctgcttctttcacttgtttttaaattgcagaaatggatgtcttcagacctcgtgaactgtgggcatatcaaagattgccttggaaatggcaaatatatatactgcttcattttactaacctgcatagatcactaaaaccaatagcttaaagcatagacacctcccaaaggtcttcccatcagtttgcaagagtgggaacaaccagaatcttacctggggttgatggagctggaactcccagaccaggagttggggcaggctgcctgccctaaggaatttggggaatccttgttcagagtagtgaagcataccacttggggttgctgagttgttttgtcctctatttttttcctcttcttttctgccctaataaacattggtattaaattta

SEQ ID NO: 32671 - DNA, 524 bp, Homo Sapiens
atgccaccccctcccctgcatttcccgggatcctgggccactcccgggatcctggctgtctccagggaggaagaggccgcggggctgagatgttgtgcctatggacgtggctgtgtgtgcggagagctggctgattcaggccagtgttctgggacgaagagaagcccacaccccaggccatggcccctcttgactccacctcctgggggcccagggttggatgggaagctgaatctggccacactcgttctggaactcccttacctctgtatctttgcccctgctaggcgttgcccacccgtctctccccacctgcagcacagccaggcagcggctggcagtggtgatggtctttgcgtggggtcaggcaggtatgatgccccactctgctgcttggcggctggtaggccttgggagttctgccttatctctgcagctcagctttctttcctatcaatagtaacacccacttcactggattattgggaagattaaatgagatccactaagcagtgcttaccaca

SEQ ID NO: 32672 - DNA, 2399 bp, Homo Sapiens
ggtggcttccaaggcgactccgtagtggatgcagcgccggacgccacagccgaaaaacagaatcttggaactggtttagtacaatccaggtcgagttccttgttttttatccgagtggccggcaggcccatgtgctgtcttgtttttaacacatcagctcttgccggaagccgctaagagataaaataggaagtcccacccttcccttagagaaggaaaacggagagccgaaggagtcaatctaaattcgatgagcgcgtcgggctccaaggcaggcgctgtcagcccgggagggctgtctgggatttctagagggtcccagaacgggttcttcccaggccgatcccgcctgcttcctgccccgtctctccacccgcctcccgccctctgtaagggaccccgagggcggcgccggaaacacggagaaggcccagaacggcgcgggacccgagaggcctacgttggcaaacgcagcccgctgcccctttgctcgcttcccccgggcctggagtggctcctgtcgcttctggcgctccgatttcgagaaatgactttcagctgtgcaaggcgagaatgctactttagatgatgagaaaaaatctctcgaatggctcccaaaatgaggtccttgtttaagaggccacaggaagccgctagccgaactctgataccaaagaggaggccaagaagcggactgtggcttggtgacctgtttggtattgccaaattttcagcttttattaaagctgaaacaccttggctgtttaaaacgttcgacaaggacttttttatgaacgttaacggcacagcatacgggttttttggaaaaaaaaaaaggcaggacttcagcccgtccgcccccttgtgcaggtccattcatgaacctcgagttagaggcctttcttctgaaactcagaatctagtagggaagacctgtgtagacgaataaaaataaatacatcacagcttgttaagtgctgtgacaaagaggcagtgaaatcctgcttgaggtcatctgccttgctaaagaggtttgactatgttgtaggcacagggttagggttagactctgtaatgggaagttatgtgatcagatttctgtttaggaagatcactggccaggcggggtggcttacgcctgtaatcccaatactttgggaggccgagtcggtggattgcttgaggctaggattttgagaccagcctggggaaaccgcgtctctactaaaaatttgaaattagccaggcatggtggtgcgagcctgtaattccagctacttggaggctgaggcgggagaatagcttgaacccagtggcggaggctgcagtgagccgagattgcgccactgcactccagcctgggcgacagagcgagattccgtctcaaaaaaatcattccaacgagtggataaagaaaatgtgatatatatgcactatggaatactaagccataagaaggaatgaaataatggcatttgcagcaacctagatggagttggagaccattattctaagtgaagtaactcaagaatggaaaaccaaatattgtatgttctcactcgtaagtgggagctaagctgcgaagatgcaaaggcataagaatgatatagtggactttgaggactcaagggttgaaggatgagactacacattgggtacagtgtgcactgcttgggtgatgagtgcaccaaaatctcagaactcaccactgaagaacttccccatgtaaccaaaaaccacctgttccacagaaactatcgaaataacatttttaaaactttactatttctgaataaaatttacatacatttctcagaaaaaaaaatatttggaattgaggtatctaatagagaactgagttaaattattgccacttaaaaacacaaagtgatatagccactttatgaattaatcagtcagcagtggctaggttatgcttagtggtttataaccaaatcttagtttataacaacaaatgtgtattgttaattcccactacaagtttataacgacattgctggatgctacactccatgtctctttgtgggacccaggctcatgggacttctgttacctgcattagagagagagaagacaacaaaatatgcactggttcttgaagctttggcccagaagtaaaatatgtcttttacctgttcacattgcattgggccagggcaattatcatggctgcaagtaacttcaaaaggatggggaagtgcgatcttggcatgtgtcagaagaaatgaaaacatttggtgaagagcattaatgactgtctttacaggaaaaaagcaatcaaatagacatgattgcttgtttcagtttcatcatttcctactgtgttacctaaactttctgagccccagtttcttattactaaaataaaataaagatga

SEQ ID NO: 32673 - DNA, 2242 bp, Homo Sapiens
agtgtggaaacgcccactgaggggcacacagtgaggcggccactggctctgtgtccttggggaagccccttctgcggtcccctccattgtctgcgtgacaaagtggacgtagaactcccccatttcctgcccagggcgggtgaggaccctgcacacacacggtgtgtttgtgagctgtgcagagtggggtctccctggcaatggccacagcctccaggggcgctgacacctcccgtctaactggtagacagtttctgcctcttcttgtttggggattggagagggaagtgcgtctggatgactactaagatgaggaggctgaggcctagtgctcctagcgggcttggtcaagagcaggaggcggaggtggtggaaggctgtttccctgcggtgacagaaactccatttgcaccagcttacattaaaaaaagaggagggagaatatggtcgagtgaccccaggagtgatagggagcactgacggagtttctccctgctctggatagcagatccgctggctcccagcttatgatccatgaagagaacgtcttccccttgggcttcaatttgaagaatcctgaagacgaccctgatggcctttcgcggtccacgtgccccttcttgcactaccgtgatggtcctatccacggacgccttctcttgggttctgtggttggatgcggaggaatcatcgatcctctgtagtggaagggaagggaggacacaccaagaccatgtggccccaagagccgtgagaggagcagaagcctgactggtgcctcttacatgtcactgcagcctcggggggggccaccaggaaaacacctgacatcctgttctctagtaatggtgtggctggaatcattcctgtaccaaataattcacccatttaaagtgtgcaatccaacaatgattggtatactcagagttctgcaactctcaccacaatcaattttggaacatttctatcatccctagcaataaatactatatcttttttttgtgtgtgtgagacagagtgtcactttgtcacccaggctggagtgcaatggcgtgatctctgctccctgcaacctccacctcccgggttcaagcaattctcctgcctcagcctcccaagtagctagctgggactacaggcacgcaccaccacacctggctaatttttgtatttttagtagagacagggtttcatcatgttggccaggatggttttgatctcctgacttcatgatccactcgcctcagcctcccaaagtgctgggactacaggcgtgagccaccacgcccggccagcaaataccgtatctgactagcactttccatttccctccaaccccctaatggtttcttttcccacaataatctaaatgtttaaggaactggtttgctaactcatttcttaatgacaagaattaagccagcacagcctctggtttctgacattctttccctacaaagtcattcatcatttatccttttttaagggacttccttcatctctgtgccttaggctcacttcctgactgtggggatcagctcctctcaccaatggtgagtagggagtacctgccgttaaacctctgtcaccacaggagagagatgccatggatggatgattttctctctgattcttggcattagttcattgggcaaaaattcagcttccagttaagcaccggcccatggaccgggcttggtcctgtttcccctggaagcactgctgggaaaccaagcccagccctgcagggcttcctcctgctgccgcccacgccaggatcagcctcctcttgccgctgcagccccgtcgctgcaccggtttcatcggtctgaagtccagctgctcctccttggcctctgcacctcagcacaggctactgcctctgaggggccgcccagccgtcgtcctcctcacaacctcccatgatcgtggccctgaggtcacctttccattggcgatgaacaatcccattgtcactccccatgggtgtgcccaccggaagctgctcatgggcaggaggggaactgttcaagctggtttttccagcccctaccacagcgctgggtgtgtaggtggacaagaaagtcattacgtatgtaaatgaggaagcgcatgaacacctgagcgtgtgagaattcggtggggtgaatgccactccaaatgtgtgtcaaatatgatgggactgaatgcaaatgaaagtgggtcaaggagatattcagaataaaatgagcaacttttcctc

SEQ ID NO: 32674 - DNA, 1869 bp, Homo Sapiens
atgggaaatgtagtccagggcagaaaagcggtcaacccagccacgatgcgagccaaaggattcttggctccaagcctggtcctggctgttagtttggaactcatgcacccagatgctaactcgccctcagaatgcagaggggatgaaacactgaccggacaattcaatctgtatatgggagataaactggaggggaagacgaatggcaggagggtgaagaggaaactgaattactgtgcaaacacccgccactcaaatccgggtggttactgcagagtgaataacgataggtactatttcgtgtaaggcaaagtcctttgaaagggctcctagagcgtcaaggcctccacctgatgaatgaatgagtcaggcaggcccagctccacttcacggatgggaaaactgaggtacgaggcctcgctgaaagatgcgaggcagagcggagaaccagaagcaccacttctctcaggctgatgctctaatctcggctccccccgcccctacaatggcgtagacggcctccgccgcccgactcacacacaccctcccccgggaacggcaagtctcctcgggttccaaggacagggtcaaaagacaagaggcccgaggcgctcccgccgtgatttgcagccagataccgttgggagcgcagccagagagcgttgggagcgtgcgtacctccagcccaacatggcggcggcagcggccgcccccgaccccaagccctccctcagggcccgaggcttctcctcagggccttccggtgggcgggaagacagcgcaaccccgccaggcctttctcgtcgctgcgcctgctcgctgaaggagtcacctacccgacgagactaacggctgcggcgcggaagccccacagcccgccgagaaccaggaatacgagagccaggcggcgcggcggcgggacctgtactgagcaagaaagaagatttcaaagtaatttattgttatgagatccgtgcttttatcttgtctcagactcccaatgataggcacatactctcctctgtacatttaatgaaactactaaaatatttcgatttaaatcttccacctatttgttttctgtgtatcctacctgttcccgaccttgacattttcaaagaatacaggttacttattttgttttttggtggtggtgagtttttttggggttttgttttttggtttttggttttatttttggagacagggctttgctgtatcgcccaggctggaatacagtggcgcgatgatagctcactgcagcctcgaactcctgggctcaagggaccctcctgcttcagcctcccgagtagctgggactacaggcctgcgccaccacgcccgggtaattttttattttttgtagagatggggtgttctatgttgcccagtgtggtctcaaactcttgggctcaagagatcctcccacttctgctgcccaaagtgctaggattacaggcatgagccaccgcgccgggacagttattttgtagagtgttctttaatttggatgtacctcatcttttatgtatctttgggaggaataccacataactcatgtggtttatcccatcgagagacacacagtgtcaatgtgttccattcttggtgatgttaacttttattacttagtgaaaataattctaagagatttcaccactgtagagtgaataaatgaatatgtgggattcatcaatgaataagtaaaaggatgccaactggcaaaagaactgagttgggaggatggcttgagcctgggaggtcgaggctgcagtgagccgtgatggcaccactgccctccagcctgggtgacaaagcaagaccccgtctcagaaaaaattaaataaataaataaatacccagcacctg

SEQ ID NO: 32675 - DNA, 1730 bp, Homo Sapiens
tccgcggtgccggccgacccggaagcatgtctgtccctagcggaggcgcgggtgccgtgctgagagcgcctgcctgtgcgccccgagcggggctgggactcttccaagatgcccacgttcgcacagagaccccggatcgcggaagctcgcgtctcgaaaggcctgcggtctcacgccctgcccgtcctgggttcacggtttttcatcacctgcggctgtcctgcgatcgaccacagctgtgcaggaggggcaggaggtatctgttgctgcagttaccggaacctttgccaggactagtacaggaccacgggctggtagctcagggatgtctcgtctgtgagttacagctgcacgctctccaggaaagaaggaatttcctcttctctggaaaccccaccacacagctggtttctcattggtgctgcttgcccattccctgagctgtgactgccagaggagtgggaggttggtggtgcctccagcccatcaggggcaggccctgggaccgcctgggaacaggaggactatggcacaaaccgagtgagtgatgggagcaacccgcagggctctgccacatccctgtcttccttcactgacatgaaacgcagaaaaggcagctttgccacaacacaggagcacgcaccgaatgtggccgcccagggctctgtccttgaccctgttgtccaggactgtttaccaagggctgacaggcactgagtgccccgtgcacctggccagacactgcactcatgcagcggaaaggacagtgaacgagactttgtccctggcctccaaaggcttagggcgtagtggctgtcatgaggcacagtgacaagggccaggagggggacctcttagggggccatgcagtgatggaagccagaaggaatgaaggcctgcagtgaggatggagtggtcggcctgaagccatctctagcaagtggtcaggacgctgattgttctgcgcaggttggaggtaggtggtgagtctgagaaaggggccggaaagactccccagcaactgctggcaaagggtgaagggcacgttcccacaggattcaagccagctgcctttggaggggagacgggcactcagtttaggcgctcctacagcagggtcagcaagacaagcaggttgcggcaagggtctgcgcactgctgtgtaaatgtaggggcatcggggggcagaaagaccaggggagaagtgtgcatcacccttggggttaagggacagttgtctgctaggtgttgcttcctggagatggctgaaaagccagtccagtctgcagggaccaggccaccacccacctgatgtgggagcatttcccccaatccctgctgggctgctgaatctgggggacatagggaagctgaggctggtgttctgagtagtggcagagctgagccacagggcatgtctgaggtcagccccgagcaaaatggaatagggactcagggtgggtcaggtaactggaaagcgggcactgtgcacgcagcccttgaggggagccagggtgggtggggatcccccactgtgtgcagaaggcagcagccttggaagcagggtgtgctcctcggtgtggtcgctcgataccagaaaatgactctaaaaactgaagagtgtttgagtttcattcacacaaaacatggacatcatctgtgaggctctgtcccagagagacagggccatccctcatgtctgttattgggttgtagataaacaaaagtat

SEQ ID NO: 32676 - DNA, 510 bp, Homo Sapiens
accgcggggccgtgcggacggccagcactcgactttgcctaaaaaaggaagcagcaggctgaggctgaggagctggcggcaggaacaagggagagctgtgtccccgccggcgccccccaccccccctgccggggatcttggcagtggaggtgctggctgcgctccacagacctcagacctcggctgggaccagaaatgcctggtgcttccgcctgggcccggtggggggactttgggtccccagagtgcaagctgtaccacttcgaggggcctcgccaggccccccagcccccagtacacaggggctgccgtggagatgacgctgaaggccgcagccgctggaggacctggggtctgaccggaagctggctgcagaccctgcggaggcccagctgttgttttcacggctccgggaccaggcggatcctcagccaagagcttcccaggagagccctcatcttcaacccctagtggcgaccagagccagcccgggcaggaggggaaggaagg

SEQ ID NO: 32677 - DNA, 1698 bp, Homo Sapiens
gccgctgctgctccagctctccggatctctccagcagctgctgctccagctccgagcacctcttcttgtactggagaatctggggatggggagctgatgagtctcactctattgcccaggctggggtgcaatggcacgatctcggctcactgtaacctccgcctgccgggttcaagcgattctcctgcctcagcctcccgagtagttgggattacagacccacaccaccatgcccggtaagtatgagatcttcgggctctgccccgacacagcctcatacgcctcactctttacacacacggtcacttgccccgcgcactcccgagccctttccagccctgacacacagctgggattctctcttccgatccgcggtcctgaacccgctcccagggcaggggaactccttcgtggcgaagcagcaagtggcgaagcagcagcctctgcgctgcctcatctacatagaagtcgccctgtccgtgatgtcaccgacagtgccttgcccagtccccgtctgcttttctgccactcaactgaccaatctgctgccagagccgccaagaggaagtgacgtctgcctctccctttttccctcccgcccctgcgtctgttctctcccaaaaaagctggtccttagcctgtgttaaggagcaacctttcggtggccagatggagccggggcatccttcttcaaataatggcttttaattcgcagactagaatgtttcggattacagaagaaaccggttctcttcacatctttatccctgtgatgcagcattccacttgcaattggaagccgagagaaaccatgtttatgaaagtaaagaggctgctcagatgactgcaaaccagccttccttactggttttatcactggtaatgttataaagacagttgtccagtttcatgaatcttgtaggttttttttttttgattttttttccaaaatcagtattgtagaaaactatgctgccccagaagagatgattggacactctcaagcgtggtgctggactttgtcatctcttgcacagccatctccacaccttagtgcttacctcatgttagttttttatattctgcaaagacgaaatcaaaataatccaaatttgacacaaatacctgggctacatcttatttgagatgtttaacaatgtctggatcatcttttcttatatattacgcaggaaacactgtgaagtaagcaaagttggaatgcccaagtgaaagaccatttgaatatttacaagtagatttcagacaggaatactacagggtggtcacaggataacaaattctaggcagcagatttacatgacttgaggctgtgggctgttaagacgctgaaaaaccagggtgtggaccaagctggctaaggctgagtggacccaatgtggtgctggatttgacggaggttttacctaggccctcattatatgctcattaacatactaaatcacacacccgccagtgccatgacagttctgagaccaatatttgatgtaaaaatggatggcaccacagttccgagaaatctccacctttacccaggaattttcatgaacattccactccttggttaaagaaacccatcaagatgaaaccccagaatccattgttctctcttgggtatgcctgaactcccctttcttgagtgtgtactttttgctttgcaataaatctcttctttcacta

SEQ ID NO: 32678 - DNA, 2370 bp, Homo Sapiens
agcttctcctggccccctccctgtgtctgttcctgtccccgagcctctggcctctgatgccttcaggagcttgggcctctcctgctccactcctaaacttcagcttctcagcaaacaggcctcccaagtccctgcttctccctctcaggccttgctaacctcaccagctctagggcctggccaggcctcccaggctccctcctccaccccaaccccttctcactcatggagcccttgggactggtcgtgcatgggaaagctgaacctttttccgcagcactccgaagccttgtcaacaacccgcgatacaggtggccgtaacctttggcctggggcagctgcaggagcgctgcgtggctttcatagaggcccacagccaggtactgctcccttcatactcctcaccctacgcaccgcattctgctcctccctgacccatttgccggctcgcaggaggccctccggacccgaggcttcctggagctgtcggcggccgcgctgctgcccctgctccgcagcgacaagctctgcgtggacgaggctgaactggtccgcgcggcccgaagctgggcgcgcgtgggcgcggcggtgctggagcggccggtggctgaggtggcggccccggtggtgaaagagctgagactagccttgctggccccggcggagctgagcgccctggaagagcagaaccggcaggaaccactcatcccggtggagcagattgtggaggcgtggaaatgccatgccctgcggagaggggatgaggcccggggcgccccgtgtcgccgccggagaggcaccctgccccgggagcatcaccgctttctggacctgtccttcaaatgatccaacgccgggactcgcagggagccctcgacccgcccagctgagcctgccccaaactacagctcccgaagtgctcggcgttcggagcgggcttccgttcccagcgtgcccagtgagccgggcgccggaagaaccgttgtctgccacgcgcagccccttgtgcgggatcaagcccgtgtgggcgaggtggggtcgggccgggcagggcttgggctgggcctccctgagggggtgaaactcgaaaacgaggatttccttcgttccacaccctgactctacgccctgcccctgggcattgtcgtctactagtctattctgatgactcccacatatctatctgttcagctcagctccctctttcttttctttttctttctctttctttctttctttctttctttctttctttctttctttctttctttctttctttctttctttttctttctttctctttccttccttccttccttccttccttctttctttctctttctctatctctttctttctttctttctttctctcctctctcttttttttgagacggagtctcgcactctcgcccaggccggagggcagtggtgccatctcggctcactgcaagctccgcctcccgggttcacgccgttctcctgcctcagcctccggagtagctggtactacaggcgcccatcaccacgcccggctaatttttttgaatttttagtagagacggagtttcaccgtattagccaggatggtctcgatctcctgaccttgtgatccgcccgcctcggcctttttttttttttttttgagacagagtcttgctctgtcgtcgaggctggagtgtagtggtgcgatttcggctcacttcaaactccgcctcccgggttcaagcgattctcgtgcctcagcctcctgagtagctgggattacagacatgcaccacaacgcccggctaattgttgtatttttagtagagacgggggtttcaccatgttggccaggttggtctcgaactcctgacttcatgtgatccgccagcctcggcctcccaaagtgctgggattacaggtgtgcgccaccatgcccggcctcagctccttctttcattccagacctgcccccctggagatcgctccctgaatgcccctcagacaccacaggctcggcgagaaattgatctccccagcttttccccagctctgcccccatcgtgtttctcatttccgtggacacccacgccagaaacctggatctcatccttgccttatcgctcttcacacctgccttaggtctctttttaccttgtaagagaccttaagagacctttccagttggttcagttctctcagccccaggttcaacctgtcctgtctgacacgtctcacagccttcctgccttcactccagcgccccctcaatccatttcccacagtgcagccagacctgtttttgattgtcagtcctatggggcttaagtcctggaacatcccattgacctccaggacaaaattcaatctatttcactttcagggc

SEQ ID NO: 32679 - DNA, 1176 bp, Homo Sapiens
atgcgagttgaccgggcagccactgaagccctcacccgggaaggcagtgagctgtttgcttttttacagcgaagggggtgtgttgtgggatgggggtgggaagctggagcaacagggccaggaggtgtgggagcgggagacactagagtaacctatgtgcacagcctctccatataccatgtgctgttgcgcctgctagtaatcgacgacattaggcaagagaaacagcggctcctcaagtcctgcccaaagaccgtccagaaaccccagcctcccgtcgccttctcgccgcctccgctgggagccgcagatcagtccaagttgacggacaggaggcgaaatgtgcaaatgtttatggtttcatctgtatggaaaaggagctctggtaactttggccaagacttttcagtaggaaatgcttcaaaatacaaagcaagagctattttcaagaaagaccttctaaatttatattaggattaagcgtctgtaacgttgccactcgtcgctgaggctcctggtttcagcatgtctccttggttcccagccagctctgggtgttcaggtagcagctgtggctgggagtgtctctccagtccacattccttggccatgaattttgcagccctgtttatctgatgaagacctcccagtagtgaattgctcatgacattgtcacacagaccttaatgaatgatatggaaagatactgaatatttttcctcccggaatgccaaccaagcttcagtgtcccagcgccttcattccagctgatcatggcaaaggcttggtactgagatccagtgagacctttgtcctacaaaaaccacattctcactggatgcctacaagtcctctctatgggactgttacccaagcctgtttacagaattttcaacaattacatctgcccatttgctgagtctcacttctctgcactaattgttgacttcaatttatatttttaatgtacaaatgctatcaccaacttcagtgcatgaagacctctctttcttctcttcaaacccatgactttgcttggaataacagggatggctttatggcatggctttctcattatttcatgtgtcttcattttgctttcccaagccagattgtaaattccttgaaagaggagaccctgaaaactagaaatacctatacagacagatagacagt

SEQ ID NO: 32680 - DNA, 2824 bp, Homo Sapiens
atgtgggagatggtatggaaagtcatccaaggaaaagagtgggatgggggagaaagagggggcctggagtgggggggcttgcgggtagttgatatcaaatcccggtctctctcacttccgctcaatcggcttttggccaaagacgagtatcttcttcctggactgccttctcccaccccaacccagacaccaaggggacgcgacagcggttttgggacgctggctgatcatctgagaggaggcgatcccggccccgctgggcgttcaggatcccgatctggatgccgtccaccccgccccgccgggggctggggcgaaagcggaacaagtcggcggggctggttgggccgcgacctccggggcacgtggccgcagacagtgcccgtgccggggcggggaggcgagttctccctgcggccgcggaccctggatggtggcgtcgcccgaagacgcgcctcaccggcctgggtggggttgccttttgccctcgaggctggcctaagcgctggggggccgctggctaaccctgaggtagatactcgggaaatgggtggaatagggaaagggactcagcccttccgcccttttccccagtcgaggcccgcgtcactgccctgtgggtgcagacgcctccagtgtcactcccctggatttcgcttgggcagaagaagagattgtaggccggaccccaacgccgaagccctgaggcttctaatgtgaggaaaaacacggaatgacaagtgtgggaaagagcaagcactaaattactgtcagaaaaataaacggagtagcacagtgctgctcggtgatttacgggggcaattagtcaccaccccacggcgctgctgaggacagcacggcagcagacaagtcaggcccatgaggaagaagaggctttgcactgctctccagacaacttttcaaacaacaagagaggatatttgagcacattaggttttgtgtcttcattctgggtacctactcttcatattattctaccaacttaatacataaacatatttttagcacaatatgaacctgttctatgtgtgtttaaaagcctccagcagcaacttttttctctcccactgtccaaagttgggttttccccatcccttaaaaaacaaaacaaaaaaacctttcttcactccaaattgtccccctggtgtgtggttttggtctttctcattacttcttgcatcttgctacatgttctgcatttgctcagagccactgggtgctaaggaatttggtctgctgctcctctgggaaagtttggtaagctggtacaaggaggtgatgaacaaggctaaatgaaaatcatacataaacttcccaatatttgtgaacatgttctttaacataccatacatagtttctatgtatatgtaacatagcaaaacaaacttgctaaggtataattaattggtatgcatgccttcataaatattcaccatcagaagaaacctagaatgaaaggttgtgaaagaacccaggaatgagaaagactttattgactaaaggccatgtctatgtaggggcaacaatgaagctgtgggtgagcaaatgaagcttcatcaggagtttagtatccttatgtagcattacctaagaatgctaccatagtaaatttctgaagtactttacctgttacaaagaacgtttgtaatctccttttcttatttgatcttgccctggctttagtcaggaacacctgctcagttagaaatgtattcggtgggtatgtacgcagttggagaatgtgccccaacacacgccgcctttggcctgtatgttggagtcctagagaggcagacaatgttgatgagcttggtaccagcatggtgcgccattcatccggacacaatttctgataaagagggtcacaactgggagaaacctcagattctacttgcttctcttctccacgttattagactttttttcccctcttgaattttataagcacactccttttaaaacaattaattaataacgagcactgggatttgatgtagaattgcgtatttgtaactgcaatggcactggttttcaactaccctgtaacaaggaagcaattctaaccagcaaaagaggcagacgtgtttctgtgcaacatcacaggcgtgtgaaattgttcagatattgagatatcaggagtgatataaattggaaatttaaccaaaaatattttccatcagtgaacaaagccgattttaaagtgcctcttgcatttttcagatctttctctttctttttcccaaagtcacattgtagtttctgataaaggaacacactgggaaaactaagcacatatttaatcaatgaaatttaaggtgtaaaaattctgcatttctgacaaatttaatgttcacttttttcttgatttaaatagagcattctaaaaatattacccctataggggataaatttttatatgcatgttatttttctttacaaagtgtgggctagtaaagagtgaaaaagaccttggctattgtacttatttcttgaaagaaataatagcatcttaatgactggattcaaatctctgcttatcacacaacttccgtacagttcaaagagaggacttggattgaatgaaaacagagagctggggcttcctacattcccctgtgtttgtgttcatacagaatatttatgcaatattctgacttggccataatctgtaattcctgcctattattctcagttgcaactataaattctagattaatggttataattttggtaaggcatacatgaaaagttatatgttcctgcttgaaaggaggatcattaaatattcattattaccactcaa

SEQ ID NO: 32681 - DNA, 1569 bp, Homo Sapiens
ccaggcatcctccgcggcgggccggaccgggccggcggaggggagcggaagcccaccggggctggcccgccgctgacccgccgcctccgtctgcctcctcccgggctctgggcccagcgcgcccagatgccgggcaggacccctccgcccgctgctggaacaccaatagcagcgttggagcctctgggccggaggaactggggcctccaccgacacctgcttcttccctcacctcgcagccttccacacctgttgatctgacctctgccccgctgccgcccaggagtaacctaaggcttttggcctgattcgagctcactccgtctaaacctctaaatgcggtgcgaaaaaatcctggggaatgtgccatgcaaagcctgggcatttcaagtgcttttctggattcgcatcaactcctctttacaggcatctttatccggaattcagctcgtcccaaaccccacgtggtgtagctctgcttgtgtttttgaatcccggggcctctttgaatcagaagccctttgtatagagataagtatcctttaggccagaatcagcctccatttttttcgcagtcccatttcctacccgtaatactttcttctgattttaaagccatttgatagagaagggacagggaacagaaccttcgccccccgcctgagcagctggtagactagatatcttccaaacattatctcatttacttccctggagttacaaataggtagatttcatgtccgttgaggggtgagaaagctgaaactttgagacttaagaatcctggccgaggtcagcctcctccgaagcttcatctcttgccaccactttctggtgcacacctaggacagatttcaatccctgagatcccaggatgaaacctatgtttgccaaataccagctactgtgccagaagagatcatggaaccaggtgtggaaagctgcttgagaagaggagccaaaacatcatagttgaaccgtcctggaatagaaactcgccctgaattctttcttgtgtgaaatccaagagccctctcttggggttggatcgggaccctgttcctgtaacaagtccacaatgccagagaattaaagagaaccacaaagctgaacctcaaaaagttagcctggcgaggggaggatgatgagatttcccctgttgtcacataaacaaggaagtaaagggggccccttgtgctctcagaactccaagcatgaaacgatagcaaagggaaaaacagctaagtgtttcctggctgaattttattttgctttcagtttctgccatttcagttcctgttatcgtgctttgaggtgcactgaactgcagcaaacccaggggatccaaggctacgttgaaaagcctttgaccacagtgcagggagcagaagacattaatgacgtgatgtcgacacagcccgcactcaggatcctccaggaaaagaacacagagataaccccggatcgatggtactttttgaaaatgctttattgcaaaagagtggctagggttttacaagggctatgaagaaacatattaaggttaataaagctttttattgagtgttt

SEQ ID NO: 32682 - DNA, 2295 bp, Homo Sapiens
atagctgttcccagcagttagaggaaatggcagccctgggacctggggggatccaagggcagtccacgtctccatgggaagatggcagcagctctgtggctcttcacagtgaagtgacgacctgttgttaaatgtttaacagaagccaaacttggcttttaggggacagctctcctgccagccagccagcttgccaaaggaatctttcctgtgcacagagagcacactgggcttggagacattctctgcacagtgggatttggtgagaatcttaagagtttctgttcaaggtcagtttgtctctctcagaccgtggcaccaaggaacctgctgctaccctacttgatggggctgaacaggagatatattccacgcttcacaattgccacctttcgggagcggcttcaccagttacctccaactcccgccagacccaattcagagctgccatcaggtcagacctttgcctgctcttggcaacacgtccccctgtcctgctcctctgcaacctgcccctctttttcttcatgtgctgtgaaggcaccatgtggatgggtgttcaacttctggattggggatgcacagagcctgagggacacactttgcaaacctgcaccttgcacttttgggttctggcctgcaaggtctcctttattcttttggaccaaggctgtccctgggagagggcagccgccggcctgtcagagcaaatcagcctcaggcggtttctgcggctctggtatttgagctttgttttccctctctcccgggaagaactcattgaaatagtttctctgggaaagacaaagcgtctcgcccagatgctgaaggatcacttggtaactgcctgtcttggtttcccgttgtgcccatgaaggcgccatcagctctaaagctgacctgtggttccgtctccaaacagctaacccagacgtcacccccttgcagccagccgcacagcctgagttggagttctggcctctcctagcagtgagtgacagtgttggaggggccttggacaccttgggtaattgctaactaaatatgagcagtaggggaaggtcttctggtccacggcagagccaacggggcacttcctcttctcttttctagtcagggtagaaagctagaaagaatcctaaaaatcactatccaagtccccattgtgtggggacagaggcctggcctgaagcctaggctggagggttcagtcggaagcagaagccgggagactgcatgagagggttccttccagcttcaccaagcccgtgctgcgcgggatgaagaaagtcaagcctgtcttccagtggggccctgaggtgggggagctggaggatagggtggcagcttttttatcagctgtccccaaaagaggcccttctcccagttgccacggaccaaagctcctcctgggagctccagcctgtctgttcaatgtttgccttgcgccttttcctggtgaggccacccccggcaccatctcaggcctcagaaggacgacctcactgaaacagcccttaggttgggaaagaagcaagccctccgcgccccgtccaagtctctcaactgggcacgagcacacacagacgcccaggccctgtccctgcgccagaatggccgctcgcgtttccaggcacgatgcccctttccatgagtgcacagagccctgggctgagctgggggccgagctccacgctctctgagcagctctgagcggcacgccaaagaaggtctttcagatgggctctgggatgtggaaccatggcgtccagccctagcgtcgactccacactagaggcaccctgactttcgcccccttcttacctgagtatcagcttacttccatctggggactgaatatggggcagattccagaaaaaggaggttggggcaccaaaaccaacaccaactctgccaacggagccagcacagctatttgtctccaaccacaggccgcaagggaagttcacgggctcggcacccccaggtcccggatgtaaggatattgcccgttagacaaaggaaaggccccaagtccacaactcatgtttgtgagcttaaccttgtcctataaagcactttggaacaggcccaggttctcccaccatgtacagctgccattgacctggacagtcccgcaaggtccttcagtggaaacccagaagggagagtcactgcatgtgaaccctaagggttctggaggtcaaagttgctgtgggtgacaggcaaccaagactaagggcaaacttgaaacataaatgagttaaaacccacaaaaataagacagttttaaat

SEQ ID NO: 32683 - DNA, 397 bp, Homo Sapiens
atgcatgaatactttaaaagctcaaacaagcgtccctgggaagggcgcacgcacgaaacttcctccctcccttgcatcctcagggcccgcccggcaggacgactgagcaaggccttggaaaaccggagagattggagcgaatggggaggaattgaggggaaaatggagatagaacctgaaagagccccaaacgccagaacctgtagctccccaagaataagatcttccagaagaactagacccaaaactagccgttggggaacaccgaaatccttggaggagcaacatccgcatgaccctctgtgttcctttaggcaaaaggacttgcttccattgtttgttcaattgtttgtgtttgttaaataaataaaacgattttcatgtatctttgaaatta

SEQ ID NO: 32684 - DNA, 4118 bp, Homo Sapiens
actggaaagttcaagagtgtctttgctggctctttcttgaatatttccaaagccttggaagttacaggttttgggtgtgggataaggaaaaactgaatgatagagcacaggtaccgctcccctttcctcatcatgcctctctgtcgcctctttgttcatagttgaccacggcatgtttgagaatttgaacacagccctcactccaaagctccaggccagccgctccttcccccacttgtccaagcccgtggcccccggctctgcccctctgggctctggtgagcctggggggccaggactctgggtgggcagcagccagcacctcaagaacctgggcaaagccatgggggccaaagtgaatgacttcctgaggagaaaggagccctccagcctgggcagtgtgggtgtgacagagatcaacaagactgcaggagcacagctggccagtgggactgacgcggctccagaggcttggctagaggatgaaaggtcagtcctgcaagaaacatttcctcggctggatcctccacctcccataaccagaaagcgaacccctcgggccctgaagaccacccaggacatgctgatttcatcacagcctgtcctcagcagtctggagtatgggacagagccatcacctgggcaggcccaggactccgctcccactgcccagcctgacgtcccagcagacgcttcacagccagaggccaccatggaaagagaagagagaggcaaagttctgcccaatggagaggtttccctgtcagtacctgacctaatccacaaggatagccaggacgaatccaagctaaagatgactgagtgcagaagggcctcctcccccagccttatcgagaggaatggcttcaaactcagcttgagccccatcagcctggctgagtcctgggaggatggcagcccccctcctcaggcacggacctccagcctcgacaatgagggccctcacccagacctgctgtcctttgaatagagcctctgctctttcctgctgagctctgcccttgtcttcctgctgctttctcctccactgcgcacactggccctggcctcaactccgctgtgccctttgtcttccttgtatgaggcaccagcagagagccagtcgtccatcatgggattttgcaggactggaagtccttgagtagttctagttaaagagtctatccgcagaatggctgaaggacttgatgccgttttgagcctaattttctgtaacctcctctgagtgggctgcagcccttggacattagagctcttccactcttgagcttgtcctgtcttctcagtgaattgcagggccaccagctcaggacaatggatcttacaggaattctttttgcctgtcccctacatgcgcctcctcccctgctgttctccctcccacacccctgtcccttctctctcctccttgatgggtccgatgcccctggcctcagcgggaggaaggctggatgaggaatgatgtgtttggcttgatgacaggccatggcctagaaagccacacaccctgaccacagcccagccatagctcctcttggtcccaggacagtgcaggcccctggttgccatgtttgctctgcccctggggtggaggccagaggagatgcttaccaggcctgagaccttgagagttcacccagggtttgaacgctgccacccagggttcccaaggtttctcccatctggtcagatgtcgaacacaaaatgtgggcattctgcacggaaggaaagatcaggcttctcttgctgagtgtgtgaagacagggagagccaggccccagcagatgcggcctagcacactctgatttggttttgtggggagggcccaggaacttgggggtggtcttggcattcagagctggtgctaaaaacccagagcagaagcagggagaagggagtgaggatgggacagagaagagcgaccactggggatcagaacagcttttcaggggccaccttgcagcctaaaataatgccgtttcagggcctgggcctgctgtgagagccagaatgaagcatgtacaagattggaatgtgagaagaactgtggggggaaaccagttttaattaagtggaagtgctttgtgcttgtgctgaagttgcctgggcctcctgcagctctggacctcactggagcggccccgccctgcccttgcctgcctttcttttatgctgatgctggtgggctttttcctgcttcaggatccatgtaagggactgaccaggttcatccagccttaactggttcctgcaacccacttttaggtctcccaccaggggcctattgtgctgtcttcctgtgaccagcagatcctgtaagggggtgatcctaattctggggctctttgcagcaagaggagaacgttctttttcttgaacaaggtggccggttccctgggagaaggctgggaatggcacgtccggccagggcaggcggtgcggcatcctcctcctgggattcctgtggcctcccctgttctattcattgtttggcttcccacccataagctctgggatacccagggcttgcttcccagctcttctcatctccaagcctctgctccccttcccaccaccactgccatataaaatggccatgctaactcctacacaactaggagcctcagcaggattgctaggatgtgggttccttcctgcatgcttgcttctgcagctgtgtggccttgccatggccctcccaccactttcccttctaccttgccttccattgtcttccttctcccagaaagccaggtttcaccacgtgctcaccacaaactgtctcccctccctcgtaggagtcactgcagtagggcacctgcaggccctggtagagtgagcagggcttacgtgtacattctttctcactctaaggatgtgatatctgaccctgatgtcagagaggaggtctcaggactagcattcggggtcctttgagtgttcccagaatggtttggggtatcacacaaaacaccagagctgaggatagggatagagtccccaaacacacatcctgggagcaagccacttcatctgagcttcccataccaggagcatggtttgtgctttgatgggaaacctagcaagcccctgcactctggggcttctcctctcctggagcccagggcggctctggcccgatgatatggcagccataggtacaggtattgcaggtgcagcctttcttaagtaccctgcctccactctatagcccagctgctgctggagtccaggaccttagacccaggatgagcaaaaggatcccaccaggttgtccaggaccattgccagggtgaccccagagttcttcagacctgtgtctgatactgaatacagtgccatgggaccctgctccaatctaactgcctacaacctgcccgtccccctgctgcagggatgttgctgctacctcgggaggctctctgagactggtgtctggtcttagatgctgcacatagtacctggtgctagggtctaggggctgcccaaagcccagcaggaacagctactactcatcctgcagaggccttggcccagaccagctttccatccaaagcctcacctggtttccatgtccatctcaacagtctggccttcctgtgactgtagcctggcagccacaccctcagtaatcccgcacagtgagtccagcttctctgggagcttggccttcagttagcccagtccatgagagggcagggtaatgaggaggagtaaaggacctatcttctctgtccacataaggaagttgggaccacaaggtcttttatctccttgttactccccaaccccaccataacctcctactcagcacacagctgtatcctggtagattataaggtgagcttccagaacctggcaggaggctggtgtatccccctgcacagagggaagtgtatctgaatgttgtgtatgtggctgatatggaagacatacatgtatgcaatccatcagcgtttaaagaagaagattggctccagttcggaggaggaggaggaagattacagatctattctgagtattttttagagagttaatatttatatttttagtaattttctggtagaaggaaattgcacaataaaatgatttggttt

SEQ ID NO: 32685 - DNA, 1602 bp, Homo Sapiens
ctcattaactccatcttcagtgatttggccagaacctgctgccagtctgaaagagttgggggaatgtacaagtcaaagatccctcgggcccagaaccaggtcagtgtcaaggtcactcctaagaacactgagatgaaaatagcagaagagcccagcccgagtcttgggcagaccttggagtggctgagaaaggagctgtctgagatgcagattcaagatcagagtctcctgctcacactgaggcatcttcacagtgtcctggaggagctgcgtgcggacagcgcccactgggaggacgccaggtccagcggagggacatcccccatcagagctcgagcgggctccgaaggcaggggctgccagccggtttgctcaaggggtctggcccagctcctccgaggggaagacagcagacgaagctctctcccttaactggacggagatgacactgggctttaacactctccccattagtctaacctttcactgtgatatttcaggggcagagtgttggaatgggagtcagaaagccagggctctgggttcatttctgccctcatctgctgtgcatccctggatctgtcactcagcttctctgtgtctctggttccttttctgtcacttgggatttcttggtgaggcacacataaggtattggatgtgaacacacttttcgactgaaaacacaaatgtgctctagtgctctggcaagcaccatggcagtaaccctatccttgggaatttttcacaaggcaattgttaaaacaaagaactagatgtgcagtaatggttaccaagtgttgctatggtgaaaattccaacccctgtgtagtgacttagtggctgttttctgtcttcccaggaagccttcccattccccttcatctgataacatattaggccctgtaaccaccctggccataggcatgggtatattaccaggcctggccaatgatataattcatggttgccctaaaaagatgattggcccaatggatggtcatgtgaaccaacagagccagtcaccgaccttccctgagattgctacctggaagctctttctattacactcaggctgaggctgctggtggccatgttcctaccaggtaaagaagacctgtctgcagtaggaaggaaagaggctaatctccaaagagaagtagagagagggccacacaacagatggacagagaggaagagcgctggctctttttggtccctggttttaggtcctagttttgtgagttactcctgcattctttccagggaccgaagccagtcaatttcaccccccaacacagccacacacatcaatttgtttttggttaagctgatttgagcagtttccctcatttgcagctagaatggtcttgaggaatatgatccagatgttcaaagaatcaaagaggagaaatcaatatgaaaatggcatttcattcaatgagggtttgtgacaacaacctccgtaacagcaggcaaccaggcttgtgatacagcagagacactcagttgtgtggggtgctgcagtcataactgaaaaattgtatctgcctataagaaagactaaaacagaaaaggtgaaaataaaaaagtcatggtgtt

SEQ ID NO: 32686 - DNA, 1718 bp, Homo Sapiens
cgggccgcctggccctgggaaagcgtcccacggtgggggcgcgccggtctcccggagcgggaccgggtcggaggatggacgagaatcacgagcgatgtggccctggcgttgagtttgtggctgtggtcgcttcggggccccggtggcgggaccaggggctcgtgaggcaggtcttggtgggtgccgagggccttccggcgtcccaggcggggcgccgcgggaccgccctcgtgtctgtggcggtgggatcccgcggccgtgttttcctggtggcccggccatgcctgaggtttctccctcagccgcccctctgcgggctcccaggtgcccttgccctcgcggtccccggcccttgcctgtctgcgcccccttccccgcccgccgcccgccgatcctctctcctccccgagcggctcaccggctttacgtcggttggtggccgcgtctgggaccgaaccgggcaccgccttgtggaaaaaaaagaatagaatataccctgttaaatcagacatgatacttgcttttgtggagcttatgctttagtgcagaaacagaaagtcaagcaaaaactcaaactatgtaactttaaattggatatgtgctaatgaaggaaaatgtggcactgtaagaaaaaataatagggagttaaaggataaataggagtttgctggatgaaatttatgaagagctgaagatttcaaacaaaagaaactgatgcaggagggtgcagctttggagtcaagaatgaagttctaggagatagagagcaaagaaatggtgggagaggaggtcaaacaagacaaatctctcctctgccttctccttatcagactactcaacatgaaggcaataagaatgaagacctctatgtataataattgacttccacttaataaataaggttacttggtacactggtcgacaaaaccttgaaatgttgatgtttaagggctgttgattgctggcagcaaagaagtccaactgtgctggtacccgagatagcgtctccacattttcttccaggatcatcacctttgttctaaatagctcccacatagtgtgaacagaagtcatatgttttagattttctgccttggcacccaggaaaccagtatgattgagtaaacatattaaacttcctctgcatttccagcctgaacagatgttgagtacaagctgatccacctacgttcaacctgagagagtccacatccacagactgtttcatttccctttttcaatttacatagaagcatagattcttgctggcatatacaaatgcgccatttaaggcaatcaaaaatggttccacatctcatctgatttccacaattgttgctgtaacgatggactactgaggagagagacaatttctctggcacatcttcccacattttagcaacatgttcatggagagccaatattcagtaattacagcccaattcctcacaatttcacaattcgctaacaatatgcattttcacaatgtaaagctgattttcctttaaccaaatcaaacatgaaaagatagctgcatgcaatgggcaatctagatcattagaagattgatgtaaaattagaggacactgagactggaatagattgcaaacttcagggagctcagaaaacttgtaaactctacattttgaggaaatatgttgtcgatgcttttgcaactctatgcagtaacttaacaaataaagccttaaagtaactta

SEQ ID NO: 32687 - DNA, 2403 bp, Homo Sapiens
gtgctcgaggctgagggatgctggtgactcccggggtccccagccccgcccccatcggacgcctccacaggcggcgcaccctttccgccatccgcagagcaaggctgcctcggggcggctcagtccggcgcttcttaccttacctccgtctcatccttaactcaccacgagcgtccagggtccacatcctcctaaatggccactcgtcttaatctcggcgtcaggacccacgcggggtcaggactacccctccgcttccatgactgtctcctcgcggctccggctcccacggagcgacccctccgggttttactgaccccgggatgttgtatcctggaaactgcagttccacccaggggcttgatctgggttagtctgggggcaagtgagccgccgattctgtttgggtttttttttttttttttttgagacggagtttccctcttgttgcccgggctggagtgcaatggcgcgaagtcggctcaacgcaacctccgcctcccaggttcaagcgactcttctgcctcagcctcccaagtagctgggactacaggcatgcgccaccacgccaggctaattttgtatttttagtagagacggggtttctccatgttggtctggctggtcttgaactcccgagctcaggtgatctgcccgcctcggactcccaaagtgctgggattacaggcgtgagccaccattcccgggcgctgtttgggtttgtttttttgtttttgttttttacgttcacagcatggacggtcagtgtgaagatcccagctgctcgggtcctagctggaattcttccattaaaaaaatctgtttgttatgcatgggttagttcacagaggaatagctggataagtgctggctttttccccgatttacccattttcaacctaataatgcaggtttttgaaataatgtgaatggttactgctggcggatgttcacagggacacaccggattctacagacacatctgatgatctagccacggctgtcactttccccactgccgcgttgtccatcactaggactttactgccaatccttgcaagatagtggggaactagaataacagacatgggacattaccagttacaaccaaagacaagcttggcacatttgactgtcctcgttcctgctcctccgtgcctggccctcttcaggcttctcagctcctggggagcggccagccagggagcatcagctggtgggagcgatggggttgtgggatggcacaaaaaaacaccaagcgccactcagaaaggaaatgccgaatgcagactctcactcagtcggtgtgggggccaggaccctgtctctaccaagtgtgcgggagctgcccctggccgggagctcccagaccccactgcagagccgcagctccagttgtcccaggggcgactactcaggtgtccatcgccatgcacatgtgacacagaaaagggtgaggcgaggagggggaacgctggaaattgtttcacggaaaagggcgaggcaagggaggggaacactggaacttgtgctttgggtaggcgatagctaaggattctctctcgtctgggtcacggagattgtgcagccacagaacacctggtgtcatcagggcctgagctcctcccttctacaaagacctctggtctgcaggcctgcaggtacagtgctgtgggccacaaggcactgcctgtcgtattcatctccactctctagcacatctggcctcacgccacccccgggaggccggcaggcagatatcagctccacttcccagataagcaagggagccaggtactacccagggtcttgggggccacaccgctggcgagggacaggctgggcctggcagacagcactggcagtcggtgaagtgcccacctcagtgtcagcctcaggtcctgaccctggaggctgctgttactgagctgtggggaccaggatgccctaccatgatggagacccaagcctctctcatgatgactattcccaagggcactgcagaggggaggagctgtctcctcctccgtgtggcccacgcagagctggtgcaggtctgagtgagctcaccaagacaggccaatcccagccccagactccaaagcatccccaagaggtcagggagaggctctgtgcccctgaccccaaggatatgcacaggtcacaaggcagagcccccgctagacagcaggagcaccctgctctgtcagcctgcttccccaggacggaggccctggtggtaaggcaggcaggtcttgagcccccacaagacagcaggatacaacataaccctttttaatctgaagtgtagacttcatcctcacgttagaaaactccatcttttttttaatccctaagttctttatcaaacctttatgttaaagatataaataagtctcatac

SEQ ID NO: 32688 - DNA, 2444 bp, Homo Sapiens
agacctgaaggctgcttccgctaacccgggctggcgctgctaacctcacccaacgatccctgctgtcggaaaatgtccagaggcaccatccctgctatgaagagggaatgccagtacaacagccacaaggggtcttcctgtggccctcaaacaaaaaatcactgcattacatcagcaggccggacgcggtggttcatgcctgtaatcccagcactgtgggaggccgagacgggcggatcacgaggtcagcagatcgagaccatcctggctaacacgactgcattggagagaaaggcgccgggacagaaaagcctgagataaaccacctgtcattcttggagaaaaggatgctgcggctttcccgatttggttgatgagatggaaaatcaacccttacaggaaggacatcaccaattccggaaaggatgctgcgccagtcatgtttccgcactctgtgagacgttgaaatctccagaagttgcccaaggttttcaagctgaacacaggagaaatgactctggatctctgaggactgttttcctcaataaggagctgcaatcttggctccaccaccctccctccaaaacatctcgtgtgtctggtatctggttatattgtggcctgacagagaagtttctttcggggccagtgaattaaaaaaaaaaaaaaaaagaaaagcgggtcctaccaactcattaatactttaatactttaaatttccctctttatagtaggttgaaatgtcagtatctcttaagaacaatggctgaaccaaatgtttcctcaaaactcacattttttcccaccatttcagaagctgcctcaggactaagctttgatttttttttttttttttaatctggcccaaattcctatctaaggggcctggggagtcatgcccaacaaaccataaattctcatcagatgagttttatttaaccctatatatggtgacttgctttccagtctgactctggcatgacatgtgacaaagaagaaagtcaaaatattttaccccaaaacatgtttctttgccatattttgaaatggtcctgcaaagctgtgctttgtgggggaaaatatgcatctgtaaagaatctctattaacacagctagatctttttcttccaggccctcccaatcctgaagagactgagagtctagcattgttttaaaggtctgaataggaaacatttgtcatctatcatctctaagggtagccattataagacttcaaaagaaccttttgaagtattataatcttttatcttaacctgaacatgtgcttcctattgatcccaggtcttcagacaattgtgaactcaaccatttgtcaattagaaaatgtttaaattggctgggcacagtgtctcatgcctctaatcccagcactttggaagaccaaggcgggcagattgcctgacctcaggagttcgagaccagcctgggcaacatggtgaaaccccgtctctactaaaatacaaaaatttagccgggcgtagtggcatgcacctgtagtcccagctacttgggaagctgaggaaggagaattgcttgaacccggcgggcagaggttgcagtaagcagagatcgtgccactgcactccagcttgggcaacaaagtgagactccatcacagaaaaaaaaaagaaaatgtttacctttacctatagcctggaaatccctgctttgagttgctccatctttctgaaccaaaccaatgttatttcttaaacgtatttcattgatgtctcatgcctccctaaaatgtataaaaccaagctgtgccccgaacaccttgggcacatgttctcaggacctcctgagggccgtgtcacgggtcataatcactcatatttggctcagaataaatctcttcaaacattttacagagttgactcttagtcaacatgtccatacctgatgagatgcttcatcaaaattctagtggactggctagttcagaaaatggaccagccaggtttgcttaaatgcacccctgcacaactatctcactcctgcttggagccggctagatcaggagacctgtccctaaactaatgtactccatgtcttaagtctttttgttttgttttgtttttgtttttgacagagtctcagtctgtcacccaggctggagtgcagtggcgtgatcttggctcgctgcaacctccgcctcccaggttcaagagattctcctgtctcagcctcccaagtagctgggacaacaggtgtgcaccaccatgccctgctaatttttgtgttttaagtagagatggggtctcaccctgttggccaggctggtctcaaattcctgacctcaggtgatccacccacctcggcctcccaaagtgctgtaattacaggcatgagccaccgcacccagcccatgtgtcttggtcttttttactaatattgattataaaatggatgaaactttggat

SEQ ID NO: 32689 - DNA, 2386 bp, Homo Sapiens
cgggggggaggggcggcgaggcgaggcctgcggagcggaggaagacaaacataaagatgaagtgcttaattcaaggtcacacaatgtcggggatggacctccagatttccttactgacctgcattatcttgtggatacctgagtgaattccacaccacccattttatagatgaaaccactgagacatggagcaattgactgagtagtcactgccccacccctgcctggagcctcacacatgactcgcctcctctcagtgaccacagatggagtcttgctgtgtcaccaggatggagtgcagtggcgcaatctcggctcactgcaacctctgcttcccgggttcaagtgattctcctgcctcagcaacccgagtagctggcactacaggaaaacaagctcagggctcccactgattgtacattatggtgagacgtggtcttgtaacacagtggttaagaatgtgactttggagccagcctgctaggggctgaattctgactcagccatttactaactgtgtgaccttagggaggaggacctggttgatagaagaatttatctcgtagtcttaacatccactgtaattccaaactttgaggacgatagagatcagtgggctttgactgcccagcatgcagtctccattcttaggtcacagaattttccacactccttgacagaggtgcttaacccttatccatcagcattctcagacagcacctccggttagggacagtatctgaccgtccgacatccctgcagcccccatgtgtcacacagactcagcctcaggtagatggtttccgtagatggtggctttctttggacccttgacatcaaccagttactatttgactcttctgcagaaccccatgttgacccctgctttgaggtggcagagttaacactactcttcgttataagctctcgtctggggcaactcagaagaacccagagacagactcccagactcggccagaggctgatgccaactccttccagctctcacggtaaccatgaggcccctgcgtgtttctgttgtggaggtcccagagggaactgtatggacagacacagcccgaagggccatctgcctcaagccacagcagcacagaattctaaagattgtggggaaggatggggccaaggggaccagatgtgcagaggtaatgaataccagggaatcaggaaaccactggatcagttctttgagccacagaacaacactcatcccagcagctgggaagctatctgcaaaagtccatctgcagaaagggcttcctggtcttgcgtgtggctgggccatttctctggatgcaggtttttcattatacagtcttctcaaagaaccacctgctctcaacaccttctcggtgactccatttcccctcctctgggctcctggaatgccacaatggccccaccttagccaggcagctgtgatgagaggtgttgacccaactgcctctctgctggctcactgaatcaggtggaaggggctggggacagcacagtcttgcattgtggttggggacctgggccatccagaggcaggactgtccaaaggcagggtactgctgggattccgccaggcactgggtgatgcatggcatagggagctgaagagggacaggctcttggccaggaaaaacagccccagagccacaggtgtgccatcgagtcttcctcctctcccatccttaatcactcctgtttggtgacagcacacagctaggcctggagcccagcaaagagcccctgggtcccagaggaagttgttctgggggctggagacaatcacaaatgccaggtttgtgagccccagactctggttcatagcaagaggcagacttgtgaacaaaccaccagatcacaccgtaaaacacgctcaacgaggagtgggtgccctttctagggacaggcagaaggctccatggagtgacctttgaatggggacataaaagtggatcccttcaacagcccctgcacagccccaagtcaggcctccagcccttggactcacagatgtcctctgtagacgactggatgtcctcccgtgctaccctttacccctgcagcgaggggcacagagccagagccctccaggtcctcaccactggcatcaccaacatagtggacattttccctctcagaatgaaaagggagtgaaatttcccgtgatctttccacaaatgaccagcttggggagtgggagaggaagtgctgcagtgcctggggaaggggccctggaacagttcctggaaatggagaggggtggatagggtggagacaatgctcatggagtgcagtatggggcctacccagagttgcttggccacccctctgcctctgaatcaggggtgatcaatgaaggaaaattactgca

SEQ ID NO: 32690 - DNA, 4633 bp, Homo Sapiens
ggtccagggctcagtcaaggctagaaccaagacaggggcaaaggccggggcagatctagggcacaagcagggcaggctagggcagggcaatggcaagaccaggccatggcagggccagcccaggatagaacagggcacaggcagggcagggccagggccacggctggggcaggacaaggaccaggactggggtccaggccagggcaagggtatggccagggcagaggtagggccagagccagggtctgggcaggaccaaggcaggtctattgcagggccagggttcagaccagggccagagcagggctgggacagggccagggccagaaccaggaaagggcaatgtcaggacaagggccgtggcaggaccagcaatggggctggggccaggacagggacagggacagggtcagggctagggccagaatagcatgccaaggtagagccaggccaaattagggccaggacaggttcaggaccagggctgggccagggtatggccttaagtagcgaagggccagggccagggtccatgccagtgccagcgctggtccagggcagatgcagggccatggccagatctaggacaaggctggggcagggccaaggtctgggtcagggtcagcagaaggccaggacagagccaggggagggacagggccatggtaagaccaggttacatcagggacaagacacctgcaaatccacttcagggccagggtcagggcagggccagttcagggccagggccaagacagggccagggtcagggctgccagggtcattggcagggccagggccatggcaggaccggggtcaggagcaggggtcaatgccaggccaaggccacacataggaccaattctgtgctagggccagtgtgagggccaaggcagggtcagggcagggccaaagggagggcagggccagggcagggtggagcaggcccagggtagcacagggttaaggtagttcacgaccaaccagggcaggtctatggttggggcaggggcagggccagagccagggcacagccaagacagtggcagctcctgggcagggccagggttaggaccatggacatgtccaaggccagtgccagggcaagagcaagggcaggagcaggaccaggttcatctaagaaccagggacaaagccaggcccagagctgggccaggacaggtacctggcagggctagggtctgagacagggccacggcaggaccagggccacaaccaggtctgtgctatggccaggtccaacacagtgcccaggtaaggctagggtgaaggccaaggtagggccagggcagggtcaaagccaggctagggccaaggcagggccagggccggcaaggcagggccagaaaagcatagggccagggcagggcggggccaggacagtgccaagacctgggcagggccagggccagggacaggtccagggcagggccatgacagggccaggggctgcgttagggcaagggcagggccacagcaaggtaagggtcagggccaaggccagggtagggacagggcaagaaatatggcatgaccaggggcaatgccaaggccaaggttgggccagggctgagcaggactgagtcagggcagggcagggcagggcatggtatggccagtgcaggacaggacaagagccggtccacagagagagcagagctgatgccaagaaagagccaggctagtgccgaggctgaggcagtgtcagagcatgtccagggcagggccggggccagggccagaaccgagccagggcacagccaaggcagggtagggaagggaaatagcacggccgggacagtactgggacaggacagagcagggcaaggagatggtagcggcagggcagggacagaccaatgcagagccatgttatgccggggccaggacacctccaagtccacttcagggccagggctatggcaggacaaagaccacggccaggatcagggccaggtctgtgctagggccagctccagagcagggtctagcgaagactagggtgagggccaaggtaaggccagggcagggtcaaaggcagagtagggccagggcagggggatgacacatccagagcgcagcagggcagggtgatggcaagaccaggggcagaccattgccagctcagggccagggaaagtccagtgcagagccaggaaagggtctgggtctgggtcagggccaggaacaaggcagagcagggccagggccatggcagagtcagggcaggtccttgacaggaccaggttccaggccagggccagggcagcagcaggggcagggcctggataagggcagggccagggatatggcaggaccagggctagggccagggccaggccatagtgagggcagggcaaaagccaagggcagggtcagggcaggtccagggcaggtccagggagcggccagcaccaagcggggccaagtcacaaccagcgcagggtaaggcagggcaatggcaccactgggccatgacagggcaaggtcagtgccaggagagggcagaacaggcaggcccatggtggggccagggcagggatgggccaaagcagggccaggacatgtccaaggccaggtcagggccagaacaggagcaggaccatgaccattggcagggccagtgccatgacacgaccaggatcaggacaagaggcagggccagagccagggccagagccaaggtcaggccagtgcaggttcagggcagggccagtgccagggcaagaccagggcagggacagggtagcacagggccaagacagggtcaggatgggaccagagcaggacagggccgagagtccaagtaacagtagggcaggtacagggcaaggcagggcagtacagggccagatccacggcaggcgcagggcaaagccaggcccattgccaatgcaccagccctccctacaaggctcctaccacctggccactgctgcagcccgtccatcgctctaagcctgacccccaaccctggctgcagccgcctgccctcctagcgcagccgctctcctacccctctggcgcactgcagtctctgtcactgccgcccacccacagtgaggcgagccatggtgtcgcaggctctaggtgtctcctcctcttcctggcacagagcagctgggcgggcaaagccagaaaagcctagagaaagatgtgaggggtggaagggttagagcctcaacttgtcatgccggccactgggtggcaggggccagtttcagcaaaggcactcacacccaccctccaaagtccagcctctccttttggcccaagctgggcaggaactggggtctggggtgggtgctggagacaccacagcacccagatccccactccacaggaaccattgggcccactggggctgcactcctcggggagcaggagaagcagaaaaattcagacccagccagccctccacacccaggtgccaattcctgttccggacgcctccacgcacagggccctgtcccccgtggtgtccccaggggtgcctggcagcctctgaggcacagacccacagtacacaggcccaggaaccacggtgggtgtgggggctctgccatgctcaggattcccacgcaaacgctgcgtgccctgctgcactccagtatgaccaagagtgggtcgccctctggagtgtggagtcagggagaggagaaccactccttcctgggatgccaactctgttgaccgacaccagcagtgcagcccctgatagcaccgaactcgcccccgctccactgctagtcctgccctcaatagcgccccccacctccgtcccccaatgccgccagtagcgtataacctatagtgccctaacctgtcctcctccatgggcattgaagccccagaaagcacccataacccaccctccctgccgtgggcagtgcagccctgtacagtgctaccaaccagtacccctaatgcaggcaatgacaccctggatagcgccctcaacccaccccacactgcgaaaggtgcagccctggatagcccctgtcctaccatctggtcgtcctgcagtctctgtcaccaccaccaccaaccacagtgaggcaagccagtgggccacaggctctaggacccagcagccaggcatggagcagctctcgctgatggccggctcctaccactctgaacacgctgctgtctgtctccgtggccatcttctttcactacaaaggaataaaactaggtatcaataagaaaagcaattttggaaacaatacaatcacatggaagttaaacactaccctcctgaataaatgactagcgggtcaatgaagatactaagacagaaattcaaaaatttcatgaaacaaagggtaatgaaaacacagtataccaaaacttgttatgcagaaagcagtacaaaggcagagatttacagctataagtgcctaccatccaaacaaaagaaaaccttcaaataatacatcttaaagaactagtaaagaacaaactaaaccgaaaataagaaaataaataagatcgtagcacaaacaaaattgaaataaaaaacatacaagattaaatgaaaagttggttttctggaaagctaaacaaaattgacaaacttttaaccaggctaagaaaagagacaagattc

SEQ ID NO: 32691 - DNA, 1474 bp, Homo Sapiens
agccacatccatgctatctcctaaagcagtcattctgaaacccaatctggggacagtgcagactaaataaaatttcattttgatttggcctcccgctgcgaatgggactgctttgtctcagccgacagaaccagcaagccagaaagggaatgaagacatttggagaagaagcgtttactgaaaggagattcctgggctggaggaaaaccatgatctacagttcatgttgacagatattgtatttttggtcctagatctgacttttgaaatgacttatcacaaattcaaatttagcaatcatgagtgaagtacccacgatgtgctaagcatctacctctgcagatagaagaacacttactgttcctgagcatgggagggaatagaagttcctgggtcctggcctcacctcatcaggcactgccaaatttgacacctccttcctgttcacggcagtcctttgcgatagggtattagatgccaccaagtagctgcataactcacccatttggtcagagcctgggtctaagccaggtctgacagactccaaagcaagccctgtttacagcatgactgggatccagtggacgagggaactgagctgtcaaaactaagtgacttgattgaggccatgcagctggcgaggggaggaccaggatctgaacccaactgggtctcccaagcctgggccactgaaccatttcacctcttggaaaaacttaatggtcagagtggcccacccagtccatggacagcatggaggataaactgcttccctagaaatcctctccagcattcttgccaccacgactttgggacacattgaccatgaggaggagctggtcaatgatggacaggagtccagattagcagagatgtggtaataaggacaccgatgcctaaatacttgaaatatccaataggaagcattccacctttgtgcaaatgcgaaccacatctcaccaagttcaggccaaggctgccaccggtgacgttttggaaaagaaaaaaaaaagcggggggagaggagagaaacagagaagcaaggaatgcagaagagagcagaggccacaaaaacagcagcaacgtgtcctgtgtattctgtttccttgtaaaactatgaagcatgttaaggagatacttcattttttgaggattcatactcttgtttatattataataaaaacaacccatgttctttctaaaaatttaggcaatgccttcgtgcacataaaagtaaaacaaaatcacctgtaatcctaccacacgcagatcagcacttgctaatcttttcacagggatcctaagaatatcctattctctatagaatatagttgatttatgttacctaataactaactgttaaccattttaaaattcttcagttttacattatgctagaaaaaaggagccgtcactctacgtgacatttctgtatattggtttattcattcaataaacattttttaagtaccta

SEQ ID NO: 32692 - DNA, 4230 bp, Homo Sapiens
atggcgaccaagttagccaaagcagcccagggccgccgcccagcgcccccgagccccgaggagagccgtcgcgaccgggggctgcctgggcaagggcggggcgagagggcagaacgcctgctctcggacagctctaatgctagtgactaccctcagacacttactgtctatccctttagggtgttcttaaaatacaccggaaagaacggaggtaaaaatactggagtgtttcctccacactggaaagagcctggccgctcgctgaggcgcggagagcgcggaacgagcgcgcgcatcacgtggcggcgcggacgtttgtgccgcgcgcccgccagaccgcccaggaggcggcggctattgttccccgcaggggcccggggcgccctgaaacggggtccacgtcagcccgctcccgagcgtgtcctcaggtctaaggacgggtggggcttcctttgtgtgttctctggaaggggctgggatggcgtcgttgctgccccaaggggtaaccgagggggattgagggaagatggtaccagctccctagagctcagctcaccagacctactcttccgctcgacccttgcagaggaggtggggacggatatggtatttgtagggcagcgctgtgaacaatggagccatcaaaaaggccttctcccagcctcctcaccaaccacggacattcctggcccaacaagacctcctggccaggttttgagccctgcttcccagtttctgaaagaaggaccaaagtaatgccaagaactcccagatgaagaggaccttccttagacctataacagattcactacttgacttcagagggaagtttcagctaattctcaggaaaaggtcaaaacaggcctgtgactgtcccttgaatactgaaggtataaacaagcttctggctcctccaggtcaagcagaggaacacttttattagaatgaagggttacttctttgttattcaaacacacacccacacacatcctctgtagtctccctaatgaaaaacctcaacagatggagagcctgagctcccaagtccgcaggctgagaagatgcacttcactcaagggccagtgggctggtacagactagggaagagaaaagggacaaaggctgctagtataggtaatcactatcttttaatactcctaacacatagaaattcgaaaaatcttgttcagcaatgttagcagcctgtgagcctcggaaactaatttggctgatgtgtctctgatagggagcttggggctgcaccaaggggaaacattctcctcctgtattctctcctctctctcgtttgaaagcctgtacaaagaaatggtacaaatggatggttaacttaatgattccatcagaggcagatttttctctgtcaggtccctggataaggtggaggtctgaaagccaggagacagaatatgtacttaatcgccctttctgacctgcttaccagtgaccaggactactctccaggcctttcttctgccacttccccattcttcctggctagttcagttgggtctcagcacttcaactcctggctggatcctgagtttttcttggttgcagggaaagctctcactgtctgcatctccttccccacccccacctcccgttttgcagctggccattctggctgcctcacagctatcctgccttaattcatatttgattgcctggacagaaccacctagaatgtccagacgactgccacccctcagccatgggcctgagatcctgccctgacccctttcttcagaccccaggaggacccacaatctccctgatccccaccttccccaaagtagtctctaggaaaaaagcagagctggctaaggcctgagacagagccatttcttccccttgggcaaacgaggtagaccctcccagagaccaatgccggagaggcccggatccgagctccctttatatggcctcccccatcacggatcccgtgggaaaacctgacacacaatggcgcggctgctccgggcaccctcaacccagcgccctgcggcaaggcctggagcagcctggtggtcttggtgcgctccctttgccctccccgcaaccctctgcgagcactcgtcccaggagagagaccctggctagggtggaggttgcctcccgcaaagggcgctgttgctggggcctcccctcccccattctcttgtttttctgcttctgagactcgggagggaggcggcaggcgcctccgcagccgatagagcagctattgtgaccttcccttgcagagcgggaacccagccgagtgtgtaccgccggcggtggcgggggaggaggcgactgtgtgtgcaaacctcagtcggagagggggtggcgctgggaaataaaggtttgcaacctcaggcagttgggcccttcagagggcgtttggttgtgtttagactcggttgctttctaacactaattgcaggctcaaaaggagcggaatttattgcgaaggccaaggcggcttgtttataatttatgaagttttaaatggctgtgccgcgggccccaactttctcctgggctggcagccgcgcggaaacgcgccctcccccggctcgccgcccacccccacccacgcccctcagatgagtctcacgccaatggcaggaacagatccgagctattagaagtctcgggaacctccagagatgacagaaggtggcagatttggtccaagccctcaccccactcgagaggagggcgtcggggaaagctgtggctgcctggagagggagcccctgatcccacacttccttggagcctgagtgtgagaggaagctaatgtcagccgggctagacaccgtttaaagtctaatccatgaaaccctaagccgcaaatgacacttggggctttgcagacacccgcagactcagcagatactcctgcggtaacacactgtgctggaaaacgcctggagccatgacacattacgtatttttattattatttatggtaggaagaggagatgagggaaaatcgggctgaatctaagcagcctgacaattcagctagttaatatttagccagttaagaaaggtggttgtaatccctgcaaggcagtgagctctcctttgatttctctaatagcttaaaaaataatttcttacaagacaattagaaattctgcctatggatgcaaatttcatagaaaacaatgttaagccttgaaagtgggtaaaatgtgccttcgattgaagtcatttattctgttgatacacttctacaacatatatattttaaacctgctcagataaagtgaaatttagcaaaaggatatcccctcccacccccaaatctaacatgccattttaaaaacagcacaaaggaacaaggaaactaaatattattttgagccatcattacttagtgaaatacaaacatccaaatagaaacgattgttgttccaccagaagattagaagttaaattatttccacacaataggaatttcacttcgtgtcatcggggatgtagtaggagttgcattatttgtcaaaccaaatagagatgcgtgggctgactttgctgaaatacaaaagaattgaaccttatctgaaggcgttttctaagtggcccctcccatagaagccgggaagttgtccacccctagcagaagccacattaatatttacaaaatggttataaatccttgaagacatttttgcccattttgtataagaaacaggagtaaacaaggtgtttatacttgttatgtttcattaatgaaatattattactttacatcttggggaatgtttgttttctttagaaatgaactaatgatcactacaaaggaagaattcatgacagcatttcctagagaaaaagcttaggtacgcgtctccaaatgatggtttctttttctacaccttagctttttcatagctcaattcttcttacaacttctcttgtgttttttctttgattgtcagttttctttcaaagtttattttttgttacttaatgcagaaaagtgagctctggtctccccagtgtaaaagtcgattgtgtctagaaagaaggcagtaaaaacagcaaagcaggcgctgctttcaaaaagccctgcccaaatcatcccgcccagaaccttcttaggtttgcatcctcatttccccctcccctaatttcaatagctggaaagtaatcaagtatcccgagaaccaatttatgcactagactccaaataaataaaatatttttttcaaa

SEQ ID NO: 32693 - DNA, 2341 bp, Homo Sapiens
atcgctgcggccgggatagggcgccgccgttctggccggctttctcggtgccctggaggacctggccggctccgcgggaagctgtactcagagcgcgcggccgccctctggcagggaggagttcgttgcacttttgagggttcttcacgaagacatccaatacatagaaaacaagtaacagcaacagtaacgaatttttaaatattaaaattgctggggaacacgacggatcctgcagctgctcggctgtcccggtcgtcagtgacgctagggctccgcaccgtaccctgcataccgtaggtgctcacgaaacgttcgtgagttccctgctctgaggaaacaagcttaaaaactcagaatctaaggtgtgagtctccgcaaacctgcttgttgggcagcgtcccccgcccgggctagccctgcacgccccaccccggagccacgcttctccagccgggacccctgcctccttccaggctattctcggaaccgcagccagagggaatttttttttcctttcctgaaacgtagagcagatctggttactcttctgcacaacgccctaaaatctagggcccttcccatccctcagaatttacatctaattctcagctcccctccggcttgctgtagccatcctggcttttgtttagcacagcacttactgttagtgacattatattgtatattattaacatatttgtgttttacatccctcactagacccccaggaaagaggctttgatgtgttgcctgctgcaaggctggctgcataatttgtggagctcagagaaaagtgcggagcttccttgttcaaaaaacagaaagaaagtgcctctgaggtcataaaatataaaactttctctttcctctcagtttctctcttttcatagtgtttttatgtgttatttaatatcattccaagaaaaatttagatttaaattgttagcatgaagttcaccatccatctttacgttgtgcaatgccagttttaaatactaatataagtgcactgatctcatatgtggaatcacagaaattatgcaatttgtacttcatagcttatacatgcatatagattttgtttttaccagaaccacgctggtaaaaacagatgctgcacaaagtgaacttgcccgttttcatcgcactttacgtgcacgaattctacctctactctcgacctgggactcaccgatgcgtaaggaaggactgaaaagcaaaagaactatggactggccttttggcatgatcaggtgtctaatataaagaagtgcatgaataagaaaatatatgatatgagtgatggttaatactgactgtcaacttgattggattgaaggatgcaaagtattgatcctgggtgtgtctgtgagggtgttgccaaaggagattaacatttgagtcagtgggctgggaaagttcgacccactgttaatctagatggacaccatctaatcagatgccagtgcagctagaaatgtaaagcagacagaaaaatgcgaaaagagagactggcctagcctgccagcctacatctttctcccacgctggatgcttcctgccctcgaacatcagactccaagttcttcagtttgggacttggactggctctccttgttcctcagcttgaagactgcccattgtgggacttgtgatcatgctgattcaagggggccctgccccgcatccttcctgctctaccggccatcgcgacgccaccttccatgagctccatttccaggactggcccatctgggcatcacagtcccaaccacaatgcgtgtttggtccttggggcttcctggataacttggagctttgtgagaactccaaaaggatttcttctgaagaaccaaacccatgtttcataggcgacacgcagtttgctcctttcaacatgcacacaaaacacacatgcatgaaacagcaaatgagagcagcctcggcatgatctgagagtctgccagtcccttcctcaccagagcagggctcagaaccatactcctcacatcctcggattctggggtgcagccctcagggacagcttggggctgaggccagaacacagttggcagggcccagagcttctcccctgaccccacctagcacgtggctcagagccagtggggctggccaagggttgcttttccagtatggtttgctcattttcttttgctgctcttgttctcgctctcacctgtactctctgctctgtccctgctcctcaagggtttcaagatcaagatgcttattgtcgagaactgtcttcctttcaaaaatggcttacagttctggcctccaaatgcaggattttagctacactgccacatcattcaac

SEQ ID NO: 32694 - DNA, 1897 bp, Homo Sapiens
acaggcgggcactctctgcgggtcccgcggctcccgcggcttccggcccactcagcgcctccagaggcctcaggtgagggtcaccccccgcagcttggggtcactcccctgagcccccggatcttcccatgggtcctttggaggcctgggttttggagtttgtccttcgttaagtgccgcccgccgggcgcggctgctccaggaccacagacgagtctcgctctgttgcccaggatggagtgcagtggcgcgatctcggctcgctgcaagctccgcctcagcctccggagtagctgggactacaggagcccgccaccacgcccagctaatttttttgtatttttagtagagacggggtttcaccgtgttagccaggatggtctcgatctcctgaccttgtgatccgcctgcctcggcctcccaaagtgctgggattacaggcatttcgctggggatgctacttgatctctcttcagcctcagtttcctcacctggacagtggagctgaacccaccccccactatctgaccctgctctctgggctgtcttttgggaacccgccctgctgaggcctgctccccaccctccatggctgtcagccccccaggagaagaatgtctgccatatggaggctgctggcagcaaagggagatgaacaagccaaggttgcccggcctgcatgccggcccagggctgctgctgtgtcttgccatcaaccctcccctgacacccaggatgcctgcctcacccagaagcactcctacgtcaggcctctgagggggagcgcttcatgccactgttatcaaaagaagaaaccatcgaagcagaaaggccaatgccacactagacagccaggagcccagcagaacaagtggccccctaaggcactttggggaccacaccccgccactgaccccagcacagtctggttcccagggcttcaggatcctcctggggacctctcagcatgattgacacaggcagacgggacctgaaggggctgctggtccttctgaaaatgttcaccaggtagtgtgagtgtggggaagccatgaacaatgtgtgggactctaccctgcacctgctcagagcctcagcccttcagagccactactaatgatttgctgtgggtggggtcaccctgatacttctctgaggtggctttttcttgcagtttttctgagtaactgacaggaatccttgactgcatgccgcctaaactagggtgtgcacagccctcgttctgtgcaaagagggtgcaaagcagcagagtgtctgtgacccatttgccacctaatgttactacaagatttgcaagaaccggtcacttatcagtaaccatttttatttaaaaagataaaatagagctttgcaggaaagtgctgcaggctcccacgttgccgggcagacgacaacctgggcgcctcgcccagctcctccccacagccattggcatccactgtcaggtttcaatgttcttggacctcagggccttcgtcctctccaatctaaatgcagagagacatttgacatggactctctcaggtgttttgcaaaatgcaacacattctcattgactctggtcactctgctgtgcactacatgtcaaaacctcttcctcctccctgagactttggtcctttaactgacaacccccctcccattccctccctctgccactctctgacccctggtcaccatcgatctacttgctacttctatggggtcaacttgtttagatcaacacttctgggacctcacgtggaattggtctctctgaggtagtggagatgctaagtagtgggatttcctcattccacattgtaccccatgaatgaatacaagcatgatttgccaattgaagcaatacaataaagacagaagaaatgtaaaatgc

SEQ ID NO: 32695 - DNA, 2272 bp, Homo Sapiens
ggttaagggaaagcgtgggtgtgagtaggagtcttcggaaaccctttttctttcttttcgccccgctgctgttcgggagatggacttctggagtccccgtcgtagctggtgttgtcccctctaccttcaggaaagaagggcagatggccctcttgcctactgaagccgaggaggggcgcgtatacagcgggctaagggcgctcaagagatccgagtggaagaaaaagcagcggcacagcactggaatgggcgggagtggcagaagagttgtgaaggctattggctagcaagggtggtgggcggggcgtagaccgagctacccagtttactggtcgatttcggatccagttttccagttatagccacgttggcacctcttgaacctctgtggccgttagcacggttttctgcccgcgtgcccgagaaaccaacggattagaaggacttttaaagatgtgtgaggaaagagctcaccgctgaagaaggctgctgcatcactgaacttcttatcactaacatagcgagattttagtttggacgaatttgaggttataggggagatagcgatggcagaagactaggtggaaatggcacatctaggttggctgcagtcgaaacggtttgagcgtggtcgctgtggctcatcgtcggcaccaattaacgaagcgatgacatctgcgttgttaggggtttcttaaactgagttggtagaaatgcgaagcgtcagggttcccgccggcttcgagcctttcttggcgtatttgtatcttgagctgatttctgcgtcagcccacatctcgctctgatccgcacgccccccgggttgttttgcagtagcagtctcagccctcttctcgtctcattcccaaatcgtaatttcagttcacagctttttatctataatagctttatcaactctttttccgatgctctgcaccagatctcttaaaatataaaattaccttgcaaggtattgtttggaatacacggtattttcatgaagacaactattaatagaaaaatcagagtccagaactatggttctccatttctggtatactggtttgcagaagccttacattaagatttcataaatgattgttttgctgttaagtgcaacaacatcacagtagagctacataaagattgaaaggagatattttatcaagtggcaccagaatggactgattaaaatagaatggcctaattggaaagaatttcaggatcaccggtttctcctgcttcatgtttactcaaactcctagtagtaaagtggtaaattcagcgtatatgattcacattatacctgggacaggccttcagtatttggcatcacctttacatggagcacaaagatgatgatgatgatgatgtgtcttttgccaaatggatgagcagcttctggggccacagctggagagaggaggatcagagaggactccgggaacgccaccgactgcaagccaccagtcacaggaaaacctccctgccctgcccacttcctgtgcttcccagaattccatcatctgactgccatcctagaaggcattctcatgaggaccaagaatttcgatgccgtagccacgtacgggattacagaaaatactcagaggatgggtcattcaaggagccactggaatcaaaaggaagatcccattccaaaattgagaaattttcagagtcctttgaacggcaactgtgctttagaaccaagcgttctgcctctttgggacctgaaagcagaaaggagagaaatgaaagagaatgcctgaggatggagataaaatcccgaaagaaagtagaggaagaaaggagctctaggaaagaagagcatggagaagcacacatggctcccctgtttgaaaaagggcctgaataatactctgcttctgcctcatgacatcagatgctactgttttggtttttttctttgagccccaattcaccatttcaggatgtggatgggggcggggttgggggtaaaaacagctataaaaagcaactgcagatgctgactgactgcagtgggcagggtatgtagctgctccaagatgacttgcatcataccccaattactgctggcatcttagttgagagtataatctgcttggttgcctttttatgggaataaagagaataaaaggtattttaatagaataaagaaaaatttgaaaatataatggaaggtatttaaagagccacccacatagcttcaccaacccttctcacacatcaactcataaatcatcttaaataaaagtcattggtatga

SEQ ID NO: 32696 - DNA, 2282 bp, Homo Sapiens
gggtgtggccgcatggcgtgctgtggtgcaggtggccgaagggggcgttactgttgcgactggcatccgcatccggcagatgtagatggaaccaaagtccagaagttacgcgtcacccttgctctacagccaaacatgcaggactctagtaacccgcgaaatgatgggatagcgttgcaaatccttaaaagagtcttaacgaaatcctggctgacattgacttctccactgcaaccatcgagttcattgtctcctaaaccttgccatggaggcctgtggcacctgagccagccattatcatcaccagcacttccatgagctacaagctggacccactgcagtcctcctgacacactgaaatcagagcctgcacacagagcagcagatgcttcaatgtaaaggtcatttccaggtccttgacaggcgtgcatctgggccagatccatggcaataaccttcaggttgaggctagagggcttcagatgggcagcttcgaatgacaggagcaaggcacaagaggccggaaagggagggtgacattttcagcatctataagatcaactttagaaacatttgggggttgacaaattcccatcaagctctgtggatcttgtacaactgctcaccaccggcttctcatcagcacatgattggtgcagggttctgaggatgattttgagatgttccctgatgtggtcttgtgaggagatttcatgacagatggcaggaagcttcgtggagagatttctgaagacactcctgagctcccaacaccgggcaactctcttccagaggatagtggggtggagggtagaagagaggcaaagtcaggtttgtccttcggatccccttcattctccttttgccaccgtaaaccaacttttgcttacagttagacaccagttttcggcagatgaaatccctctgatttcaggcattttgtcaattaagctgctcagcaacaataggataaacttatgaaaagaaaggagtagcagtcccacagacaaagcatccagcccctgcactgagacagtatagggaagggacttggtcctggcagacaggacagataatcaacatcctagtgggccttacacatgtgggcatattcttttccataccttcttgtctgttttaacaagctaaccccagtcacagtagcagagagagggtccatcctaacttagctgaccaggctggattcctaatcataaaaccaaaaaaggaagaacctaaccatttctctctttcagctatgtgttccaagattactgaagcaggattctggccttcctgataagaacatgaccagatccagctggtttgcaacaagatgaacttcagtgctgagctttcaccaagtttttctcactacaatctcattgtaatactaaaatctccacccaagatggaggttatctgccattttctgtacatgtgttaccagaaaggggtcctgatccagaccccaaaagagggttcttggatctcacgcaacaaagagttcggggcgagtccatagagtaaagtgaaagcaagttcatcaagaaagcaaaggaataaagaatgcctactccataggcagagcagtggctttggctgctcagctgcttgtacttgttacttcttgagtatatgctaaacaagggattgattactccttgtttagcagttttctgggaaaggagtgggcaattcccagaactgagggttcctcccctttttagaccatatagggtgacttcctgatgttgccatggcatttgtaaactgtcatggcgctagtgggagtgtcttttagcatgctaatgcatgagcagtgaggatgacccgaggtcatttttgttaccatcttggttttggtgggttttggctggttttggccggcttctttaccacttctttttatcagcaaggtctttgtgacctgtacttagtgccgacttcctgtctcatcctgtgagtaagaatgcctaatctctcaggaatgcagcccagtaggtctcaaccttattttacccagcccccattcaagatggagtgactctggttcaaatgcctctgacacatgtgcctcatgtttgggcatgagacctcactgtgtaggtgcagagaagaccctgcctaaacattgcctacacgttgctcctttttcctgcctcaacttccttaaaatgacaagagcagagcccttttgggagctaacatcaggactccttttctgtactctgctccgttgtgctgctagagccacaagcctattaaactttgcctgaaat

SEQ ID NO: 32697 - DNA, 1205 bp, Homo Sapiens
ggtgtccttccatgctgtggaggctctgttgtttcgctctttctactgcttactcttcgggtccacactgcttttatgagctgtaacactcaccctgaaggtttgcaacttgactcctgaagccagcaagaccacgagccccagggaggaacgaacaactccagacgcgctgccttaagagctgtaacactcaccgagaaggtctgcagcttcactcctgagccagcgaggccacgaacccaccagaaggaagaaactctgaacacatccgaacatcagaaggaacaaactccagacgtgccaccttaagagctgttaacactcaccgcgagggtccgcggcttcatttttgaagtcagtgagaccaagaaccaaccaattcgggacacaataccaactctttcatgccaggagaagcctccttaaaaaatttcggtgattaacagcagcacatgggtcaaaatctcctgaaagttgagcaggggagctgtagaagaattcctccttttctcgcagatgaaatcttatgatatagcaggggttacctggccaagaaggaacacagaggagaacaaagaaaattcaaggaactaaattccttctccacctcaaccaccagcattgatactccatcacttatgtactgcatcaagccgtcctcagaggtgaggaaggtgctgtcaagactagaagcatgtgtccctctctccattgcaagatgggacatagagaggagaaaagtggcagacagaaggctaatctcaactggaaaccagaaggctagaaatcttactgatgtgatgtccagggatacagagcatatgaaggatgcagagagtgggtcaaatggaaggaatgtagcaaaacatgtaaacttgagtaagtatttgatctctttgagcctatgtttttcaatatttggattccaacagccagctcagtgctgacagagtcagcaagttcttgttgagtgggattgtgtccataaaataatgtatataaaatagacaagctctatagctcctttcaattatgaccttctctgattactattttgttgattgtcctcaaatattattaaataatcatgccctgaccataataaagaagacttcatcattgctgaggatgaatttcacaccccagtctttaactctatgctctgctatctcttccatctaaaaatacaaaaactgattgttcag

SEQ ID NO: 32698 - DNA, 1616 bp, Homo Sapiens
ggcaacctgttagggtctgcttttgtcctctgggagctttccttgtttggttttcgtagtaaatcttactgctgctcagtgtttgtgtctgtgctgcgtttgtgagctgcaacgctcacggtaaaggtctacagcttcactcccgaagccagcgagactgtaaatccactgggaggggcaaagaactctggacgtgctgcatttttaggagctgtgacactcaccgcggaggtttgcagtttcactcctgaaatcagtgtagaccacgaacgcaccagaaggaacaaactccagacacaccgtttttaggtaaccgtaacatgtaccgcgagggtctgcggcttcattcttgaagacgagactaagaacccaccaacttctggacacaaaaccaccccaaaaagtgagtttctaaaggagaagctaaaaataaagaccacgaaagtgttgcccatggtgatagctccagacgtccggagacggtgttcagcgctgctgcaggagagactttatcttctattccgttggtctgcctatctagaaagcaaaatttcaaatactgagaccgatagatgaagatgctttcgcttcttccctgtttcatccagttggggactaagtgtccttcggtttggactgtgcagctcgggtcaccttctctgtggaacagcaagtgaagaaagaggcgcagagccctgtgttccaaaccctggagacaattgagaaagtgggaacccattattccccaagcccagccagcaaacctcaccgatgaaacagataagcacttcctgcaggtggggccgacactggccaggacacagccctctctctcacagcagtgttccaggttgtttgtgcacaaaatttcacaaaggtcagagctcgtctctccaaaccgatgagctttgcggttaacctgaattcactgaactgggatttattattattattctattttacctctaacagaagtttaaggttcgtgtaagtttcgttcctctctgattgtaggggagacgcccagagcgccatttggaggagagaacctggcatcctttccttaccttgatttcaggtacccagctcctagcaaatgtgtcttcctcccagggttctttggggtaaagaatttggtgagaaggagctgaatgttatggctgcgtttctcagccacttgctcggagccaagcatcctctcaccctttctttcaactggtagccagaaaatacgggttgagcatcagggattctcaaccgtgtcaagctccagccctgcctgttgtgacagacgtttcctgatgcctgttgctctctggaatgaaggtcatgggcagtattacccacacagccattcaaaatcagtcggcttcgtgacctgttgtgaaaggatggcgattgccgtgccagcacgtgacatggactcggatgcctgcgcacacaggtgcaccttccagaaggtgaggtcagcccgagcgcccaccgccatgtgagtgcgctgctgcagtgaccagttgctggaatgttctgaacagagcccagtgccacccactttgatgtgcgctattgttagatctccggaaaaatcagagtgcattaaattcctgcaaaaattc

SEQ ID NO: 32699 - DNA, 819 bp, Homo Sapiens
atgaccccgtacgactctcgctgtcccccaaagctgcaaatatctgcacctgcacagctgccgcctcattccctgccctcttcggggacccagttcccaaatccaccagcccactcccttcgacatcgccccagcaggagacgagaaagggacaccaagaggcacggtgcttcttccccacctaagcctgcggcctgcggacaccccaatgcaccctgcgcccgggacaccgccgaccccgccccgctttgctctttgacagctttcttcccgccaggccccctccacccgatcgccgcgcgctctccgaaccaaaaggcgacctcacgaaatgcccctttgagctcaaaggctagttacccccaggggcccttccactctcggggacaggcgaaacctctttgtctctgcctcggcctgcggcccccagcccagcctccgcgctttccctccgccagtccttgtcaatcaaacctggtgccaaacgcggcagctgaagttttcagggacacatttgcttctccccttgaagaaccagttacaaagcgtgatgtcctctctggggtcccatcagaacaaagaaacaggtctaaagaccctcattccagagagcatcctgccccatatccagaatgaaatccatgctcagagatgccaagaagaatctagacagacaggcctttctagagtcaagaaaattgtttttttcttttgagctgtacatagcttacagtaattagataaattacacttttgtgagaacaattgaaacactaacctttctctctacctgatgtctccagaatttggaaagtattt

SEQ ID NO: 32700 - DNA, 1218 bp, Homo Sapiens
atggttatctcggagctggtgctgtgggcagatgtgggaggaccagatgagcctctatccctgacttttggctgctcaagaacactttggaacttggacacaatcctgggggtagtgggggcgctgtctatgcgtgcccagggcctgtcctgcggatacccagctcgccccttgcagccctttttagagcatctcgcgggctctggcatcaccaagcgcacagccccgggctgcgctcccctaaggtgggtccctcagatccggggctgtccattaaccaggctggcccaaagaggcgcagacactcgaacccgggaaaacttattttattctcggttcccggggttgcagctgccagcggctgagacacggggcgcacggcggcggggcgcagactgctctggcagccggagaggaggcggtgcggcggtggcgctgcggagacccggtccagacgcctggcggccgccggcacacaaggcgctttctagctccctcccccgagcgcacagcccgcctccttccgcggcgcctgcagtggcaggcttgctctgccctaccgtgacgcgctccggagacgctctgcgggtcctggacaccgggtccgcggcgtggggacgacagacggaggcgaacgccatcggtagccggtccgcgagccatcgttcggggcgcagtcctctccccggctggccctcctttctccggggcattcgccaccgcttccctgggctgagacgaccggttcgtcgcctccttgcccgtgaccgtcgctagaactcagttgtgcgttgcggccagtcgccactgctgtgtcagcatttgcaggtatacaggaacagtcctagtgatgcactatttaatcaaaagacggatggatcttttgttcttgcagctggttttccaagaattgatataaagcgggaagaacagaaaacagcagtcataagtatgctactcaaaatattcttctttttatgtgccaaatcctcacattggaagctgtcccgagcaagacaggtagttggtgattatggccagaatttattctgtgctttgactaaaggcttgctgatcaatatatggttaatgttgaaattggggtgcttttaggactcttcagtggtagagctgtctggttagaaattaatctttaagttgggatgccgaggtgggaggatcaggtgaggccaggagtttgagacccggtctctacaa

SEQ ID NO: 32701 - DNA, 2064 bp, Homo Sapiens
tatttaaattttatgaattaatttgaatgttttttacactaactaacttttcccaataaagtccactatgaaaccacgacatccaagagcccaaagtcgtcttctctgccttcaagtcatagatttgcccgcagtatctgtggtgctctgggccctcccggtgtccgtctcttccaggatggggatgcccgggagggaaactgtctgtggctctaggctgcacggctcgtgccaacccatcagggagggccatgcccgttgtcctattgagtgccccaccctgcacccccaccttgggaattcacatgtccattccttgaggttcatgtcaacctcggaggcatccctgtcttcattatagctgacccctctcctgcgtccttctgtcagcatatcccttctgcatccttcccgtcacacatacataccaagctatgatgattgattgatagtggccttcgagatgaaaaccatccttaaccccatgatccttcccagctggcatccccaccctaagcaaggttccctaaagagaagcttgttgacattttctccccttcctcacttacagtcagctgtcaccttgctccctccacctcccctcgtcaaggtgactgccttccactgccagccacactggcaattgtcttgagacctcactgtgcaagcggcctgggggcgtggcggggaggaggaggaggacaaggactcctgaacgctgctcactcggcttccaggacaccccgctcaggttctgcctgccttactgggggctccttctcctttcctggggctgagaggttgtgtctgtgcccactctcctgagctcagccagaatctcgcatgtaaagacatccaaatgccgacttcttctccccagagcctggcttttataactgactgccgcctcacgctccattcggatgtctaatgaatctctcagacttgacctgtccaaactgcttgccacctctactcgccaccgcccacccccacaccctccataccgttttccccacgtcactgcccctcccccccttcctcttgccaaatgcctaaaaataaaaattctgaggtggatctgtagcacaatgggcttctagtgacaaatcaaaattctgatctttaaaatgtatgcacaatttacctgttaccgcctggcctaagccatcctgctgttactgctgtgtagcaagttgcagccaaagcgacctcacacggctcctgaaggtcaagaatctgggagcagctcagctggatggctgtgactcggggtctcatgaagtggccaagatgccagctaaggctgccgtctctgaaggcttgacctggcgaggatttgcttccagactcactcgcgtggctattgacagaaggcctcagttccatgccacatggcccgttccacagagcagctcacagcttggtagtagctggcttccccagagcggtatctgcgagcagcgtccagatggaagccatggtgttcccttaaaacctgatatggagggtgattccccatcatgtctgtattctgtgggtcacacagaccaaggccggtccactgtggaaggcaaggacgaggttgccagtgcccggcggtgggtggccacagccagcctccctgccagtgtcccccacagacaagttgtccctgtaagacaggtcagctcaggtcattccgagctcagaccttccaacggcgtccatgtccctcagtaaaagccagagtcctaaaggcctcttgcctgctctggcctcctctcaccattctctgccatcctccatctgcccctggtgtccctgaagtcttgaacatgccgagcacatcctgcctcgtatgcttcctggcctggaatgcacttgccccgggacaccctgtgctggctttagtgtttccttcctgtctcctcaagtcaccttattatcaaaaggactccgacaggctaagtgtggtggctcatgcctgtagtcccagcactcgggaaggccgaggtgggaggatcgcttgagcccaggagttcaggacctgcctgggcaacatggcaaaactttgtctctctt

SEQ ID NO: 32702 - DNA, 5131 bp, Homo Sapiens
accagaggctgggtctaattagttgagaagcagtgacacccccaaccactccccaaacaggctggctcccgtctccaggccccaaggagccacacctggaccagaccccaggaaaggtaagcaccaacggcagacctgggatccgtgggtgggggcctctgggaatttccctagggggatgctgcatctgggggtcttgctgtcttgctaactggctctgtccctttctggacacagattctctgggtctcagtttccccatctgtacaggggctggagtcaatgatctctaagcatccatccagctgatcggctctagttctatggtcctgttggcttctaggattccttgttgttgtagtcaattgggggaagaaggtgcagagggagtgcacagagttaacatcctatcagcccaagcttcacctcggcacccgagtctcaggcagtctccctggcttctacataggcagtgcttcttcctcattgtgtggggctttgattttgtaattccaagagcctggggctcctggcaaggaaaatggttttcaaataatggtttcgagaaacaaagctggggaagaggcaatgtaagctcaggctctggcaggcaggcagagatcctgggaaggctgggtgctgactgcacatggagcaatgggaagggatgctggtgagaggagacgggggcacttaagctccggccccagctctgctctcagtgcccggctctgtggtcttgggctggccccctcccttctctgggccatagttttcccatctgtatagcaaggccattggacaaaatggtccctctgcagatgtggcttctgagttgtttgtgcctgagggacagccagtgttgggaagttcccccaggaggtccctgagccgagtctgaactttgaccacaagcttggagtccaagcagatgaagtcctgtgggagcttttggaggttgagcctgagtgagggagagtagctgaaggttctgtgactgaaggcttggccagaggggtgccccgagccctccagatgaacttggctgcaaccagcctctggtggggaaaggactgatctctggattcaaccacacaggaatgtgggacatggaagtaggtaagggatggaaaagatggcagagggcttcgcgggatgaagcagtggggccaggggacttagaggaatgcaggaggcatgggccactgcactcagccaacacctatccttgaggaatagaaagatccaggctccacaccacacaccatcactgactcaagtggctgttctgattcccagctgagcctgaggggttcggggaggtaatctctgaggtcctcactgctgggccgtgcctgggcatggcctcttcctgcaattttccaactaaactctccgggggggctcagcgccatggggtggttcgaagaaccatgatgaaggctggttcgaattgtgatgaccatttttgtccacatctcctaggacccataagccagagtttctctggagcttatagctagaaggggttctgggtcctggagtgcaggcctgtcaactttacaggagagcactagattgctttctgaagtggctgaaccaggttatgcttccatcagctgtgtatgagcatccccatcttcttgaccacacttgaagccatcagtttccttgaagcatatgggttgcacacttcattttgcatgtatcaagtttatataataaaaaatgtaaggaagccatggaaataaaaacgtaggtgtgccttctgtaggctgctacgctcctgtgcacgagggcgtctagaactttgccctccatgcacaagttgcagagcaccctcatcaggacatttacgaaggccctggggtgggatgggcactgcctatgtggccctcccccagcccagcagtatgcagtggcccgggtccaatcaaaggtcgcctgggagggtgagttgcaagaatctggggaaaagagcccaaggtggctgccgcctgctaacagcttgtctagacaggccccatggggcttcaccgcacattgcgagagctctggccagccccctgcccacttgcaaaagaggctgttggcagcaacacttcaccactagaaacctttactccaattcgaaacatgccttaacgcacagtgtgaattacccactctcgtggcccacagaggttgactcattcaggcccccttttgttcagatgaggaaactgaggctgactccgaagcctgggggctttcagatgtggagtgggtccctgtgcccaggtgatgaggggaccaggcgggtctggagcagggctggagtggggctcagatgtagtaggctggcagttaaaggtgccagatgtgagccaggctgctgggtttgaatcctggagctgcctcatagcagcagtaggactttgggtaacttacataggtgctgtatgcctcagtgacctcatctgtaatatagagatgataagagtacctgtctcattggtctactgagttgtccggattaactcattaaatgagttaaaactcatgaagcccttggaactgtgactgacacatagtaagtactcaataaaaaataactgctaagaccagccacagtggctcacacctgtaatctgagcattctgggaggccaaggcggaagaatcccttgagcccagtatttcaagaccagcctaaaggtcaacataggcagactctgtctctactatacatttttagattaaatttttataataataataaccactaaaatgtgattactaaagacagcttcttcacagtacaaagagatgctcttctgagtaccaactctttggaggataaactgcccttataccttcaaaaataacacttgccatatatcaagtcctttcaagtacctggagatttacccagcactctgagataaataccattatccctctgggcacacagaggctcagagaggtttagtcatttgcccaaagtcacacagcctgtacgaggccaggctgggactcaaactcagttctgactgattctaaaatcatgtgtttaactgctgcactctaggaccacccgcaatggatctgtgaaccagaaccagctctggttctgacctgcctagtagggcctttggcatttgggggaggaggccattggaagtccgaagcccccttccagattaggcatgattgcagtaagagaagagacagaccctttggccccccacccctgctcaggctcaaaaatgcagaccctgccgaaacagtccttctcacccagaagcaccccatagggtgggctgagtaaccttgggggcctcgtcagtcttgggctgccccatgccctgcacagcccgcctgaggtttgaggaaggggcagttggctaggcccagactggagaaagccaccccaccatggctcttctgcaagaacccccggccagccacaagcctaagccccctccttaaaagctcctcctctgaccttagctgtgcatcaagggagaaaagaaagctccaggccgggtgcggtggctcacacctgcaatcccagcactttgggagaccaaggctggcagatcattaggtcaggagttcgagaccagcctggccagcaaggtgaaaccccatctctactaaaattacaaaaaattagtcaggcatggtgacacgtgcctgtagtcccagctactctggaggctgaggcaggagaattgcttgaacccaggaggcgaaggttgcagtaaaccaagatcacgccactacactccagcctgggcgacagagcaagactctgtctcaaaaagaaaaaaaaaaagaaagctccaaactgctctgctgccacatactctactcctcctgtccctccaaggaggcagggatgggggtggagtgtctagagggaggctgcctgctggcctggggagggatccacagaggctatgacaccacccctggctgggctactgggctcagaggcccccggtcagcctgcccagagcctgccagccaccaggcatgtgacccaacaaccccgatgagctgagcaaggcagggtgaaggagaaagaggctggctaggaccaggccctggctctgcagccagcacaactgggtaactgtcccactcctctggggcctcaggccataatgttccctggtttgggacagaggggacagttgaggtcattccatgtgtgatagtagacacctggattctcagagagggaaaatctaaggagctgggggcgcgccctggatagacagagaagaagacggcattccaggtggagagctctgtgtacaaaggtatggaggcaggattgcagaggcattttcagacaacagcagagaagcccagttggctggaaccgagagttggtctgaagctcagtgaggctggaggttggcgaagcagagaaggcctagagtgtgcggtggctttggcaacagaaaccaaagcctcagagcttgggaaaagttctccttggtatctgtctgtccctgggagggggtgcctttctttagcctatttgtccccctccccaaaataccatcagccaagaaccccagtgcagggcagagacctaggaatttggataatgggcaactctgagatgtcaggcaatggggaaaggagagctcaggtgggactaggaggggtaggaagcccgagggctgcagtcaccatcttcagaccactccagagcttcctggggagcaggaacagaggacaggccatgaagcccagaaaggcagatggcagcagaatactaggaagacacctccaatagtctgtccaaagagggtgaggggattaggaagtacagacatatcctgagttacaattttctattttaaaatgctatgaaagctatatgcatttggtaccctcctcaacttatgacgcagttgtgatggggttataaggttacttcggataaaccaactctatattgaaaatatcgcaagtcaaaaatacacgttcgggccaggcgcggtggctcacacctgtcatcccagcagtttgggaggccgaggcgagcagatcaggagttgaggagttcaggagttcaagaccagcctggccaacgtggcaaatacccatctctactaaaaaaaaaaaaaaaa

SEQ ID NO: 32703 - DNA, 2887 bp, Homo Sapiens
ttgtttacaaactcaggtacccgcagggcctagcaagagacttaaatgactgataagaaccgtgagaaacatgttgcttccagtgctaggagaggtatgagcagcctctcacctgtgagctgtggggatcacaaggctgcctgcctcagtcttggagtcctgttgggtgaatgaggcagatgggaaagagcctcaccagcagctgcttttggagcaggggtccaaggaagagagggtggcctcgacatcaaactgcctggatttttctaccaccctgttacatcataacaacttctgaaacacacaccagccctgagttctgggctcatttgaagcctggaatagcaataaatctttttaacttgcggacagtttccccttgccttggctgcatatttcactgatcacatctcaggatttcaaaagcatttttggggtggggctcttttggttggaagggtttgttggaacggtacaggtgagccgaggtgattccagggacggacccttctgcaggagcttgagcttgcttgttgtctctgcttcatcgccatccagctcccttgtttgctattttgctttccatcacatcatgactgcggagagcaaaaatcacctagtgaccattgaacaggtcccagagacaaaatctttttatctgaggaatttaaaagggagcaaagaccacctggtgactatcaggccatgcagaggcaaaacgccttatttggggaaaattaaaagtaattagactttcctattatctaaagcaggcatctggttccagatttcttttccccgaaaaaaaccttagaagtaactaaaatttctgtacatctccggaatgccatgctgaaactcactgcaaccccacggtcccgctttaaggtccataaatatccctaaggaaaaatccaccgtggtacattcagtcctctcaccgaggtgccccatggcagtcttctgcagcattcttctaatacctttcctttttcaaacctatactgttgttggtgaattctttttaccaacccacgagttgaccacttcccaatgccggggatctgacacctcacctggcaatgacctccacagccgtttccctctgttggatcttccagccttattctcaacagttcatttttagttcacattcttgaccgaatctcagtagctcagttaatctttttatgtctgctctgctcttgggtcatatgttccgtgaggtttcttaggggtgggggatgaggagttaaaggtggcatcttcaatcgcaggtcaaagcagactttaataaatggtgctgagccaactggaaagccccttggagaaagttgaagttagacctgtacttcacaccatatgcaagaatgaactccatctggatccaggatccaaatgtaagaaaatgaagccatataaatacagaaggaaacgtggtggaaatatccagtggcaacaaaatattgacacatttgactacatgaagataataaaaatgcttagtaaaaacacaataaaatcaaatgactgggagaaaaatttatccagcctatataatagacaaacagttagtgttcttactatataaggaattaaaaattaagggacaaaggaccaaaaacttgatagaaaaactgggaaaagacatgaacatactcacgtaaagatataaaaatggctctttaaaatgaaatattcaaactaactcattagagaaatgtaaattgagataatactgagataccatttatcatctctaagactggtgaaagaaagaacaacacatttctgttaggcaaggctatagggaaacacactgtcatcactgttggtaggaatgcaaactggtatgacttctggaggggaatttgtcagtacttaacaaattgcagaagcatttaccctttgacacaaccatttccactgtgggaatttcccttgaagatgcacctccaacagtacaaacatacagatgcacaagattactcattgcagcactgagactgcaaatattggaagcaaagtcatgttcatatacacgagaaagcctgagtaaaccatggcaccaatggcatacccacatgatggaatattattgagctataaaaaaaatgaggaagatctctatgaatcggtatagttattttcaagatatattaaatgcaaaaagcaaagtacaaaaagtagaaagtggtactttgtatgtaagaaagaaggagatgtaagaaagcacatgtatctatttgtttatgcaaagtaaataaggaaagattggccagaaagtaatgagctgtctatggatggtaggtgggtttagagtagaaagaagggagaaatcataacggtgtaaaggaggaagggatggaacactgccgagtgtatctgagtatattttgtataactgtgagtcttggagccatagtaatgtttctcatgccccccaaaataattaaagtcaaccaggatatgaggagagttcaaaatgaaatacaaacagtaacaaatgaacttaactgtatttcagatgcataatacaaccacattgaaggaggtgggcaagaaaaataagaagttatagcattttgatgggatactagaaagagaaaaggaactgtacacaaataccagagtctagttagcaaatttttcacagaagcagaagttagtaattcaggaagtattttatgtgtgtattaggatggggaaaacaaatatatggtaggtaatgagaacatgggggacatattgaaaggacacaggaaccaaattgaatgtccctcagtggccaaatcttgggcaatttgagcaataaaataatgacaataatgggttatagtccactgactaaaaatacactatagaatcccatacacaatggaatcac

SEQ ID NO: 32704 - DNA, 2288 bp, Homo Sapiens
ggcttcgcgtcccgcctctcgcctggctggccgtggggggcctggacgcagtggcctcccgaatctcccaggaccctaatatcgcccgaggatgctgggaggaacgctgagccgacctctccgttaggctgaagattgcacaaaccatgctaatggccagcatggatggagggagcgtgtgagatgtgtggggcagcgtgctgcatctcagccaactccaggagccagttgatgtgatggactaccttaattgatttttgaatgttgagccagccttatgcatgtgggataaacccctgttgatcatggctggctggagtgcagtggtgcaatcatggctcactgcaacctcaaattcctgggctcaagggatcctcctgcctcagcctcccaagtagctaggactacagttcctgctggaatcttgctgttgcccattcaagtctggtggttcctgtgtgttggggtggccttgcttctcctgctcttagctctggaggagccctcggctggtgctgcagtgaatctgtcagagtcgtcctaaccagagtgcccccatcctgaatagaggctggataaagccaaacctgctgggttatagtcccaggggattgggcagtcctggtcacaagatatttaaggttgagggaataagttaatgatgctaagtaaataaagaccctgaattctttcccgtgagagattcaagaactcactcttggcatctgggataagaccctttttccggtaacaaacccctgccctggccctttcttccttctggaaaacttaaaaaaaaaataggcctcaaaaagactgcattaatctgagaaactgctgaatatggctactaagagaagctgggattttctgatttttaatgtcggtttcaaagagagcaggtatactttgcaggagggaaccatgctagctgcagaatcatggacgagctggaccacaagtttttacacagtgtgcatgcttttgttctcctgtcaacttctgttgttttcctgtcaacttctgttgttttcatcaaaagccatcaacccgcctcagccagggcatcataatgtacatgcaacagagtgttccaagaaactttcagctgagaccctaagaccctggacatgcaatgccagagtgaagtgtgaggaccacagctgtgcaggacatgcagaaaggaggggcagagagccaatgagatgatgtcccacgactcacctgtgtcagtggagaccgaaggagacttggagggtgcttttggagagaactgctgatgttttgtgagcctcactctctctgtgtgtggaaatgctggaggatgaaaccgtctaaactctcctgaagtcccgggaatggagttttaatggtaatgtgtgatgggatgtgtgttctcttatggtatgggagacacagaggactcacagaggactggcctctgcctcttgaccagggatcaggagagatgggaactgagctggtcagctgctcttcagagctggtcgaggagagatttctgctgtgctgggagggcctaaaaacatgcatggatggagcccaaggaccaggtgcagatcttatgcaagaatgaaccagggggtgacttaggtccaccaaaagactgcccagagggacaaaaggctatcagtgaaaagaatccacagatgaactgccagttcctcagggctgaggcaagatcttaattttgagtaggagcagagtgtattacctacaacaaggataccacagatgagaaaaccctagttttaaacctgctacatccaaagagagcaatgcaactctggcagtagcaaaaatgttgtgcctctcctttcctcactcctaatttcccatcccagagaagggtcagaaaccatcttctgcaagatgggaggaagggtagcagccagactgcaaaaagggagaagaaaccagctacctcttgctgttctcagtggcagactccccacctgcaacaggtcaggtctgttactggagagaaaagacaggacatttttaaattctaggtatagagcaataaaagaagaattcaagcaaagggatcaggaagaggattgctactaagaggcagagaaaccaatgaagccttttgccatctcacactggaaagacaaaaagtcatagaggcttgatttttataaggaaagagaagtgagaaactgacctcgatactttgttggacttgcctaaagacatttgctgaattctcgggctgtgctgggatggagattagaggccaaataaaaacctctggtaagtagtgc

SEQ ID NO: 32705 - DNA, 2630 bp, Homo Sapiens
atgcatggggatggtggtatgggagctaatacaattgtggtgtcaccaacaggccttggctctcacctcgaacataagcccgatgaggacgcagagcaccaggcagaagccgatgtccgcatggttgtggatgacgaactcctggctgaagagcggcgccgcgcccggccgcattctcggggcccgaggctcagccgctcgcggtggagaaagcaggccgcggaggaggcgggcgcccaggcctgcccggacaggaagtgggcccagctttcccactcctcgctccgctccttcctccgcgggaagggcaggccccggaggcagcgagcgccccgggggtggccgggcagccggatgctcccggggttgcgggctgtggccccgggggctgagggcggcgcgggtgcggcggaagcagggaagccgcgaaccggccttctggctggccacagcgccctgcacggacgatcagtgaatggagattactcaagtatttatcgagaacttgcagtgggctaggcacagttcaggtagatcaacaaaccgaaagaccctgccctaggggagctttcgctccaatgcggggagagggtggatgattgcagttttgcccagtaatttttgggaccctcatgccaccattaattagctacacacatttcaccgaaagtctaccttacatattaatcagaagaagtggaagaataaacacagaagaagcaaaaaaggaaggaactttctcactgaaagtttctatttaatattaagtcttaaaagtactcctggaaggacaaaaggtgttcttaataaattatattcgcaaatattggatttaatcctaccagtaatgaagcagtcagttactttctagatgtgcagaaatacgtaatgaacaaaaaaaactaattcctattccattttttattaggtccacagttatttcacttctaaataaatatggttttttaaaagtggcacgcggtggaatgtaattgagacaggatggagttcctagagaaattttacttcctcaatctgcactccaccttacttaaaatacagtcttgggtctgtaattcccttatctgactctcaaggaaatgacaaagtaatgcctagattggactaaacctcatttaacttcaaggctgacctttctcaaagttgaaccttcgtcttgtgaggaacagaaagatcaagaactctgaagcacctcgactttccacctgtgaagatgtgttcaaatttgcaacgtgcggccacacctatgaggtcactccctctggaggaaaccagctgccactttgtgaggatactcatagtcctgtggaggcatatcctccatatggctgagacctcctgcgaacaaccatcactgacttgccagacatgagtgtgccaccttggaagcagattttccagccccagttaagccttcagatgacatcagcccctgctaatctcttgactacaacctcatgagagaccctgagccagaactagccaggcttacccctcatggttacaaagtggctgcaacagctccaggtgttctatcctttaacacagaataactcaaacaacaagacccaatattcagacaagaaggaaagggacttttggagagtgaagaaaactttcctagaaacctcaaacttctccccatgccttattggccagattgtatcccatgcccatttctaaaccaatcattggcaaagtgagtggaattgacgtgattagattaactttaccaagaatgcatcctcagagaggctgagaaaaagtccagcctcctttgaagagcctggctacctttcacctgaacaaaacaagaattctgatgaaaaatggagaatgtatgtggagcaggcacccggagtgtctatgccaggattttttttcagtgcgtttcaccggttatatttttgtctctttaccttacaagatatgtggcacgtttgcctaaaacaagccttgctttctgatttctgtgcactaggcacttaaaccttgcaaatgtcgcttacctaacagtcactgtcaaggagtacctggctaaagaatctccagctagacaaagtagaagtgtctgtgctctggcagttgaatatattgtatcaggctcaacagcacctttcaccaaaggatgagacttcacaaccattagatcttcttttattttgtttttattaaaaaaaaaaattttaacacaccattgctaacttgaagccattagatcttcttacccccaataccacaaaagtttagtggaatcaggggtataccaaggcaggtggagtaggggagctgggagtggtcagcccccagggcaggcaatgagggattgtgaatctgtgaagaattttaaagcaatgatacagctctaaatgcaatgtactatcctggacttagccctggaaaagaaaaaagatattagtggaaaaactggtaaaattcaaataatgtctgtagtttggttaatagtattataccaatgttaatttctgtgttttgataaatgtaccatggttatgtaagctggatgaaagatatgtgggaaatctctctactatttctgcaactctcctgtaaacctaaaaatgtttcaaaataaaagatttaatgct

SEQ ID NO: 32706 - DNA, 2437 bp, Homo Sapiens
ataatgcagcagggccaccagtcagtttcagataatgatgtcaaccccggccaccaagaagtaaccttgtctccactagacagagcaggttgcaggaatttagccaattcagaggtcttgttctccataatttggaattttccttcggatttgatcaagttggatagagttggtcaaacccaatgggaaaaagatgaaaacaacaagaaacagaaacaaacagcaacaacaacaacaacaaaaacaatgcatttaattaaatgaagatgagctcatgctggagtagggtggactctgaacccagtgggacaagcgtccttattaagaagagggaaatctggacacacacagagcagagaccgccgtgtgaagatggaggcagagatcggagagatgctgccacacgccacaaatgcctggggctcccagaaactacacggagcctcccccagcggcttcagcaggagcatggctcggccaacactttgatcttggtcttccagcctccagaacgttttcctaaaattcccttttccactggtgtgtggtgcaagatgaggcacattttccatggatggtgaacagagggaggagccttttgatcacaaccaggtcaccccacttctaagccactgtgcctccagccccacaagactaaggagagagagcgcagcgtggtggagagtgagctgtgctgggaccattgtttccgtaacctcgttttctgtgtccagctgacacaccttcaaagtggcatcaggtcctaaactgtagcttgcaatgtgcctgtttccagaaaccaaggtgaaagtgcttttagacagtgttcccatgcaagagtcccttcccagcttttttctggaaatgcatgtttctctgaactctgagtcccaagaaaaatcacttgagacaccaagaaaatgggggaagtgctaaaattgtgtgggaattcaagcttaacaataaacatcaagacatttttgataaaaatgaatccactgacatcggggaggagcaagagaacagcacgctgacactgggtcagaggctaagaccgacatttctgggaaccactcccggaagggcacagaggagacgctttcagcctctcatcagccagcctggcctgtagctgctgcacgttatgagtgtgttcctggcatgactgcttctaacaactgggtctcgcttgttgcccaggctgtagtgcactggtgcaatcatggctcactgcagccttgacctcctggatcaaggtatcctcccacctctcagcctcccaagcagctgggactatgggtgcatgccaccacacccagctaatttttgtatttatggagatatgggtctcaccatgttacccaggctggtcttgaacttctgggctcaagccttctgcctgccctggccttccaaagcattggaattacaggcctgagccactgtgctaggccagagccaacaggacttactgagaaattatctgagagagaggggtcaaggaagactccccctgttcaaccaagcaacgaggtgaatggtgctgctgcttcctgagatggggaagactgtagaggaaacaaaccaggaacgacaaatcagtaatttagctttgaatacattaggtttgagatggctagtctgtacccaaacagaccacactgtggcatctgggcagcaggatctgcagaatccagcaggatggatgctgatgccaagctgagtagacagttgggtctgtgagtctaaagctcagggaagacctcagggtctgggatacaaatctggagatcatcaccctgtccatgaaagccaagggaatgatggaagatactatgagaaaaagtgaagagaggaaagagaagaggtccatggaaggagacctgggagaatccaaccttcgattagatcaggaagaggagaagaatccagtaaaaaactctgagaagtctctgggaaggaagtcttccttccttcccctgtaccaggagaggtgctatcccagaaattagtaaagaaacagtttttgatggggagaacaggatcacctttgtcaactgctgctgcgagacttggaaaaataaggactgggaagagagcaatagaaactttgaaagccattggttatcttgataagagttgtttctgtgggggtggtgagaactggagcctgactggatgggttcaagagagaatggggagttctagccaagaaggctgatgaggatgagtcaaattaaaaatgttttctttttatgagtcctctcatatttactgatacaactgatatattgggtctccattctgccacattactttatattgatcatgtattgtatctgctatgcaattgtattgcatgtatctgcatggcaattgtattgccatgcaatgtatttttttttactttaaaaattatatttataaaggtttgtaa

SEQ ID NO: 32707 - DNA, 4961 bp, Homo Sapiens
atcagcctcctgagagctgggactacaggcgcctgccaccacatccggttaatttttgtatttttagtagagatggggttttgccatgttggccaggctggtcttgaactcctgagctcaggtgatctgcccacctcggcctcccaaagttctgggattacaggcgtgagccatggtgcccagcctggctcctgttttttgagacagggtttcaccctgtttcccaggttggagtatagtggtgccgtcatgacttactgcagccttgaactctttggctcaagcagtcctccccactcagcctctctagtagctggggctccaggcatgaatcaccgtgccagactaagtttttttaaaattttttgtagagagaatctctctctgttgcacaggctattcttgaactcctaggctcaagtgatcctcctgcttcagcctccgaaagtgctgggattacagttgtgagtcactgtgcctggctcttttaatcttgaaaactctgggaagagctcacttctgtttaggaggctgccttgggaactgcatctcctgggctggtgctctgtgctgcttggagtctgcagaccctatctgggtcgcttggcctcccgtgcacaagctgccagaatggaggccccattctcaatgtgggggctgcccaaagagcagggagcttcccacaggacagaggctgggcacctgcttggcctggttcttccttttcccagggctccaacacccaccccctcaggtcctcccaaaccctgcaggtccctggcctggtccgtccacacctacactcaggaatctctacacatctctgagttgctgcatctgtcttcaggcacagcccaccagcccccctgggtacccaaagacaccgcaaatatcagccattccagacaacgtcctcctcccgtgtccctatctcatggagtaatgcctctaattcagccacaccaagaccccacgctccacatcccctagaactctcatctcctgtggcccaacatggcccttcctttcagcagtgggatgtgggaaggatcaaggtcacccttgtccaaatcccatgcagacaacggtgttggagtcttgggcccaaagaccagctcctagaacctgcagggaagcaacggcacgttccatctctccccatgccactgaggaatcattggtggcaggattctcagcaggcatggccgtgggtgcacagaacagagaaaggatggcctggaccacacacatcactgtgtgcagatgctttcctagacactgcagccaaggacacagaggctcagagagaataacctccatctcctgggtcccagcgattctcctgcctcagcctcttcctatttcacaagtagggaaactgaagcccaggtaggcaagcctgacttgctggagtcacacaggaagttggcagctctgctccatccctgggatctggagcccctgctctggggaaggagaggtggggcgctgccttcccagagtcccctcaagctggcagggacggctgtacccccagggtcagaggagaactaaaaggagcggaagctggcctgggtccagggagagacctcgtgtttgcccaaaagggagctggagaggggcagctgggcccatatgcagggaggagctgcagggagctggtggcggggcagcaaagagaagtggatttggtgggtagaggggcccctccttggttctagtcctccccgcagccccttgcaaacaggcggggctctcctgtccttcttgtctcctgcagcaagccctacatgaagaggcctctttggtgagtggcagctcaacctctgctaaatgcctccagtgatggggagttcactaccttccaaagtttttaaaagatgttaaccactgctattcaagaacaattctagaatttttttttttttgaaagacaaggtctcattctgtctcgcaggccagagtgcagtggtgtgatcatagctcactgcagctttgacttcctgggctcaagcaatcctccctcctcagcctcctgagtacctgagactacagatgtgcaccaccacactggctcattgttttcattttttgtagagacaggatctcactatgttgcccaggctggtctcctggcttcaagcaatcctcctgccttggcctcccaaagtgctgggattacaggcgtgagccactgcatctggccttttttttttggagatagagtctcgctctgtcgcccagggtggagtgcagtggcgtgatctcggctcattgcaacctccgccttccgggttcacaccattctcctgcctcagcctcccgagtagctgggattacaggcatctgccaaccatgcctggctaatttttgtattttttggtggagacagggtctcaccatgttggctaggctggtttcgaactcccgacctcaggtgatctacccgcctcagcctcccaaagtcctgggattacaggctgagccaccgcgaccggccctgctgttgcttctgaggtttgaaaaccgctgcctcaatgctcctgattcagctcttcttacccaaaggttcccccacctcatctactctgttcctgcacagtcgcccttttctctgatgccccgggcaggtttctctctgccagctccacgcttctggagtcccccatccgtcttggggcccagctgcccactgtctgggttcagaccttctcaacactccctggcttctctgccctagttttgccttctccaatccactcttggtgggtggaagtacggttaccatggtaacttgaagacaacgcaaatctgattgtatcattacaatgactgggaaaacctccagtgccacaaaataaagctcaagtcactagctttgcagtccaggccctttaccattccggcagcatttctgggggctattctccttccccccactgcacaaccccgcctggccaccccaggctcaggctgcagaacagcgtagaccagggagtggctttggggtcatgctaactacctggtttttgtctctttcaggctgtttgctcagttgcaaaatgggaaggacaacagcacccgcctcacaggctaagaggctgtgtgtgaaaagcccgcagcacaggatctggcacgcgtggacgtgcgggatgggaggaggggatttcccagctcctcatctctgcagggactggccttggcctagggaacactagctgtccagggagggggagctttccctgagccccccgatgtgtggcaggcagaggagagcaagctacttctgggaggggagttgtggggaagggcaagttagtctttactgagggtggcagtgagctggcactttggtctcacctcggctgcagaaacccaccctgctcccgtcttatttcctggggatttcagctgtgtgcaggcacagatgcatctcccaagtgcctcatgcttgccttgatctcctctccttcctctggccagtcctgaacctcttggtgatccacggcggcacctctgtgtcctacatccttctctggccatctccttccctccttccagccctccctctaggaccctgaccccaaccatccttcatccccatggggacattcagtccactgactcatcaccctcccctgtccctctgtgagagaaggagcaggcagagaggatcttgcaagagccttcagcaactctcttccacccatcctgttgcttgctgctttttttttttttttttccaaaaaaatagagatggggtcttgctatgtggctggtctcaaactcctgggctcaagtgatcctcctgcctcggcctcccaaagtgctggattacaggcgtgagccaccacacccggctccgttccctttctaagcagggtgctccttttcttgccatttcccccatcctccttcctctcccacagctcacttccctctctactgaatctgctgaagatcatgcagctgctgttcctgcctctaaaaccctctcttggctgggtgtggtgggtgacatatgtaatcccagcactttgggaggctgaggcaggagaatcacttgaacccgggaggcggaggttgcagtgagccgagattgcgccactgcactccagcctaggtgatagagcaagactctgtcccctccctccaccaaaaaaataaagccctctctgcatccattccactctccactcttgctcattctctcctgccctctaaaaggtgatctgtctttggcagattcaatcacttgcctttctcattctctcctgagcccactattccactctggtccccaccacttcccccaaaactgctttgaaccatcgcactgcaacctgttgcttagcccctccatctagtctcaggcgttaggactgactgcccagcagaggctggtgcaaccaatcacctcctttagtaagtttctccctgggcttcacctcttcacctgtgggctttccacctgtctctctcttttttttttaagacagtctcctctgttgccaggctggaatgccgtggcgcaatctcagctcactgcaacctctacctcctgggttcaagcgattctcctgcctcaggctcccaagtagctgggattacaggtgcccgccaccacaccgggctaatttttgtatttttagtagagtcggggtttcaccatgttgcccaggctggtctcgaactcctgaccttacgtgatcctcatgcctgtaatcccagcactttgggaggttgaggcgggctgatcacctgagccaacatggtggaaccccatctctactagaaatacaaaaattagccaagcgtggtggtgggcacctgtaatcccagctactcaggaggttgaggcaggagaactgcttgaacccaggaggcggaggttacagtgagctgagatcgcaccactgcactccagcctgggcgacagagtgaggctccatctcaaaaaa

SEQ ID NO: 32708 - DNA, 864 bp, Homo Sapiens
atggcagctgcagtggcaggtgaaggcagagagagaggcaggctgggtccgcctggcagcctacgggaggaggcgggagccgggaaggaggggagcctaggcccggcgtggggaggccggcaggaagggcctcgagcccagtgcggacctttcttcagcctctgtgcgaccgagccgcgcgccaggctcctgtgcgaggaggacgcgctgactccctccgacctgggctccgatggagcagaaatagcgggacctggacttgtggcgcgcctggtgccacatctcgggctctgcgagcgtcctggcgcgggatcctgccgtttgcatccaagagaggggaggacaggggcaaaaggatgcagggaggctgctgatttccactgaagagctaatttcctgtgagacattaacagtgatttaagaaaaagattcctgtaactgtaatgtcttacaataacagaatgcaggagagcacatatcaatgaagaaaagacaaaatgtacttatccatgaagctgaggttaagaaaccagtgtcttcaagagccagggacagcactgggtctgtgcagagttgagagatggtgatgacatgtggtttccagcattcctcacccagtccagggacactgtgggtgtgcccagcttaagtccagtaactggaaatacaagcccaagttctggagagtttgagctgcagagatatatatgggaacactttgaatcttgactcattggccataaccagcagagtggaaaatacaagaagagaaaaaaacattgaactgcgattttataacatcctttactaggcagagagaagaggaaacaccaggaaagaaaactgtattacgatgtgaaaact

SEQ ID NO: 32709 - DNA, 3047 bp, Homo Sapiens
gttcaggtttatagagctgaatgggtgatcaaactctaattaaaaatagctttgaatattaatgttgaattcttctttcttggtttcctttagtcttcattctttattcagagctcttaatcatattgctacactagaatatgaattgtatattaggagtctggggaggaaaggttaaattgtcttttacatcctcttctcactcactctggcaacctatcctgtgtccccatagaactgagaagtaaagccctgtgcaggcctgctttagaagactttacatcccagcagaggattcaggcagggactctcaggattttaatcagactgcctttgaataatgtgatattaaattttatttttctcatagactctcaaagtaccacttgcttgaaagtagctacttgtgatctttaatttccttatattgtgatagttctacttttcagtctttcctgtgtatctccatttcatagtgcgttagtacttaaacttcggacacttttccaaactgttaaacaagtcaggaatgcttttcagaatcgcagtagtattattagggtctctgtgtctaggacttacagtcatcagtggtcatcactgggactagaggtgttcttttttttcctcttctcctttgtattaaaaaatagattttgctactgtataatgcggcatttcatgacttcctcttgttacttttcaaggttattctaaagagatggagatcttcattagaggctatttctcataatagtctgccttgcttattttcatactccccctgaaataagcctacttttgcaaacaggccatatgaatcaaattttatgtttgttcctcactattgtaaatctgtgttttaaatattttataacagagcactaatggaaacctaataaatacaaacaagataactattacccaagataacatggaaatacttctgtttttgaagttaacaacaccgtctgccctcaaagcacatttaggagtatcaaccaagaccagccagttgacatgtttttctgtgtggcaacctgcccttaaattgtcagatcttaactatcttgtgtttgctgtgcttgcagccataagctttcctccttttttgcttatccctgctgtttgtagggttagtgtgccctctgtcagaaaattgggttttctttactatacctgcaaaattaccaagggttaccccaatattgtctagaggaattaaaaagaacttattctcagttgacaaaagtattactgttatacatagttaattggaaagttggccaactttggtcacctatttttgagtcttggctatgcctttgtaattagttacatataccttctgagaccttcagataatcaatgggcctttccccattagaggtaggttcccagcctacaagtatttcctgtgatccatggcaagcctccagagaaaagattcaagctttgcactgcccttttgttgattgtcattgaaaacttactttatttcagaaagtatcaaaaataccaaattggtctttcagagagtatgtaaatctggggcttgcccttggatttcacttgttaaacaccctcaaacttaaaagaagaaaatagatctccagctggtgaaaattttgtgccccaaataatatattaatccaagtctaccaaggtaactaagtaatggatgttttctctcttttattacaagcaagaaagttcatttgcagttgtaaaaatgattaccgaactccagacctatttgctataactgattggaaataatgattctgatttttagtctgggtaaacacatacttcggtgtgaattttgataagggaaagacttgtttggtagcccaaggaaaaacaggatgtatttatacagtgaatgttcactctgcagaggaacttccctccagttacatcttcctcatacattagccacctccacacttgacatagatgccaacatgtttcaaaaccaatcttgaaggagcctaaagagttgatggtcctctaggtgaaagacaagaattactgtattgcatttgcttatagggaggtgtgtttttgctaacttgaagggatatactgtatttcaaataagtgtgtgacttaatattttgggatttttttttcctcctttaaaaactggacctgaacacaagctttgagttgatgtttgtaataatctcaggacctgaaagattgtagcatttagtgtgtcttaaaaattatgtactgtaccagccatggatttttgtaaatatacctgtctcccttttttgtattttagtaaaaaaaaaaaaaaataaatttaaataaaagggggtggtgatgacatgtgaatgggtgcgggtatgtgtgcgtgtgtgtttgtataaggctcttttgagatgaactggtgcttgtttaatttccagctcaaatcggagcaggaatatggacaaactgctgctactgaaccctgcactgagccgaggtatttccatttggttaactaaacgctagctaccaggaaatgacgcagaagtcacgttcttcttcccactgccatcttgcctttgcattctcagttctacgtgccctttgaactttaatggtaaaacatttcacactttggatggtttgcttgtctctagtttttagaaagctcttatcactccttcctaagaaaaaagaagggcaggtaaatttttttaaccaaaaaaaaatcacacatttcataaaaccctgatgaattttggatatgtgagagggcataaacattcctaaatatggacctgtgaatttagtaaattacccccatgaatatactccttcagtgcagggatttttgtgttttttttttttttttaatttttttgcaacagccttgctcatattccaggtgtagctagcaaacccctgtttttgaagcaagagccttatttgattcagtgtagatgtttcctgtctatcctttgtgacagggccttttaatgagtgttttttctttttgtatatgttacgtgtttgttgttgtattaaataaagaggaatgtacatac

SEQ ID NO: 32710 - DNA, 2262 bp, Homo Sapiens
atgaatccaagtcagtccagaaccatggcccatggacgggcagagcagctgctggtctccgcccctctgtctttcctttctcctcccggtggcttccctgttcctgtccctggctttcctggctttttggatccccatcctggctctggggggaaggaggatgggtctggagcacctgtgagacccgagcctgggcccaccacagcagaggatgcagcctcccaaccccaagagtcccagattggagtccctgagagaagctgggccccgtttaaccggacagaggatgactttcttctctggagtgctctgggtcacgcttggggacacatgaaggatacgccctccctttcaggctcccatcgcacgttgaacctggcttgtgaacacagccctctgggacactactaggaacaaagtgttccggatgctgcagaagctcagctgccacctggaaaacctgtttggccactttaggtccagatgacgggagccagtccggctcaggagaacagagctggcccagtaacacctcgcttcctccctgctgcagagacctgggagggccctgcccagcacagcacactggagtggccctgcggcagcatctgggctgctgtacccatggtgcctcccagcccgaggggctcccggcagctctggagactcctgctgtcacgtcacctggcccctcaccatcaccatcctcatctctcttgggaattaagacattgaaggaactgctgctgccagcaagagaggctgttgcaagaaagaaaggctgctgcaagaaacgcaagaaaggctgctgccagcattgcatttctgtcaagaagctgccccgcaaaatttatggatgtatcgctgtatgcacctaatagcaagctctactggatgaatggcttataaagatctcccctgaataaaattgtggtttttaactttagaagaacaatgtcaattctctctgcatcctttatgggagcctcagcatgtgttcagcactggtatttattctatatgactgcttgttaagcaacaggctgaattaaaatgggaaagctcaccgaggagttttcttgaaatactgcttttctagcaaggagaacatagaagatggtgaggcagccgcagctggagtgctgactgcccagaagcagaggggcaaaatgcactccagtatggattttggtcattgaggccttgctgagagcatgccccaggctgggttcacttttgcctgaaggggctgcagcagaatgaaaactcaactgtgcaaaacaaaacactcaaattttaaaaagcacaagattctgctgggatcatctggcagcaggggcagcaggaaagacgtaatagagatttcaaagcaggctgaggaggaggacagggcattccagcctctgtggttcagcaatctcaccactccacaaccgacggtggctttccagcacagatcttcacggattgcagcattcaggacctgagtccatgcccatgcagaggcccattgcagtgtttgcttagcatagctgcatttccagaatgtaggcaggagaagctgtaaaagattctcaccctgccatgcacactgatggctcacattctaaagagtcaggagtcattttggatttgggctgacctggtagacttctgaaagacagtgctctgggttcaagttgtcctcagggctggatgatccatagcaaatatcccctgatggataagcattgtgctgagagacttgcctccatcagctgtgtaaacctcaggatgacctgcacacaggtatactaaggcacacagagaccagctcgtagtcagtgacaagtaacttgccaagagctgtggtttaaaagcatgtctgcaaattcttggacactcttgtcatccagaaatagagtctaaccctcctcccttgaatacgggctggcttcagtggtggaaatgacaatgtgtgagtttgaggtttgattagaaaagatgacacagcctctgcctgactctcaaggcccttgttcttggacattagctgccatgctgggaggaagcccagcagccacacagagaggccacgacagccgaggtcccagccaagccagcatcaactgcccaacacgtcaatgagtgatcctgcagagcctcccatctcctagccaccgcagctgatgctctgagagcggaggcaagctgtccttgctgggcgctgcttaaactgcagatgtatgaacaaaataaaaatggtggttattttaagacact

SEQ ID NO: 32711 - DNA, 3842 bp, Homo Sapiens
attctccatccctgcattcctccatcgcagcatccctgcatgcctccgttctctgcatccctccaccccagtatccctgcacctcttcatccctccattcctgcatccctctatttttccatccctccattcctgtatccctgtgccctccatcctccatcccagcatccctccatccctgctccccactctcacttcccttcccttcacagacaggcttttcctgccatcctcagaccccacccagggttacctgatgcctttccagctgcacacggggactgactcacctctctctttctcagtcccaaagtcccgaaagagagcatctgatgtggtcagcttgtgacaaggcgtccaccttctgtccatgacatggaggccaggggaaggtctcactgcccagcaccccaccctgtgctcccaggccttttgaatgttcctcctgctcagcccagtgactgcgggctgtggctcctcctccagcctcccctcgaggtcctggtcttacttaggaggccccgggtgtagatgccttcccacccaccaggcattgccccttttcctggcttcacagactcgggaataaagtttccttctgtttcccctcttgcagaaggagatccggttggcagctaaaccgcgctgggaacaggggcctgagtcctggactagggctctttccccggggctgctgcagatggggaggagcctacacccgcctcccgagtgctaatcagacctgacaggctggagaatggccagtcagcctgaggccaccgcgggacaccacctaggcccagcttctccccccaccagagggcgccagagcccgccaagcctcgtaggagatggcaacagggcctgctgctgccacctagcggccaattccgggaatgaatctcggcacgctcattacccagcgactctgcccatcttgaccctttatgtgaagcagaacagccgcttccgcagtgagctgtcagaaggcgtcgtgcctgtcttgctagtggggaaactgaggctcagagaggcagaagacttgcccaagatcacaccaccgggacccaggattcaagcgcaggcctgcccaggctctctgtggcctcctggctgcgaggaggcagccagggaccaggtgccacccttctgagacacctgagatcccaggcccgagaggatgaaggcgggattacctggagcgtgtctgaatgctggaggaagaagggcagctgggagatgaagctgtcaggatgggccgcatcccatttcctgcctcgtttcagttcaactttccaacagacctccctggctcgtcttgctcttctctaatggacaaacaaacaggctcagagaggtggtgtgacttgcccaaggtcactcagcttggatgctatggaacagggacgtccactgtcccagtctgtttatgggaagccgctctgcaactgtcctgacccaccacatgccccaccgctgtttctcttgccctgaccccttgttccctggaccagggtggcacagctccaggctcttgggcccttcccgagggcaggcacctgtgactgtgtccccaaagacctgagtggctgagggggccccacagagcttggacttcctggaggacaaggaggggtctgccagccacccccaccacgcccgccccagggctcccctggagcttccatgccagccggactcaggtgggtctggaggagcaccgtgcctccaatcagaccttgagatgtgccccctgcccccactgtgccctcccctgcccaggagtctggttgcaaaccctgattaaggggattttatctccaccagagggccagtaggtgggaagtagcttaaacaatgcaggtttataatctcacagttctggaggtcaagagtctgaaatgggcctcatggggctaaaaccaaggtgtctgcagggctgtgttccttctggaggctccagggcaggaaggggaggatccacttctgtgcctttccagcttctagaggctgcctgcgttccttggctcgtggccccttcctccaccttcaagccagcagcggaggcctgagtccttctcatgccatctctctgttctctctcctgcctcctcctccacactgaaggacccctgtgatcacactggcccccccaccggatgacccaggataatccatctccctgtttgaaggtcggctgattagcaaccttcattccatctgcctccttcattccccctggccatgtaatgggattcacagcttctggggattaggacatggacatcttgtggcgggggcataattctgtcgacgacaccaagaaacacttggatgttaaggattcaccgaacactgttcaggctgaggcaggagaattgcttgaacctgggaggcagaggttgcagtgagccgagatcataccattgcactccagcctgggcaacaagagtgaacctccatcacaaaaaacaaacaacaaaaaaaatcaggtataattacatacagtgaaacatatggtgactcaagtacacagttcagtgttttttttgtttttgtttttttttaagatggactcttgctctgtcgcccaggctggagttcagtggcgcgatcttggctcactgcaacctctgtcttccaggttcaagcaattctgcctcagcctcccaagtagctgggactacaagtgcacgccaccatgcctggctaatttttgtatttttaatagagatggggtttttttttctttctttttttttttttttgagacagggtctcactctgtcacccaggctggagtgcagtgtcacaatctcggctcactgcaacctctgcctcttgggttcaagcaattcttctgcctcagcctcctgagtagctggtagctgggactataggcacgtgccaccacacccagttaattttttgtatttttagtagagatggggtttcaccgggttagccaggatggtctcaatctcttgacctcgtgatctgcccgttttggtctcccaaagtgatgggattacaggcgtgagccaccgcgccaggctgagatggggtttcaccacgttggccaggctggtctggaactcctgacctcaggtgatccgcctgccttggactcccaaagtgctgggattacagacgtgagccaccgtgcccggccagttctatgagttttgatgaatgtgtcctgcttcttcccaggctccaccatctcttcccctaaaggcaaccaccattctgatttctctcaccaaagactggaaaaatatcccaatacctggatgtatgcctcacgtgtcccgctggccccagcacccaggtatagttagttactgctgtgcctggcttcactctcactttttttttttttttctttttttgagacatagtctcgctctgtagcccaggctggagtgcagtgtggcacaatctcagctcactgcaaccttcacctcccaggttcaagcgattctcctgcctcagcctctcgagtagctgcgactacaggtgcccaccaccacacctggctaatttttgtatttttagtagagatggggtttcaccttgttggccaggctggtctcgaactcctgacctcaagtgatccacctgcctcagcctcccaaggtgctgggattgcaggccggccttacctggtatggtttttaggttcatgttgatgcctggagtttcagtaattccctcccattcgttgctgagtagcactgcaacacatgcaggcagctatttggggatcttttcacctgttgatgggtgtctggactgtttccagtttttggctgttacaaatgaagcctctgtgagccacg

SEQ ID NO: 32712 - DNA, 2427 bp, Homo Sapiens
atgtcatctgcacacaactttccgcttcccggcccgtctcggggccctgagtcatcgccgcccccggccccgacgctggcctgcggcgtctgtttgtgcagagcgaggccccgccggccgggcttgacgtcaggctggcagggcctggaacggccccgcatcgcggccccctgggggcaggacgacaccgctgggggccgagggcagggcacgccttcggaatccggcttcgaagccggccgcctgacctggggcaagtgctttcaactctctgaacttcggttcctcatctgccagttggcagacgctcagcaaatcttcctagactcacggggcgaattgtacagttgggtaaatcgaggcccagagatggcaaaaggaccgtccaaggtcgtacagccacccggaattacaattcttttctgccgggtcacacgctgtcatccacgtgttacctaagagagctttccagcctgtgctaagaaaactgccccacatcatctgcagtaggacgggggagttggagccctggtcaggccactctgctactgaccacagttttctcatctctaaaaaggcgcagtaacaatataattaccgtatgcagtcccccaggatacagggtcaaaggagagcacaaccatcgcagttggaagcccatggggcagaagcaaggtctcgctgtgttaccctggctggagtgcagtggctacttacaggcatgatcatagcatactgcagcctcgaactcctggactagagcagttctcctgcctcagcctccagagcagctgggactgcagacacgcaccacagagcccagcctgagtcattttgattctgtaactggcttcctctcggcgggcaggctcacaccctccacccccagctggagatggaaggaggatgctcaccgcccattcctcatgcaggccatcgatggaaatgtcagacagtgcgagtccacgcctgaacacttctggggtccgctctgggactgacactggcagatccatcggtgagctcccgcctgccacctctgggcctgcattgcggtgatagggccaagggcctgggccttcaattctccagacttgccaaaatgctcagcgcaggcctcgtcggcaactgcagacaagcagaggcagcacctgggctctgcctgtgcctggcacagtgaagcgagggtgggggcaggaatgagggtcctctccatgcaaggggggaagatagaagaacaaaatttcaccctaatgtagtgtctttagaccgtgcaatgttgtgctcctgttagtctgatatcaggggcttgcagcctggcaaaggaaaaaaaacaggctgaggcacatgatagaagacaggcagggatgccacaatcataaccatggcaaagaccaggatcagaaaggcccaccatctctgaccccaaatccctgggcagatggttccagaactcagaattttcccagttgtagaaagatggggccaggtgcagtggctcacgcctgtaatcccagcattttgggagtacaaggtgggcggatcacctgaggtcaggagttcgagaccagcctggccaacatggtgaaaccctgtctctactaaaaaaaaaaaaaaaaattagccgggcgtggcgatgcatgcctgtaatcccagctactcgggaggctgagccaggagaattgcttgaacccgggaggcggaggttgcagtgagccaagatcgcgccactacactccagtccgggcgacagagcaagagtccattcccccaccaccaaaaaaaaaaaaaaaagaaagaaagatgatgtgatacatatcacatatttcctaacacccccaaccaaacacatttatgcatatgcataaagcagacgaggaaagattctaaataggctctgaatctcagttttctcatctctacaatggggcagtgatggcatgcacctcccagggctgttctgagaatctgatgcctcccattgcactggtgagcctggcacaggcacaggtcccaccccaggccctttgaactggctgttcctttggcctggaacattcctccccagatacctcctgagagggctccctcacttccttcaaggcactgctcaaatgctacctcttcacagaggctttccctgaccaccccgtctctttcctcttcctgcatagcctctgtcacctgacattttatgtcataaattactcatttattaatttcctgctctcccacagtggcacccgagctctgtgagggcaagactttgttcggttgtgggctatgcccccaacccctcggacagtgcctgcacaggtggacatttttgttggatgaaggattttctgttaaatgtgtctggcacacacagaaaaacaaagcccagcaggtacgatggtgattattattgttactggtggcgctcta

SEQ ID NO: 32713 - DNA, 2838 bp, Homo Sapiens
atgtcaggttccgtcccgccgccttcgcccgcgcgctgcactcgcggacgatctctgctcgccttgggcgcgccgtggcgcgcggggccgtgctggcgctgcggctcctcggcctgctccgccgtctggtggccgccccgggctgactttgacttagcgatgcctttcctgatggaggaaacagtgacccagcaccacctaatgcccccaaaccaaagccagatccaaaccccaaccgacctggtttcactggtgacccagcaccacctaatccccccaaaccaaagccagatccaaatcccaactgacctggtttcactgataagagcctctaaccctacggggtggtctctatgttgtttacctggcagtgatgtccgtgtcatctgagaagaggagatttcaggggctgactttgacttagcagatgcctttcgtgatggaggaaataacgacccagcacctcttaattcacccaagctgaagccaaatgcgaaccctgagcagcctggattcattgacgagccagcaccactgaacccacccaaaccaaagccaaatccaaaccccaagcagcctgattccaccggggatgactttgatttcacagatgtttcttcatggtgaacgaaacaaagcatctcctgggaatcacccctgaccaaaagccccaggcacctctccaagaccccctacagaagcctaaacagcccttacattcattgcctttggacctacccgaagtcaacaagttccaaactcgtcagaaactgggagaagtctcagccccaaatcaatagcagccgttgtcagctcctcccagctcaaagtcccccagagatcggttccctggtctgagtcaggaacgagagactgaaaagcatggggatctggtgctttttcttcatagggttagtcgctttccccaccaaaaaacctaccaactgaaagatcactgattggatgggtcaaccagcctcagctaccagatgtctttgagatggggagccagccccctaaagctgagtctctgtgtgtggcttccaaatacctggtcccctgggtgcagacagaagagaggacgcagaggctggacatctcccagaggagggggagactggctggtcaccagataatcttgcttccctctctgatgtcataggaacatgaacagacttggagatgctgattgaaagtacatgtcacctgaaggagacattggttccagagccattaattcctaacctcctaccatactctctgcatggtggaagatgccagaacattctcagagcttgagaaaaaagaggaattgagagaagggacgggggtcaagagatagagaaggtgagaggaatgtgagagaagcaggggacggaggagaagagaggaaggataactcagaagctcaggtctaacttcaccccactccccttaggacccccccactctaactgttgtttctgagagttcctgggggccacccataaacaatgaggttaaatgtaaatggaagggcaggactctgttgaagtctgcagaaggtaccctgttggctgcatagtcaccagctctcatgacccaaagaggagagtgagcaggtgactggatcatcagtgagggtaaatctggaagacagaattggagccaggtgcagtggctcacaactgtaaccccagcacctttggaggccaaggtagaaggagcacttgagcctcaggagtttgagaccagcctgggcaacatagccagaccctgtctctacaaataatttttaaaaattcattgaaggatttctaaagaccacttgagtggtttatgtctcctggagtcagaacccagggaggatttttgctgaaataccaaagccgcagggagcatgaatagagatgttcagacagaaattaagtttgaagaaatagactttggcagagaggcacgtggccacagacaagaactcatcatgcattcattctttcactcactcagcaaacattaaatggactctgtctaactgcatttccctctcttgacaagagggatacatcggagagagacaggctgaaggaatgtagagttgatattggacctgggagctttccaaaggcactgtgctctcctgtgcccttcttcgcatcccagtctctacgatgttgaccgtgttcgtgggtttcacattgctgttgacataccagaaagaatatgcatgaaccacagtgacaaatgtcattcataatcattttcagcacagaataacctacagaaatgtcttctgtgtaccttcccctgcaatattttgtgattctgatgcaactggagacaaaacatctcttatccatggcctctcttgaatcaattttatctccaatctgccttttcatgggtactctaacaagaaagcaaacaaggaaagttcagctggtctagcagttctgagacagcaaattatctcactgttgatgtggacaaagagcctcttgcagaaagactatacttaactctgagaatctgggtcccagcttttttttttttaatccagagagacgtaaatctgaaagaatctgagtcccagccgagctgagagaggagtaaaatcacggaggcatgcctccactcagaacacatcattatcgtgcttttatatggaaggcacagccattcactcattgtccgatagacgtttccattgaacgttggatctcttcaaaccaagtgtctgcaaacatgatgggttttgcactgatgctgaggatgaatccaacaggaaagatacagagaaacatcacattgcaccccagagacatatgcaattattgtttattgattaaaaatataatg

SEQ ID NO: 32714 - DNA, 5033 bp, Homo Sapiens
caatatgaccttgggcatcctttccccactccccagccatagctgtttgggctagggttggaaacctgtccatggtaggccctttggagtctcttgctggccacttgggattacaatggagacagtcaagttaacagacagtaatgctggacctggacagttgccagcacgtgttggaggctgagagcaccatccagtgtaagccatggtggatggtgtagtaggagagcaaaggaaggcaatctgcaaatgggttggatggggagggggagaaaaggtgggagaaagagagaaatataaaatgagggaagcagaggaagagataacatggcaatgaagaaagtaacatctttggtcattttctgttccaatcacccacagcaggcctgtcggttctcttttacctaagtagattttagtggcttttctattcttgatctccaaccatgccctaagacatacggcaatggtaacacagactgaggattctctgatggcagggctttgtctcattcctttttgcaacaagcacaaagtagatgctcaatgaatttatactgaaatgacatgaaaatcatgtttgtgtatgaagtgtcactgatggcatttatatgaaaaaggttaattaaaataattatgtttttaaaaaagtctgttttatcctatgaaatgggcagtggttctgggatttcagcccatctacagaagacactgctgaggcatgtagataactggcatggggcaatggtgccctattctgtagctttccaccatgcttagtaggaaagactttttgaatgaggtcctgatagtgaggcccaaagtaggaagtgcatggatgagcacctaggcaagatgtgtttccttcaggggattgggatcatttcttggaacttgaggtcagtgtcctgtagtgtaggggagaggggaaatgggttggaaaacatcgtggttaagttgtgcttttgccagctcttaactgactgaggctatgctccctggtcagtgcttgcccacaggcctggtaggaagactcaaggcccagatctccaccttttttttttctttcacctcccaaatgggtgccaaaaactgctctagtcctttctcagtttcatacttgtgagtttcctaaagtgttgcccagtggtcttatgtgggcagagccttttagggtcaatcaaccttcttttttccaagcctcagggcaagacctggacctacaggatctgattgatcctaagctcaaggctgtgagtgtgatgctctgagagtgttccttaggtttgagccaatgctgtaagacaagcagatacacagaacatagatcttcatgtttgaacccaggtttcttccacgaggagaggaaccagatcatactaaggaactagagcctaacaaacagtgcacttccggattgttcttgagctgaagtacagcacaatacagacctaggtcctctgacaccagagctcaatgttggtatcaacttgatccccaatgagtgtcagcactctctgccccatgggacaaaatgtgtgcaatggcacgctgtgagacctttgacccagactttctttgacaggagcaaaaattaaccagacaaagtttgaagtgcaatgtacttcaactactctttcttgtatcattgtagtaccccccaaatcaggaaattttctatcctttttatgagctacacctagcaatgtggctactgccacctcccctttatttggctggccctgggacctccagggcagtgcctcctttcttcgcttgaagttacatcttcaccaagagcaaagatccacagtcaaaatgccctgtggtagctccaggttcccaaacatggctgccactaaggcctggcctctgccgcctcccgagcctggcaggcctggcagcccagggtttcttggtgggcaagctcggctccctcgcttttgcactgaatctggaggcacccagtcaggtgcccacatccagtcccagaattccctgagtgccccaaacctaccctttgttctattagaaaccttcccctctggatacactgcgaagggctggaagccatgctcaaaaagcttcctcttgatggcactgttgttccagaaatgccaaccgccccgtcctaccaggcctctccctccaccctttgtggatgaaaaaacaccagggaaggcccacaaccagtataagccttagaagcagagtttattctgctatagtgctacaaggcagggctgagtgtacctttctctggggctcttggttttaatataaatgtctgtgtgtaagtgttcatcaaaaagaacagatgtatccatgtatctgttgctgttaatacatcatccctttatgagcgttaagtctaaatatcatgtaaatgtgtcagtggcttctgggcacacttgtgggtttatataggatatcttaggtagaattcttgctcttatggggacattgactcatagcttgaggtgggctgagtacctggatttcccttcttatcttggagttgttgcttctcttctgtcctcatggagccagggcaatcttacccaaggcagtccagcagcctcttgtagcttaagatgtcagcagcaggccctagagggaatggcaggctattgcggggcctgcaggaattgacaggtgctatatcaggtgagaagactttttcaaagtgaaaataaaaatctagagatgaatatctaaatttaacattttattacaggaggaaaaattgcagtttggtgcatacatacagattcggtggcctttagtatttctgaagaagaaagaggaggttgcaggttttataaaaggagaaatgtcacatacagtttttctagaaagttcattggtactagtaacgtattgtggagctagcagtctctgatgggtgagtgatagtcttgggtaaaagtggtcttagagttttgagcaggttgtttcagtagctgttagataaaagtgttttcaggatataacaggcagttttatcatccaggctggtagagaattacattcttagagcaatgtaataatgccctgagtgcttcttccccctgaactcttgactgttttagttttatattgtaagaatgacccaatgtgtgtgatcaactttcacacgcccctctttgatcaagatccttctatgaatgcatgactgatcaaccattgtgaagttaggcttaattgtctctcggtgctgggatggagctgtcctgttgtcttcctcattgagggtaagtcataggggtgtatatcagtgacctgggtcatattggagtaacaaggaggccagaaggaaaaattttctcatggtaggttcatctggagtccagcatcaagtttcatcttacagttccatagtcatcagcagtcaccttgaaacaatgggctaattttatccccttcagagagctggctttacaaagattagacaggtaataagagcaacacttaaaaatcataatacaaaaataaaaaacaatataataaaattagtttgcacaatggttttgctctaagagcacaaacttaagggcaacaactaaacaaatcaaaagaccatagaggaaactaggtgagacctgttatagccactgagtagcattttctgacttggtaaaattaaaacagagaatgccaattttacaaaaggaaccaccattataatttgaacaaaatttttaaagttgcccactaggtgaactaaaaggatttctttggtcaggttttgtcaagttatctatagcagttactggttgctaaaaaaaagtaattatgtcaacttcctgccaagtgaaaaaaaaatatcattaagggaagtaagactttcattatgatatgtcattctgatgtcttaggaaaggtcgtttatggcatgaaaaatgtcaacttcttgtcctggtttacagtttgaatgtctctggctttggtgtcagggagtttggtgacctttctgtgtggttcatatatcaggcacaagatttgttccttaaaatttatctagttttagcttacaggccttagaaacgaagtagttcctgccttaggagttttatggaaaaaagttggattggaggaacctagaataatttaggaccacgtgtagtgtataagtagataataagagcttgaaaacaatgtgcagagttaaaatctaataacaggtgtagtatagctcttttttagaaacaaccttttctttctacattgatcatataggaaatctcagattttaaaacctcatgaggctagaaagcaaaaccaagaccaactttagattttattataatcttaggattcctggacctgctgggaagtgacagtttttatttactcactataaggctgggaacccttaagtcaggcattttatgcatattttcaaatatgtcatttcagtcaaagccttggtaataaccatgcttttaaattgtattctgctataaagaagacagatttttattgggcttatgcaaataatcatattaccataagaatactaacaaatactttctgaattctggaggaatcaaggagaaaaatccaaatgattttcctttttttcttttttcttttacaaaagtatatcttaccaaattgctataaatgatagctcaagagagaaaatgttcctaaatctgaaaaacaaaacattaagaaccacatgtatcaagtaaaaaatcataaaaacattgtcttcattagttattcagtctcatataatcaacatttgttctctttgatctccactagtagttttctgaatccatcagtttattagagttctggaagttttcatttagtccattgatattaaagttatcagaaacctgtatttaagagttcttgtgggccaggcatggtggttcacacctgtaatcccagcactttgggagcccaaggcaggtggatcacctgagttcagaagttcaagaccagcctcatcttgaactaaaaaaccccatctctactaaaccccgtctctactaaaaatacaaaaaaaaaaaaaaaaa

SEQ ID NO: 32715 - DNA, 2838 bp, Homo Sapiens; identical to SEQ ID NO: 32713

SEQ ID NO: 32716 - DNA, 8614 bp, Homo Sapiens; identical to SEQ ID NO: 32628

SEQ ID NO: 32717 - DNA, 4438 bp, Homo Sapiens
tatatatatatatattcaacacactttgggaggatcacttgagcccaggagtttgagatcagcctgggcaacacagggataccccatctctgaaaaagaaagagaaaaaaacaaagttattccaaaaatgaggacatcctcctggcatctgagtcctcaccccatgtgccacggtggccgcttctgccgtcctccacctccaggcgctcctagagctgtccctgggccagtggcttccaaagggggctgtagttgggccctgctagcctggaccgccgccctggccgctcttggtgaagggccccttgtccagcccgccttcctcctcctgggtttccgtgtgacagatgccccgtcctgtggggtggtgtctcacatttgctttgctgttaaaaaatggggtacaccatccccaggcctccaatcaccggccctgcccctgagtggggatggttttcagcagctccttgctctgggggccaagctccttgtccaggaggcctttggagaactggggtcagagctgtggggaggtacagccctcctgtgcaggctgcctcccagctctccacctggcagtcttgaccccaccctggcgcctctgctcactggcacaggtggatctggggtttgaggtctcctcccacttcaccctgactttcttgtatgtatggggtcatcgcctcctctctgaagcccacgggtcctctcccagccccaggctgcacccagtgcagaacctttgcctcctggccagagggacccttctgcaggctgattccagcagtgcccgatggtgggacccacaccagaccaagccttcgcctcccagaggcctcctggccctcctgtcatggcctgtgagagccacacccctaggccccgtctcctagtctgcaggccgcaggaccagctgcccacggccccagggggcaggggctgtagatgagggtctcagaggtggtgggagcaccccccccacccacagttcctgggcatttctttagagctttaaaatggcacctggagaccaccaggcgcggcgatcagatcgggtggtgtggtgcctcctgggactgaccacttcttgctctccgaccaggcaggggcgagtggcctgggaggttcccggaccctcagggggcctgtgtctctgggcaccgcagctccgccccactccttcctccagaacattccccactcgggctagagaattgcgtctgctccaggaatgcatcctagcgtgtgtacgatcgcgcctgggtgtcctgttctcatgagcaagcggttttaaccagcagcataatttatactcatagacaggactgggggaagggctgttcctgaggctggggtgcagtgccttggaaagcacccctgaaacagtggaccttgtatttttagtgtcccctgcaaccatcctctgacttagagcaagaatttccgctgctgctacccccgagatgggcttcaccagatgttaataacgtgcttattttctctaagtgctattttggcaccagcgttagttgcaatttatattctgcagcatttgatgctgggaaaagaacccaccctaatggtccccaattggcagagctcggctgttaagcagcagaccatatgctgcctgctggaggagcgtggtcagcacttgtccccgtgcctgcgtgcgtgtgcctgcgtgcacgtgtgcctgcgggtacctgtgccctgtgtgtgcacatgtgcctgcatgcgtgtgcctgcgtgcacgtgtgcctgtgtgtacatgtgcctgcgtgtacctgtgccctgtgtgtgcacgtgtgccttcgtgtacctgtgccctgtgtgtgcatgtgtgtgtgagtcacgtcttccgtgtgtgtatgtgagggagagactgtggggttggagggagggaggaggggaaagggtatgtatccctttgttctttaaaagggagagccccaacctctctggctgccccctcctgcctgtgctcccagctcaccccacacctagctgctatttattctcctgacccccttcccggccctgcagccccgtgtcccgcagcctccgccccgcctcctgctccacgtcaccaggcaacactcggctccaccaggcttccgaaggtggcccagagcaggcacttgagcctgatgacccagagcaaagctgcctttctgggccttgagtactcctttctgctatggaaggcttttcttgttttcaacggcccgtccagcccaggggggctgggtgagggccgcttccttctgcagcagagggggcgggctctatccttgccatctgctgcccccagaggccctgccaggacatgggcctgagcggtttcttctccaagaggccctcctgggacctgtctgtgcacagggcgggaagacacttgctgcttcgacccaggacggcagccaggacgggctgagctcctcttgcgctgcaaacacacaagggttgcctgccagctcagcagcgccctccctcaaccacaccctgggtccggacccagagccacaggccgttggacccaggggaccggggctgggctcaggcgtgggcctggagggcttgtggaggggccagacctagagccgtagggctccaacagctgagggctgggcccctgccggccaatgaagctccagaccagtgctccggccttggcggtgccagcagtgctcctgcagggatggagggtgctggaggcctggatgcggggaccttgatcccccagcaggcagcgctgtggcagcctcccacctcctcttcccctgttatctgctccttttaggatctgaaaattacagagccttttttttttttttgagagggagtcttgctttgtcccccaggctggagtgcagtggcacgatctcagctcactcactacaacctccacctcacaggttcaagcgattctcccacatcagcctcctgagtagctgggattacaggcacctgccatcatgaccggctaatttttgtatttttgcagagatggggttgcaccatgttggtcaggctggccttgaactcctgacctcaagtgattctcacgcctgtaatcccagcactttaggaggctgaggcaggcggatcatgaggtcaggagatcgagaccgtcctggctaacacagtgaaaccccgtctctactaaaaatacaaaaaagtagtcgggtgtggtggcgggcgcctgtggtcccagccactcaggaggctgaggcaggagaatggcatgaacctgggaggcggagcttgcagtgagctgagatcgcaccactgcattccagcctgggcgacagagtgagactccgtctcaaaaaaaaaaaaaacaaaagaagtttctagatctactgggcatgatgaacacaaaccccacagacactgaggaacccagtggtggcagtgactcgggctcctctgctctctaaagctcctttgagaaacatgggaggggccgggcgtggtggttcacgcctgtcatcccagcactttgggaggctggggcaggaggatcgcttgagcccaggagttcgagaccagcctgggcaacatagtgagactgtatcgctacataaaataaaaaaaaaagttagctgggcattgtacatgtgcctgtggtcccagctactcaggaggctgaggcaggaggattgcttgagcccaggagttggatgttgcagtgagccaagatcgcaccattgccctccactctgggccacggagcaataccctgtctcagaaaacaaacaacaaaaagcagaaacgctgaaggggtcggtttacgggaaaaccgcctgtcagaacacttggctactcctaccccagatcagtggacctgggaatgagggttggtcccgggaggcttttctccaagctgttgccaccagacccgccatgggaaccctggccacagaagcctcccggggagtgagccagagcctggaccgctgtgctgatgtgtctggggtggagggagggtggggagtgtgcaagggtgtgtgtgtgcccggggggtgttcatgggcaagcatgtgcgtgcctgtgtgtgtgcgtgcccctcccctgcagccgtcggtggtatctccctccagccccttcgccaccttctgagcattgtctgtccacgtgagactgcccagagacagcagagctccacgtggttttaaggggagacctttccctggacctgggggtctcgccgtatctcatgaccaggtgctaaatgacacgacatgcatcacctgcctttcgatgaccaacctccctgtccccgtcccgctgacctgcccccgtggcgtctcacggtgatgcctgctcctgacattggtgttcactgtagcaaactacattctggatgggaattttcatgtacatgtgtggcatgtggaaaatttcaaataaaatggacttgatttagaaagcc

SEQ ID NO: 32718 - DNA, 2156 bp, Homo Sapiens
gcagcagcagcagcagcagcagcagcagcagcagcagcagcagcagcagcagcagcaatgtttcacttcttcagaaagcctccggaatctaaaaagccctcagtaccagagacagaagcagatggattcgtccttttaggagatacaacagatgagcaaagaatgacagcaagaggcaaaacttcggacatagaggccaaccaacctttggagaccaacaaagaaaattcatccagtgtgactgtatcagaccctgagatggaaaataaggcaggccagactctggagaacagctcattaatggccgagctcctgagcgatgtgccgttcaccctggccccgcatgtgctggcagtacagggcaccatcactgaccttcccgaccacttactctcctatgatggcagcgaaaacttatcacggttttggtatgatttcactcttgaaaattcagtgctctgtgattcataacctttatgtctgtttgcaccttaacagctttaaaatatgttcgcctattttatctaacctgtttgatgttctttgccgtttcactgtttaaggtcctcagcaaggatcataaagcaaagaaaatagcattatgttcactactctatttttaagaaaaaggtacatttgtatacaaattgaacttaagttctacttcctttctcccatataataaatatacaaattaggctatgaaggttttaggaaaggactcgattccttcagatggtctctcaaaatataacacctcaaatttatcttagaagaactgtgaaaaagaattgtggcatttttcagtcactacagctccgaagtctgagcaagaagtgggtgtgaagtctcctctctggtttgtaggaagttgaattggtgttattcctgcatttttttcttccacagtgtttatgaatgaattcagaaaaaaagttgccagttagcttaatttcttcagatgcattgatgtggaaatttaaaacttgtcctaaacagcagtgctagtttgctgatacaaggatgctagacctgctctgcgtgctctttctggagtggcccatttcggttttctgaaacccatggcagccctttccatcgtgaataatcgttgtgttcccacctttgttctctgcctttttgctacttcagtgtgctctctgaccagctttccaaagaactttccctgcttctgcctcggttgccatttgctctccttaccacatatgttcccagtttatgaagagatccacatttcctttcaacccctctgcctcctgaagaaaaacatctcatgatgatacatattattgctgataacacccttatttagaaatttgttggccacaatagagatggaaatgttttactgctggaaaaactgaaatcaactcatttccaattagagtataggcagaacacctagatatgacttttagttcttgaatatccattacttactttaatgaaaacagaactgccattggtcaataaactgtaaagggaagaggtaaattgtgatagagaattttctatgtcatgggaaattgaaatcacatttattttgattaccagcaatatgatttgttaactctgtgccaagttttaagtatattttttcacaaagatagagtgccatagtgaaactaaacactgtgcataaaggtacatgaattattccagttttaaagtattatgcatgtttgtttaataaatgtggcatggttttaatacaaatgctatgttatttaaaagttagaggaacatttctattgacaaaaatatgcttcatttacatataatgttaccatatggtgttaatgattaaattagatctttacatagttcttacaaagcatcagtctaggaaatatgacttattactgatgcaaacgtgaacattttgtagtagttttgtaaaagaacatccttttcaaatatctgtgttaatgtacccttgaaattaaatgcaagcacatagtcagtttgtctaattttgtgtgaaattttgtcgaaaatacctaaacatttcatctatatttgtgcctaccatgttataaatgttcataagtaccttcatgtgtctataaaaaatgttatatttaaataaatgtgaattaaaataaaatttttgattattttcagatccagaaaaa

SEQ ID NO: 32719 - DNA, 4739 bp, Homo Sapiens
aattagttgccattcggagtgaggagtgggtagaagcggcggcggcggcggcggcgtttgcggtggcgcggactccgaggagcgccagcacctcgaggccctttctctctaccctggtccccagaagcaggggtcccggccctccttgcagctgccgggttctcccgtgcgtgcagccctgcgagggctgaggagaaggctgcgagcggccctcggggctgcgtgatccgggccgttgccctgtcagcacgatgcctggagcggtggcggcggcggctccgggctccttgcggccccggccgtgaccgccacaccgagcccagccgggcggttgcggccgttggacgtttgttttcgcagccttcccctcccccctcgccgaggcggcgggggtgtgcgttggggagggggagccccgagactcctcccccacagcgatacccccgcccctcccccttacacactcgcacgcactatcgcgccggctcccacacgctcgcgcgcctcccgccccgcgcctccgtgtcggccggcggcgtccagggcccgcagagccaccatgtccactgcctcctcctcctcctcctccagttcctctcagacccctcatcccccgtcgcagaggatgaggcgcagcgccgcggggtccccgcccgccgtcgccgccgccgggagcgggaacggtgcgggcggcggcggcggcgtgggctgcgccccggctgcgggagccggccggctgctgcagcccatccgcgccacggtgccctaccagctcttgcggggcagccagcacagtcccacgcgtccgcccgtcgccgctgccgccgcctcgctgggcagcctcccggggcccggcgcggcccgcggccccagcccgtccagcccgacgccgccggcggccgcagccccggccgagcaggcgccgcgggccaagggccgcccgagacggtccccagagagccaccggaggagcagctcacctgagagacggagccccggctcgcccgtgtgcagagcggacaaggcaaaatctcagcaagttcggacctctagtacaataaggcgaacctcctctttggatacaataacaggaccttacctcacaggacagtggccacgggatcctcatgttcactacccttcatgcatgaaagacaaagctactcagacacctagctgttgggcagaagagggtgcagaaaagaggtcacatcagcgttctgcgtcatgggggagtgctgatcaactaaaagagcagatcgccaaactgaggcagcaactacaacgcagtaaacagagtagtcgtcacagtaaggagaaagatcgccagtcacctcttcatggcaaccatataacaatcagtcacactcaggctactggatcaaggtcagttcctatgccactgtcaaatatatcagtgccaaaatcatctgtttcgcgtgtgccctgcaatgtagaaggaataagtcctgaattagaaaaggtattcattaaagaaaataatgggaaggaagaagtatccaagccgttggacataccagatggtcgaagagctccacttcctgctcattaccggagcagtagtactcgcagcattgacactcagactccttctgtccaggagcgcagcagtagctgcagcagtcattcaccctgtgtctcccctttttgtcccccggaatcccaggatggtagcccttgctcaacagaagatttgctctatgatcgtgataaagacagtgggagtagctcaccgttacccaagtatgcttcatctcccaaaccaaacaacagctacatgttcaaacgggagcccccagagggatgtgagcgagtgaaggtctttgaggaaatggcgtctcgtcagcctatctcggcccctctcttttcatgtcctgacaaaaacaaggttaatttcatcccaaccggatcagctttctgtcctgtaaaacttctaggccccctcttacctgcttctgaccttatgctcaagaactcccctaactctggccagagctcagctttggcaactctgaccgttgagcagctctcatcccgggtttcctttacgtctctttctgatgacaccagcacagcgggctccatggaggcctctgtccagcagccatcccagcagcagcagctcctgcaggaactgcagggtgaggaccacatctctgctcagaactatgtgatcatctaaaaaagggggagctggcctccaccctatgttccatggattcggaacaagatttcagacatctgcatgagtgacaaactttctgaacaccaccaccaccaataatacttatcagcatcataaagtatctcttaaacactgatcttggcagggacggaactcctattcagcagtttttgtggaaagcagtaatgcttgcaaaacgtgtgtgtcattcagcattttaagtggagactatgcatttcatagtatatttgacagattagtactgtgtcctgtgttttgttccagattcttcagtataaataagctctatatcaaaaagttgcctgtctaaatagaaaatgtcttgctgtgttttgtcctatggaaaatactgtaattcaggattatgtttacaattgatccaggtgtttgtttctaacttctgtaatacatacaatgcaaaaaaaaaaaaaaaaatggccacaacagttgcacagtgcccaccctatggcctagcttcaggtacttcagttgaagtctaaactcaggtaacttggaatgtatatcatattgggatattaaatatttcacagctaaaaagctaaagagggaacatcactcttttgcctttccttattttatgcatttccctttcctcattacattccacattcttagaataagaagtgcattcaatcctaggagaatgataatcctggacatgggtgaacatgaggagaaccagcaaaatctgtggtgtttgacatcactttgtcatgtggttacaagtaaaacaactgttgcattcactgtttcaacatgtgtacatgtggcttttttaaaagttcaggtgttgctcagtaaaggactgtgacaatgttgcaaataaagtgttcagtactggactgtacataaacattccacattgtgtgtgatgaaatttaaagacaagaatgtctagagttaatttcaaaataagtgaagtgtttgacggaatggttgagatttttttgtttatgttagccatcagggtcataactgttaccattttatctaaagacatatttatatttagtttctcccttggaaattctttattttgcaggtgaaaaagtgacatactttttgttattgtcttcctcaagcagtttaggtgcatgatcttcatttacatagaatacttgggtctcagaattgatgcaacataagcaggtttttttggtgacttacaagagcaatagtttgaagctatctcatttaagcctctcataatgcataatcatgagtagttttgaaatttgcaacctgtgaggtagagcataaactcaagaaaatagccttgaacttgcagacttttgacacaagttctccacaaagtgtgaagagagccccaggcattcctgattggtcaatgggagagcctaactttcattgttttcttcagtacaaagagtatccaaaagctaagtttttgtattccactactttcagttcaataaaacctagagttgtttcatctgcgcctaaagtgtatggcacaattttcttaagaattaggggaaccaggtgcctacagttaaaggaacgtttcagttcctttcattcattcctgggtttttcttttattttctaagaaggttgaagaaggatgagtgatagagaagaaagcaacaccattgatttttttttttaagaaatgatatatatatgtatatgtttgtgtgtgtgtgtgtgtgtgtgtgtgtattctgtgcattattttgtcatgatctcaattctcttctttccaccaaagtttgtcgtaatattttctcctgaaggtgcattctggctcctttaaattagtcagtgttatattgtaggagactgtcatggaaaaaaggactcagtttactttcgtcattttcacaggggaaccttttaaaacaatcttttcagcagcagatacctttaaccctaataatctcaggccttgatgaaaatactatattttgtagattatggttaaagggggaaaattactagttccgtaagataaatatgagctccatttgacttctgatgtctggtttagcattacataatatgttgatcttacactctgcttttgtccaaataaaatgcaatagtatcaatatcaatttcagaaaaatggactgaatatgcttttttggtgatgaaatctcatgtacgatatttatagtgatgtgcttttattttctcatgagatactaaatattaattgtgttgtacatttgttcttagcatatattaaagttttgaaccaaatgtgttaaagcttacgctttgccatgtaaatttcccagaagttgttgagctcaaatgtatcctacatccagctgtagaaatttgtcagaaattgtttaaattttgtatataattgtactgtttaattctagccattgcgctgaacagtatttgagttaccatataatatggctttacacaaggaaatgtgtggcttttgttttgtattttttcagtatagaagttcctgtgtcttatttaaataaagttattagtaaaactgaaa

SEQ ID NO: 32720 - DNA, 4231 bp, Homo Sapiens
ctgaggcagccgccctcgcgctgtgcaatttctggtctttcgttgcttctggtccaggctaataaagtttttctttctttaattttttttcttctagttttaacgggagaaattaactccccggggccgccgggttgactgcgctgcctgggccggaggtcttctccggccagggagcgctgtgggaaggggctcgagcggccagggccaggcgaggccgggggggcggggggttaggggaccgcggggctactcttgggagcgcccctgtccggctggctgcgcgccggttttaaatagcatctttcggacttgtcttcgcggccccagtccccgacctcggcgctgcctgggctcctgcagcctctccctaagtcttctccaaacgaccacctcacggattccttatggatcgcagctccaagaggaggcaggtgaagcctttggcagcttctctgctggaagctcttgattatgatagttcagatgacagtgattttaaagttggagatgcctcagattctgaagggagtggtaatggaagtgaagatgcttcaaaggacagtggagaaggttcctgtagtgattctgaagaaaatattttagaagaagaactgaatgaagatattaaagtaaaagaagaacaacttaaaaattctgcagaggaagaagtactatcatcagaaaaacaattaattaaaatggaaaagaaggaagaagaagaaaatggagaaagacctagaaagaaaagggagaaagagaaggaaaaagaaaaggaaaaggagaaagagaaggaaagagagaaggaaaaagaaaaagcaacagtatctgagaatgtggctgcttctgctgctgccaccacaccagccacaagtcctcctgctgttaacacatccccttctgttcccactacgacaaccgctacagaggaacaagtcagcgagccaaaaaaatggaaccttcgacgaaaccgaccacttctggattttgtgtccatggaagagctgaatgacatggatgactatgacagtgaggatgacaatgattggcgacctactgtagtaaagagaaaagggagatctgcgtctcagaaagagggaagtgatggagacaatgaggatgatgaagatgagggaagcgggagtgatgaagacgagaatgatgaaggcaatgatgaagatcatagtagccctgccagtgaagggggttgcaagaagaagaagagtaaagttcttagcagaaacagtgctgatgatgaggaactgaccaatgatagcctgaccctatctcaaagcaagagtaatgaggactcgctgattcttgagaagagtcaaaactggagctctcaaaaaatggaccatattctgatttgctgtgtttgtctgggagataatagtgaggacgctgatgaaataattcagtgtgacaattgtggcattacagtccatgaaggttgttatggagttgatggagagagtgactctattatgagttcagcttctgaaaactccactgaaccttggttttgtgatgcctgtaaatgtggtgtttctcctagctgtgaactgtgtcctaatcaggatggaattttcaaggagacagatgctggaagatgggttcatattgtttgtgccctgtatgttcctggagtagcctttggagatattgacaaattacgaccagtaacactaacggaaatgaactattccaaatatggtgccaaggagtgtagcttttgtgaagaccctcgctttgctagaactggggtttgcattagctgtgatgcagggatgtgcagagcctatttccatgtgacctgtgctcaaaaggaaggtctgctttcagaggcagcggcggaagaggatatagcagatccattctttgcttattgtaagcaacatgcagataggttagacagaaagtggaagagaaaaaactacttggctctacagtcctattgtaaaatgtctttgcaagagagagagaagcaactatcaccagaagcacaggcaaggatcaatgcccggcttcagcagtatcgtgccaaagcagaactagctcgatctaccagaccccaggcctgggttccaagggaaaaattgcccagaccactcaccagcagtgcttcagctattcgtaaacttatgcggaaagcagaactcatggggatcagtacagatatctttccagtggacaattcagatactagttctagtgtggatggaaggagaaaacataagcaaccagctctcactgcagattttgtgaattattattttgagagaaatatgcgcatgattcaaattcaggaaaatatggctgaacaaaagaatataaaagataaattagagaatgaacaagaaaagcttcatgtagaatataataagctatgtgaatctttagaagaactacaaaacctgaatggaaaacttcgaagtgaaggacaaggaatatgggctttactaggcagaatcacagggcagaagttgaatataccggcaattttgcgagcacccaaggagagaaaaccaagtaaaaaagaaggaggcacacaaaagacatctactcttcctgcagtactttatagttgtgggatttgtaagaagaaccatgatcagcatcttcttttattgtgtgatacctgtaaactacattaccatcttggatgtctggatcctcctcttacaaggatgccaagaaagaccaaaaacagttattggcagtgctcggaatgtgaccaggcagggagcagtgacatggaagcagatatggccatggaaaccctaccagatggaaccaaacgatcaaggaggcagattaaggaaccagtgaaatttgttccacaggatgtgccaccagaacccaagaagattccgataagaaacacgagaaccagaggacgaaaacgaagcttcgttcctgaggaagaaaaacatgaggaaagagttcctagagagagaagacaaagacagtctgtgttgcaaaagaagcccaaggctgaagatttaagaactgaatgtgcaacttgcaagggaactggagacaatgaaaatcttgtcagatacccttcatgagacccaactctgccacagctcatcctcggaggcaatcccggaaacctcttttataagtgtgattttaaaaatgtggattaaactctcgatagagtacataaagtaaaggagaacagctatattgtcctttctataagcttgtcactgcaaaaagttgccttttgcttgtcaggtttggatagaatataattgattggtttgttacttggactaacaaggcagtagatttgcctgtgtggaattttttttcctatttttcttctttttgctttttttgcacttatcagaaatatttgatgtgtgcattgttgaaaaatactggatacatgtcttgtcagaattgtcgtattaagtaatgtctttccctcttgcttctttggcaaatgttgatacacagtgtttggacttactgaagagttactgaagcctgtgggacttaataaatacaatatgctactccctgttgtgattgaacaatacaaataacaaacaagaaagacaatgcattccattagtctgctattctgtttccttcaacttcatacatagattcatatatgaagtactgcattgtaaaacaactatagactcatattaaatgttatttctatttataatattcagcaaaagtgaaagacttgtgaagcatatgacattctatttttgacttattagtcctagtgtgaaagcattaatattattagcatgaaatttttacttcagattttaagctcatgaataaagatatatctgtgttgatctctagatatttttagtaatacccaaatatattcagtccttattgttttaatataagctttctgtgttcagtataattttatttttctcaaccttaaatatgaacttaggaaataaggagggaagtacaaagattattgactatacaacctaccagctgaaagaaagatcttcatcaacatctgtatctttccagaggtatacagaattaaaatttgatcttcaagctttaatgatccagttttaagtcaacggcagaagtatgttgaatatttcatcactcaatcttgaactgatttagaagagactctttgctgaaattgaattgcacttatacatgtaaattgtcaacatgtaatttggaattttctgattaataaatgtggttttggacatct

SEQ ID NO: 32721 - DNA, 4932 bp, Homo Sapiens
cagaaatgcaacaagtagtacccggggtctgcagagcgccccgcgccgcctgacttggccgggcgaagcccgcctgcagagacccgggccggcctccggacaaaggacggaggaggggctggacggcgctgcgaagtccgaaacaggccatttagcgactctggccaggctaaggggaatgcagaggagacacagagccggcgggccaagaggacgatccggccgctgcacgcagggcgggaggcgatggaggctgcccgcgccttgcgcctcctgctcgtggtgtgcggctgcctcgcgctcccgccgctggccgagcccgtgtgcccggagcgctgcgactgccagcatccccagcatctcctgtgcaccaacagggggctccgcgtagtgcccaagaccagctcgctgccgagcccccacgacgtgctcacctacagcctcggcggcaacttcataaccaacatcacggccttcgacttccaccgtctggggcagctcagacggctggacctgcagtacaaccagatccgctctctgcaccccaagaccttcgagaagctctcgcggctggaagagctgtacctggggaacaacctcttgcaggcgctcgccccgggcacgctggccccgctgcgcaagctgcgcatcctctacgccaacgggaacgagatcagccgcctaagccgcggctccttcgagggcctggagagtctagtcaagctgcggctggacgggaacgccctgggggcgctgccggacgcggtcttcgctcccttgggcaacctgctctacctacatctggagtccaaccggatccgctttctgggcaagaacgccttcgcccagctaggcaagctgcgcttcctcaacctctctgccaacgagctacagccctccctgcgccacgcggccaccttcgcaccgctgcgctccctctcctccctcatcctctcggccaacagcctgcagcacctcgggccgcgcatcttccagcacctgccacgtctcggcctgctctcgctcaggggcaaccagctcacgcacctcgcgcctgaggccttttggggcttggaggccctgcgcgagctgcgcctggagggtaatcggctgagccagctgccaactgcgctgctggagcctctgcacagcctggaggcgctggacctgagcggcaatgagctgtccgccctgcacccggccaccttcggccacctgggccggctgcgcgagctcagcctgcgcaacaacgcgctcagcgccctatccggggacatcttcgccgccagcccagccctttatcggctggatctagacggcaacggctggacctgcgactgccggctgcgaggcctgaagcgctggatgggcgactggcactcgcagggccggctcctcactgtcttcgtgcagtgtcgccaccccccggccctgcgaggcaaatacctggattacctggatgaccagcagctgcaaaatggatcctgcgcggatccctcgccctcagcttccctgaccgctgaccgcaggcggcagcccctacccacggccgcaggggaggagatgacgccacctgcaggtctcgcggaggagctgccgccgcagccgcagctccagcagcaggggcgatttctagctggggtggcctgggatggggccgccagggagctggtaggcaaccgcagcgctctaaggctgagtcggcggggcccgggcctccagcagcccagcccctccgtcgctgccgccgcgggcccggctccacagtccctagacctgcacaagaagccccagcggggccgtccgactcgggcagatcccgccctcgcggagcccaccccaacggcctctcctggctctgcgccatcgcccgccggcgacccctggcagcgcgcgacgaagcatcgtctgggcacggagcaccaggagcgtgccgcccagtccgacggtggggccgggctgccgccgctggtgtccgacccatgcgacttcaacaagttcattctgtgcaacctgacggtggaggcggtgggcgcagacagcgcctcggtgcgctgggccgtgcgcgagcaccgcagtccccggccgctgggcggcgcgcgcttccgcctgctctttgaccgctttggccagcagcccaagttccaccgcttcgtctacctgcctgagagcagcgactcggccacgctgcgcgagctgcgcggggacaccccctacctggtgtgcgtggagggcgtgcttgggggccgtgtctgccctgtggctccccgggaccactgcgcggggctggtcaccctaccggaggccgggagccggggcggcgtcgactaccagctgctgaccttggccctgctgacggtcaacgcgctgctggtgctcctggccttggcggcctgggcgtctcgctggctgcgtaggaaactgcgggctaggcggaagggcggggccccggtccacgttcggcacatgtactccacccgacggcccctgcgctccatgggcaccggcgtgtccgccgacttctcgggattccagtcgcaccggccacgcaccaccgtgtgcgcgctcagtgaggcggacctcatcgaattcccctgcgaccgcttcatggacagtgcgggcggcggcgcgggcggcagcctgagacgggaggaccgtctcctgcagcgatttgccgactaggtccagggcatatagagaccatctcattggccctaaggagccgcctctccgtgaggcccaccagcccacctcaggggaagtgccgttttgtgcacttgccagagaggccggtggggacagagggccaattcgggcaccatcccccaattcccaatactcgagaagtaaatggatggtacttggtggtcagagccagagtaggggacaaatggatggtgggatgctgaggtcggaggcttcgcttggaggctttgacacagctatgcgaatggcttttgtagcactgcaatgcagaagccaggctttgggggtagaaagggggtgcttgtgcccccaacatggccagaaatatttgggtgcatgctttttgtttgctcagtgtcaaacagagaagttttgtttctatttaaggaaggaacttattaccattacaaaggaggcttggccagggactccactggtttggtgatctctgccaagaagggggatgtaaacaggtggtaaagtttaacatacccgccaaggaactcgtttatgttggctgatagagcattcaggataccttaaagtttaataagagacgcattttttttttcaaaaatgtgaaaagctctgacatttaacgaactgaccaatagactcaaggactgttttagttggactgggccattttattatgttccttttaatattaacagtacaagagcgcttgctgacttcgaggataactaagattacatactttctcaggagaaggctgcatgcaagacttctctgtcagggttgctcctgtggcttttttaattttatttttttaaacctatatatggaaaaggaaatttcaatgccagatttgataaaagaatgtgatgtatatgtagctgatgacccactggggaacaccagtgttccagttcacttaccacatctgtgacagtgtgtttagattggaataaatgtgatgcattacttcttatgtttttatcagtgacatggttgactgtgccctaattctcttgagttgcagttaagcaatgaaggttatttcctaatagggaagcaaaaggtgattgtcaattgatagtttaatgtttgaccacattagtgtctttatatgaaatagtagaggggaagaaattatagaaaacaaatgtgaaaaaaatacaccagtgggtatctgttctactaaaaccagaagattgttatgagtacttaaacctcactgtgaaataatgatatattttgcaattaatccctccccaactgagtgtcttactgtgttattaaatcttatcttttagttaatagttgcagtatttcttttaaatgtttttgttttaaacttaggggtaggatcctttatttgttcagttgtttccaactatttgggatactttcattccctgctatttatgaagtacatgtttatcactaagtgtagtggtttggtttacattaataattttatgtgtggtctaaaaatgcagtcactaagagaatgtacactgtggttatggtcacagtggttatggatttattggcagtggagtaccatggaggtcactgcaatggtgctaaggctgacagtggaatcttctgtttagggccttaagcccctgagggtcctggtgactcagggaatccatcacagccccgggtctttcaccccagttcactccttttatgtttggcctagattgacccatgcctgccctcttctcaacagctgagtagggaaccagccatctgaatgagctgatcgttgtttatgttcaaatgagtaaatgtccagaccacttaaaactacagctgcttttctggcagtctcgtctgcggggccaaaacttaataaaccacaggaaatagactgtcattcttagtttgctgccagggcttattttagattgagagcatactggtacatgagagcagtagtgttgtttgctcttattttcaaccagggagctatctggcaccttttgtgctcctggcttttttcaatcatagcactattgcatctcctagctatttcttttgcccagcagggtaatattgagtcccattgcaagtatggacaaggcctctggttctcctcaccacccaccttttcagccatagaacatcactgaaaatgcctaatgcctggatctgtgttctactttagtttcactgggaagtctttcagtgggagatgaataaatgttatacattgttatgtccagttatgtcaataaacccactaatagagat

SEQ ID NO: 32722 - DNA, 2761 bp, Homo Sapiens
ctcggcttggcggctgaggaatgacactgcccgaacacctcggaggccccatggaccatcatggacctcgggtaactcttaaggtggagggaaaggttgaaagagccaacggcctcttaaaaactcaccctccaactccgaaaggactggactgttctcctaccacttgtgcttctcaggatctgagccaccgcccatgaacctaccagatacccagccatatgaggacactctggccagacagcccatcctgataaagagcttaaccccctgatctctacaacctcagtggacaggacccttcctggtcgtttatggtaccccaatggctgtctgcttacaagatcctcctcagtggattcacccttccagagtaaagctgtgtccatctgacactcagcctgacccttcttcctcctcttggaagtcgcaagtactctccccgacctcgttaaaactcaccgaaatccctgaagaaacttaaatgtcctgctcctgtccgccctgcttcttcaccctcttcctccactctatttgccaagacatctcctggtttcatccccaaactcccaccttagattctctcttaaactggatagatgatctcatcttttagggcactctgtataacttcttcccagatgagacgcctctgtttaccttcctactcactctttatctatccctcctgctcctttggctacctggcatggccgcactcccacttccagtaatgcctaattacctctacaaaactctcaacccactctctgttaaaccagtccaacccttctttggcaaaggacgctggctttgcatttctctatcagctaccacttacgttgccactctcattcccacaaaaaactgggtagttactagcttaacctaccaccctcgtaatgaaggaaaaagccccttctaactcctacatatgcagtcattggccaacttctccatcaatgaaatgaccgaaaataccctgacaggtcgtgcagttcaacttttacgctcctacatgtccagcctcacccattacacaagtaatgaaaagcccatacacggccctgtgactacaaacgctgtcttaactttccaagcccctttatgcatccaacacaacctgtcatcaggcctacctctaggtcacctactgttccatcagtgcaactacgccttgcagcttcaagccccaactgactgtattaacttccaggtctcccaaacagctacattcaaacagcctgtccgcttctcaaagcccccagaagtcatcagcacctctctgcttaacaaacaatccgggttttgtaatggcaggcatacgcactgcatgaccattcacccctggacctcctgcagcagcactcccaccactgacgaatgcctccttatcccctctttcgattacccttctgagtggctcctagtagatacaaaatgatttttcctccaatgggaaaataaaacacagggagccactcagcttatcccaaacatcccttttcagccgctcactggggccgccttggcaagtaccctaggggtgtgggaaaatgaaaacaaattcacacacctttttaacatacacagccagttctgcctacccagccaaggcatattcttcttgtgtggaacttcaacctatgtctgcctcaccactaactggacaagcacctgtaccctaatcttcctaagccccaaaattgacattgcccctggaaaccaaaccttaccagtccctgtcagagcccaagtccatcagcatagggctgtgcagataatacccttgcttataggactaggagttaccaatgccacaggaactggaatagcaggtttgtccccttccctgtcctactatcatacactctcaaaggatctctcagacagcctacaagacatagcaaaatccacccttactctccaatcccaaatagactccttagcagcagtaactctgcagaaccaccgtggcttagacctcctaaccgtcgaaaaaggtgggctatgcacctttttaggggaagattgtttttccaccaaccagtctggactagtacgagatgctgcctcgcagttaaatgaaaaggcttctaaaatcagacaatgtctttcagacttttaacaccaatctttggagctgggcgttgtggcttctccctatagctgggcccctcatttccatcattctccttctcctatttggaccctgcctcttccgtctagcctctcagttcctacaaaatctcattcaagctattaccaatcaatctatgcgacaaatgctactcctaactgcccctcaatgtcacccccaccccaagatctctctcccaattaggagtccatgccgccccaagtcccgctcgaagaatccctgagaaacatcaccccgtccacttcttttcttattaaaacaaaaagacaggaatgtcatatcccacaaatatggctgcattattgccagcaggccattattgacggtgggccattaagaactctgtgaccagcacatatgcctccagacttcctggaaccagaaaacctgcaacaaccaaaaaccacaaaagaagaacaacgggtttctgttccaactggttgatcaacttcttgagtcaacaagtcccaaaaccatgttgtaattttccacccgccactttgccctgtaaagactgctctccctcacacctccgggctgactcccttttccgattcagcccactaacacccaagtgaataaacggccttgttgctcaca

SEQ ID NO: 32723 - DNA, 5863 bp, Homo Sapiens
cgcttcctgtgcctcttcaggtcatcgcttgctctcgttcccaggctttggcttctagtggacgagaatcaccgagtctgcggggctggatgctgaccgcccggaccagcacctaggcgggcgggagctgtgcggcccagggttcgcgcgggccgggtagaggctcgagctgggacccccgagcgtgaaccccggagccggcggcgctggggccagaggggccgggagccccagggaggcggatctgggccccgagaaggacacccgcctggatttgccccgtaggcccggcccgggcccctcgggagcagaacagccttggtgaggtggacaggaggggacctcgcgagcagacgcgcgcgccagcgacagcagcccgccccggcctctcgggagccgtggggcagaggctgcggagccccaggagggggccagtgtcattcaaagatgtggctgtggatttcacccaggaggagtggcggcaactggaccctgatgagaagataacatacggggatgtgatgttggagaactacagccatctagtttccttggcttatgaggtggcaacatcttgtacttcggagattctgaagccgagcaacttgcccaagtccttcttcttttcccattaacaagatatgatatcaccaagccaaacgtcatcattaagttggagcagggagaggagctgtggataacgggaggtgaatttccatgtcaacatagtcctgggatcgtgggactttaccagatcggtttgtaataacacctcgaagacgctatccgatccatcagacccagtattcctgtccgggggtacttcccacagtgtgctggaatggttatcacaagaaggctgtgctgtcccctcgcaactccaggatggtgtgtagcccagtgactgtgaggatcgcccctcctgacagaagattttcacgttctgcgataccagagcagataatcagctcaacactgtcgtcaccatcaagtaatgccccagacccatgtgcaaaggagactgtactgagtgccctcaaagagaagaagaagaaaaggacagtggaggaagaagaccaaatattccttgatggccaggaaaataaaagaaggcgccatgatagcagtggcagtggacattcagcatttgagcccctggtggccagtggagtccccgcttcttttgtgcctaagcctgggtctctgaagagaggcctcaattctcagagctcagatgaccacttgaataagagatcccgaagctcttccatgagctccttgacaggcgcttacacaagtggcatccctagctccagccgcaatgccattaccagttcctacagctccactcgaggcatctcacagctctggaagagaaatggccccagttcatcacccttctctagcccagcctcatcccgctcccagacaccggagaggccagcaaagaaaataagagaagaagagctgtgtcatcattccagttcttcaactccattggcagcagacaaggagtcccagggagaaaaggctgcagatacaaccccaaggaagaaacaaaactcgaattctcagtctacacctggcagctctgggcagcgtaagcggaaagttcagctgctgccttctcggcgaggggaacagctgaccttgcctccacctccccagcttggctattcgatcactgccgaggacctagacttagagaagaaggcttcattacagtggttcaaccaggccttggaggacaagagtgatgctgcctcgaactctgtcactgagaccccacctaccactcagccttcatttacctttaccctgcctgctgctgcaactgcctccccacccacctccctcctggccccaagcaccaacccactgttagagagcttgaagaagatgcagactcccccgagcctgccaccctgcccagaatctgctggagcagcaaccactgaggccctctcacctccaaagacacccagcctcctacccccgctgggtttatcacagtcagggccgccagggctgctccccagcccctcctttgactccaaacccccgaccactttgctggggctgatccctgctccatccatggtaccagccactgacaccaaggcacctccaacccttcaagcagagacggctaccaaaccccaagccacatctgccccgtcccccgcccccaagcaaagcttcctgtttggaacacagaacacctcaccttccagccctgccgcccctgctgcatcttcagcatctcccatgttcaagcccattttcacggctccacccaagagtgagaaggaaggccccacaccgcctggcccttcagtcacagccacagcgccctccagctcctccctccccacgaccaccagcaccacagccccgaccttccagcctgtctttagcagcatggggccacctgcatctgtgcccttgcctgctcccttcttcaagcagacaactactcccgccactgctcccaccacaactgccccgctcttcactggcctggccagcgccacctctgctgtggctcccatcacctctgccagtccatccacagactctgcttcgaagcctgcgtttggctttggcataaacagtgtgagcagcagcagtgtgagtaccacgaccagcaccgccactgccgcctcacagcctttcctcttcggggcgccccaggcctctgctgccagcttcaccccggccatgggctccatattccagtttggcaaacctcctgccttgcccacaaccaccacagtcaccaccttcagccagtccctgcccactgccgtgccaacggccaccagcagcagcgctgccgactttagtggttttggcagcaccctcgccacctccgccccggccaccagcagccagcccactctgacgttcagtaacacgagcacccccacgttcaacattccctttggctcaagcgccaagtccccgctcccatcatatccgggagccaacccccagcccgcatttggggccgctgaggggcagccaccgggggccgccaagccagcccttacccccagctttggcagctctttcacttttggaaactctgcagccccggccccggctactgcacccacacctgcacctgcgtccacgatcaagatcgtgcctgcgcacgtgcctacgcccatccagcctacctttggcggtgccacgcactcggcgtttggattgaaagccacggcttccgccttcggcgctcccgccagctcacagcccgcctttggcggctccactgctgtcttctccttcggtgcagccaccagctccggctttggagccaccacccagaccgccagcagcgggagcagcagctcggtgtttggcagcacaacaccatcacccttcacgtttgggggttcggcagcccccgctggcagtgggagctttgggatcaacgtggccaccccaggctccagcgccaccaccggagctttcagctttggagcaggacagagtgggagcacagccacctccacccccttcacagggggcttaggtcagaacgccctgggcaccaccggccagagcacaccgtttgccttcaacgtgggcagcacaactgagagcaaacctgtgtttggaggcaccgccacccccacctttggtcagaacacccctgcgcctggagtgggcacatcgggcagcagcctctcctttggggcatcttcagcacccgcccaaggctttgttggtgttggaccgttcggatcggcggccccttcattttccattggtgcgggatccaagaccccaggggctcgacagcgactgcaggcccgaaggcagcacacccgcaaaaagtagcctttgtcccctgtccctgttccccccaccccttccctaaatctggaccttggcacgtgctagaaagagccttggacccttccagctgcgtaaagcaaacctaccccggatctctggcttcagccgccagggggcagtggcagccctggggccctttcccttctggaggaagcacaagcctcagggaaggggaagcaggatgcggagggccaaagcccgggacctctacttgaacagttccactggggaggctggagaactaaggacctgtacatagtgtccgctgccctgactcccgcttagcgcacccttaggcaggcgccccttccacctttccccgagagccgtcgtcgctggagggggcagggtccagcccgcctggatcggtggtgtgcacctgatgggatttgggaaatgggttatccctaaagctttatcttgcttggcttagctgtgagaagtggttctcttcctctggtcccttctggggactctgtttccccatttcttgctgctgtgtccctcaccggttccttgcaggattccctcctttttaaatgcccttgaatctagctttgccttggagaccccagtgggtgctgctcctgccgttttcttcctgccaagcctgaatcaatgtttcatctccaaccctctgccagtttggcccctcagagcttggtggctcaagactgttagcctggcagagccaggggtgaagggagaagctcttggagcaggcaggatgcccaccgctgcttcagctgcctcctcgcccagctaccctttggccccattgggccctcgtctgcctctccaggattgtatgtttcaagccttgtcctgtgttcctttgtctgacgctctgtgtattgctctttgaatcgagtttggaggaagagttgagttgtatgagtggcggcatgttggtagtgccggacttcctgtttcaagttttctggggcctcgctaattgaatgtggaaagtagcaccacttgacggctacaagtgccgactcctgaattttcccatggtgttctgacttcaagggctggcagccagggagaatgggcccaggggaagcaaagacctcttccctctgcggtttctgtcccacttaactgacctcactggaggctacgtcacccaaagtagatgttagaaaacctaaattaatgaaccatatttttaaaatcctatttttcccaaacagggccctctgcagcccatcctttccttccgtccttctgaaaccacataccccaggcccaagcgccttgctgtcacgcccaacctctttgggagaagtatgaatgcgtgtgtctaaattaaaagaaaaaaatatttaaacgttttttaacaaaaatttatttttgtatttaagctaaattgccttttaaattccttcaagcttggttcattgaggtggttaagtataaatgctattaactaggaattagctgtatagttaagttatgcctgtgcaaagaagaggctcaaatgctgtccccggcagctttcctgggggactagagctccttctggccatgttatatgaaatgtaattcttattttataaataatgtgatgtagatgtaaccggtgccccctccccgttgtgactgagggcgagtgttatacctggctgcgtgtgcagctgaggagggagtgaacctcaagcctaaatacctgttaggattggagggtctgggtgggcctgggcctagcaatcaatcaagcttctacctgtaccttatgtaaggtagaccctcctagtgtcagtacctgagcttgtttacctcagttccgcaggcaggacagccggtccgggaaccctgagtgagagtgagtgtggatgtgtacagtacacacactggacggcagcgggaggctgggactttccattacaaatagagacttcattcctgttgagtctagttggaatttttagtatgaatgtgagatttttctcctgcttgtgacattaagaataaaaaactgtgatctatcgta

SEQ ID NO: 32724 - DNA, 4097 bp, Homo Sapiens
gagggcgaggcggccacgcggggccgggaatgcccgcggtgcggggccccagagccgcccggtggtcgtgtccgggcgatggctcttcgcctggtcgccgacttcgacctcgggaaggacgtgctcccgtggttgcgggcgcagcgggcagtgtcggaggccagcggggccggaagcggcggcgcagatgttttagaaaacgattatgagagcttacatgtattaaatgttgaaagaaatggaaatattatttatacctataaggatgataagggaaatgtcgtctttggattatatgattgtcaaaccagacaaaatgagcttctatatacctttgagaaagacttgcaagttttcagttgctctgtcaacagtgaaaggactttgcttgctgcaagtttagttcagtctactaaagaaggaaaaaggaacgaacttcaaccaggatcaaagtgcttgactttgttggttgaaatccaccctgttaacaatgtgaaggttctaaaggctgtggatagctatatttgggttcagtttctctacccacatattgaaagtcatcctcttccagagaaccatctgttactgatttcagaagagaaatatattgaacaatttcgtatccatgtcgcccaagaagatggaaatagagtggtgattaaaaattctggccatctcccaagagacagaatagctgaggatttcgtttgggctcagtgggatatgtcagaacagagattatattacattgacctgaagaaatcaaggagtatcttaaaatgtatccagttttatgctgatgagagctataacttaatgtttgaagtacccttggacatatcattaagcaactcaggatttaaacttgtcaactttggatgtgattatcatcaataccgagataaattttccaaacacctgactctgtgtgtttttaccaaccatacaggaagtttgtgtgtatgttacagcccgaagtgtgcctcttggggacaaatcacatattcagtgttttacattcataaaggacacagcaagaccttcaccacttctcttgagaatgttgggtcacacatgacaaagggcattacttttctcaaccttgactattatgtggctgtttacttacctggtcatttcttccacctacttaatgttcaacatccagacctgatctgccacaatctctttctgacaggaaataatgaaatgattgatatgctacctcattgccctttacagtcattgtcagggtccctggtattggattgttgttctggaaagctctatagagcactgctcagccagtcgtctttattacagcttctgcagaacacttgcttagactgtgagaagatggctgcgttgcactgcgcgctctactgcggtcaaggtgcgcagttcctggaagcccagattattcagtggatttctgagaatgtctctgcctgccattcatttgacctcattcaggaatttataattgcttcttcatactggagtgtatattcagagacaagtaacatggacaaactattgccacattcctcagtgctcacttggaatacagaaattcctggaataactcttgtgacagaagacattgcattgcctcttatgaaggtgctcagctttaagggctactgggaaaaactgaactccaacctagaatatgttaagtacgccaagccacacttccactataacaacagtgtggtcaggagagagtggcacaacctgatctctgaagaggtatgagtgggtcagtgagaacaaagccagcagcgaggcatagtggactggatccaggtgatgcctttaaatcataaggctggcttccatgtgcagcactcttcccaattgccagggacttgatcattgtcattactgatctcaatgggcagagatgcttctatgatctctgttctcctagggaggaaactgaaaagcagaaagtttaaggggacacacagcacattcatagtagaagtatgattaatatccatgtctcagatgtgttctcaggttacttatgtagttaaaaattgatattaaaaaatctaggtgttcccaacttagtggtcattaggggttggggtagttggagggagaatagtggacgtgactcactgtccaggggtgacccagggaaatctttgggggtgatcgaagacttctatgtgttgattgtggtggtacattgtgggacatgaatctaaacatgataaaatgacatagaatgacacacacacattgtgccaatgtcaatttttgattttgatattgtgctctagttaggtaagatataagcactgaggagactgggtggagggtacattgcatctctctctagtatcgctgcatgtagattagtgttgttgtgtgtagtatatagttgactcgcagtttcctgtgaatctgtaattgtttcagaataaaatatttcttaaaactttaaaaaaaatctaggtgttctgattacctggaaagtatatttcttctctctgatgctcttaactgtattgcattatatccttgacgtgaaaagtcaccgataaaacctttaccttccacatttctgacgtgttctcactcctagaaaacaggaaaaagaaggtctgcggcatacgtgaggaatattcttgataatgcagtaaaggtgatttctaacctagaagcaagaaatttggggccaagattaacacccctcctgcaggaggaagacagccaccagcggctgctcatggggctgatggtgtctgagctaaaagaccattttttgagacacctacagggtgtagaaaagaagaaaattgaacagatggttctggactacatttcaaaactgctggatctcatttgccacatcgtagaaaccaattggaggaaacataatcttcattcctgggttctccacttcaatagtcgtggcagtgctgctgaatttgcagtttttcacatcatgaccaggattctggaagctacaaacagtttgtttttacctctgcctcctggttttcatactctgcacaccatcctcggggtccagtgtctccctttgcataacctgctgcattgcattgacagtggagtgttgcttctcactgaaacagctgtcataaggctcatgaaagatctggataatacagagaaaaatgaaaaactgaaattcagtatcattgtgcggcttcctccgcttattgggcagaagatttgtagactttgggatcatcctatgagttctaacatcatttcgcggaaccacgtgacgcgactgcttcagaactataagaaacagcctcggaattctatgattaacaagtcatcgttcagtgtagaatttctgcctctgaactacttcattgaaattctgacagatatagagtcctccaatcaagccctgtatccttttgaaggacatgacaatgtggatgcagaatttgtagaggaagcagctctgaaacacaccgcgatgcttttaggcttatgaaaaagaaaacgcaattggatctgctgctgccattttaatcttgctcattaaccttactcctttgagaattctttaacaatatttaaaattggtaacaaaaatagtttagccataattgtttagccatgtgagtttcaggttggtacacgttcagacagaactgctgtatcacattccaattttgaatagccagtgagcaatcaagtgtagagaaatgataaatggcctaagaaggcatacagtggcataaacgatgctcttcctagtagcttaataggccacaagctagtttctgttgcactctgaaataaaatatgctttaaaaatgtagggaacagtgcttagaaaagcaaaaactaggtgtgtcattgaaataataggcataaaaattaaatgttacataagaacactatttggaaagagggtccttttaaaaactgaatttgtactaaatcagatttgccatgtccagtacagaataatttgtacttagtatttgcagcagggtttgtctttgtgaattcagatgaaacatatttatttttttttatttataaaaggttgatttaggaatattttgtcagtcattaaaaaacctgaaaacata

SEQ ID NO: 32725 - DNA, 3041 bp, Homo Sapiens
caactgccactccaaggagaacagaaatggttccgttattagtggctgctgtgggaccacgacagtctgtgggagagaagacacggttcaatgtgtagaccttctccctctccagtgtctccagcctccaatcccaggacatcactagtacaggtgaaaacaaaagcctgtctcagcggccatcactctgccagcagcacctcaaagccattcaaaacgcccaaagacaatctacttacctccagcagcaaacagcacacagtctttcctgcgaaaggatcaagggataaaccatgacatcactgggcagggaggggaatctacttgatgccaagagaaccatgtttcttaaagccagaggacccgccttgatctagaaagataaattcagacaggccaagcacaaaggaagaagacgtgggcaactaaagcagcacaaaagaaacagagtgttccagttcctgtagtcagtttagagaaaattcctaacctagtgaaggcagatggtgccaatgtcaaaatgaactccacaaccactactgcagtttctgcctcctccacctcgtcctctgccgtctccacccctcctttaattaagcctgtcctgatgtccaagtcagtgccaccttcaccagagaagatcttaaatggcaaaggaattctgccaaccaccatagacaagaaacaccaaaatggcaccaaaaacagcaacaagccttacaggagactttcagagagagaatttgacccaaataaacactgtggagtattggatcccgagacaaagaaaccttgcacaagatccctcacctgcaagacacattcgctaagccatcggagggcagtcccaggccggaaaaagcaatttgacctcctcctggcagaacacaaagcaaagtcccgggaaaaagaagttaaagataaagagcatctcctgacttccacgagggaaatacttccaagccaatccgggccggcacaggattctctgctagggtcttcagggagctctgggccagaaccaaaagttgcatcccctgcaaaatccagaccacccaactctgtacttcctagaccatcatctgcaaatagcataagcagcagcacatcttcaaatcatagcggccacactccagagcccccactcccaccggttggaggtgacctcgccagccgactgtccagtgatgaaggggagatggacggagccgacgaatccgagaagctagactgtcagttctccacgcaccaccccagacctctggcgttttgctcatttgggagtcgcctcatgggacgagggtactatgtgtttgatagaagatgggatcgttttcgattcgcactaaactccatggtagaaaaacacctgaattcacagatgtggaagcacagaaacccgagccacagggcatcaggtccctcccccctgttcaggacttgcctaaccaatctgctgtcactgagcaacattggggctgcctgggtgtcaactctggagagcgtagcaccccgctaccctctcaacctcgctgcccaaaccccaggccccggcgggcccgaacctggagggatggcagccgatgggggcgtggaagacattaggaagaaaaggaacggccaagactcttttttctttaacaagcatttaactctgcatcaggagccgccaacacagtattctctttcagccaggaagatccctcctgcggcagatagccccctgccctcgccagcagcccacatcaccacccccgttccagcatccgttttgcagcctttcagcaaccccagtgctgtgtatcttccttcagctcccatcagctcgaggctcacctcttcttacataatgacatcagccatgctctcaaacgcagctttcgtgacatcgccggacccgagcgccctcatgtcccacaccacagctttccctcatgtggccgcaaccctcagcatcatggactcaaccttcaaggccccatccgccgtgtccccgataccagccgtcatcccttccccatcccacaagccatccaaaaccaaaaccagcaaatcctcaaaagtcaaagacctgtccacccgtagcgacgagtctccaagtaacaaaaaaaggaagccacagtcttcgacttcctcctcctcctcctcctcctcctcttccttgcagacatccctctcgtctccactgtcagggcctcacaaaaagaactgtgttttgaatgccagttctgctttgaactcctatcaggcggcccctccctataacagcctgtctgtgcacaactcaaacaatggggtgagcccactcagtgccaaactggagccctcaggacggacctcgctgcccggcggccccgcggacatagtgagacaggtgggcgcggtgggaggcagcagtgactcctgtcccctctctgtgccctcccttgcgctccacgcaggggacctctctctggcctcacacaatgctgtgtcttctctgcccctctcttttgacaaatcagaaggaaaaaagcgtaagaactcgagttctagtagcaaagcctgtaaaatcactaaaatgcctggtatgaatagcgttcacaaaaagaacccgcccagccttctcgcaccggtgcccgatcccgttaacagcacctcctctcggcaggtaagggacctcctggcaccgccttcaccggctctggggggcagggggagctgggcagcgcccctgcttagccgggcggctccgacaggtaacacaagcttgattcctgttctcgttttccccgaaggcagttttcaccctctgctttgagagcactttactgaacaagtacttgataccacgctcactatgtgctagacactgttctcggcactttacggttattacctcactgagtcctcacgacaccccagtgcagtgagtgcagttatcactttacagatgagtaaactgaggcacagagagattctgagttccccactccacatcggtcagttttatcttttgaggttctgagaacattgtcattaaagagttctgttgctaagag

SEQ ID NO: 32726 - DNA, 2179 bp, Homo Sapiens
atgggggcttctccaggcccacctcttcctcttggctgggtctacaggcacaactgctgcctcacaacagccttttttggcccagttcctgtccagctcatggcggccaatgcctcgacaaggcccagcctcctgcctcccgaaggcctgcacaggcccagcctctgcctcacagcggactctccacgcccagctagctgtcgcctcattgcggcctcccgagtccaaagctcctgcctctcggccgcttcggcaggcccagctcccacctgccagtggcctcttcaggcccatggggctcgttcctcacaacggcctttccaggcccagtttttcccttccggcggcctctccgggcccagaacctcctcaagtcggcctctccagagccacttgcaccctccgggcgtcctctccgggcccagctcttcttcctggttgcgtctccaggcccgactcctgcctctcaacaacctctttggactcagtgcctacccatctcctggcggcattggtcggcccacagcttcctcaagccaagctccccaggcccaggtcaggcctcacggtggcctctccaggatgagctcctgccctccgatggcatctccaggccccaaatggtctccggtcggtgggctcctccacgccaagcttgggcctcccggcgaccgctgcaggcccaagttgtcctgaagtcggcctctcctggccctgcctcccagcaagtaagcaagctcttttggctcaactcctgcccagctcccaaccgcctttctaggccccgaactttctccagccaagctctgagggcccacctcctgcctcctggtggcctgtacaggcccagcactggttggagaacagcctctgcaggccccgcccttgcctaccaggggcctctccaggcgcagctcttgcccccacggcggcctcccgggggacttgggcctgggaggtcgcggtggggcgagagctgggcctggagactcccctgggaggcaacagcggggtctgcagacacccttctccagctggagctgggactgttcagtcactgggagaagggatgtgggtctgaagagcttggttgcagaaacttcggggtctacaaaggccggcgggagctgagccaaaagagcttgtttgctgggaggcgggagatgcagccaggaggaacagctgggccatgcgggaggcagaggccgggcctcctcaagtcggcctctcagacccacttgcagcctcccagcgtcctctccgggcccagctcttcctcccggctgcgtctccaggccggactctggcccgactccaggtcccaacaacgtctttggactcagctcctgcccagctcccagaggccctggtaggcccacaacttccctaagccaagctccccaggcccagctcaggcctcacggtggcctctccaggctcagctcctgccctccgatggcatctgcaggccccaaacggcctccggttggtgggcttctctaggcccagcttgggcctcccggtggcctctgcaggcccaaatcgtcccgaagtcggcctctccaggcccagctccggcctcccagcggcctctgcaggcccaagtcgtcctcaagtcggcctggaagtgggcctggaagagcagcaagtcggcctccccgggcccagctccgtcctctcggcggcctctccaggtgcaaaacttcctcgagtcagcctctccaggcccagctcttcctgcctcccagtggcctctttcggcccagcccagttcatggctctcggcggccttcccaggccccgcttttgacttttggcagcctcttcaggcgcagaacttgatctccagtcggcctttgcaggcccggcctcctgcctctcaaaggcctgcacgggcctggccttggccttggcctcacagtggactctccacgcccagctagctctcgcctcactgcggcctcccccgtccaaagctcctgcctttcggccacttcggcaggtccagctactgcctgccagtggcctctttaggccaagctcattcctcacaacggcctttccaggccccgtttttcccttccggcagcctcttggcctctaatttgtttatcttttgtgtataaatcccaaaatatggaattttggaatatttccaccattatatattttggtaggt

SEQ ID NO: 32727 - DNA, 7294 bp, Homo Sapiens
atggtggagcagggagacgcggcgccgctgctgcgctgggccgagggccccgccgtctccctgccgcaggccccgcagccgcaggcgggaggctggggccggggcggcggcgggggcgcccggccggccgcggagccgccccggaggcgggagcccgaggagccggccgccccggaggtgctgctgcagcccgggcgcctggagctgggcgacgtggaggaggaccaggtggtggccgtgttcgtggtcaccttcgacccccgctcgggaaacatggtagaatggtgcttacctcaagatattgaccttgaaggtgttgagttcaagtctatggccagtgggtcccataaaatccaatctgatttcatctatttccgaaaggggcccttcttcggcctggcctgctttgccaacatgcccgtggagagcgagctggaacgtggcgcgcggatgaagtctgtgggcatcctctctccctcctacacactgctttaccgctacatgcacttcttggagaaccaggttcggcaccagttggagatgccaggacattactctcatctggctgccttctatgaggacaaaaagggggtgctccatgctggtcccggcagaggcagcagcctgccccctgtctactggctgccttccatccaccgatacatgtaccctgagatgaagatcacacacccagctggctgcatgtctcagtttataaagttctttggagaacagatcctcatcctctggaaatttgccttacttcgaaagcgcattttgatattttctcccccacctgtgggcgtggtgtgctatagagtgtactgctgctgctgcttggccaacgtttcactgcctggcatcgggggcaccattcctgagtccaaacctttcttctacgtgaacgtggctgacatcgagagcctggaggtagaggtgtcctatgtggcctgcaccacagagaagatattcgaggagaagcgggagctgtatgacgtctacgtggataaccagaatgtgaagacacaccacgaccacctgcagccgctgctgaagatcaacagtgctgacagggagaagtaccgccggctcaacgagcagaggcagatgctgttgtactcccaggaagtagaagaagactacaacccttgtgaagaggacctcttcgtgctgtttttcctagaacaaaacaaccggatatttcagactttgttggaggtgtctgccagtcaagacaaaactctgacagcagagcatgcccggggcatgggcctagacccccaaggagaccggagctttctcctggacctgctggaggcctatggcattgatgtcatgctggttatcgacaacccctgttgcccgtaggaggagccaacaggactgggagccgcttcacgtgggatgtcagcagcccggagttcaccccagggccccagagggcctcattttttattaagttgacacaaaggaatattgtttatactttccaacaaacataatttttgcaatttcctttctgcccttttccctagagataaggtgagatcaccttggttttgtgtcctgccatgttaggatattggaatctgccactttctcccagagctgctggtcctctgggcttggtcatgggagttgtatcactaggagtaggctgagctctggaaacattgggatggactgttcagaaagtctgtgtggtctttgtcccttgatgtatttgagaataagacaaccacctgtcccctgtggccttagatgttcatctgcctaaaggcagaaactagaccagatgatcttttaaggtttttagtagttctaggagtctatagtcttgggatcaaatcccttttcttgttcattagggcaactttatgtcttctctgtttacttgagtagggaccacaaagagggaaaaaaggatgtttctgacaccaaatatgagcttatcttatggtcagaatgaaagaggttgcttatcagtgagctgaaaactaaaattatagaatgaagcctggaaaccttcctcaaagtaacttgatggtggccatgcaatgtaatgttcctctttgtctgaaccttcctcttcttgggatgaattggtgaattgctaagggccaatgctggccttggagcttgcaagcaaattaattttccagtttagtctcttaagggttcaataatgctcttggagtaagttgggtatttttaaaggctgaagtttggactaccggaggatagagcaattgaagttcgagcaggatggagaagccactctaagtctcttcatctggacacgaattctctggaggcattagcagcagcacctctgggtcaacacagatttactggattccaaaatctagcaaggatctgagctggttaactcagagggtggagcatgatgctaacaagacggtttatcattttggacccctcacaaacacacttctctttagcagaggtgacattccttaggctaaataattggatccagggacataacagatttgttgagagaaaatgtggcagtgccttcacccgggacagtggtcaggaagccctgagcatccctgatggatttatccatcctcttctgaagtgctctgctctaggctgggtcctgttgccacctgcctgttctctggttggcttttgcaggagggcagcttacgtgtttgtcaaccagttagaaagccagttcctgtgggtcgagtttaggcctttttggccatagttgagaattttgacttgggatactgggttgttggtgacaaataatgtcttccttttcccccttcccgcctggctcggttatgggaatagccatcagtgcatccatgtctgtgaccaacacccagccagactaatgtacacagcagggagaaataacattcaaatggtggttcacacatctcatctcaagataagattcttagggttcactgctttattcaaaagtgttttcactgtagctccttcatatggaatatcaaaactgaagaaattcacatgtggaaatgcaaatagacattgattaatcaaggtagcatctttatgtaaatatataaataagtttgggcattgaaatgtaaactgtacagctaatagacttttctcctctgcaatgtgggttgctgtcatttcagtaatgtgtatgtttacaaaagaaaaaaaaatctgtgtttcgaggttgaagcctcaccttttattctcctttacatgcaaccctctcctcttgcctctcaagggttgaggggtcctttctgtcaagtaatggttatttttcgtggtatcctgaggttcagggtgttttaagctgggggtaggtggttagaggcaggagtagaagtgaaaggaaaggtctgattctcctagaggacacaagaagacctcctttttctggaattagggaatctgccggaaggagctgtttgaggcatttctgctctgagccttctatatgcaaacactgcagttttaactgcaagctcagaagtgctggtgtaaacatagcagggtgagaatgaagttcctgttttttcctttgaatggtgagtcagggcttctgggttcccttaactttgtgcttgtctcggtagctttctgtctcacatctccacgtgtccaccctcctgctcatgcagagggccagggtatgggtggccccagaggagaacgtgccagtgaggcagtgccatgtttcaggtcataggggccttgggctcagctgaccccaatgcagaacttctccctttaagagagattccaataaattggtccttccctaccttgccagcttcttcataggaccagaaatcttgtgcagagcctctgcttggctgaacagcgtgtgctttatctcttcagttacctttgccactgttgagcatcctcagagtatgtcttgcctgggctatgaagtggagcctgtggcttcggaaatcacctttcgaagccttgctctatgccagattctgctccccaacatgacagattaacaggcacaacctaggatcctttgctaccagttctctactagggaattccacagtggcagcagaagctaggagccatgtggacctgcttttctgccagtcttgaaatattttctgagaaaccatctgcttttgttcagaagaaagtgctgaacatcgttcacagacttctaggtctgtaagctctttaggggcgggcattatgatgaccaccggcctcctggaggagggttggatacctgtggtgtgacaccttctgccaccatctcctgccgggcctcagccctcgcctgcctgagcaggcctagttctcctgtgaagctgtcagcctgatctcatgccacactgtgaaatgaactatgtgccagtttggaaatgattgctgacctgagatgctggctgggctgccctgttgttcctgaataagtcagaagaagttccaggtgggagtggaattcaggtttggggctcgttggtatccatgcaaaatatgacaaaggcctgttcaagagggcattttcaattctgtaggctcagcagatgatactgcccagcctttgggaaaatgtccagttggcccctggcttaggactctccacaaggagtttgaaatggtagggcttatcccctaccagactaaaagtatggcccaaattatgtgtttagaatttgcttggcctttaaacacgaaccattccctatgcctggtagagaccattccagtgtcagtgtcccacctgggacctgtacagtcctcagtaaattatgattgcaatgaattagaaggcttttgccttccatatccatcatccattatagcatctgtgcttccacctggttagggggagggaagctgaaatcattgatgtatcaatagaagtaatttagcttaggaacttgcatctataacttaccttgttttgttccactttaaagtcaagacaagaaagttaagatagcacacaggtgcacatgcttccagatgccacatgtgaacatttgttgatcatgtgactaccgatgacactttagctagaagataaattaaatcttagctaaatcattgtttttccttctggtggctatgaggatgaatttgctctcagtcttgatgcactgaaagcccttcaaacacagtaaaagatgaaatcactcatctttaaactgaggccttcagggaagcttttgtaaaggacagtaatgaattaggctttcagttttaggacatcaaccctccgagaaaaggcagaaacccgagggaccatttatttcccttcgaaactgtatagcccagggaatggattgagatgctttctccagaccctgtataggtcaaccttgcagaggtaaaggaggaggggcaggtggatgaataaaataggataatgctcagcttggcagtggacttgccttagtgtgatgacaggtctaacatgggcaagacaattagaatggggaccaatatgccaggcatgggcttttatctccctagtagatcccaagctagtaggcttggattctgccaaatggccagccctcctgtcttctccccgtaccttgtagttagaccgaggtgagaatcctgctgaccccagtcccatcccctctcatttcaggaaaacccttttgtgattcaggtagggggagaggaggagttaagggctccgtttactcccaagtcatggatttttaatattccatttttatcactaatatacctctcttcctagaagctactggagtattgagtgttgtgggaaaaggctaactgtgaattaagttaatgtttttcttataagaaatggaagtttatttttttattgatattactatgtgatgaactgagtatgcatatactgaaatggaaggaaattttaaaactattattctagaagaaatgggcagttttgtaatttggtggtggctgagaccccatagaagttttactatgtaaataatttggagagtgaataaggagattgtgctatgaaatcctgacagcgctctttaggaggcagacttgacagtcctaggaaggttgacataaaaataccaaccttcagtaaagctctagtacaaaaaagggtaaatgtcatcattcttatttttaggcctctttcttgagagaggtgggagtgggaggtagtgttataactggcactttaatttgtttttggaactagaatttaggggcagttggatgaaattgcaaatttagaaggggaataagaattttctagtgctatataaagaaatgatgatggagacaaaagccttgctttcctctttttagaatttattttcgatttttagcatactgtggggcttttagagctaatatgatctaaattcagaaaatttaattttcatagtaggccaggtgtgaattacttatgtttgctatagaatgcttatttagactaacaataaatttactttgctttctaaggccagtcagcgaatgtggggatgaggcaggatgttttaaatgagccagagatgatccacaaagtgaacagtcgacacagaggtctttgagttggatggttgcaaatatattgacattagagtgaaaactccttcctttgggtaaactaaagaaagataaagtatactaaaaaattttaagatggtgttatacaaaaaaaagtttgggtctaacgtgtccacaaagactgtcaagtgaagaatggtggagattcttggtgtttgagcagccaacctggatgagtgacttcagggacagagcagaggaaagcaaaatgaatttcctttatttacccaaaacttgttgactgaatttttgtataggtccgggaaaataagcctaaacaaatagttgtagccttagaaaaactgttttcccatttctttctgagttagaatcagcatagcctccctgtcgccttaaatgtaaaaatcctattttgattaataccccagcctaagagttatagcaatacgagagactgaatctatttttgtttcgggtctttacctcatagtatgaaattagtaagacactgcatagattttgccctgaatactggtgtgcccaggtatgccgtgctctctctctgtttccagtggtggtaattttaaggcctaaagaaagctggggttaatcctgaagctaaaagtaaatgtttcttgaattgattttgttctgtggtacaaataacatctatgaatatcatatctgtatatatctgaaccaagttgtgtgcagagaggttgatataactatatttacagaaaatgatttttacaattaaagttcacattttaacatg

SEQ ID NO: 32728 - DNA, 7064 bp, Homo Sapiens
attgcagaagattcttccataaagaagtgatctgtagaacacttgcttctttatcccaccatatagtcttattagttgtgggaggagagagcgatggcttttttcacccagaaggccagccccagcggcttccccagcctccggaagtgggaccacagcctgcccgcaaggtgacgctgaccagggggggcctccagcagcccccacatctgccagcggggccccacgcacactcgcctgtccctccagggatcaaaagcatccaaggaattcacccggcgaagaaggccatcatgcacggacgaggcagaggagtggccggtcccatgggccgggggcgcctgatgccaaacaagcagaacctgcgggtggtggagtgcaagccccagccctgcgtggtgtctgtggaggggctgtcctcgtccaccacggatgcccagctgaagagcctgctgatgtcagtgggacccattcagagtttacagatgcttcctcagcaacggaaagccatagctaagttcaaggagccagcccacgcattagcatttcagcagaaattccacaggcatatgatagatttgtcccacataaatgtggccctgatcgtggagtgagtcctaacaagagagcctgaccttaggctgtacacacactgtggaatttcttcaagggagctgccggccggcgcagaacccccaggagcacaggtctctccgggccgctgtcctgcgtaactgttctccagagcgccagccagccacgggcctgattccagaggagccgaactgacaggacacagcaggctggagttggtgttagattgcttcacattctcttgtcaccaccaagaactccaagtttttcgttttgttttgttttcaaagtgcttacaatgcatgtagacattgttctttgtggtctgactctatgatcgatcacagtgacttagattcaggaaagaacattaacgtcacaagttctaagtagttttcacagcaaagaatatttgataatggttgcacttatcttcagtgcaggttagaagagtcttctcaaccaagcttaactcgagttgtcttctcagccctcaaaaggctcttgtacaaaatgtagattaaaatttgggtgattgttgattgacctttgcataccctggaaagccagggtgtgagtggggtggttgggagtggtgccagttgaacagcagattctgcttcttgtcactgtttcaaaagcgtcaactctgtgttcctagtttcgatgaactccccattcatttttaacacacttcccagataaggcaatgtgctggacaggcacacggcatggccctcggctagagcagggtctgtgatggcctcacctggcagccctctggcctagttcccaccacacatgaggtggtggaatggcctgaaggtggaacagacctgtttttttcctttttaaatgcagtaaggtggcctgtttatcactggctctgtgatacatgacattctttgggaatttggtggccactgcttcagtcacctctgtttttctgaaggctgttccagcagggctgccctgttcatcagcggatgttcactctggcctgccgttccccgtggcatgcggggtgagggtggctttcttccagccccaaatgagacgagtctgtgtcatcattgaaactgcttttcgtaattgcgggtaggttcctgtaggtgagacatattctccataaagctactgtagtagaattcattctgggcaaacactgaaaaaagtgccttacagtatttctgctcatgaaagagtttcactattttggatatattctaaagtggacctgagctatttgagcaaataatgatagggcatactcagacattttagctaccttttatacctacgatttcatgtcacatttactaatagaattaagggaaatagaagcccgttctttcttactgcccctggagggagcatggcgctagggctctcagcctcctagaaggaagggactaaggagacgggcacagacttgcgtcatctcgtttccacagttgacgttttatattactttctcaaattaagttaccaaaacaaactgaagagctgaagcaggtcttccagaccctgcgatcctttctgtagcagtgattctaaagtggcgtttgctgtgtgcttgagagtaacactgcacgctgcaggggctgttgcagcagtcagtcccaggaagccacagcgcttgtaggatctgctaggaccctgcagctgtgctgccgccacctctgctccagagtgtcccagccaaccctcggaagatgggattgccagtcagccctgcctcaccatgcctgcaggaggctgtccagggagcaggtctgtgtgcccatcagcaggttcccatggctgtcactgcccactcatttccacagttagatacggatgtgttgatgtatttcgtctagtttatttggctcagtccacagctgcgttggagtggtgactttggtagcccttgagctctaattaagagagatccaaaccactcagtacccactgggcagtgggaaggcctaccgacttactttatcattgagggcttactgatacaatgaaatgagtttcatgactttttttttttttaaacactttttgaaatagagtgtgctgtgtttaaaaccaaaaatatgcatgttgtctctgaaaagtaggcattgaaacagacttttttgtagtcagtgttaataaaacggatcctgtttgggccttcattgttaaggtggacttcatggccactggaaggtctgttttggtgttacctgagtgtgacacaggccctggggtgtgcgtgtttctctaactgtctacacatgcacataggcagactttctcatagaatgttcttgaaaggtgattggcaaagtcatgcaggcccgccttaaagcgctgattagaacagtccaacacagtccgacctcactcaatacccacaaccatcgaaaatggattcttagtaccagacaatcccagtaatgaaggtttagtttccttgaaggaaactacagaaaaggaaagaagcagaatgagaaaggaatggtacttaggtgtttggtatgctgctcacgtgaagtcagcccacaccagccaaaccctcgtggaagatctgctgcaaccattatctttgttcttgagttcatcatgcatttaaaatgagatgcaagagcatttagcataccatgtaaatatggaccttttaaaattaaaatactattggaagtgctttcaactcagccacatcttagctattagttctttgtgttgtcttatcaaagtttaatggatacagttccacagttgttgatgtgtttgtgtgtatattcgatttttataaagatggtagtaagtcaatacatttatcctgatctgtgtattatttgttcacaaattcaagaagcttaaaggtcgtaaatatcagtatctcataaggtaaaccaatagctgattatgtggagccaagttacttcttttctttttgcattatcttgttttggttttgtgctgtaatagaagttcacttagctactttagataaccttgcattaccactggtctggccacgtttgttaaatccttatactgatattcttctaaagagtaaatctcatcatttttccagacaaattttgaggggtttctctgttttgtggacaggcagcagcctccgtaggcacccgcaccctgccttgctggaggagatgggatggggcgggaggtggcttcaccataactatttttaatatgggtcattcttagcatgatttgtaaaggtctcaggcaaacagttgttgaagcttgcttctgtggcatttctgaattgtggcagagcttagatcctgcacccaggggtctttttttcaaacagcatcttgctcagttctgtgaacagaaggctttgttactgaaggaggtggaagaggagtttagggtgaaaaggaggaagggatggacagacccaggtgaggagaggcctggggattggggaagctgtcatctcagtgttaataatcaacttgcttctaacacactggcttatcaggggaggtcatccagtccggtcggtggagttgagagcccttgggccagggtgtttggcggcacaggggcatccgctggatggcctggaggagtgggggaggggaacgtcttcactgggtggtgatcagctgggacagttcaggtagggcaggtgagggacccccgaggccctggagccttgtcctgggatgggtttgaagaactcatcactcatcacttgttttcttttggcttttgttgtttttgttttgttctgtttgttttgttttgtatttctttgttattttattgggaaggtaagcggaatgtgctcatagaccatcagacgcttgtcgaaggcaggtcctagtcatgtaattgcacaggacaaggaggtcagcgtgtgtgatggcagcatgctgtgccggcacatcgtggagtcctagaaactctctagtccctgcggctgttcccctcctctgctctctccctggagaggactgccagctcttaagaaacattcctggtgcggtgtctgcagtgccctttgtgggtgacttcaggcttcccgctttcgtggtgctcttcctgggattcgtttttttattaccctccctccctacttgtaggcctcagctatggcttgacgtaatcgcttttagacccaggttggcttcccttcattaagctatgatcctccaccccattttttttttttttaatttggagtgggagggaggggggtgggcgagagaaagctcgaaaggtattattggtttttcaaaaaattagaggtgacgattctaccagggagttgactgataggagtgtgtgcagggcaggaaaggttcggaggcacccgactaccaccactcggaaagccgctagtccagatcgactagggagaggcttagatactttagtgtatttaaagagcatttcagttaactttttcagctatttttaaagtttgtgaatggagtgttattttggacattcttaaatatgaattctccaaaggcatttagccttgacttaatattaaatcctaaggattttatgtaaggtttttttgcaacctatttaattttttttaaatgcctaacttctgaggtgcataagcccgtggtttgtgtactggaactaaagcggaactcactgattcatattggatccccaggtataccttctgctggtagcatatggctggaaaaggccgtttgcctcacacattgtaacctgccttggctagaaaatgcttttaatgtctcaactctctcttttctgtgtcatgttttggtaggaaatctttaagattggcggacggaacaggtattttagtgagacacttctgagtacttgctttttcctttgacttctaaccaactaaaagagaaggaggtcttcatgttgatattttgcttggttttattttactgattttaaaaggtatatagaaaaatgtaggcctttaaaaagaaacagcatgtagttttttattttaatatgttccatagagtggataggcagacaggtactattgtaatgtattctgtatttaataatttaatatactctagaaagtagacctcatgcattcttttagcatgattttcttttaaactgcttttcattttaagggcacccgtggcggaagctggttttgcaaggactgtgtaagctgtatgcgttctagctgtatgcgttctgtagtcttttcttaggtgggtaacattttcaataacgcgcgcacagcacacaggggtgccctgagccgaaggagcaaaaaaagccaccgctcgtttctataatccagctttgcttttcacaggcgtgggatccaggatggtgtcctctgtgaggacttgaactctggggctttaattccactgtttaattttcaggtaccacagcagcaaagcacagagtgtgacctttttcatgtctgagctgattctgtttgctccacgtgcctgcttcttgctactgttcatttagtaatgggatcacctcaccatgccatgctctgggctctccctctctgtccatttctgttttgctttcctggctaaacccatctaccattcttaacactggtagctcctgtcccattccaagactcactctctcagaccttcccatctccctggctttccatgctcctctccctccacctcctggcttcaactgggtgagggccgtattcctgccactctgctccgcctcagccttgagaactccacgtgggctgggtgggaaggtgctgacgattttcacactgtgtttaccactccatcacctctccatcacctctcaacctttgcttcgacaggtcttcactcacgatttattcctccaggtctttgattggagagagtaactttttaattctgttgttttgcagtttggctctgtaggagtgagtggcgattcaaagatgccggcgtcccgcagtgtgcggttcgtgcccttaaccacccgcttctttgtttcccgcccctctgctttcgcaggagctcttgtgcttgagttcagtgttagtggtagcgtggctcactccacttggaggtggcggccgtctgaccgtgtgttactgctttgccgacggggcctcccggccctgatgcgtgtacactctgcgggctgcaccgggtggctctggttgggggcgaagctgtgttgactgggagagcgttggaaattgagacatggagagatgacgggagtgcgtttctctgggtttgatctccatcctgttttctcccagacacaccacacctaccttgggggaatgccgttgcctgttccacccctttgttcacttcgcgttaactgctgtggtaactttttcaggatctgtgtgaagaatggtaatgacgtagttgaaaggaaaatgtactgttgtgtgtttcatttgtgtgatttcgtaccaaaaaaatgtgtttgaactatattgtatgtaatttggaagtcgtgttaataaaaccctgcagtttcca

SEQ ID NO: 32729 - DNA, 2378 bp, Homo Sapiens
atgcaaagcgggcggctccgactccagctctgcacggtgcacccggaaggaagggcggccccatctccgccccccttcccttcctttatcccagtggggcccagacccgcgcaaccaggcggggaggggaggtgggcgcgcgattgggttgcgatctggagcagtggggacaggtcaggaaccggcgcgtatttctgcagtgagaccacaggacggacatcggcgccttcggcttcgatggagttgcgattttgctctttccagggaaacagtggcagggtgtttgctgcttatcggttcctgcggatatgcctgggtcccaggacattccactggaggcttggactgcatttaggagcccctatcccttccctgtccacactgttagtgagcaatttcatatgtttgcatttagacccatagactcagaacgactcatcacacacacacacagtgtacactgacacactcacattcgcacacttaggtatacagcctgatccttgctctgacctggtaacaacgcttcctcctccagagactttgagatagagcgagcgatccctgtgcaccattcatccatgctcccacctcgccagtatggctggcttagttctggaaggggcttaagaggaacaagccccagctgtgcttctggctgggacttaaaccccccttctgggccctaaagccacgcttctttgtggaccggacctgactctccaggaatctgggaacccgctatttcactctattttgggacaagaaaaaggggctctttggggccacttcctgccttcccctcaagtaggatctccagcctgcagagggtgcctagtccttctttgcccaagaaccagtccaagaagcctttcctctgtgcctgggaaatgcaaccttttcttgggagcatggtagggtgttggtgctgaagaaccaagcagcgacccgtcttgtagctgccatgttttgtcgaggggttctgggggtcctgctgctttagagccacatacttccacttcctgattcactactgtgagctggtcagatgcctagaagaggaacaagcgttcaaagtgaaagtgggcacattaccggaatagtgctggggagagtgctggattcttttccaccccaggcggactggtgagaagccaggcttggacctgtcctctgctcctagcttgcacactcagccctaaactcagagcagcacgcataccacccctcacacacaccccaccatctgctgtctaaggcccctgggcttcctgcaggatccagaccaatgtggctgggcttgggcttttatctgtcctgatcctggatttgtcctgaccaatgtaagtgtcgcccaataaaaccttctatgacccccacaccagccacccccccaccaagtgtgccctttccttcttgactttttagcagttctgggtaaatattgatttgcccccagtttaccttctccctgactggccatttgcagactcaggaactagcctctgtagggacttgatttttctgttactttctggccgtttcaccaccccccttcctccctccaagtggcattgtaaaactcacagtgacaaagagacagagtagggttctaggcccctgttcctggggacttgaaggcggttttacatactggtcagacacggctggaggccaaggtcaagttgaaagttgcagtccagccagcatgagaactgccatgcgagcgtagagacacaggcagcagcaaaaggcccattgcccacatcccctcactcttaattttctctctctttttaaaattctcgcctctgactctgttcggctgcccagaattttttggtgccttcgtggggtttttggggcggtgtttaccgactcttctctgcctccgccctgctcagccagggctttgagcctcttcggttttccggccagacccggaaaaacgaaaacacagcttggggagcccccactagccggcgcctgtgccagctcacctctggccatggcgcagctgccggtgcacacggcggccaaggccagctccacattcttccctccccctcccacttcaccgtagccccgaaccctgcgcgcagagaaagggtctcagctccacagacgactgggtccctcctcaccaaaaatggtgagacaagatttcatctgtcggccgaggagccacaagcaggtttgtctgagagggatggtgctgggggaaggctttggattgcatctcaaattaagctttgctccttaaatgtggcgctctcgccaagaaaaagcttggggcctgaattcttgagatttatggtgcaccttattgatcaaatttatctggactttttttagttccccgatgtgtccctatcatt

SEQ ID NO: 32730 - DNA, 4090 bp, Homo Sapiens
tgcaaaggcagccccaactcttccaccacctcctccatctccggctcctgggcttgggaggccccgcgccactgcttcgactggctggggcgggaaggttgaaatggctttgagactccacttttgagcttactcctcctttgcccgactattttctcatagtccctattccaatcaatttctggtgcagcccagcttgaaatggctcttgagcctccgcttttcagctgactcctcgattgctcaactattttctcatagtccctgttccggtcaatttccggcgcagcccagcccagtccggcgaggtctggaaaggcctgactcgcctcgcagcctgaatgacttgtacccaccgccgatgcggacctcccagtcttcttggcgactgtggggtggggggcatgcggttgaagccgttcacacgggcagtccctgcatgtcccctcacgtgctccccagtgcacgcggcacccccgcctccacgcttccctgagcgtgcagcctttggtgagggcagccccacgcacagccccccacaccctccccagcgcctgcagcccctggtgcacgcagtccccaagcccgcacgtgcagcccccaccttgcacacagctccatgtacagcccctcatacgttcacagccccagtggcgcagaacccatcactactcgctcttcacgcgcttcactgggcgtgcagcccccacagcgcgcagctcaatgcagcctctccacgtgctccccagggcctgcagcctcgtcttaacttcttttgccaggcccacacatacctgcctatggcctgagtggattggcaatgacagtggtgacagctgacatttactgagtacatgctatgttccagatgctgcgtttccattctccaatgaagaatcttaagtctcagggcctcatgcaaaactatacagctaataaacagtagagttgggatctaagcccagggaattttactctagaactcgcagtattaaccacagtgctctcttggcttatatttctaaggcacatgctgtaaccacttttttttttttttttttgagatggggtctcactctgacatccaagctggggtgcagtggcgcgatctcggcacactgcaaccttcgcctcccagattcaagggattctcctgcctcaggctcctgagtagctaggattacaggcacatgccaccatgcccgtataattttttgtatttttagtagagacggggtttcgccatgttgcccaggctggtctcaaacacctgacctcaggtgatccgcccatctcggcctcccaaagtgctgggattacaggtgtaagccgccacgccctgcctataaccattctttttttagggaggtgtggtatatggtgctaccctggatctgtagtcaggatttgaagaagggagaaggtatttgcttgtgaagaaggcaccatgcattgtgctctgtagtggtgactggagagagagctgggaggggcacaggcagcaaggtccctgcttaaagacagttatctagtttggagaaacttagctggatagtcagttcttacatgcatttggcaagcacttatcatacactgtaaagaggcaatatgtctagcttgttagagggtgggctctggagtcagacttctggctttgaaccccaacttccctgccattttcaaatgacactggagaagtcacaaaacctatttctgtctcagattcctccccagtaaaagtgggatattaatagtacctcctttggcttgatatgaaaattcaatgagttgatatatgcagaacatcttagaacagcaactagcttagagtaaatcttcagtaattgtaaactgtgaatatactatgtttttggcactgaagccacgtcgtggtaagacagtgcctgacctcaagaagctcagagtctagtactggagacaggtgaacaaatacttgcaaagtgtgtggtgtgagagaggtgtgacaggtgggcgggagcctgcagcaggcacatctgacccatcctaggtgtgtgttgtgcagaaaagttagcctaggctttctaggggcactgatgtctgggccgagtcttgtagggcagggaattagtcaaggggagctgtagtgatccagctggggctgagcaggagctgaaagtgaacagctcacatctgtagggttgccagatttagcaacggaaagtacaagatgccctattaaatgtgaatttcagataaaataataactttgaagaatatgtgtcatgcaatatttttagtataagtatgtcccaaatattgtataaccacacacattattcattgtttatctgaaattcaaatttcactgggcatcctatgaaaagtctgtcaattttatctgtccgcatttaggaaggtgcagtatgtttcagagtagctggagtgatgcagggaggaaaggcagagtgggccggatggggctgagaggcacacaggaggcagtttgtaaaaaacctatgctatgttaagggatttagattttatcctgaaattagtgatgagcccttggagagctttaaccacagggatgtgaaaccacagagacagcagtgtcgggcacgaagaaatgagtgtcactttctatggctgaatagcaaattactccaaatttaaagtcttaaacagtaaacattatctcccagtttctgtggctcaggaattcagaggcaacttagctgggtggttctggctgaggtttctcatgaggttgtagataagatagtgaccagagtggcagttatctaaaggatgtactggagctggagaatttgtttctaaggtgactcactctaatggttgggaaggtactgctggctgtcagcaggagagctcagttccttgctacaggaccccccataggacaacttgagcctcctcacaacatgacagctggcttagtaatccaagacagcaaagtgacattaactttggaagtcacatgccaccttgtcattcccatatatcccagtgctaacacagctcagccctgctcagtgcaggagggtcctacacaaggatgtacatacaagaaggtggggatcatggggttatcttggaggctggttttctgggatgggaggcttacatggtgatgcctgtgaccttggaggtggaggagaatgatgggcgtacagaggagtgaagaaaggctgggaggaatagagatgtgggagaggaggtgaggcaaagaaaaaagaaaggaggaaggggtgttggagcagattgtagttgatccacagcaaagagcatcaccaaagccattccaggaggaactagatccaccacttcctctgctgggcatgctccaaaaatggttgtggcctccagagaggactccaaaagaaagcacaaaaactagacagtgggagggcatacccaaaagccctgagtttctgaaaaaatattgaaagtttctatggtgaaataggaagttaatgtgcttaggaagaaaaaagtggtaatgattcaaggaaacataatcacacacggttttagttttaatggacatgggaggagccataaaagtagtctatctatcatcagttacatatctaatgaactgtctatctgggataccctatcctgttttaatctgagtgactctctctcagctgagagagctggacagactccattttagcctcttcacttgcagtccccttatccccctcccttaagggaataactagtgcaagctgactccaagcacatccaggaatgcacttactgataagatattgaggcaagctgtaccagcagctcctggggacgtgctcagtggatggtacccaagcccctgcatttatctctttgtgatagtttaagcccctgcacctggaactgtgtatttttctgtaactatctctgtaaccattaattttttttaactttttgcgtgttctgcttctgtaaaaattgcttcagctaggctccccctgccctatttagaccacggtataaaaagaaatctatccccttcttcggggctgagagaattttgagctctagccatctctcggtcactggcaataaaagaactcctgaatta

SEQ ID NO: 32731 - DNA, 3113 bp, Homo Sapiens
agacctgtactccgtactccgtacttcgtagtcgcagcggcgcggtcttcggcagtctagtcatccaccgccatcctgggccccacgtgttgcctgaccattcctgagcccaggtaggggtcctgggggattgggttcagtggcgggcggcgtgggaggctgggccgcagtgagtgggggcaccagtgattcttggagaccaagccttcactacacgtgctacttcctctcaagaggcggttgagcgcgttcggaacattttacccggaggagactcggggattacttgatgagtaacctcgtgcttctctttcagccgagaagtggggcttctgcatgacctgggtggaccccagtaggtgggatgggacgtgtggtcaggagggacctcaccggaaggcatggggtggcgtgtagacctgccgcaagagaggctgtagagtgggccaggcgttgcaaggagctagagctggataatggttcagaggcacaagctgaagctaactgcgtttggaggtaactgcatttgttcccttctaggtgggagccgtggctgaggtgacggtctcaaagtggaagagcttactgtcacagcaactcctttgcaagatgccccggtaaatcacgttgcagagaccccaactctgccttcctggaactaggcctgcgttttctctgaaccattatttcatggggaaaatgaaatctacttcatgtgcctggtctacttactccttcagaagtgatttctgagccgtaagatacatgagaaaaaaatgaaggggaaaaggcagtatttatattaactacatgatgataaggatgtttctggtcacagtgaaaagccatgctagaattgtagtgtcatagaataatgtggaagtttagttcgtgttgtctgatctatttaataatttaataaggttatctcttccaagacaccttcccttcttcctcagccagaaaggatctttccctgagagtcattagtagctctgggctcctggaaccaagctcaggtgcctaattgaactctggtctcttcccacagcccccagcagggactggtgcttagtgagagtggactgccagattccttgagtgtgggggatttgggtgaatgagggtagcaagcctccagcgtgcttgggtctgcggtgaccctatgcattccttcagtgcttgctagaacagttttgaaacggtttgaggccttgccctgctccatccagagcaaggttatagaaatttcagacaatgacttcctccctcctggatctagtgtcctgggccttgtatagatccgtgccatctaatgtggtagccacttggcacacatgattaaattaaatttggagttctatttcattttcacactagccacatttcagatgatcagtagccacaggtggccagtggctaccatattggaccgcacagattagagggcatttctgtcgctgtggaagttgttttggacaatgctggtgtgaaaggtgaagggaatcctgagtgtttgctgtgctccaggctcagtacaaattttattttattatacacttaaagcaaaagtcttataaaagttgaggatgaagccaagagtggtggtaagggtaggagttgaaacagtgaagaggaataacagggaagagtcctgccctgagagactcatggaataggatatttacaaggcaaagcaaagagaaccaaagtctcagttctgcagaggagctgagtgccccaggagctagtggagggtgaggtcaatgtgtgctcatcttaaaggaaaaactcatggaagaggaaggtgctaatgttgaacatctattttgcgccagacctcttaattgttttaaatctttgaggtatcatcatgaggtcgtttttaagttcagtacagatgaggggcccaaggtcagaattatgtgtccagggttgcccagccacaaaccagcagatcagggtttgatgccaggcctctctaaccctgcatcctgagtggaatatagaagccggtgggaagtttggatgggaaggagatggatgccttcaagttcttgtcttggtgttaggtgtgttaaaggactggctgggatgagaagagtgttgctggcttgagcatagcacgagcagcacagctcctgtgttcctctgggtggtggggtcacctctcttaaaggtagaggctttcagctgattctgtcttttcaggccaggaatagttgctgaacaccccaggcctgctgaggtccctccttgagtctcatgttcaagcagtcttgtgagtaaagcactggctaccccttttcacttactatcttttcaagcatgttctaccaccttggaaggtaagaggttagtaccttcttccagagcagagggcaggcattcttgctgtgcgttgtgaaagggtagagtcctgcgctcctttcttgtagtagtccaatggctcatgcaggtgcctctgactcccctatgggaactggggcttgggagggtggtggaaaatgctgatgctctggctattgctattgttttgaataatcagtggtcccttgtccctaatcgaggaattttgtattttctaccagtgtccatgaaactgggaggcgaccgtgttagctgccagttcctgacagccacctctcaccagtggcttcactctgtgtccctgacccagcacatggcacaagagtgcctgccatccgtcagtgtttctacagcagcaatcccaagatgctggagctagaggggacctgacctgagagaagataccttcagtggctgccaggctgttccttggaacctgtgcagggatgaggcctgcctgtgttaatacacctagtgaggagtggagctgaatttgaatgcaagccttggcaccttaattgagcaagtttgaaacctcgcttgttgcccttctggaaggagtcaggaatttccagttctgggcctgggctgtgggtctggcagacagacctctggccctaggtttgggtgccaggttctctgcttccagaatgagaagctttgctgtgcaccaggacctgggcccttctggtatctcctgaatgaaaaacaagggatatttaataaatatggatttaaatatg

SEQ ID NO: 32732 - DNA, 8536 bp, Homo Sapiens
atgagtgcacagcagggagacttctatggtctgcaggctccaccccacctcctgttaggccttcctgaacagcagcagcagctgggaatgcaaaatgacatccctatgttgtccctgccctttgtccaggaaaaatttccgtgcgggccgtggggggctggcggcaactggggggccgcagatcagagtgggccactggcagccaacggcccccggggctcaggcggggagcagctctgtggtgtgggattgaggcgttttccaagagtgggttttcacgtttctaagatttcccaagcagacagcccgtgctgctccgatttctcgaacaaaaaagcaaaacgtgtggctgtcttgggagcaagtcgcaggactgcaagcagttgggggagaaagtccgccattttgccacttctcaaccgtccctgcaaggctggggctcagttgcgtaatggaaagtaaagccctgaactatcacactttaatcttccttcaaaaggtggtaaactatacctactgtccctcaagagaacacaagaagtgctttaagaggcggcggaaggtgatcgaattccggtgatgcgagttgttctccgtctataaatacgcctcgcccgagctgtgcggtaggcattgaggcagccagcgcaggggcttctgctgagggggcaggcggagcttgaggaaaccgcagataagtttttttctctttgaaagatagagattaatacaactacttaaaaaatatagtcaataggttactaagatattgcttagcgttaagtttttaacgtaattttaatagcttaagattttaagagaaaatatgaagacttagaagagtagcatgaggaaggaaaagataaaaggtttctaaaacatgacggaggttgagatgaagcttcttcatggagtaaaaaatgtatttaaaagaaaattgagagaaaggactacagagccccgaattaataccaatagaagggcaatgcttttagattaaaatgaaggtgacttaaacagcttaaagtttagtttaaaagttgtaggtgattaaaataatttgaaggcgatcttttaaaaagagattaaaccgaaggtgattaaaagaccttgaaatccatgacgcagggagaattgcgtcatttaaagcctagttaacgcatttactaaacgcagacgaaaatggaaagattaattgggagtggtaggatgaaacaatttggagaagatagaagtttgaagtggaaaactggaagacagaagtacgggaaggcgaagaaaagaatagagaagatagggaaattagaagataaaaacatacttttagaagaaaaaagataaatttaaacctgaaaagtaggaagcagaagaaaaaagacaagctaggaaacaaaaagctaagggcaaaatgtacaaacttagaagaaaattggaagatagaaacaagatagaaaatgaaaatattgtcaagagtttcagatagaaaatgaaaaacaagctaagacaagtattggagaagtatagaagatagaaaaatataaagccaaaaattggataaaatagcactgaaaaaatgaggaaattattggtaaccaatttattttaaaagcccatcaatttaatttctggtggtgcagaagttagaaggtaaagcttgagaagatgagggtgtttacgtagaccagaaccaatttagaagaatacttgaagctagaaggggaagttggttaaaaatcacatcaaaaagctactaaaaggactggtgtaatttaaaaaaaactaaggcagaaggcttttggaagagttagaagaatttggaaggccttaaatatagtagcttagtttgaaaaatgtgaaggactttcgtaacggaagtaattcaagatcaagagtaattaccaacttaatgtttttgcattggactttgagttaagattattttttaaatcctgaggactagcattaattgacagctgacccaggtgctacacagaagtggattcagtgaatctaggaagacagcagcagacaggattccaggaaccagtgtttgatgaagctaggactgaggagcaagcgagcaagcagcagttcgtggtgaagataggaaaagagtccaggagccagtgcgatttggtgaaggaagctaggaagaaggaaggagcgctaacgatttggtggtgaagctaggaaaaaggattccaggaaggagcgagtgcaatttggtgatgaaggtagcaggcggcttggcttggcaaccacacggaggaggcgagcaggcgttgtgcgtagaggatcctagaccagcatgccagtgtgccaaggccacagggaaagcgagtggttggtaaaaatccgtgaggtcggcaatatgttgtttttctggaacttacttatggtaaccttttatttattttctaatataatgggggagtttcgtactgaggtgtaaagggatttatatggggacgtaggccgatttccgggtgttgtaggtttctctttttcaggcttatactcatgaatcttgtctgaagcttttgagggcagactgccaagtcctggagaaatagtagatggcaagtttgtgggttttttttttttacacgaatttgaggaaaaccaaatgaatttgatagccaaattgagacaatttcagcaaatctgtaagcagtttgtatgtttagttggggtaatgaagtatttcagttttgtgaatagatgacctgtttttacttcctcaccctgaattcgttttgtaaatgtagagtttggatgtgtaactgaggcgggggggagttttcagtatttttttttgtgggggtgggggcaaaatatgttttcagttctttttcccttaggtctgtctagaatcctaaaggcaaatgactcaaggtgtaacagaaaacaagaaaatccaatatcaggataatcagaccaccacaggtttacagtttatagaaactagagcagttctcacgttgaggtctgtggaagagatgtccattggagaaatggctggtagttactcttttttccccccacccccttaatcagactttaaaagtgcttaaccccttaaacttgttattttttacttgaagcattttgggatggtcttaacagggaagagagagggtgggggagaaaatgtttttttctaagattttccacagatgctatagtactattgacaaactgggttagagaaggagtgtaccgctgtgctgttggcacgaacaccttcagggactggagctgcttttatccttggaagagtattcccagttgaagctgaaaagtacagcacagtgcagctttggttcatattcagtcatctcaggagaacttcagaagagcttgagtaggccaaatgttgaagttaagttttccaataatgtgacttcttaaaagttttattaaaggggaggggcaaatattggcaattagttggcagtggcctgttacggttgggattggtggggtgggtttaggtaattgtttagtttatgattgcagataaactcatgccagagaacttaaagtcttagaatggaaaaagtaaagaaatatcaacttccaagttggcaagtaactcccaatgatttagtttttttccccccagtttgaattgggaagctgggggaagttaaatatgagccactgggtgtaccagtgcattaatttgggcaaggaaagtgtcataatttgatactgtatctgttttccttcaaagtatagagcttttggggaaggaaagtattgaactgggggttggtctggcctactgggctgacattaactacaattatgggaaatgcaaaagttgtttggatatggtagtgtgtggttctcttttggaatttttttcaggtgatttaataataatttaaaactactatagaaactgcagagcaaaggaagtggcttaatgatcctgaagggatttcttctgatggtagcttttgtattatcaagtaagattctattttcagttgtgtgtaagcaagtttttttttagtgtaggagaaatacttttccattgtttaactgcaaaacaagatgttaaggtatgcttcaaaaattttgtaaattgtttattttaaacttatctgtttgtaaattgtaactgattaagaattgtgatagttcagcttgaatgtctcttagagggtgggcttttgttgatgagggaggggaaactttttttttttctatagacttttttcagataacatcttctgagtcataaccagcctggcagtatgatggcctagatgcagagaaaacagctccttggtgaattgataagtaaaggcagaaaagattatatgtcatacctccattggggaataagcataaccctgagattcttactactgatgagaacattatctgcatatgccaaaaaattttaagcaaatgaaagctaccaatttaaagttacggaatctaccattttaaagttaattgcttgtcaagctataaccacaaaaataatgaattgatgagaaatacaatgaagaggcaatgtccatctcaaaatactgcttttacaaaagcagaataaaagcgaaaagaaatgaaaatgttacactacattaatcctggaataaaagaagccgaaataaatgagagatgagttgggatcaagtggattgaggaggctgtgctgtgtgccaatgtttcgtttgcctcagacaggtatctcttcgttatcagaagagttgcttcatttcatctgggagcagaaaacagcaggcagctgttaacagataagtttaacttgcatctgcagtattgcatgttagggataagtgcttatttttaagagctgtggagttcttaaatatcaaccatggcactttctcctgaccccttccctaggggatttcaggattgagaaatttttccatcgagcctttttaaaattgtaggacttgttcctgtgggcttcagtgatgggatagtacacttcactcagaggcatttgcatctttaaataatttcttaaaagcctctaaagtgatcagtgccttgatgccaactaaggaaatttgtttagcattgaatctctgaaggctctatgaaaggaatagcatgatgtgctgttagaatcagatgttactgctaaaatttacatgttgtgatgtaaattgtgtagaaaaccattaaatcattcaaaataataaactatttttattagagaatgtatacttttagaaagctgtctccttatttaaataaaatagtgtttgtctgtagttcagtgttggggcaatcttgggggggattcttctctaatctttcagaaactttgtctgcgaacactctttaatggaccagatcaggatttgagcggaagaacgaatgtaactttaaggcaggaaagacaaattttattcttcataaagtgatgagcatataataattccaggcacatggcaatagaggccctctaaataaggaataaataacctcttagacaggtgggagattatgatcagagtaaaaggtaattacacattttatttccagaaagtcaggggtctataaattgacagtgattagagtaatactttttcacatttccaaagtttgcatgttaactttaaatgcttacaatcttagagtggtaggcaatgttttacactattgaccttatatagggaagggagggggtgcctgtggggttttaaagaattttcctttgcagaggcatttcatccttcatgaagccattcaggattttgaattgcatatgagtgcttggctcttccttctgttctagtgagtgtatgagaccttgcagtgagtttatcagcatactcaaaatttttttcctggaatttggagggatgggaggagggggtggggcttacttgttgtagctttttttttttttacagacttcacagagaatgcagttgtcttgacttcaggtctgtctgttctgttggcaagtaaatgcagtactgttctgatcccgctgctattagaatgcattgtgaaacgactggagtatgattaaaagttgtgttccccaatgcttggagtagtgattgttgaaggaaaaaatccagctgagtgataaaggctgagtgttgaggaaatttctgcagttttaagcagtcgtatttgtgattgaagctgagtacattttgctggtgtatttttaggtaaaatgctttttgttcatttctggtggtgggaggggactgaagcctttagtcttttccagatgcaaccttaaaatcagtgacaagaaacattccaaacaagcaacagtcttcaagaaattaaactggcaagtggaaatgtttaaacagttcagtgatctttagtgcattgtttatgtgtgggtttctctctcccctcccttggtcttaattcttacatgcaggaacactcagcagacacacgtatgcgaagggccagagaagccagacccagtaagaaaaaatagcctatttactttaaataaaccaaacattccattttaaatgtggggattgggaaccactagttctttcagatggtattcttcagactatagaaggagcttccagttgaattcaccagtggacaaaatgaggaaaacaggtgaacaagctttttctgtatttacatacaaagtcagatcagttatgggacaatagtattgaatagatttcagctttatgctggagtaactggcatgtgagcaaactgtgttggcgtgggggtggaggggtgaggtgggcgctaagcctttttttaagatttttcaggtacccctcactaaaggcaccgaaggcttaaagtaggacaaccatggagccttcctgtggcaggagagacaacaaagcgctattatcctaaggtcaagagaagtgtcagcctcacctgatttttattagtaatgaggacttgcctcaactccctctttctggagtgaagcatccgaaggaatgcttgaagtacccctgggcttctcttaacatttaagcaagctgtttttatagcagctcttaataataaagcccaaatctcaagcggtgcttgaaggggagggaaagggggaaagcgggcaaccacttttccctagcttttccagaagcctgttaaaagcaaggtctccccacaagcaacttctctgccacatcgccaccccgtgccttttgatctagcacagacccttcacccctcacctcgatgcagccagtagcttggatccttgtgggcatgatccataatcggtttcaaggtaacgatggtgtcgaggtctttggtgggttgaactatgttagaaaaggccattaatttgcctgcaaattgttaacagaagggtattaaaaccacagctaagtagctctattataatacttatccagtgactaaaaccaacttaaaccagtaagtggagaaataacatgttcaagaactgtaatgctgggtgggaacatgtaacttgtagactggagaagataggcatttgagtggctgagagggcttttgggtgggaatgcaaaaattctctgctaagactttttcaggtgaacataacagacttggccaagctagcatcttagcggaagctgatctccaatgctcttcagtagggtcatgaaggtttttcttttcctgagaaaacaacacgtattgttttctcaggttttgctttttggcctttttctagcttaaaaaaaaaaaaagcaaaagatgctggtggttggcactcctggtttccaggacggggttcaaatccctgcggcgtctttgctttgactactaatctgtcttcaggactctttctgtatttctccttttctctgcaggtgctagttcttggagttttggggaggtgggaggtaacagcacaatatctttgaactatatacatccttgatgtataatttgtcaggagcttgacttgattgtatattcatatttacacgagaacctaatataactgccttgtctttttcaggtaatagcctgcagctggtgttttgagaagccctactgctgaaaacttaacaattttgtgtaataaaaatggagaagctctaaattgttgtggttcttttgtgaataaaaaaatcttgattggggaaaaaagatgggtgttctgtgggcttgttctgttaaatctgtggtctataaacacagcacccataattacagcataatcttcaagtagggtacggactttgggggattggtgcgagggtagtgggtgagtggcctactaaaaagcccagtaacccccacaggaaaatagggaacttctttttaagtagcctcctttccactatttagtaattggctgtgagctgggctgggggagaaatggggcggggtgtgtgtgtcattggaaagctctcttttttgtttttttgagacagtctcactttgtcccccaggctggagtgtagtggcatgatctctgcaaactgcaacctccacttctggggtccaagtggttgtcctgcttcaccctccctgtagctgggactacaggtgcacaccaccacgcctggctaatttttgtatt

SEQ ID NO: 32733 - DNA, 4597 bp, Homo Sapiens
cgacattttaactgaactgcgggataaagtgaaatctttccgtgcagctctacgagaggaggaaattgttcctcgtctgataagacaacagtggagaaaggacgcatgctgtttcttagggacacggctgacttccagatatgaccatgtatttgtggcttaaactcttggcatttggctttgcctttctggacacagaagtatttgtgacagggcaaagcccaacaccttcccccactgatgcctaccttaatgcctctgaaacaaccactctgagcccttctggaagcgctgtcatttcaaccacaacaatagctactactccatctaagccaacatgtgatgaaaaatatgcaaacatcactgtggattacttatataacaaggaaactaaattatttacagcaaagctaaatgttaatgagaatgtggaatgtggaaacaatacttgcacaaacaatgaggtgcataaccttacagaatgtaaaaatgcgtctgtttccatatctcataattcatgtactgctcctgataagacattaatattagatgtgccaccaggggttgaaaagtttcagttacatgattgtacacaagttgaaaaagcagatactactatttgtttaaaatggaaaaatattgaaacctttacttgtgatacacagaatattacctacagatttcagtgtggtaatatgatatttgataataaagaaattaaattagaaaaccttgaacccgaacatgagtataagtgtgactcagaaatactctataataaccacaagtttactaacgcaagtaaaattattaaaacagattttgggagtccaggagagcctcagattattttttgtagaagtgaagctgcacatcaaggagtaattacctggaatccccctcaaagatcatttcataattttaccctctgttatataaaagagacagaaaaagattgcctcaatctggataaaaacctgatcaaatatgatttgcaaaatttaaaaccttatacgaaatatgttttatcattacatgcctacatcattgcaaaagtgcaacgtaatggaagtgctgcaatgtgtcatttcacaactaaaagtgctcctccaagccaggtctggaacatgactgtctccatgacatcagataatagtatgcatgtcaagtgtaggcctcccagggaccgtaatggcccccatgaacgttaccatttggaagttgaagctggaaatactctggttagaaatgagtcgcataagaattgcgatttccgtgtaaaagatcttcaatattcaacagactacacttttaaggcctattttcacaatggagactatcctggagaaccctttattttacatcattcaacatcttataattctaaggcactgatagcatttctggcatttctgattattgtgacatcaatagccctgcttgttgttctctacaaaatctatgatctacataagaaaagatcctgcaatttagatgaacagcaggagcttgttgaaagggatgatgaaaaacaactgatgaatgtggagccaatccatgcagatattttgttggaaacttataagaggaagattgctgatgaaggaagactttttctggctgaatttcagagcatcccgcgggtgttcagcaagtttcctataaaggaagctcgaaagccctttaaccagaataaaaaccgttatgttgacattcttccttatgattataaccgtgttgaactctctgagataaacggagatgcagggtcaaactacataaatgccagctatattgatggtttcaaagaacccaggaaatacattgctgcacaaggtcccagggatgaaactgttgatgatttctggaggatgatttgggaacagaaagccacagttattgtcatggtcactcgatgtgaagaaggaaacaggaacaagtgtgcagaatactggccgtcaatggaagagggcactcgggcttttggagatgttgttgtaaagatcaaccagcacaaaagatgtccagattacatcattcagaaattgaacattgtaaataaaaaagaaaaagcaactggaagagaggtgactcacattcagttcaccagctggccagaccacggggtgcctgaggatcctcacttgctcctcaaactgagaaggagagtgaatgccttcagcaatttcttcagtggtcccattgtggtgcactgcagtgctggtgttgggcgcacaggaacctatatcggaattgatgccatgctagaaggcctggaagccgagaacaaagtggatgtttatggttatgttgtcaagctaaggcgacagagatgcctgatggttcaagtagaggcccagtacatcttgatccatcaggctttggtggaatacaatcagtttggagaaacagaagtgaatttgtctgaattacatccatatctacataacatgaagaaaagggatccacccagtgagccgtctccactagaggctgaattccagagacttccttcatataggagctggaggacacagcacattggaaatcaagaagaaaataaaagtaaaaacaggaattctaatgtcatcccatatgactataacagagtgccacttaaacatgagctggaaatgagtaaagagagtgagcatgattcagatgaatcctctgatgatgacagtgattcagaggaaccaagcaaatacatcaatgcatcttttataatgagctactggaaacctgaagtgatgattgctgctcagggaccactgaaggagaccattggtgacttttggcagatgatcttccaaagaaaagtcaaagttattgttatgctgacagaactgaaacatggagaccaggaaatctgtgctcagtactggggagaaggaaagcaaacatatggagatattgaagttgacctgaaagacacagacaaatcttcaacttatacccttcgtgtctttgaactgagacattccaagaggaaagactctcgaactgtgtaccagtaccaatatacaaactggagtgtggagcagcttcctgcagaacccaaggaattaatctctatgattcaggtcgtcaaacaaaaacttccccagaagaattcctctgaagggaacaagcatcacaagagtacacctctactcattcactgcagggatggatctcagcaaacgggaatattttgtgctttgttaaatctcttagaaagtgcggaaacagaagaggtagtggatatttttcaagtggtaaaagctctacgcaaagctaggccaggcatggtttccacattcgagcaatatcaattcctatatgacgtcattgccagcacctaccctgctcagaatggacaagtaaagaaaaacaaccatcaagaagataaaattgaatttgataatgaagtggacaaagtaaagcaggatgctaattgtgttaatccacttggtgccccagaaaagctccctgaagcaaaggaacaggctgaaggttctgaacccacgagtggcactgaggggccagaacattctgtcaatggtcctgcaagtccagccttaaatcaaggttcataggaaaagacataaatgaggaaactccaaacctcctgttagctgttatttctatttttgtagaagtaggaagtgaaaataggtatacagtggattaattaaatgcagcgaaccaatatttgtagaagggttatattttactactgtggaaaaatatttaagatagttttgccagaacagtttgtacagacgtatgcttattttaaaattttatctcttattcagtaaaaaacaacttctttgtaatcgttatgtgtgtatatgtatgtgtgtatgggtgtgtgtttgtgtgagagacagagaaagagagagaattctttcaagtgaatctaaaagcttttgcttttcctttgtttttatgaagaaaaaatacattttatattagaagtgttaacttagcttgaaggatctgtttttaaaaatcataaactgtgtgcagactcaataaaatcatgtacatttctgaaatgacctcaagatgtcctccttgttctactcatatatatctatcttatatacttactattttacttctagagatagtacataaaggtggtatgtgtgtgtatgctactacaaaaaagttgttaactaaattaacattgggaaatcttatattccatatattagcatttagtccaatgtctttttaagcttatttaattaaaaaatttccagtgagcttatcatgctgtctttacatggggttttcaattttgcatgctcgattattccctgtacaatatttaaaatttattgcttgatacttttgacaacaaattaggttttgtacaattgaacttaaataaatgtcattaaaataaataaatgcaatatgtattaatattcattgtataaaaatagaagaatacaaacatatttgttaaatatttacatatgaaatttaatatagctatttttatggaatttttcattgatatgaaaaatatgatattgcatatgcatagttcccatgttaaatcccattcataactttcattaaagcatttactttgaatttc

SEQ ID NO: 32734 - DNA, 3923 bp, Homo Sapiens
cccggacgctcgcgggtctcggaacgcatcccgccgcgggggcttcggccgtggcatgggcgccgcgggcctgctcggggttttcttggctctcgtcgcaccgggggtcctcgggatttcttgtggctctcctccgcctatcctaaatggccggattagttattattctacccccattgctgttggtaccgtgataaggtacagttgttcaggtaccttccgcctcattggagaaaaaagtctattatgcataactaaagacaaagtggatggaacctgggataaacctgctcctaaatgtgaatatttcaataaatattcttcttgccctgagcccatagtaccaggaggatacaaaattagaggctctacaccctacagacatggtgattctgtgacatttgcctgtaaaaccaacttctccatgaacggaaacaagtctgtttggtgtcaagcaaataatatgtgggggccgacacgactaccaacctgtgtaagtgttttccctctcgagtgtccagcacttcctatgatccacaatggacatcacacaagtgagaatgttggctccattgctccaggattgtctgtgacttacagctgtgaatctggttacttgcttgttggagaaaagatcattaactgtttgtcttcgggaaaatggagtgctgtcccccccacatgtgaagaggcacgctgtaaatctctaggacgatttcccaatgggaaggtaaaggagcctccaattctccgggttggtgtaactgcaaactttttctgtgatgaagggtatcgactgcaaggcccaccttctagtcggtgtgtaattgctggacagggagttgcttggaccaaaatgccagtatgtgaagaaattttttgcccatcacctccccctattctcaatggaagacatataggcaactcactagcaaatgtctcatatggaagcatagtcacttacacttgtgacccggacccagaggaaggagtgaacttcatccttattggagagagcactctccgttgtacagttgatagtcagaagactgggacctggagtggccctgccccacgctgtgaactttctacttctgcggttcagtgtccacatccccagatcctaagaggccgaatggtatctgggcagaaagatcgatatacctataacgacactgtgatatttgcttgcatgtttggcttcaccttgaagggcagcaagcaaatccgatgcaatgcccaaggcacatgggagccatctgcaccagtctgtgaaaaggaatgccaggcccctcctaacatcctcaatgggcaaaaggaagatagacacatggtccgctttgaccctggaacatctataaaatatagctgtaaccctggctatgtgctggtgggagaagaatccatacagtgtacctctgaggtgtggacaccccctgtaccccaatgcaaagtggcagcgtgtgaagctacaggaaggcaactcttgacaaaaccccagcaccaatttgttagaccagatgtcaactcttcttgtggtgaagggtacaagttaagtgggagtgtttatcaggagtgtcaaggcacaattccttggtttatggagattcgtctttgtaaagaaatcacctgcccaccaccccctgttatctacaatggggcacacaccgggagttccttagaagattttccatatggaaccacggtcacttacacatgtaaccctgggccagaaagaggagtggaattcagcctcattggagagagcaccatccgttgtacaagcaatgatcaagaaagaggcacctggagtggccctgctcccctgtgtaaactttccctccttgctgtccagtgctcacatgtccatattgcaaatggatacaagatatctggcaaggaagccccatatttctacaatgacactgtgacattcaagtgttatagtggatttactttgaagggcagtagtcagattcgttgcaaagctgataacacctgggatcctgaaataccagtttgtgaaaaagaaacatgccagcatgtgagacagagtcttcaagaacttccagctggttcacgtgtggagctagttaatacgtcctgccaagatgggtaccagttgactggacatgcttatcagatgtgtcaagatgctgaaaatggaatttggttcaaaaagattccactttgtaaagttattcactgtcaccctccaccagtgattgtcaatgggaagcacacaggcatgatggcagaaaactttctatatggaaatgaagtctcttatgaatgtgaccaaggattctatctcctgggagagaaaaaattgcagtgcagaagtgattctaaaggacatggatcttggagcgggccttccccacagtgcttacgatctcctcctgtgactcgctgccctaatccagaagtcaaacatgggtacaagctcaataaaacacattctgcatattcccacaatgacatagtgtatgttgactgcaatcctggcttcatcatgaatggtagtcgcgtgattaggtgtcatactgataacacatgggtgccaggtgtgccaacttgtatcaaaaaagccttcatagggtgtccacctccgcctaagacccctaacgggaaccatactggtggaaacatagctcgattttctcctggaatgtcaatcctgtacagctgtgaccaaggctacctgctggtgggagaggcactccttctttgcacacatgagggaacctggagccaacctgcccctcattgtaaagaggtaaactgtagctcaccagcagatatggatggaatccagaaagggctggaaccaaggaaaatgtatcagtatggagctgttgtaactctggagtgtgaagatgggtatatgctggaaggcagtccccagagccagtgccaatcggatcaccaatggaaccctcccctggcggtttgcagatcccgttcacttgctcctgtcctttgtggtattgctgcaggtttgatacttcttaccttcttgattgtcgttaccttatacgtgatatcaaaacacagagcacgcaattattatacagatacaagccagaaagaagcttttcatttagaagcacgagaagtatattctgttgatccatacaacccagccagctgatcagaagacaaactggtgtgtgcctcattgcttggaattcagcggaatattgattagaaagaaactgctctaatatcagcaagtctctttatatggcctcaagatcaatgaaatgatgtcataagcgatcacttcctatatgcacttattctcaagaagaacatctttatggtaaagatgggagcccagtttcactgccatatactcttcaaggactttctgaagcctcacttatgagatgcctgaagccaggccatggctataaacaattacatggctctaaaaagttttgccctttttaaggaaggcactaaaaagagctgtcctggtatctagacccatcttctttttgaaatcagcatactcaatgttactatctgcttttggttataatgtgtttttaattatctaaagtatgaagcattttctggggttatgatggccttacctttattaggaagtatggttttattttgatagtagcttcctcctctggttggtgttaatcatttcatttttacccttacttggtttgagtttctctacattactgtatatactttgcctttccataatcactcagtgattgcaatttgcacaagtttttttaaattatgggaatcaagatttaatcctagagatttggtgtacaattcaggctttggatgtttctttagcagttttgtgataagttctagttgcttgtaaaatttcacttaataatgtgtacattagtcattcaataaattgtaattgtaaagaaaacaaa

SEQ ID NO: 32735 - DNA, 3624 bp, Homo Sapiens
cagttgggaaagctgaggttgtcgccggggccgcgggtggaggtcggggatgaggcagcaggtaggacagtgacctcggtgacgcgaaggaccccggccacctctaggttctcctcgtccgcccgttgttcagcgagggaggctctgggcctgccgcagctgacggggaaactgaggcacggagcgggcctgtaggagctgtccaggccatctccaaccatgggagtgaggcacccgccctgctcccaccggctcctggccgtctgcgccctcgtgtccttggcaaccgctgcactcctggggcacatcctactccatgatttcctgctggttccccgagagctgagtggctcctccccagtcctggaggagactcacccagctcaccagcagggagccagcagaccagggccccgggatgcccaggcacaccccggccgtcccagagcagtgcccacacagtgcgacgtcccccccaacagccgcttcgattgcgcccctgacaaggccatcacccaggaacagtgcgaggcccgcggctgctgctacatccctgcaaagcaggggctgcagggagcccagatggggcagccctggtgcttcttcccacccagctaccccagctacaagctggagaacctgagctcctctgaaatgggctacacggccaccctgacccgtaccacccccaccttcttccccaaggacatcctgaccctgcggctggacgtgatgatggagactgagaaccgcctccacttcacgatcaaagatccagctaacaggcgctacgaggtgcccttggagaccccgcgtgtccacagccgggcaccgtccccactctacagcgtggagttctccgaggagcccttcggggtgatcgtgcaccggcagctggacggccgcgtgctgctgaacacgacggtggcgcccctgttctttgcggaccagttccttcagctgtccacctcgctgccctcgcagtatatcacaggcctcgccgagcacctcagtcccctgatgctcagcaccagctggaccaggatcaccctgtggaaccgggaccttgcgcccacgcccggtgcgaacctctacgggtctcaccctttctacctggcgctggaggacggcgggtcggcacacggggtgttcctgctaaacagcaatgccatggatgtggtcctgcagccgagccctgcccttagctggaggtcgacaggtgggatcctggatgtctacatcttcctgggcccagagcccaagagcgtggtgcagcagtacctggacgttgtgggatacccgttcatgccgccatactggggcctgggcttccacctgtgccgctggggctactcctccaccgctatcacccgccaggtggtggagaacatgaccagggcccacttccccctggacgtccaatggaacgacctggactacatggactcccggagggacttcacgttcaacaaggatggcttccgggacttcccggccatggtgcaggagctgcaccagggcggccggcgctacatgatgatcgtggatcctgccatcagcagctcgggccctgccgggagctacaggccctacgacgagggtctgcggaggggggttttcatcaccaacgagaccggccagccgctgattgggaaggtatggcccgggtccactgccttccccgacttcaccaaccccacagccctggcctggtgggaggacatggtggctgagttccatgaccaggtgcccttcgacggcatgtggattgacatgaacgagccttccaacttcatcagaggctctgaggacggctgccccaacaatgagctggagaacccaccctacgtgcctggggtggttggggggaccctccaggcggccaccatctgtgcctccagccaccagtttctctccacacactacaacctgcacaacctctacggcctgaccgaagccatcgcctcccacagggcgctggtgaaggctcgggggacacgcccatttgtgatctcccgctcgacctttgctggccacggccgatacgccggccactggacgggggacgtgtggagctcctgggagcagctcgcctcctccgtgccagaaatcctgcagtttaacctgctgggggtgcctctggtcggggccgacgtctgcggcttcctgggcaacacctcagaggagctgtgtgtgcgctggacccagctgggggccttctaccccttcatgcggaaccacaacagcctgctcagtctgccccaggagccgtacagcttcagcgagccggcccagcaggccatgaggaaggccctcaccctgcgctacgcactcctcccccacctctacacactgttccaccaggcccacgtcgcgggggagaccgtggcccggcccctcttcctggagttccccaaggactctagcacctggactgtggaccaccagctcctgtggggggaggccctgctcatcaccccagtgctccaggccgggaaggccgaagtgactggctacttccccttgggcacatggtacgacctgcagacggtgccaatagaggcccttggcagcctcccacccccacctgcagctccccgtgagccagccatccacagcgaggggcagtgggtgacgctgccggcccccctggacaccatcaacgtccacctccgggctgggtacatcatccccctgcagggccctggcctcacaaccacagagtcccgccagcagcccatggccctggctgtggccctgaccaagggtggagaggcccgaggggagctgttctgggacgatggagagagcctggaagtgctggagcgaggggcctacacacaggtcatcttcctggccaggaataacacgatcgtgaatgagctggtacgtgtgaccagtgagggagctggcctgcagctgcagaaggtgactgtcctgggcgtggccacggcgccccagcaggtcctctccaacggtgtccctgtctccaacttcacctacagccccgacaccaaggtcctggacatctgtgtctcgctgttgatgggagagcagtttctcgtcagctggtgttagccgggcggagtgtgttagtctctccagagggaggctggttccccagggaagcagagcctgtgtgcgggcagcagctgtgtgcgggcctgggggttgcatgtgtcacctggagctgggcactaaccattccaagccgccgcatcgcttgtttccacctcctgggccggggctctggcccccaacgtgtctaggagagctttctccctagatcgcactgtgggccggggcctggagggctgctctgtgttaataagattgtaaggtttgccctcctcacctgttgccggcatgcgggtagtattagccacccccctccatctgttcccagcaccggagaagggggtgctcaggtggaggtgtggggtatgcacctgagctcctgcttcgcgcctgctgctctgccccaacgcgaccgcttcccggctgcccagagggctggatgcctgccggtccccgagcaagcctgggaactcaggaaaattcacaggacttgggagattctaaatcttaagtgcaattattttaataaaaggggcatttggaatc

SEQ ID NO: 32736 - DNA, 1725 bp, Homo Sapiens
ggcacgctgaacgacacagctcagtttaaccgaatgacagttgagtatgtctatgaaaggatgacaggcctccgctggaaatgcaaagtgattctagagagtgaagtaattgcagaagcagttggggtgaagaaaactgtcaaatatgaagctgctggggaagctgtgaaaaccctcaaaaagacccagccaactgtcattaacaacttgaagaaaggagctgttgaagatgtgatttcaagaaatgaaattcagggccgctcagcagaggaggcttacaaacagcaaatcaaagaagataatattggaaatcagctgctgagaaagatgggttggactggtggtggtttaggtaaatctggtgagggcatacgggagcctatctcagtgaaagagcagcataagcgggaagggcttggtctggatgtagagagggtgaataaaattgccaagagagatattgaacagatcatcagaaactacgcccgctccgagagccacacagatttgactttctctagagagctgactaatgatgaacggaagcaaatacatcagattgcccagaagtatggtcttaagagtaagtctcatggggtgggccatgataggtacctagtggtaggtagaaaaagacggaaggaagacctactagatcagctcaaacaggaaggccaagtgggccattacgagcttgttatgcctcaagcaaattgagatcttactaatttattttgtaaatgcctaatgaggcagatttttgaattaaagaaatgctacatgttccggttgcagagtatattcataagatgtctcaccttgttcatttcacatagtggtttattagatattggaacctaaagaattctgtccacttgtattagcttaatccagcagatgatattgtgcagttactgtttgtgtctttgatattgctgtgtccctcagattttagtagtttgacaagcaagaacacatatccaaatggaattttaccctgagaaattatcattttaaagggcatagcacagcaatctgcaacaatatgtaaagttgatattgactacaataaaaatccagtcttaattccagatttactgaaaatgtcagatcattttgtattaatctattttcatctttgtgtgaagccagttatagaatgtttgacaataaattgtgctgtacacgtaaatgtccttaccaactaaatgatgtaaaactttcttaaagtaattttagtgttcatttatttataacttctaccatgtgatttccagactattggaagtgatttactgtatcttgtgatatatgggttttaacaaattctagtcttcacgctgagagagcactacttgagagagcagttgaaagtttcaaaaactttggttcaatctgaagaaaggaagcttgaactgtttgttcttggtgccttgcagagagactcacagcaactctccattatagctttcacacggtttggatgtgcagcacatccaaggcaaccacagctgtggtagagcttggtaaaagactgaagatacattggtgctttgatgaaaaggtcagttggctggtccctctctcaaaaagcttattaagcctgaaaagccaactttgtaacatatttaaaactgctattttcgcttatttctggaatgtaaaaaaaaaaaatgtataaaaacaattagtgtatgcttcctgaataaaaaggagccaaagttg

SEQ ID NO: 32737 - DNA, 2303 bp, Homo Sapiens
cgcttcccgccgcccgagcttcggaaacttcccggccgcgacgcagggaaccggcgcggagaaccgagcagagcggagcgcccgtggtccagcgtgtagggagccgatcgcccatggagggtctgggccgctcgtgcctgtggctgcgtcgggagctgtcgcccccgcggccgcggctcctgctcctggactgccgcagccgcgagctgtacgagtcggcgcgcatcggtggggcgctgagcgtggccctgccggcgctcctgctgcgccgcctgcggaggggcagcctgtcggtgcgcgcgctcctgcctgggccgccgctgcagccgcccccgcctgcccccgtgctcctgtacgaccagggcgggggccggcgccggcgcggggaggccgaggccgaggccgaggagtgggaggccgagtcggtgctgggcaccctgctgcagaagctgcgagaggaaggctacctggcctactacctccagggaggcttcagcagattccaggccgagtgccctcacctgtgtgagaccagccttgctggccgtgccggctccagcatggcgccggtgcccggtccagtgcccgtggtggggttgggcagcctgtgcctgggctccgactgctctgatgcggaatccgaggctgaccgcgactccatgagctgtggcctggattcggagggtgccacacccccaccagtggggctgcgggcatccttccctgtccagatcctgcccaacctctatctgggcagtgcccgggattccgccaatttggagagcctggccaaactgggcatccgctacatcctcaatgtcacccccaacctcccaaacttcttcgagaagaatggtgactttcactacaagcagatccccatctccgaccactggagccagaacctgtcgcggttctttccggaggccattgagttcattgatgaggccttgtcccagaactgcggggtgctcgtccactgcttggcgggggtcagccgttctgtcaccgtcactgtggcctacctcatgcagaagctccacctctctctcaacgatgcctatgacctggtcaagaggaagaagtctaacatctcccccaacttcaacttcatggggcagttgctggactttgagcgcagcttgcggctggaggagcgccactcgcaggagcagggcagtggggggcaggcatctgcggcctccaacccgccctccttcttcaccacccccaccagtgatggcgccttcgagctggcccccacctagggccccgtggccggcaggccggcccctgccccacccccacccacgggtgtccctgcccactcgtgtggcaagggaggggagggcaggagggctcggcctgagcagggtgctggggggagagcgcaatacctcacgcgggctgccgtcctaatcaacgtgcctatggcgggaccacgctcggagcctgcctcttctgcgactgttactttttctttgcgggatgggggtgggggttccctctccaggtggttgtccaagcccaggtcccggccctgggtgctcagccagctcggctaggccctgcgcctccctgcgcttcccccttcaggaagggtgtgtgccacctcgttgcactggatcccagtggctgcttgggggagaggcgtttgccatcactggtgttgtcacctccctgtttctccaccaagggcttgggcctctcggggctggggcctcccaggggatggggacccagaggtgcagtggccgcccacatccatggcctaggagctactgggcaggttcccggccacacatctggtgggctgttttgtttttttttttcctcttcccccagatgtcttgacgggatcactggggctctttgtgagtgagggtggccaaactaccgccggaggagatggggtctcagagcgagagctgcggagggggaggggaagaagaaggcctcacttttgctgctgcggggcccacacagccgctgctactttggggggtggggaaggggccaagctgcagacacacacagtcattcatttctgtccacacccctgtgggtggcgggtgtgcgtgtgtgtgcttgtgtgtgcgcacgtgtcggcgctcacacacacatgctagcccactgatgcacccagcccagggctggcagtctttgcagcgtggggccgtctcaccctggagcctggagaggatctatgcttgtttgtttttgtaatccatatcatagttgctttctttaattgttccttctgaataaacagtttatttaagataaaaaaaaaaaaaaaaaaa

SEQ ID NO: 32738 - DNA, 3198 bp, Homo Sapiens; identical to SEQ ID NO: 29414

SEQ ID NO: 32739 - DNA, 8239 bp, Homo Sapiens; identical to SEQ ID NO: 32044

SEQ ID NO: 32740 - DNA, 2074 bp, Homo Sapiens
cacaaggcggtagccatggcggaggcggcggctgcagcgggtgggactggcttgggcgcgggcgcgagctacgggtctgcagcggaccgggaccgggacccggacccggaccgcgccgggcggaggctgcgggttctctctggccatctgctgggccggccccgggaggctctgagtaccaatgagtgcaaagcgcggagagccgcgtcggcggccacggcagcgcccacggccactcccgccgcgcaggagtcgggcaccatcccaaagaagcggcaagaagttatgaaatggaatggatggggatataatgattctaaattcatcttcaataagaagggccaaattgaattgactgggaaaaggtaccctcttagtggcatgggtttaccaacatttaaagaatggatccaaaatacccttggagtaaatgtggagcataaaactacctctaaagcatccttaaatcctagtgatacacctccttctgttgtaaatgaagattttcttcatgaccttaaagaaactaatatttcatattcacaagaggcagatgatcgagtatttagagctcatggtcattgtcttcatgagatatttttgctcagggaaggaatgtttgagcgaattcctgatatagttttatggccaacatgccatgatgatgtagttaagattgtgaatctagcttgcaaatataatctttgtatcataccaattggtggaggaacaagtgtttcatatggcctgatgtgtcctgcagatgagacaagaacaattatttctttggacacttcacaaatgaatcgaattctctgggttgatgagaacaatttgacagctcatgtggaggctggcataacaggacaagagttggaaagacagcttaaagaaagtggttattgtacaggtcatgaaccagattccctggagttcagtactgtaggaggatgggtatctactcgcgcatcaggcatgaagaagaatatctatggcaatatcgaggacctggtggttcatataaaaatggtaacacctagaggtataatagaaaaaagctgtcaaggacctcgtatgtcaacaggccctgatatccatcacttcatcatgggatctgaaggaactcttggtgtaataacagaagctacaataaaaatcagaccagtccctgaataccaaaagtatggctcagtagctttccctaattttgaacaaggagtagcctgtttaagagaaattgcaaaacagagatgtgctccggcatctattcgcctcatggacaacaagcagtttcagtttggtcatgctcttaaacctcaggtttcctctatctttacatcatttttggacggattaaaaaagttttatattacaaagtttaaaggatttgacccaaatcagctaagtgtagccacattactgtttgagggggatcgtgagaaggttcttcaacatgaaaaacaagtgtatgatattgctgcaaaatttggtgggttggcagctggagaagataatggacagagaggttatttgctgacctatgttattgcatacattcgagacttggctttggaatactatgtattaggagaatcttttgagacttctgctccttgggacagggtggtagatctctgtagaaatgtaaaagaaagaataacaagggaatgcaaagagaagggtgttcagtttgctcctttttctacatgcagggtgacgcagacttacgatgcaggtgcttgtatctacttctattttgcctttaactacaggggaattagtgacccactgaccgtatttgaacaaactgaggcagctgctagagaagaaatccttgctaatggagggagcctgtcacatcaccatggagtgggcaagttacggaagcaatggctaaaggaaagtatctctgatgtcggctttgggatgctgaagtctgtcaaggaatatgtggaccccaataacatctttggaaacagaaaccttttataaatccattagtaccattacaaaaaaatgtcaattttttttttaagttttcaactgtggttatactagtaatcaaatatatcat

SEQ ID NO: 32741 - DNA, 1995 bp, Homo Sapiens
gagaggcggaagtaaaagcgaactacagtggatgggtgcagttcaggagatagctgttctccagcctttctggagggatgcagagcctttccttaggacaaacaagcatttcaaaaggtttgaactacctaaccattatggcaccaggaaacctctggcatatgagaaataactttctctttggttcaagatgttggatgactcgattttcagcagaaaacatcttcaaatcagtttcatttaggctttttggtgtgaagtgtcataatacagacagtgagcctttgaaaaatgaggacctactgaaaaacttacttactatgggagtagatattgacatggcaaggaaacgacagcctggagtttttcataggatgattaccaatgagcaggacctgaagatgttccttctttccaaaggagctagcaaagaagtgatcgctagcatcatatcaagatatccacgagcaataacacgtactcccgagaatctttcaaaacggtgggatctgtggagaaagattgtgacatcagaccttgaaattgtaaatattttggaacgttctcctgaatccttttttcggtccaataacaacctaaacttagagaataatataaagttcctctactcagttggattgacccgtaaatgcctttgtcgattgttgaccaatgcccctcgtaccttctccaatagtcttgatctgaataaacagatggttgaatttttgcaggcagccggtttgtcattgggtcacaatgatcccgcagattttgtcagaaagataatttttaaaaacccttttatcttaattcagagcaccaagcgggtgaaagctaacattgaattcttacggtcaactttcaatttgaacagtgaggaactgctggttctgatatgtggtccaggagctgaaatcctagacctttccaatgactatgccagaagaagctacgcaaacatcaaagagaagctgttttctcttggatgtactgaagaagaggtacagaagtttgtcttaagctatccagatgtgatcttcttggcagagaaaaagtttaatgataaaatagactgcctcatggaagaaaacattagcatttcacaaataatcgaaaatcctcgggttctggattcaagcataagtactttaaaaagtcgaatcaaagaattggtaaatgctggctgtaacttgagtactttaaacatcactcttctatcttggagtaaaaaaagatatgaagctaaattgaaaaagttaagcagatttgcctaaggatgccaatgtttttaattctcaggaactgtgaatatgttatgccacattccaaaagaattttgcagaagtgattaatttaaaatgttattaagggccttgagatggggagattatcctgaattactttggagggcctaatataattgtagggatctttaaaagttgaagagggagccaaaagaggaggtcagagtgatcctgtataagaaagacaactacttttgaaggaagttaaaaggtggctttgaaggaggaagacaccttgagccaaggaatgaagggggcctgtaaaaaaagattgaaaaggcaaggaaacagattctccattagagtccccagaaaggaatgcagccttgctggcacctttttagcccagtgagatcaatgtccaacttctgacccacagaaccataagatggtaaatttgtgttgttttaaaccactgagtcagtgataatttgctgaagaagcaaatagattaacatagcaactaagtagatgattagttgcattataggtgaagtccaaaatacagtcctttagtaaagtctctatttcttccttttataagagtaattatatttaaaaaatctacctacccttctggaattgctaatgttagtgtttataaagtcttaaatgtgtgcataaaaaactaaatgtgaatataaaatctaaataaaggaatatgtttgcctaatatagtttaaaaaaa

SEQ ID NO: 32742 - DNA, 36159 bp, Homo Sapiens
ggatctttgtttcaatttttggttcatagttcaccttaggtcaagcattgattttgggcgcattagccaatcaccaaaagttgggctcccttttttagtaaaatttattctgccagcttgctagaataactactatttctaacctccagtcaaggaagttctctatagttgcacttttaacaaatttaaacccagcttaaactgataaacttttcctaattacctcaacccctcagagctcatcactttcttctttatgctttctctctttaacttttggacatgttaatattcttgcaattatcatgctatattatatttatttgcttcctatctaagcttttgagcttcatgaggaaaaggagagaggcttatttagcttcatatcctcagcacagcaactggcacataagaaagaagaaacaagttgggggccaggaggaggaagagaggaaggaaaaggaaacagattggaaaggaaaggatgtgattggctgctttgtatctgatgtcataatccactgagatagaaggcaattttaacagccaattcgtggttcttacggtgtcataattctactacctagccaggagtgatttgttctagaaaggataatgtgtcaagtacgtagatggaatagggtttttgtttgtttttgagacggggtttcactctcgtcacccaggctggggtgcaatggcatcatcttggctcacctcaacctccatctctcgagttcaagcaattcttctgcctcagcctcccgagtagctgagattacaggcatgcaccactacgcccggctaattttatatttttagtagaaacgggctttctccatgttggtcaggctgctttcaaactcatgacctcaggtgatacgcccacctcgtcctcccaaagtgctgggattacaggcgtgagccaccatgcccggccttggaatagattttaattttgtctaccctggatttttacctacatcagtcagcttgaaagatttttaattgggtattttaagaagccaacaaaagatgagctgaatccactgcctgaagtgagagctgaagtgagagctatgtatatttagttcacactacaccaaacataaatatatgcaataaattacaggggattatattacgcagtaggattttcatcttaatttcaagtcttcttcactaaggacagttgctaacccttagccaggggctgataagaacaacctgtgtttggcttggatgctcttttaagcactcctcatcctttcctggctgagccacggtattcttctccttctgctgtctgtgtttggatcttgtgtctttggatcagggcctgtattactatttgaagaaaatcttttagtctttgctgacccacttgcataaagttgcctttaaatgcaatgtttatccaaggtattgcttaggccctttgtgctcagaggcactttgttcttgtaggtagcaaaacacttctttgtccacttaagtgttttctaacctgagtgttctgtattctcctttcaggagttctgttttgtccttttctctgccacattaagggaaaggaaaatattttctaaaaaacacccattggagaacaaatgaatttattgggaactgagtgggaggcaggttcccccactgacagaaggaagaatgctgtttgctgtgtcataccaaggagcactacccacacagagcagcagttcagaatttttttgtacaattatttcatgtgcactattgattaaactataaaaacaagaggaaattttaaatatatcacaagtgtatcaccttagcccctaaataaactatagaacatttgcaacaaatacagattagaaggagaaaaaacccaaggtagatgtagtgtgattttggagagctgcaaaatatttttcctatcgcaacccaggtttccatcataggtttttcagaaaagaaggcgtcctcaccctccatcttttcagctctgctagctaaatgcaatggcaaggtcatggttctgtgaaaatcccccgaggaggagtaagctcaggacatatcaagctattgcagagacacagtggatatggtctaccttgcaagatgtccttaagcacatcaggagagggatatgggatagcacgagatagtccctaggatgagtgatgttgaaatagatccttttcagcacttttaataaacatttactggatttctagtgtgacacaaccatctgccttaagcatggacagaattaagctcagtctctgttccctagaatctcataatctattcaagaaagagaaaagcaaccatacttcaatgttgtcagttagagtagataaacgttctgcggaaacaatgactcctcctttgcctcctttcccatcttctgaaaaaggatcagggaaagtcatagaaaggtaatgtttagagcctgttttggaaggatggagagacgttcaccaggaagagaagagcaacttgaaacaggaagaatcatagcaaagaggcatgaaattgaatggaggggcagaaaatgacaaatagtagtccaatgtgactacagagtagtcagggaatcagagataagactgcaaagatagtcctggtttcaactatgatgggtcttatgtatcaggctaaaggaattgatctttatttcataggcagtggggaggcagcaaagggctgtaaatagaaaaactgtatgattgggtctcttttatatcacattggaggtcacagaggttaagtatggaaggggcagaactggacccttgaaagagcacttagaagacacagagatgagggttagtctagtggccttctctggggtatggtatggtgagcattagataccgatgtcagagatacttagatgctagtaatattttttacccaatagaaaaaattaatttaatattcatcagagctattaagtatgtattatatacttggttcttaatgtgttcaggacttagagcaacatggaaaataataacacattacctctgctttgtaaggaactcagtctaatcagaagcaaactgtatatgcatgaaaagtaaagtaacaagatactgcactaagtatcaaatgggtgttacagcaaattagtgcaataatagttaaaaggaaagaggaataaggactggctgtgattgtcaggaggaggtaggactgaggttggttctgaaaaatgggaagaatctggagaggcatgaattcacagataactaaaacagatggacaaataaataaatttcagtatagtgtgatgtgacaatagcagcatgcttggggatcacagagaggtccacacaaatcagaaatgtatgattgggagaaggtttaagaaaggcttttcagaaaagatatcccttgatctgagttttagtggacaagtagagacagctagattaaaaggagaaagagccacatatgcaaaggaacagagccattaagaacttgagttcgggcaagcagatgggggctgcaaatattgcacagggataaagggatagattactttgtctctgattccctgactcctctgtagtcacgttggatgtgtgtgtgggacaggcaggaaacaaggctagaaaggggcagaaggaccaaaagtttctaaccttttggtgaaggaccaaaatttggtgaaggaccaaatataaggagcttaaattttatcatgaaaggtattggagtatggtaagcttgagggtgaggagtgacatgatcagatttgtattttagaaagatcattccagaaatagtatagaactactttgaggtgtctgactagatggtgatatcattcactaagggaacacaggaggaccagattgggaagaaaggttttgagttcaaatttttcatgtgttgaacttgaagtgtgtatttgtaacacacaaacttggtggctttaaacaacagaaatttgttgtcttacagttccagaggttagaagtaagaaatcagagccttctggaggctctaagcgtatatctgctccatccctctttcttagcttctggtagcggttggcaattattggtattccttgcctagtagagtgatcactccaatctctgcttctatgttcatatcatcttagtgtatgttgccattctgtcctcttataaggataagggctcatcctaaattcagagtgatctcaagatccttaaaaacatctgtcttagttcatttgggctgctataacagaatatggactaggtggcttataaacaacagagctttatttctcacagttttggaggttgggacatccaagatcaacatgcttagagatttagtgtctggtgaaggcctgtttcctgattcatagatgtcactgtgtcctcacatggtggaagaaacaaaccaattctcttggatctattttataaaggcactaatcctattcatgagaactaatcatgaatagtgatagctaatcacccatcatttccttctatgatgtgaatgtgtccccaaaaattcatgttcggaaatttaatctccaatgcaacagcattgggtggtgttgccttttgagagctgttcaggtcataggggcttggcattcctcccctcaggatgacaaggtgttcaaggtaacatcctggaaacagagaccagaccctcatcagacaactgaacctgcttggacttctcagcctccagaactgtgggaaaataattttttgtgctttataaattcttcactctcagatggtctgttatagaagcacaaagtggactaagtcagcttctaaaggccctacctcctaatatcatcacactgggggctaagatttccacatgtgaaatattcaggggagacacaaacattcattctatagcaatctgcaaagactctgtttcaaagtaacaccacgttcacagatactggaggttaggacttggatatgcctttttgcagggcactattcaaaccactgcaaagtgaacaaaggtgtaagtgtcttcataatctgactcatactccagccctggggacctgtgttttgtgcttccaaatgctaatatcatgcaacagtcaaaagaaagagcaaaattaaaggctgtgatgtatggtagaaagagcaaagactagtcagatggacctagattcaatactggctctttaggagttgaaaagatggtcagccatttaacctctacaagccttgatttcttcatttgtaaaagaggcattgccaggcacagagttgactttaaatgtcattatttcaggggaaaaaaggctgacaatagtacatttgaaaataacccacattaaaatgtggtcatgtgagtgaattggatctctttaaaagagaatagaaattggcattaagaatagtgggatgtcctgtcagagatggacatcagcgatgaggaaagaatccaagagaaggtgatattcaaatagccaaaggagcatttggtttcaggaaaattggctaccaggtatctcaccacctaagtgggagggaggttggcaaaatcaagtcagggcttagaaattgggatactgggcagatttctaagatatctattaagtttaattactgtgctagacattggagattaaacgatgagtaagacacctaccttccagatagaacacaccatcttttgaatgaaatcagcaggtagacaagataaaaatacaatgcaatctgaagtgctagaaaaggctaggcacacagttaaggaacagatctgtgggagcctctgaagcctttagagaaaatatgacgtttgaatagaatagttcttgaaggatgaataagagtgcgcgtgccagggaagaagaactttcccagcagagagaaaaacgcaaagcttaggaattaaggactagaagataggaactcagaatcagttaaaagcccagttgtgcaaattgatcaatgagaccacaggcagaatattaacacagagccttactgctgactcctgcatcattgggctttaacttagaattttcctgcctaaaatgcatgtttgtcccacagactcagagaggagtgagtctagagatatgagtcaagtggttccagcatttaggaaaaaagaaatgcagagagactgatgaccagctaggtactgactcccactgaattagacagtactagggcccaaaggtgcttattagaagtgattcagctacatgaggaacagttgctattgacttcactgcattttttttcagctaaaataattattggattatatctacaacagggaacaatgaatgtctactcaagtaactcgtacatttgagtggcttcccggtgttcagtaaatgtccgttcaattaggttcccgaggatatacatggtaacactatctccaacactaaatgaaaaatccatccccagtatcgcaggataaaaacatcagacttcataggcctccgaagtcaagcagcccgaaggattcaacgtcctccttgaggactctcagtcttcaagactccagccacctaagtgaccactcgttcacttctgcccacgcagtcaccacgccggtccgcgtccacttgtggtctcgatatcggcccctcccaccctagccaaggagaccttggtccgagaaacaaagagagcctcacagctccggatggcaccgatctttcagcgatggggaacaaaggggaaggggagaagcgtcctcgatttttgagggtgccctttctgaggaatctgcaggcggcccggggtggagcggaatccccataggccccttctggcccctgtgcaatacaacgcgccccaggccaaggtcctaggtgcaggggccgccgcagagcctgagcccgcagggctgggatgcgggtcgtcagggatgcgggctggggaggggagggtgtgagcagcgggtgcccccagtccccgccagggcgcaagcgcaggcgcgcagggtgcggtcgcggaggggcgggcacagtcgggcggggagctcggcggcggcgggcgcgggaagatggcggcagcggcggcggcggctgcagaacaggtctgtgagtaccgccgcggccgcgggctggaggagcgggggaggccgcgtcctgccggctgggcccgcgggagccctggccgggggtgcggggggcgcgggccgcagggtctgggttcggcggggccgatcggggcggggcggggcgggaggagctgtgccccgccgaggatgctggcacaagctagggaccaggagccaggggcggcctcgggctcggcccggcctggctgatcctcggagggggtgaggaggggtctccttccggagagcctgggaggcggtcgagccagcctggaagcctgcgctgggacgtgccagggacgtaccccgttcagccgccagcagagatttggataaaaataaccgcagccccagcgagaaggctcctcttacaagaaacgggtcagctgttgccccggtgtcagcttgccatctttgttttttgtttctgccatctccaatatgcagacatcccagatttcccctcacgctttggtttttgaagatttagtcaccagtctaaaactatctcctgttcacttttaaaaatgatttatccaagatttcctgacctgcattgtaaacttgtaacttagaatggtttaaaaggctcctcatccccccaaaatctagttatacgtatgcatacatgtacatgcatatgtgtgtgtgttaatatatacatacacgtaatcgctagggtgatttattgtaatacagataattttcagtaactttcccccttacctaacttacttttcctttgaacaattatagtagtttctctttaaaaagtctcattctaaaacattgttgaaaaaaatgagtcaagttttgacctttggaacgattttcttagataattaactttttagagacctattagatatatgtcactggagggctcattctgaagataaaagacgtaaaatctctcttcaaggagcttaaagtcatacagccaaatacatgcagaaaaaatcagctaaagacaataggcaggctgcagatttgtaacagtaaaataaaacatagaggaatgagtgaaactgaaaggagacaaaacttcttggagttggtatttaaattgtgccttggctttcctcatttcccgcctaagttatcagcttctgtttcagatgattgtttttccatctggttctatttttgctttacacataagtggggcagtctgatccgttactcagtctccacttcaaatttacgcattacgtctccagccctgaacttaactgaattttccataggcacctcaaactcaaaaatgttcaaaactggactctgtcatacttactattaaaaaggctacaaccatccattcacttgtttaacctagccagaaacttaggaccaaggccattttaagggagctgagaaggacctgcacttggtttaatgttctgctgtcctgggcttgagatttaaacagtgagccccacattttcttttccccctgggccccacaaattatatagccagtcctatttgggagtcatcttcgacccctttgtgccacactcatatccaaacaatcacgagatcctgacagttctacctcttaacacctttccccagacttcagcttcaaagtcaaacctcagtcagtacctcattgggactcttagagaaacctgctgttgatatcttcacttctaggctcttcagttccagttcatctctttttggagtgattttactacaatgcaaatctgattgtataggaaacctattttaactcttcagtagttcccctttgccttcaggataaagtccattgttcttgtcatggtatttatgttgcttactggcccctaagcacatctctcattgtatttcttgcttcatccctacacctatccttctcaccatccacataaagtgaccaaaattagttctcccagagatggttgcctctcaaagtctccatgcttcttcctctgcctagagtgaccttcttagctcttttgcctggttaactcctgtccatccttcaagagttaactcaaccttcagcttttcttagaaactttccctgatgcccttgcctgctaggtggagatgcattcctcttctgtaccctttctgtattgtatgcattgctccactacagcacttgtcatgctttgtgaactgttagtcaccttgtctgtctacctgactggcctgtaattaagctccttgagggtggacactatgttcatcctggtagcttggagaacctggcttatagtaactattcaataaatgttaaatgcatcaagatgaagacagtaatgtgcatggtttggcagagaagagtaaaagctacgtctcaggagggatgaattttgtcctttctctcttttatgtggacctatattcaaactttggctaacacttttaagttgcccatctgttagggctgtcagaagcctgaggttcttttttggaacctgactacaaattctgttaagtcttctcttaaagtatctacttaatctctcctttttcatcccactttagtttaggtcctcttaacctcaatcctccattactacaacatccccagcagcttacttactggtactcctctttcttctctctcgtacaaatgcccacacctttaacactctgaatttgtgctcaaaaacctccagtgactcccaattaaatagaacataaagactagaatttgtaccctgctgtccaagaaccttcacaacctggccctacttttccaacttcctcttccctgccttgccatatctgacccatctacttctccccatttccctaacaactccaggtcatcctgtctctcctccctttgaactctgcagtgtgtattgcctagactattgattttggcacctgaacatacagagtgctttattgcattgttaaatattttatgttaacatgtacacaaatcatatctgttaatacatagaggataaggaccctttcctatagttcttttgtattcctatctatggaattagtgtttaagcgtaaagtgcttaatacatgcgtattcaacaactgaattttctcagagctttaagaaataagtaggacagtatccatttctgcccatttcttttgtgctcttgatattcaagattattacccaaaatgtcattcaaccatagtctaggtcagaggttctcaaatcattttggtctcaggttctctttacactcttaaaaaatggaggattccaaagagctttggtttatgtgggttatattcattgatatttactataggagaagttaaaatggagaaatttttaaagtacagggctatacaagcatacattctgttgagtgatgatgccatcacattggtcatgtagcctttacattcatgggcctaggagagtaaaaacagcaaacagtatctcagtgttatttcaaaaatacagccccccaaagggtttgtggaaccctcccaggactccccaccctgcatttgaaaactactgatctagggtaatgtgagctctagtcagtgaaattataagtaacaaactatgtcagcctttccggtcttattttcatataaatgaaaatatataccgttgtccctcaatatctatgggggattggtctcaggacccccaaaggatagccaaatccattgatgctcaagtcccttatataaagtggtgcagtttttgcatgtaacctctgcacatcctcctgtatactttaaatccatctgcagattacttacaacactgaacacaatgtaaacactatgtaaacagttgttatactgtattgtttagggaataatgacaaggaaaaagtcgtacatgttctgtacaaatgcaaccattcacttttttttttttttttttttttttttttgagacggagtctcgctctgtcacccaggctggagtgcagtggcgcgatcttggctcactgcaacctccgcccctccaggtttaagcaattctctgcctcagcctccggagtagctgggattacaggtgcgtgccaccatgcccagctaattttcttgtgtttttagtagagacagggtttcaccatcttggccaggctggtcttgaactcctgacctcgtgatccacccgcctcagcctcccaaagtgctgggattacaggcttgagccaccgcgcctggcctcaaatatttttgatccacagtggttaaatccatggatatggatcccatggatatggagggccagttgtatacgtaaaaaaattaataaattattaataaaagcagttactcactataggatacgtatgacaactctgctcagaaacaagctgtatactttgacagtgggactgttgaaagcagagaggaaaaatatcagatagtgaccttgaagtttcttctgtactttccttctaagcacagttatgcccttatttggaactgcaactcaatgtgatttgcagtttattcatggaaaatgtgtcagtaaccaattcagcttgctatagctatgaatttgcacctaatagataaatgcaccaaaacgagagggtatagctgttccattatgttgtatttcatttttagcaaagttccaatggtcctgtaaagaagtccatgcgtgagaaggctgttgagagaaggagtgtcaataaagagcacaacagtaactttaaagctggatacattccgattgatgaagatcgtctccacaaaacagggttgagaggaagaaagggcaatttagccatctgtgtgattatcctcttgtttatcctggctgtcatcaatttaatagtgagtatttgtaagaatactcattttaattgccatggggaattttttatctgctttatagtgaaatcatagactttattttctccttttctatacatgtcttgtctcttactgaattttaatgaatactttattaaaaaaactagtgtgctaatattttcatatattaatttcatttacaaaaaaatgtgcatgggtttatccctttaatggacttaatttttagcaaggatagaattatgaggctcccacctagctcaatcggtagagcatgagacttttaataaggataggatcaactcaatagaagagaactttgccaagatgattttattgctttcacatctccttaaaaatataatcctttctgttttcatttaacttttcctacatttaatgttgcctcctcagctggattttaaaattttaaaccctttgatggcagtaaaaggttatattttatagtcctaagtccccgttgtcaaaggatgcaagaatctggtaggctgattcacactaaagtactgaggacctgataggatgccttttccaaagatatttgcttttttaatgaagaaatccttttaatctgaagttgtgactgtctggggttaaatctgaaactctggcatgtgcatgtacagatattttcagaaggaatgattattgatatacttaagactgatcatgaacatagtctgcagcagttttgaagtgattctttttgtgttattttctacttctaatgcatgcaaggcagtctttttgtatttatgtatgtccaaagcacttctgtctaattcttcactcaaatcagaaagacctcttcctatatatttcatattagatatataaatttttactaggagcacaaatctgaatgcattttattttataaatgtattttatcggagacttctggtcaagatggcagcataaagacatttttatcttcttctctaaaaagctcgttccaaagtaacaatgtcacgaaacagaaatatctttgaagaaagtcggaagcaactgaaatcctaaatcataataaatgaagacacaaagtaggaggaacaatggcagataacttatcagagaggagaatctgcttgttggggaggggatgttggtggaagtaccttgtagaaccctaaaaagccttgggaattagaagttccagtaccttgaaaagcagaagtgaggcaagaactgaaaacagagaagtcatttgaaaatctgtataagaagcagtgagatccctaggcctcctctcccttccagccagcagttagacagctacccctcctaatgtcatacaaaactagtgtgtctctggacacactggaccagagaggattctatctgcctgcggatactggagggtaggggttgggtttccatactgaaacaggaaagtctgggtcctgagactccctttcccacgctctcttttcctcattctccacctccagctccctggcagccaggcaagagacagaagagccttctctgggattcctgatgcatatagaaaaaagatctgaagatactgtcatttggcaagtcccggtgaaaaagccatgtaatttccctcttgtgacacctgtcagtcacaagccctacccctcaaataattttctatgaattcatcactaagtatgaatactgagccagggatcaatagacttttgaggaaagtgccaagaattgaaaaatgatagagatgaaaactcctaaaccatggaaaaaatagaaactcatggaatagagaaaatgccacaaaaactaccaaaaaaacaaaagccctaaattcagtattttcagagaaataagaatatactgcatcaatgaaacaagaataacatgccatttaaaaggcacaagccaggcacagtggctcatgcctgataaagtgagaccctgtctctacccaaaaaaaaaaaaaattaaaaggaacaattaagaactcatagatatgcgcgtgcacacacacacacacacacacacacatacacacacagagatgaatgggtgggtgggtagatggatataggtaggtaggtaggtaggtaggtagatagacagaagacattagaagataaaaaaactcttccagaaatttcaacaaaattaatcaactcaggagctctaacatgctgttaataggagtttcagaaagagcacagaaaacactgggggggaaatgatcaaatacataagtcaagaaaatttcctagaacagattgaaaactaccatactgggtccagcgtaatgcataaaaagacacaacaaggccattattatgaaatttaagaaaaccagtaataaaagatcctaatatcttccagagggggcaaaaaagcaggttatgtataaagaatacaaaatcagaatggaataggacctcccaaaagcagcattgggacctggaaggcaataaagcaatggctttcaaaattcagaaagaaaataattttccatctagaattgtatacttagccagtccagcaatcaaatatgaagcattataaagacgtatttttgccatgcacactttccaaaaaattttacttctcatacattgcttagaagccactggaggatgtgctctaccaaaagaaagatgaggatacaggaaactgggtgtctatcagaagagaaagacaaaaggaagttcagcatgaacgtaagggaaagtttatgattacagctgtgcagggggcccatacagaccagtccagcccacgcagaccaaaccagaaagatacaggttccagaaagatttcccgagagagaaaaatagaactaatatattatctgagaggctcagacctacagaaaattgtattgagagattttacagaaatagtggaggatttgagattaattagatttttaaagaaactaaggaaaatgaagtattaaactctgagagacaaggtacaggaaagaaactgccattataggacatatttggtttggtaatgaacaatatttatatggttgtaatactgaaaataatgaccttggatttaattaaaacttgagattggagctggaaaagaaaagagatataaatgagctaaatttatcatctgctaaaatagaaaattaatactaaaacctaaattatgataaatgaagaaataacatatttagaagaaatatttgttagatattttagaaatatatgtttagaagaaatacatatatttagaaataaggagataaattctagatgaaatagctaaatttgttgaaagtgattgttcctgggaatgagatgtggagagggtagaaaaaataagaaactattcattttaaattatagacctttagcacattttgacttttagctatttgcatgtaataccttaataaaaataaaattcgttttgtttataagtggaaaattaattgatatatttacctcactgataaaacattttaggaggtctttaacattttggtgataatattttctatttgttttccaattacattaaatgtatgcggcctaccaacagcggacttgtgttctttttcagataacacttgttatttgggccgtgattcgcattggaccaaatggctgtgatagtatggagtttcatgaaagtggcctgcttcgatttaagcaagtatctgacatgggagtgatccaccctctttataaaagcacagtaggaggaaggcgaaatgaaaatttggtcatcactggcaacaaccagcctgtaagttgccacattaactgaaagaaatgcaaacaggagaggggcattagagaaaaatactttgcaaaaacctagttgattattggaaagagatattttcccttagaaaaattagtatatttataatatatctataaatgtatgaatatagtgaatacagtttaaaacatccataaatattaatatttaataatactattgcttttatcatctgttaaaattagatgatttcttaatatttgagattttgttcaatggtagcattttctatgacagatgtaatttgtatgagaatacataggttactcttttctcctccatatgaggaagccattaagaaagcactttcccaggtgagaatactctgtagttttgggggctcttgaagagaatatgccaatctagtcagtggcatcccatgccaagagttgaaaacatagttttcaactgaataaaacctcaaggaggtattcttaccaccacccctgcctatcttaggccttgggccatgttcctccatgactcatgcatttttgcagagctaatgagcaaataaatgtataaaccttcattctaaagaactcttcttccaagtggatggagggagaacagacagagttaaacgtatttgaagttagtctgttattggggtttttaaatttctgtaatttttgtaatttttaaaatatattgttcaggaattttgtttgcagtcttctttgaaaatatattcacaataaactgttttttttgaagattgtttttcagcaagggacaacaaagctcagtgtagaaaacaacaaaacttctattacaagtgacatcggcatgcagttttttgacccgaggactcaaaatatcttattcagcacagactatgaaactcatgagtttcatttgccaagtggagtgaaaagtttgaatgttcaaaaggcatctactgaaagggtatgatttattggctttgttttactaatgggagagaattattctctagagttataaagtgggaagagagttatactgttgttgttttttttttgagacggagtttcgctctgtcgcccaggctggagtgcagtggcgcgatctcgactcactgcaactccgcctcccagattcacgccattctcctgcctcagcctcccgtgtagctgggactacaggcgcgcgccaccatgcccggctaagttttgtatttttagtagagacggggtttcaccgtgttagtcaggatggtctcgatctcctgacctcgtgatccgcccgtctcggcctcccaaagtgctgggattacaggcgtgagccaccgctcccggctgagagttatactgttttaaagtagtataaaagaatatattccagaacaccggaaaggattaattctagatttgtaattaactagcttgtgtgatcattatcaagtcatctttatctcaatttccacatctctaaaacattaatagaaacatttgactttcatctctcatgactgaagcttctatttctctatctctgataacaattctcacattaatttagaaactctttttagtacttgttttttaaattttcagattaccagcaatgctaccagtgatttaaatataaaagttgatgggcgtgctattgtgcgtggaaatgaaggtgtattcattatgggcaaaaccattgaatttcacatgggtggtaatatggagttaaaggcggtgagtattcttttaagagcttaagagaattattaggttcttgggtacataaatccatatgtggaatagtatacaattattgaaaatgatataattgtctattttttgacatggaaagatgttcaaagtgggttgtgaagtaaaagaaagttacaaaacaatttgtgaaattcattatttttatttttcagaacatatgtatgtttataaaaacctagcagggtgtgccagaatgtcaacaatgtttagctgtggatagcaagataacagattatttgttttatttttatttctactagcctgtattttctgtttctttctctcttttttttttggataatgatcacttgtattgttttagaaggcaaaaaaaaaaaccttctaaaagagaattctggaagatcaaagtaaatattcatgccttggagttgttgtttttaattaaagatttttcacatccctccctgagtttcatatccaatgatgtgaaaaaaaacaattagcaaatttataaaattattttatttagatatttttattaaaaatgtatttttaatctattattaattgtaaaggaaagaggtttttgtctttatcgtggctgttgaaagtgaattttctttgtgcttaacagattaaatctgaactttaacaggtatggtatttcatgtgccataagtccaaaaactttttaatgtctcacaattctggtcaaagtatacttattcaaaatgcctttgggtacctgcaatatgctatttaattaaagcgaattaaatttgtcttaccaagtattacatgacaaaagtgaacttaaacgtagggacttatcattctttcttattaaaaaaaatttcaatttcatagttcctgggaaaaatactttttaaaagtagttgttttacttttataagcagtttttcccccagaacacataatcccatctctaaataataaagatggacataaaatgtaattcttgccagaaactcagttgcctacagagttaatttgtatgtatattgtggtgtaagaagccattcttctaagaacactgttgaagaatagccacagtacaactgctgttctcagcagtagaaagtcacagaagcaagagatttgtttagagaccattagcaacttaccaaaccttttatttttttctacctgccacttcttgtcccattctaccttgtagttaatatgacaaatatttaaatactttgaaatatacatatacacatatcagtttctctactgttaaaggaaaataacctagtattaaaaagataattagctttataacttcgttaatatcagtggttagttctaaagtgtataagccaatcattagaaataattttatcaattaaactgcttttttgaaaaagctgtttaagaagcaatttaggccgggcgcgatgacttacgcctgtaatctcagcactttaggaagctaaggcgggtggatcacaaggtcaggaattcgagaccagcctggccaacatggcgaaaccccgtctctactaaaaatacaaaaattacctgggcgtggtggcgggcgcctgtaatcccagctacccgggaggctgaggcaggagaatcgcttgaaaccaggaggcagagattgcagtgaacccagatcgcgccactgcactccagcctgggagacagagcaaaactccgtctcaaaaaaaaaaaaaaaaaaaaaaaaaaccaacaacaaaaaacaatttaaagaaagtaaaattaaatgaccacaagatggcagcattggaacaaattggaaaactagtcacttaagaattactgtctattccatatactaccactgcataatcagttaaccatctccattatttataaccaattttctctctttgctttaaataccctctgtaagccgatgcctcccaaatttggaattgtgctttaacctctcctctgaactaagagtcacatatctagctgcctgcttaacattatccattttgatatctgataggcatctcacatttaacaattgaaaagttagattctccatccccacaagcatgcatttctttcagtattcttgtaccattaaatgacacccatcagtccatagcaaagccttctggctctaccttcagaagatacagagtcttgctgtttctcaccacctcggccatcaccaccctgatgtaaactgccatcattccctgcctggatggttggaacagcctcctggctgatcttcttacttccaagtattcactcccatagtctgttttctacccaacagccagagtggccattttaaaaagatcaagtcatttctgtattcagaatcctccaaatgcttcccgtataatttggaataaaatctaaagtctattccctgcctacatgtctgatcctcagttatttctttgactcatctcctactggttgttcccttcaccctccgtgcttcttccacactggcctcatagctgtccctggaatccaggcacatcttcacctcggggcctttgcagacactgttacctctgctttgagtacccttccccagttacctagacagcttcctccctcacttcctctagtttctgttggaatgtgaccttatcaaaccacaggtggtccttcctgagcaccctgtgtaaaactcagtccccatctgctcactctctacttatcctgctttatttctcctcatagcatttatcccacctgatgtcttatgtgttttactgttcattttttttattgtctccccctaccccattaaaacatcaactcaataagaacttgggctttgcctgttttacttactgctgtattccccagcacctagaatagtgtctggcatacagcaggcactcagtaattatttgttgagtgaatgaaaagaagaaaggaggaaagggagaaagcaagagagtcctaagagtcactaaaaagaaggattttaaggaactacaataagagaatgtttctggaacagtgggcgtgaagaacctccagactagagtgcctggtcttcaaattatatggtttgaatcttcatttgcagtgttgcaaaaacattggaaattaaaattaattccctctaggaggaaaagtctttttttttttttttttttttttttgagacagtgtctcgctcagtcacccaggctggagtgcagcggtgtgatctctgctcactgcaagtccgcctcccgggttcacgccattctccttcctcagcctcccaagtagctgggactacaggtgcccaccaccacgtcccgctaagtttttgtatttttagtagagacgaggtttcaccgtgttagccaggatggtctcgatctcctgaacttgtgatccgcccacctcggcctcccaaagtgctgggattacaggcatgagccaccgcgcttggccaggaaaagtctttttgtactcatgatcacaaacttaccaatcagtacctttgttatagttctcttaggacttacaaatgaaaatgatctgaaactttatcaacatcaattttattatgaacttaggaattctgatgtaattttaactaacaatagaggaattatgttgcagatttatttacatatgttatggatatatgaagtgaagaagtcactcattgaatcctgatattttgttttttattgttgctgttgttgttttgtttgtgactttactctttcttactgcttgcttttctcattgatatttcaggaagttttgtttactgactttgttctgtaccccctcatggaggtaaataaatcatattactattctcctaataggaaaacagtatcatcctaaatggatctgtgatggtcagcaccacccgcctacccagttcctccagtggagaccagttgggtagtggtgactgggtacgctacaagctctgcatgtgtgctgatgggacgctcttcaaggtgcaagtaaccagccagaacatgggctgccaaatctcagacaacccctgtggaaacactcattaaaagaaccccagaggtcaccaacatgtttatatcttgacttgacttttttatgcatgcaaatcattgtttttacagagtttgtgataactcataattattttaatggcagagcactgctgtatctgttttatggtctacatagttaaaatcttctcagagagcctaaattctaatacattttattaatttatactaatcttcatatttactgttctctaaaataattatgagaagcaaataaaatcaaaagtcatgtttaaagacgtgtttttaaaattccactatcccttttctaaaggttaaaggtctgaagcagctgtttagattcactgtaagtaaactttggtaactctaatggggatagacccacttaagatatttaaaaaggtatggcatcagcgtttcatgctctgccttttagcttctaaaaggaaagatgcagatttctagtgcattaagcctgagccatattctcacatgcaagtgaagtcattaaagaactttacatatgtgagatagatacaatggttccttagttttgcactgggaagaaaatattttgtaaaagaatgtttatttgaaataatgataactatcaattgttcacaatgtggtggaaattaaaacaccatctcagctttaacttttaaataataatgataactatctttattgagcatcttctacatcctaggcattgtcctaggcattgcatgtttatatccccaattctcaccacaaccctgcaagtaggtggtattatccaagttttacccattaagaaactgaagatcagagaagttaagaaacttgctcaacatcatatagtaagtagcagagttgggattggaattcaggcatgactcaaacctggatgtacttgattccaaatgccatgttgttttcactctctgcactgactttttaattatttaaaactctagaaagatgaacaaaggttaatttaaacttacctaagaagatgagaatcaaacaaaacagatatgcttactctagttaaaaagaaaataaatctcatgtcagacccagaaaggaccaatcactgtccgattgtaagctatgttgggccaattccaaaatattatacgatggagaggtcaaatttacctacttctgagttacctcagtttcccaacaatggaccttggcacactggagtaacaatacataacagagttgccaagatatttataccctcagcactcggggcaacacagtggaaagtggggaggccatagacccaaacaagttctttgggccaggcatggcctagtaagtacaccatgcctcgaaaataagtccagaagcactggactaaagagtgctaatgcaggaaataatacacataatttttaggtaaggataataatttatctctgctcctaatattactatcccattgtaattatttataaccctcaagccagttgatttttaatatatttgattggaaaagaactctctggtattattaagactcacacagaatcagggacagggcccccaaaggagtttgctgtaaaataggcagtagagttgtggcacgggcccaaccctgcattcaagtgtaacagcattctgtcagggtcactttgaattgtgtacataagaaaaccaatacaaaaaacaatttgtattcaatattgtcacatttctctctggtagaaaaatcaaataccttagagattatgaagtcattaatttatactgaaattggattgacttactacctaacactgagcgctgtttttaaatgaaaagaatgagatttataaccacttgagtgttattgcagtgatatttgaactcatttgaatatattcagtatcatttaatgtctgaattcagaaaaaaatgccgaaatttttattcagatggtccataaattaaattgcatattcattacttatctgctctatttagatttattttaaaagtttatttaagtaaatatttttataaaaaccagaaaacactgtattacaaaatattatttattaaatgtagttcaggaaataatctatttttactcttttttgggaaatacttgtgtttttgatacatctccatgaagtgcttttgagaggagaggctattttgatgtttttatacaactgaaggttaacagccatagcattttatgatactttacaggtagtcctggctttttccctgaaacataagcttggaaaatctattagaaagcagaacagggcaaactctccattttacttatggcttttctaatttttaattaattaatttatttttttgagacagagtcttgttctgtcgccaggctggagtgcagtggcacaatctcggctctcggctcactgcaacctctgcctcccaggttcaagcgattctcctgcctcagcctcccgagtacctgggactacaggcatgtgccacagttcccggctaatttttgtatttttagtagagacggggtttcaccatgttggccaggatggtctcaatctcttgacctcgtgatctgcctgccttggcctcccaaagtgctgggattacaggtgtgagccaccacgcctggccggcttatttttatccacagtaaatcttcagcaactcattgtctccaccagatagtatttttctgtaaatgaaatgctgacttcgcctcttcctgctgtatgctcatccctgcactgagcacagatatgacaagcagtagccatgggggaggtgggtgacaaagataggaccccgggagggggcgcaggtacatgctagtttcaattaccacagtattctagagacgggttgcaatgacaaggggggcaaatgaaatcaatgcaagatttcttaataatgggcagacagaaaaatgtaaaaccacacaaaacggactgctgataatattttaaaatatacttatttgtcttctttttgcattgtgaaaaaaacaaaataaattttgtgtgataattttgatgatgaaaggtggaagttctacctagatttgaatgagtgtttttttaagggaatgagaatgtcatggtgctaaacctgacaaataagagatcattgaaatgctgaaaattttaacagtcttcttaaaagtattgagggggcaaaaattaccaattatggtatacaaaaataagcctataaatgtgtttcacattgctaacttgagtttcagttgattcagtttgtaataactagtaatgagcttctgtttacaataaaaattctgtaaattgtttgctgttaattttttaagggttatatattaactgttttctacttagtcatgcgaacgtgatgaatttaaatatggcttgagaatgggacgctgtcagtatttatgtaatctctctggactcctagaactcaaagttagaaagttgtacattccaagttttgaatgccctcctctctgtgcattgcagaaggcctctctccagtggtgcttccctggtgtcctaggggaaagtgcacactgtcaccatggcaggaggccaaagccggagatgaaagggtgagggctggccactgggcagccttgatggcaggttgggtggagcctcaaaggttcaggtcttaaatccctacctggcttgatccagatatccacccatttgataaccacttaggatacgaaggtatgtcttagaggcattattactttccaggtcttgtccttacccgaaatagcctctgttgcttttttccttcagttttgccaccctttcttttatgtataaatgaactcttcatttcctttctataatactttgtttttttgtgctgccttcttcctatctttcacttgctgactcacaaatgtacacacccagtatttctaactgcttcctcctacttcagcttgactatttccattttgaaatttacattttgcctaattgtttccagttttctaagcaactttttctggagttctcagtggttccttacctaatacatataaatttataaatagtatgatttttttaacaaattaatacctttcactttaagatataagattccttgtctagctgttttgaactcaaacctaacatgtataaatctcttcagcttaaaaagaaccagggcaattttaattcatgtccccttaagaaaaagtatttttcaaccatgtctttctcttcagcactacaaagtaatgtacctgtgaatggtgactatatttttttgttgctgattttgttacattagcttggtgcaccattgtatatataatgatctcagctttgaacgtagaaaaaatatctttgttcctgggcaaatcaattcaatttctagtattgcataagaagcacactgtaaaaataaatcactcctccatgctgtaggctacctttgctgttcatggccatgtgtacctgaatttaaatgcccttgaaaatatgggaggattgaccttgtatgaaacaaaagttttaaagttacattgtaaatttcattcacttcactccatgcattcatttacacacaaacaacataacccagtgacagactgcagactattaaaaatgtaaaacattggatagatagatagatagataatgttccttttttttttgggagttcagaacagatacaaagcaaaacaatagcaacgctgaatgttactaatgtgtatcaattccttcagtgtttactgaaagatttctgtaagaataaagacaaatttggaggctaaagcaggaaaaatgaccaggccataagatgtgagatgaatctggaaggatacacaagactgtggctggccgggtgtggttgctcacgcctgtaatcccagcactttgggaggccaaggtgggcgggtcacctgaggtcaggagttcgagaccagcctgaccaacatggagaaacctcatctctactaaaaatacaaattagtgagttgtagtggcacatgcctgtaatcccagctactcgggaggctgaggcaggagaattgcttgaacccgggaggcggaggttgtggtgagctgacatggcgctcttgcactccagcctgggtaacaagagcgaaactccatcttaagactgtggctaagaggaaaaggcattgaacttggaactgggaatgaactgaaagtgaatttcagtatgcgatatgcatagatcattctttgcagaagccacatcttgtagtggctccacatgaacttatcaagctaggtcattaagtttacctagataacacaggctttgaataccaacctgagggatttggactataggcaataaggagccctttgaggatttcaaatgaaggaataatataggaaatacgttattgtaggaaaataatcctttggagtcacctaggatggatcacaaagaaggaaagtcaagaggcagaggcaagaaagtcagttaagccattttagtatttcagactgcagtgatgaaaactaaactgagtgccattagaacagaaaggaagggacaatttcttggaaactcatatactcaataatgtgattatttgtacacacagtggcttttaagtggaatttagtttaaaacaaatcacaaaaattacccatttttaaacttatttttgtgatacattcagccattgtaatttgtacacacttctttttaaaaactttgaattttttctcaaaaatgtttggtacaaaagatactcaatgtttctgtatcgtattacatcttcatggcttggagccagaacatgtatttgataacacattatgttgtatgtatctaaatgatttcataatgatttgaaaagtcacacaagccacacagcaaaacttgtatttcttctagtcatgaaaagtaagagcctcttttgtgagttaaactttttactcatagagttatggagggtcatggtttagtgtaactggttgtcatttatgtaataaactacatggttgattactatgttgtagataagcataatagactttgctctgtattaatggcctgcaaagaaacagggaagtctttaatcttggtaaggtttcattcatcccaaagcacactgtggagtgaaaactactggaaaagcagatgcagaggtgaggcctaactgaatatgtattttctgaaaaatcaggggagtcctttctttaaaatgtgacataaatgtaattttatactatggctatttcattttggtagctacattttcatgccccagtaagaaatcaaacattcgcttaaattggcaaccaagacaagataactttccgaaatcttaaattgaaaattaaatttgctgcttattgctgttagtttttatatattattgtgaataagtcaattcattttcctttttccaggcattatgaaaaacctctatttcagagtcattaccatagttataggtctttattttactggaataatgacaaatgcatcaagaaaaagcaatattttattcaattctgaatgccaatggaatgaatatattctgacaaattgttcttttaccggaaagtgtgatatacctgtggacatatcacagacagcagccactgtggatgtaagtttcaatttctttagagttctcttacagtctcacacgaaaaaagaagagtggaaaataaaacatctggacctcagtaacaatctcatatcaaaaataaccttaagcccttttgcatatttacatgctttggaagtgttaaacctcagcaacaatgccatccactccctctcattggatctactcagtcctaagtcctcatgggtgaaacgccacagaagcagcttcagaaacaggtttccattgctgaaggtgctcattcttcaaagaaataaactcagtgacactcccaagggtgagtacaattttaactaggcagagaaacaatgcttacgtggagttgtttcatgttcataagaattccacatttgttttcaggttcaagggacagctgaaagtaaagcaatttgatcagagcacatataataatgtttcttagtggcattggaagttatagtgtgtggaatttacagctaatgaaatttagtctcccattagtatatctgacattaatgttatgtgcggttatcgagacactaggaagtatttaagtgctaaataataatgagtgattgtaagttacctactttaattatcatgtattagttaatatagaaaagcactgagcaataactagttcaaatacatttaatatgtaatacaattcaaattaaatgttgccatattataatatttttcttctttgagtacattttgcctcagtctatctagttgtcctccaaacttacagcagaagtatcctaatattatatattggtatgtaaaccttctgattatcaagtcaaaatcagaattccttatcctagtttctaacagggtactccagatagcctccaattatcataaattctcatctgacattcaatagtctatatgttggagttccttaacggatacaccaatgttttctttggaaaatatatcaagttcataaagcaaaacttcctttgccctttttatattccagagtgctagacaattaatttcctttccttgtttgttttcaggcttgttcactctttgctaagcacctcctttatataagacattattcaaaaaaatgtataaggttattgttctctttctccattccaaattgtgcatatttagtttttcttattatccagttctgacatttcatgtttttatcttcatgctctttctccagctttgctttaagcatcattttggcaataatagcctagcaggtataggaattattacagtcaccatgtcagcagaattgtttgagaagggtgggcgtcttatctccctgaccttctccataaaagtagtatgtcatattttcagtgtaaatgaattgcattttattttatttttattgtattatttttattacaagaagaatacctgttacttatagaacatttaacaactgaagaaaaatttaaagggaaaaattaaagtcattcatgttatatatgttcttcaagtttattatttatgcctatttgtacctttttctttcaaaattggatcatactgtccatatttctaatttgtattttcatatcatagaatattttaataactttatataattaagcaatctcacaaatatttcaaatagttggtttttatatatgcgtatatcataattggtttaatcaagcactaggttatttccaggttttgttttttgatggacgtcattatagctacatatatccatataatataacaaaaatttttaactggtatggtagatgtgatctcaatccacaaactcaagtgtactagagatataaccttctgttgtctgtagtaacataatttccgattctgagcccccattagggggagttgtagggatacttaacatcagtctttcatcagctttcctctgcctttgcctggatttgtacccagcttgagaatcgtatactctaacaaggcatcaaatcgtatactctaacaaggcatcgaatcgtatactctaacaaggcatcgaggggtgagcattccttacccctgctacccagataatatttcttttcagcctcttcagtttggagaaaatttcttctcccttttttttttcttcaaaaccctctgtctggaaatcactttcttctaaagggttagggttttggaaaacaaaagccagaaagacttgtagactcagctactttctgccttgccatatgccttccctgggacaatgaacgtggagcctactttctgtgtgaatggagagaaagagcaagaggaaaatatagggaagtaagagattaacatgtcaaaatattaccccaccacaagagtaaataggaagtgctgagtttctctccttaaggcagatgaattcccctgagctaactgggggttaggactaatacagttccacttaaagaccaaatatccctataaatgcagatacagatccatcttctttttttgagttaagcttttgcctcccaaaagatcaagaaaaatgttcaacttgaagaggagggggaaaaaagaagggaagtgagcaaattctgtatctgaaattctattaaaattctagcaaatgaagacatagagagatgaatgaaaagagatagacggtggaagttcagtgtaaggcatgaatctgattggatataattcagagtccttttatccatagtattttgtgatttaaattattttcccataatcatcatattagttttcactaggttgagtctcctctaacaatttttcctattttatgattctgtgactatggctgagttgctctgactttgaaatcccattttgaggggaactgctggtgagagagatgctgcctagggcatgccctatttttggcctatttctttgttcttcaattcttcactctaagtctatttataggtgacatctggataatataagatttactcattggatcattgtaaggataaaatgaaaaaatgtatctcaaagacctaacttaacatggtatttggcataataaactgtcacaatataaatatatgaaaactacttcagaatcttgtctgaagatttaccttgcaaatactagtttttattattctcttggcataaattgagaataacagtatatttagaaacaaataattaatttttgtctaaatctcaaggttttttttgttttttgttttttgagacagagtttcactcttgttgcccatgctggagaaaaatggcacgatctcggctccccgcaacctccgcctcccaggttcaagcgattcttctgcctcagcctcccaggtagctgggtttacaggcatgtgccaccagcccggctaattttgtatttttagtagagacggggctcctccatgttggtcaggctggtctcgaactcctgatctcaggtgatccgcaggcctcaccctcccaaagtgctgggattagaggcgtgagccaccgtgcccggcctcaagttattttttaaaatgttcaacaactattgaagtagtagcccactataattcatgagcagataattatttgtgtctgactatataggcacttgcattcatctaaaataataataaattagagagatctcagaaagcaacaatcaagcaacctttgtaactatgtaccacatattttaaaatggggactatttctagaaccaatgaaaagttgctttcactcaggaaagcccatttgtgtaagggtgagatatcacacgaactaaccctgtcttcagagtcagttgtggtgtcaccaataagcttcatgttgggaaaatgcccaaaagaggtgctggccaatgcaatttataaaacagaagccagccatgaatttaattttaatgatgcttctaccttcctcccatatttttggaatacagcattcataattgaaaaactagtttaaaaacatgaaaacaatgggatcagtctctggttaatctgtcctaccttcatcaagcagtatttttggagtgctcacagagtaactggaaatgcagcaggaacaacatcttgttgggattccagttaggttgatagaccaaatgtagcagcctcacattaaccaactaagttctagaacctaagaggtaaatgtgttagaaataagataaaataatacctaacatttgaaactgggggaattaaaaaaaatacacagtgtattataaaaaactaaagtatattgtgttcctttattcatagaaaattaaagatttcatcctgattgctactggattatggaattatcaataagcaatgtactcaaaactaattcaggttctaaagaaacaaaaagtatataagacactaaactaagaaggcaaggcctttggctaacctacataatttgaccacaataagatctgacctaatgaatcgaatatcttacccaggaccattctagactctattccaattcttaattgctctttggactaacagccataatccctgaatattgttttatgttatcaggttatcacacttgggagagcacttaagttcatagtacagaaggagtatttactaagtgtaatgtctgagtatcctttctgtggcctttttttctgagagacaggtcatttcttggaaataataaaactgcctctggccacttaaatgcaaaggctaataaaattcctgcctagtgtgtcctttgtaatctttagaaagcagttcaataaataattccctttccacagagtacctctatattttcctcccagcattcaactctcctctcttgaagtataaaatgtacccctgatgtccaagccccagccgtgaatgcaccatacagcctcttttcactcatttgactaccctctgaacattggcttaccaagcaaaaatattaaaagaatacattttcccattgagaagtgcagtcaagtaccatgcaagagttttcttaaatttcccaactccatcctgagagacgctatacaaaccaggtctgtaccagttcccttaaaaaaataaaatcttaattatctaaaattgaaagtaaaggaaaagttttcattcaggaggtgtaaactgaacttcctggtctttattctcatctccagaagaagtttaccttcctcttggaaaatctcagcttgatattatgaggggagttaaataagaggattctctaataactgcattcaaaatcaaaatcaccctctccccacatgcttgggtatgttcgggtcccactctttttatttactccttttttttttctgtttttagatggagcctcactcttgtcacccagactggagtgcagtggcatgatctcagctcactacaacctccacctcccgggttcaagagattctcctgccttagccttccatgtagctgggattacaggtgcctgccaccacacccagctaatttttttgtatttttagtaaagatggggtttcaccatattggccaggctggttttgaactcctgacctcaagtgatccgcctgcctcagcctcccaaagtgctgggattacaggcatcagtcaccgttctcagcctgtttacttgtaattcttttacacatcttatattacactatttacttgtttgttgaccttaaacaagtcacttaacctaaaaaagcttcctggtccttatctttaactgagaataagtatatgtatagggtaggtataaggtttagagacagtgtgcatcaagactataacacatagagtgatgatacatgtaaaacatctctcatagtgcctggcacacagcaggtgttcaaaagcattagttcccctttagtgccacttgatcgtcctgagtctttaattctatatttcctgccctggtctttgctgtaacggtaacttccttgatttcaggcacaatagataattaaaggggattctcattctctgtcttcagatgtttagagtattcaccaacagtctgggtgcctctgttcatatttatataggtctgcataatgttggaagcctctgctcttcctttttcagagcactttttgatctgtcctctgactctctgaaccacactgactcatgaaaccatcaccactatcaagataattaaaacaaaaagtatataagatactcaactaagaaggcagagcctttggctcacctacataatttgaccacaataagatctgacctaatgaatcaaatatcttacccaggaccattctagactctattccaattcttattgctctttggactaaaagccataatccctgaatattgttttatgttatcaggttatcatacttgggagagcacttaagaagttcatagtacagagggagtatttactaagtgtaatgtctgtcaccgcaaaagcttcttcatccccctttgtaatctgtcttttccacccatcccttctccccaacccaggaaaccgctgatctcctttctgtttcattatagattcacttgcatttctataattttatataaaaggaatcatacaatatgtacttttatttttggtctaacgtcttttttcagcataattattttgaaacttatccatgtcgttgtatatattaaaagttcattcctactaaaaacagaattacaattcgacctagcaagcccattagtgggtgtatatgcaaaggaaaaataaatcattctacaaaaaagacacatgcactcatatgttcatcacagcaccaatcacaatagcaactacatggaatcaacctaggtgcccatcaacagtggattggatagagaaaatgtggtacatatacatcatggtctcctacacagctctaaacaagaatgaaatcatgtcgtttgcagcaacatggatgtagctgcaggccattatcctaagcaaagtaatatattctcgcttataagtgggaactaaatcttgggttcaaacagacgtaaagatgggaacaatagacactggggaccactagaaggaggaggagtgtgggaggagggagactaaagctgaaaaactacctattgagtactatgctcactacctgggtgatgggatcatttgtactgcaaaccctcagcatcaggcaatatacctgtgtaacaaacctgcacatgtactcgcaaataaaagttgacattattttaaaaaataagacaaaaagaaaaaattttgtgaactgtggggaaaggttcattccttttcattgctgtgtagaattccatcatgtggattcatttatctgttgatggacacttagattgtctttttggctattaaaaataaagctgctagatctttcataaatgctctatgccaggttgatgaaattctctctattcccagtttgcccaagaccttttctggatctactgagatgatcatatgggtttcttttttaatctgttaatttggagaattgtgtagattttctaatattaaatcaactttgcattcgtgggatgaattccattttgtcatgatttattgtcttttttatatattttggattcaatttgctaaaattttaagaaattttacacctatgttcatgaggaatattgggttattattttcttttgctatattgttgatgtctagttttggtattagagtaatgtgggcctcataaaatgaattgggagatatttattcctcttccgtcttctggaagtgtttgtttagaattggctttgtttcttccataaatgtttcatagaattccccagtgaagctatctgaacaggagttttttcatgggaaggtatttaattacaagtttactttcattaatagatgcagggttattcacattatctattgctttttgagtgagtattggtagtttattagcataaagctgttcacaatgtttcattatccttttagtatctatagactctgtagtaatgccacctctcttattattgacactgataatttatatcttctcttttctgatcagcctggctagaaatctttttaaatcaattttattgttgttaaagaaccagcttttggttttattgatttttctctgttatttttacatttcctactttatttcttctctgatctttatgatttcctttcttctgcttacttacaatttcattcattcttgcaagtttcttaaaggggaagctgaagtcaatgacttgaggcatttcttctttaatagacatttagtgcaacttgataataaattagtaatttgcctctaaaaatggctttagctacgtcccacaaattttgatatgtgatgttttcatttttagttgagtcaaaattatttctattttgatttttcttggtcccatgggttatttagaagtgcgttatgaatatcgaataatctgtggatatcctagaattctagctttgggatttccagtatatatcttaagagccctat

SEQ ID NO: 32743 - DNA, 1420 bp, Homo Sapiens
cacctttcctgcctgtgtgactaacctaattttgctagttccataaatacacgattagtttagtaacagccatcacaatgtaccatgtacattcatggtgagagctaaagatcgacacagacttctaggagctttgttcatactgattacttaatccaattgtatagattgaatatttgagtggaaggaatttacactctgtttaaatgatgggattctatcgagatagcactcatgatcatgacctttttggtagtattcttaaacaaaattctacagagactaaatgttagcgatgatcctccattttcaattttaaccaattctgtcccctttctcaaaaccctgagccctgtgcatgctttctcagtcttgtggtgggactggatacaatgactaacttcccctcctcccctctttaaacaccattttccatggagttcaaaaaaattttttttcttaacgttacatatcatagtgaatggtttccccagtgtatatgaatgttttaagtgtctccaatagcttatgcagtctaggagctttccaatactcatttaattaagatttaatcatttgctaatggaaatcttaccacctttcattttccctctgttaccaaatttcagctcttaggagctgctctacaattctgaatttgcttttcttgcctctctttagtcacctgtcacaggaggttcctgctcagtaatgatattgtgagttaggataataactttttttttttgtgcttcagatttagaagaaaagatcctgtttccatttgaaaggaactgtaagcttttatcttttaaccaactgaacaatacaccaaaagcagcctagggatgagcatttctttgaaagcaattaggttattcacctggtattaaaactatttactgttaaaaaatctgtgacttcatgaagttgatttttaaaggcagcatcaaaaactgaaaaggaagggaaaaaataggcagcttctctgcacttgtttggagctccccaaaacaggagccatggagaagtggcatcaagaccgggctgccctttcgagaacaccctgtggcagttcagagacacgcttttcctacactgcatgcagcccctctttccagcactggaaagaagtggtcttgagcccagctgagaagcacttcacactcctctctcttgttctgaatggtgtttgtgtcagtctgcagctgtgtatggtattatgtcttataatcctgcatcacttctatcctatccagtcatatctaatgtagaaaattagtttccagtgaaagtaatatgtagtgcttttatgatatttgtgtgcaatatcccctcttccattgaggatatttgatgtaaaggaaaaaaaaaaactcagttccacaataaaatacaaaagtggcaaaagttaaaaaaa

SEQ ID NO: 32744 - DNA, 4235 bp, Homo Sapiens
gaatccaagggggccagttcctgccgtctgctcttctgcctcttgatctccgccaccgtcttcaggccaggccttggatggtatactgtaaattcagcatatggagataccattatcataccttgccgacttgacgtacctcagaatctcatgtttggcaaatggaaatatgaaaagcccgatggctccccagtatttattgccttcagatcctctacaaagaaaagtgtgcagtacgacgatgtaccagaatacaaagacagattgaacctctcagaaaactacactttgtctatcagtaatgcaaggatcagtgatgaaaagagatttgtgtgcatgctagtaactgaggacaacgtgtttgaggcacctacaatagtcaaggtgttcaagcaaccatctaaacctgaaattgtaagcaaagcactgtttctcgaaacagagcagctaaaaaagttgggtgactgcatttcagaagacagttatccagatggcaatatcacatggtacaggaatggaaaagtgctacatccccttgaaggagcggtggtcataatttttaaaaaggaaatggacccagtgactcagctctataccatgacttccaccctggagtacaagacaaccaaggctgacatacaaatgccattcacctgctcggtgacatattatggaccatctggccagaaaacaattcattctgaacaggcagtatttgatatttactatcctacagagcaggtgacaatacaagtgctgccaccaaaaaatgccatcaaagaaggggataacatcactcttaaatgcttagggaatggcaaccctcccccagaggaatttttgttttacttaccaggacagcccgaaggaataagaagctcaaatacttacacactgacggatgtgaggcgcaatgcaacaggagactacaagtgttccctgatagacaaaaaaagcatgattgcttcaacagccatcacagttcactatttggatttgtccttaaacccaagtggagaagtgactagacagattggtgatgccctacccgtgtcatgcacaatatctgctagcaggaatgcaactgtggtatggatgaaagataacatcaggcttcgatctagcccgtcattttctagtcttcattatcaggatgctggaaactatgtctgcgaaactgctctgcaggaggttgaaggactaaagaaaagagagtcattgactctcattgtagaaggcaaacctcaaataaaaatgacaaagaaaactgatcccagtggactatctaaaacaataatctgccatgtggaaggttttccaaagccagccattcagtggacaattactggcagtggaagcgtcataaaccaaacagaggaatctccttatattaatggcaggtattatagtaaaattatcatttcccctgaagagaatgttacattaacttgcacagcagaaaaccaactggagagaacagtaaactccttgaatgtctctgctataagtattccagaacacgatgaggcagacgagataagtgatgaaaacagagaaaaggtgaatgaccaggcaaaactaattgtgggaatcgttgttggtctcctccttgctgcccttgttgctggtgtcgtctactggctgtacatgaagaagtcaaagactgcatcaaaacatgtaaacaaggacctcggtaatatggaagaaaacaaaaagttagaagaaaacaatcacaaaactgaagcctaagagagaaactgtcctagttgtccagagataaaaatcatatagaccaattgaagcatgaacgtggattgtatttaagacataaacaaagacattgacagcaattcatgttcaagtattaagcagttcattctaccaagctgtcacaggttttcagagaattatctcaagtaaaacaaatgaaatttaattacaaacaataagaacaagttttggcagccatgataataggtcatatgttgtgtttggttcaattttttttccgtaaatgtctgcactgaggatttctttttggtttgccttttatgtaaattttttacgtagctatttttatacactgtaagctttgttctgggagttgctgttaatctgatgtataatgtaatgtttttatttcaattgtttatatggataatctgagcaggtacatttctgattctgattgctatcagcaatgccccaaactttctcataagcacctaaaacccaaaggtggcagcttgtgaagattggggacactcatattgccctaattaaaaactgtgatttttatcacaagggaggggaggccgagagtcagactgatagacaccataggagccgactctttgatatgccaccagcgaactctcagaaataaatcacagatgcatatagacacacatacataatggtactcccaaactgacaattttacctattctgaaaaagacataaaacagaatttggtagcacttacctctacagacacctgctaataaattattttctgtcaaaagaaaaaacacaagcatgtgtgagagacagtttggaaaaatcatggtcaacattcccattttcatagatcacaatgtaaatcactataattacaaattggtgttaaatcctttgggttatccactgccttaaaattatacctatttcatgtttaaaaagatatcaatcagaattggagtttttaacagtggtcattatcaaagctgtgttattttccacagaatatagaatatatatttttttcgtgtgtgtttttgttaactaccctacagatattgaatgcaccttgagataatttagtgttttaactgatacataatttatcaagcagtacatgaaagtgtaataataaaatgtctatgtatctttagttacattcaaatttgtaactttataaacatgttttatgcttgaggaaatttttaaggtggtagtataaatggaaactttttgaagtagaccagatatgggctacttgtgactagacttttaaactttgctctttcaagcagaagcctggtttctgggagaacactgcacagtgatttctttcccaggatttacacaactttaaagggaagataaatgaacatcagatttctaggtatagaactatgttattgaaaggaaaaggaaaactggtgtttgtttcttagactcatgaaataaaaaattatgaaggcaatgaaaaataaattgaaaattaaagtcagatgagaataggaataatactttgccacttctgcattatttagaaacatacgttattgtacatttgtaaaccatttactgtctgggcaatagtgactccgtttaataaaagcttccgtagtgcattggtatggattaaatgcataaaatatcttagactcgatgctgtataaaatattatgggaaaaaagaaatacgttattttgcctctaaacttttattgaagttttatttggcaggaaaaaaaattgaatcttggtcaacatttaaaccaaagtaaaaggggaaaaaccaaagttatttgttttgcatggctaagccattctgttatctctgtaaatactgtgatttcttttttattttctctttagaattttgttaaagaaattctaaaatttttaaacacctgctctccacaataaatcacaaacactaaaataaaattacttccatataaatattattttctcttttggtgtgggagatcaaaggtttaaagtctaacttctaagatatatttgcagaaagaagcaacatgacaatagagagagttatgctacattatttcttggtttccacttgcaatggttaattaagtccaaaaacagctgtcagaacctcgagagcagaacatgagaaactcagagctctggaccgaaagcagaaagtttgccggaaaaaaaaagaccacattattaccatcgattcagtgcctggataaagaggaaagcttacttgtttaatggcagccacatgcacgaagatgctaagaagaaaaagaattccaaatcctcaacttttgaggtttcggctctccaatttaactctttggcaacaggaaacaggttttgcaagttcaaggttcactccctatatgtgattataggaattgtttgtggaaatggattaacatacccgtctatgcctaaaagataataagaaaactgaaatatgtcttcaaaaaaaaaaaaaaaaaaaaaaaaaaaaaaaaaaaaaaaaaa

SEQ ID NO: 32745 - DNA, 242825 bp, Homo Sapiens
cccacctcggcctcccaaagctgatgttttcttaaattgtggtaaaaaacacttcccttccctacctcttctctcctcttctccccccaactcctctcttctcccatcccctctcctttcatttcctcttctttccattatttcttcatccctccctcttttcctcccccagtaagtctggactgaatacctcccataggcatagacagccccaaataagaattttaaaacacaaacaatggagacatctataaggcatatctatgggtggcaaacatgaaatattaagaaacagaataataataatgcctgccacttcatcagaaaccattttaagcacttcataactattataatcatagtttattattatctcccattgccagatgacaaaattgagaccctgagagattaggcaattttttcaaggtcacatagcagtaagtagcaatgccaggaatccaatccagggagtttgttcccaaataccaggtatttaaccactgtcacactgcactatcctgcctggcagcgtggaaacatgtatcaacgtgaatcaacgtatatcaacgtgaatggtgcagttagcagttacaagaaaaagagaagggagctctgttagtgttatgtgaggaaagcagaaaccactctaggtatttcaaacaagtgtatttaatgtagggaattggtttcaaaggtagtggaaaggcagaaggaacaaaggagaggatgttacccagagttcagtgactgcaaaaggccgctactgcccttaagactagagaagcaaacagggaaaaggaatgtggcctaaagtccacatcacactcacctcggaggctgctgctgctactgctgagtgggactctaggagccacaatcccattgatgctgccagagtctgcagtcatctgcagccatgtgcccctgcagctgtcacatttgcggtctttatgtaggatcccggagtttcctcctgtggccctggataaacccaggatcagtaaagaaaaaataaaccaggcttctacattcctcctgtttttgaatttcctattaatgccttcccttgacagagtctaacaggaactcagctggcaagggagcctggaaaatgtagttcgtgggcttccagctgccaaccatacactgaacacactagaagatcacagtggggctgaaagccaaagcgtattctacatgctcagtgttgcataagaaaacgtggatacagggaagaaaaaaacatttaaccgaatctaagattcaatcgattgtaagattgtaagatgtatcataataccaccataataataccatcgagaaagaaaaataccgtcaaattatgccacatcaccacttacgaggtacattctacttctagaaatgttaaagcttgaaaaaaagtccctgttaaaattgataagatacagtaaatgtctgatctcaacttacatgtagtctaatggggcagacttctgcagagactattgtaatacaacctgacatcctgtgaccctgtgaccttactaagaagaggggtctgggaagattttctcgaggaggtaaaatctgagctgagtcttaaaagatgagcccgagtttcctaaagaaatggttttccaggcaaaaggagaaatgttttctttttttttttaattttttttttttgagatggagtctcgctctgacgcccaggctggagtgtagtggcgcaatcttggctcactgccagctccgcctcccgggttcacgccattctcctgcctcagcctcccgagtagctgggactacaggtgcccgccaccacgcccggctaattttttgtatttttagtagagacggggtttcacggtgttttccaggatggtctctatctcctgacctcgtgatccgcccgtctcggcctcccaaagtgctgggattagaggcctgagccaccacgcccggccgagaaatattttcaaagcgcaaaaggctgggtaaagtttagtgcatttgagaacttgaaggggtttagaatgactggtgtgtagggtgtaaattgagaagccgtgcacaggtgagcctggaggattgcgtgggctcaatcatgcaggaactcaatgtgaagtatttttacattttcctaaaaactgacagcagccactgaaggattttaagaacatcaaaagtccatttgaaatttgactcaggactgcaatttagttggttcataccagtgtggctgctgctgttgtgaaatagtgaaatatctccttactagctgtggatggctgcccctctggaccccctgcagcctcctccaatccaccccctctcctagaaccctccagatccagcaactaagatagtacagtaggggccaccgaaactggccccagtcccctggtcagtgccatgccatggtggttgttaaatattttgaatggcatcactgttttcactacataagtttaatgtttagttttgttggttcttcagtccactttaccacattgcagagagatttaatggttgccctacaccagtggttcttacaatgtggtccccagactagcagcatcagcatctcccaagagctggttagaaattaaaatttcaggccgggtgcagtggctcacgcctgtaatcccagcactttgggaggccgaagcaggtggatcaccagaggtcaggagttcaagaccaacctggccaacatggtgaaaccccgtctctcctaaaaatacaaaaattacccagacgtgatggtgggcgcctgtaatcacagctacttgggaggctgaggaaagagaatcgcttgaacccaggaggcagaggttgcagtgagccgagattgtggcactgcactccagcctgggtgacagagcaagactccgtctcaaaaaataaataaataaaaaataaaaagaaatttaaatttcagctcatctcagacctacagaatcagaaactgtagggatggagcctagcaatctgttttttaatttaatttaattttgagacagggtctcattctgtcacccaggctggagtgcagtggcacaatcaaggctcactgcagcctcgacctcccgggctcaggcagtcctcccacctcagcctcctgagcagctgggactacaggagctcaccaccacacccagctagtttttgtattttttgtagagatggggcttcatcatgttgcttaggctggtctcaaactcttggtctcaagccatctacctgcctcggcctcccagagtgctaggattacaggtgtgagccaccatgcctggccacaatctgtgttttaaccagccctccgggagattctggtgcccactcaaatttgagacctgcttctctaagccccttgtcctcataaacatctaggtaagccatccttgaacaattggttgttattaatcaagggcatacaaacttctataggttaatagtctaaccaaggagtagggtgagtgtgaccagtttgaggatacagcaagtaaacgctagttggatgaatagttatttcattttaaaattgttatgcagtggagtgctttggaaaaggtattaatattgtgggtttgggagctgtatcaatcatgttttttattttctatattttatgatgtgttgacatcttggtgccttgcagacccagggaaggtctgtccctcccagggttagctaattcctagagatagtaactgacttgcctgtgagcatgcctttgatatgcaaatcaaccaatccacgttcatataccccccacttccttttaccagactcctgcagtcaaggacactatacccctacctttccaccctaaatcatcccagggctaggtacgagagtgctagagaccacctctagggaccagagcctgctgaaattattgatgctatccacccaatcctaaacctgctcagctgcttaccctgccttgcccattcctttctttgaaaaccacaataaagtgcctatggttttcccttgctccttctgctccttgatgctcccacatatggccctgtgtggcaaggcattgaaatgagagagttccctgattcccctcgcagggtatgagacagtgttgtggctcgcctgtttggttgccccccgcagctcagaccccttacgggagggggagcatgcagatgagcaggtgcaggaaccggggtgagcacttttgggctctggccccatggcagcatctatgggtgggtgtttgtgactcccgaagcccaagtgggcatgtgttacagtgtgctcctttagctttgccatctgtagatggcttgtgtgttaatcagctcaatggaccctgtgccttatcacaagggcagggggcgagtgtgacagccttctgtatcccaagctcttcctcagtgtcccaaaagaatcggatcacatgtgggcttgaaggatgagtgcagggttttactgagaggtggaggtggctctcagcgaaatggatgcggagccagaaggggggatggagtgggaaggtggtcttcccctggagtcggggtgcctagcaaccagactcttctttgactgcccctggccgaactccccttggcgtccagacgtccctcctcttctctctctgctgcattgttctgccgtcactggtcagctggtccgcttgcctcctcctctctttgcttggggttctcttctggagcttggggttcagggtttatatggggccagggtagggggtgtggtggaccaaaaggcaactttttgggcgtgaaaacagaaatgcctgtcctcattagggcctctggtcttcatgcttgagggcggggactttgccagggaaccgccctcttctacccagtatttccctgtctcttgtccgtatcagcgtgccctctcatcttccaaactgtgagtaataaacccttttcaagggctgtctccatgtttgttgtcttaaccataccagattaaagcaaattccaagtgcatttcaacacaggagccacatcgatttgagttccaactgggctctgtcatttacccatcacgtgaccttcggaatattacttatcctcagctggctccagtgtccttatctgcaaaagattcctgtattgtaggactgctctaaggactgatgataatacacataaggtgagcaggcactgaggaaatagtagctgtgtgggaaggaggtgagaaaaaatcaatggataaaatcccctttaaggctcagagatgaacaagtagaacacatggatagatagcctctcagatgcgtatctccttcctaatgttcaattactagcagcaacacatcaggagatagttcatgtactgctatttttgttcctcaactgaaaaatgtaccccccaccccccaaattaaatgatggctgctgttcctgttaaggaaataaagcctgataattactcttttaaacaagagaattaaaggaagcatagtttatcgctttgcctctgctcaagtgtcactttgagatgctacacctgccttcactaattacccgataagcaaacttatcaagaaccacagcagagagacaagaggttgggatttgaaaccattctggccttaagacaaatactggccctgtgacctttcgcaaatcacttaatagcttcaaacttcagtttccttatctgtaaaaggagataagaacacctacctaaggaaaatgtttaaaaagatcagatacaatgtaagtaatgtatatcgttagtgaaaggcctgggatttgaactcctccagtctgaaggacctgccaataagtaacagagcccaccacaatccccagatctgagctttcactatttattttaatagctcttctctccctctcctcccttccttcttctttcctccctcttccttccaatggatggatgaaaacatttttcagaatttgaatcacttccttctttctcactaaaattatggcccgcatgggattttactgcttgaaacacaggaccctgcacatccaaataatgaccagatgcactcatgtctaacataaagacagcttcagctgtcatcccggccagttagcagcttgggctgttgttgctggattccgttacctcggataaatcactgtacctgtgagtcctgcagggagagcagtaaatgcccaggcaagtcccttcttggggtggggctcggtccatctggaagccttcctcttgtcctgcaagctgcccattctcgcaagcactccttctggaagtcttcccaatgaatctaccgctctgggatttctgcttctctgggcactgactgcccttatggtcaggcctgcgtgctttagggtcatgtggccaagttgggtttcctatacagtattttcatccctgcatcaagttgaccagtccagaacctccggcatgggttcttggtcttgcttcataagggtttgcacagggctaggcatctgagaaatgctcaagaaacttccgttgattcattgattgatccagtgaatgtccaaggtagtcctgaatgttcttaattgaaataattgggtgggtgtagagcaggctattaacagacttaccttgcataatgacttttcaatgaactaattttcacatctctagaatagttgtaaaaatttttagaataacgccccctccccttttttttccagaataatgacttctcactcccaaacacactaaatcgtatgctaaatcataatattgaaatcatagtttcaatattacagtttcaggcaaagacacattcaccagtttccctgacacaacagtttctgttcaaagaatctcgaatggaacaattttgagttacaggtcaagtgtggataaacattttattttgtatgccatgtagatggggtgaagaggtagcattttttttttttttttgtcatagtcttactctgtcaccaggctggagtgcagtggtgtaatctcagctcactgcaacttccgcctcccaggttcaagggattctcctgcctcagcctcccgagtagctgggactacaggcgcgcaccaccacacctggctaatgtttgtatttttagtagaggtttcaccctggtcttgatctcctgagctcatgatccacccaccctggcctcccaaagtgctgggattacaggtgtgagccgccgctcccggctagaggtagcatcttttactactctttagtgcagaggttgctaaacttttcctgtcaagagccagagagtaaatatcctaagtttcaaaggccaaaatgtctctgttgcaaaactacttaactttgctcttgcagcatgaaagcaactatgcacaatctacaaacaaataggtgtgaccttgttccaataaaactttatttacaggccgggcatgatggttcacacctgtaatcccagcactttgagaggtcgaggcatgtggatcgcttgagcccaggagttcgagaccagcttggggaacatggcaaaaatccatctttactaaaaatacaagaattagctgggcgtggtggcgcaccacctgtagtcccagctattcgagaggatgaggcaggagaatcgcttgaacctgggaggtggaggttgcagtgagccgagattgcgccactgcactccagcctgggcaacagagcgagaccctgtctcaaaacaaaacaaaaaggtgaaaaacaaaaaaagctttatttacaaaaacaggcagtgggccaaatttggcccatgtactcttgtgtacagacccctgctttagtcctgtgagcacctattatttccctgtgctttgaacttctttattttgccctaaagggttttttttcttttcttttttttttccgtgttactttaagtgtggtttattttgagggcaagataatcatcatctcctaaaaggctgaaaaattaatgcagaaaatggcacagaatgaacaatgtaccttgtaatgaatgattctcccacatcctttcctctgtcagtcccgccactctcaagttttcctttattcctctggtgaataaaagaaaccttcattacattacattacacaaattatgcttattttcaatattttgacagttctatattactcttacagacttgttttcattgttcaagtaatacattttaaaattactttttttaatttttaatttttgtgggtacatattaggtgtatatatttgtgggtacatgagttgtttcgatacaggcatgcaatgtgaaataatcacatcgtggtgaatgtggtatccatcccctcaagcatttatccttagtgttacaaacaatccaatggcagtctttcagttatttttaaatttacaattaagttaaatgaatacatttttctatctgtgtttgcatatcttagtttgggatagaatgcatcataattttcctattacaattaatgaaagtattttttttggtttaatggcttttcactcagcagttgaccgttcaggaatgaattcctgtcggtaagtgatgggtaggtataacttcagggaatccccaaattgccctcacctctgggggaattgcaagttcaaggcaggtgaaggctactccagctaggaactcacggccactattcaatgtcagtggggacactgaaagttgtgaggagattgagaggaggaaggaaagaggaaagaagtgagtcctggtgtcgtgcttgggtgactgtcctctcgctgtgcacaggaagctttgtcaagcagcagacatgccatgtatggcaatgatcccatcccccatctatccatttgtgattttcccatgccacctgaggccattccttggtctcagtgtccttatttgtgaaacagagttaaaatacctttgctatcaagtatgtagatttaccatgaggttaaagcgaatgtgctatgcctatatgaagtatcacttttagttgagcattgagaaggaataattagggccttgaaagatgacacccttcctccccccgcagacattagcatgtgaggttcctgaagctgaagctggttgtttgttgtttgttgttgttgttgtcgttgttgttgttttgagatggggtctcgctctgttgcccaggctggagtgcagtactgcgatctcagctcactgcaacctccgcctcccgggttccagtgattctccgattctcctgcctcagcctcccgagtagctggcattacaggcatccaccaccacctccggctaatttttgtactttcagtagagtcggggtttcgccatgttggccaggctgatctcgaactcctgacctcaggtgatccacccaccttggccttttggtttttttgagacacagtttcattctgtcacccaggctggagtgcagtggctcaatctcagctcactgcagcctccacttcccaggtccaagcgatttttgtgcctcagcttccccgagtagctgggattacagtcacgtgccaccacacctggctaatttttgtatttttagtagagacagggtttcgccacattggccaggcagatctcgaactcctgacttagagtgatctgcccacctcagcctcccaaagtgttgggattacaggtgtgagccaccacttctggccccgaagttggttttttgttttgttttgttttgtatttgtttttttccagacagtcttgctctgccgcccagactagagttcagtggcatgatctcagctcgctgcaacccgcctcctgagttcaagcaactctcctgcctcagtctcctgagtagctgggattacaggcgcctgctaccacgcccggctattttttgtatttttagtagagacagggtttcaccatgttggccaggctggtctcgaactcctgacctcgtgatccacccgccttggcctcccaaagtactgggattacaggcgtgagccactgcgcccagctgaagctggttgttaagagtaagtggctagggctaacttgtatgatttttattgctctccttttcactgtgaagggccaggaaatgtcgatgttggagctgcaacattgaacatggttcctgactttgtggaactcatggtctaagatgtgttctagagtgaggtccaaaaactcttgggagaatcccatactaggggccaaagtcctgctagggtgtgttatggaataacagcaacaaaataatgtcaacagccaatgagcacaggataactacaacacaccatgatgtcataacttggacaaaggcttgtgaccccctgactttggcgcaacatgaaatgagcagaaagtaaggtatattatggaataagccccaaaacttgagagaatcccatgctaagggcttaagccctgaccaagacaagccagacaggaccatgaatgtgtggccatgttatactgagctcatcagcacctgctgagctcctgtgtcacctctaaagccatgcgcacaagttttgcattgagataattgctctactggtttctagatatagttgaattctccacccccactcccactgccctatgacctccagcaaaacaaaagcaggtaggtagtaattgtgttgtgagttaacgatatctatatctttggataataaaatctatatcatttcagtggtagcattggaatatcagttgcccttccccatgaagaaagcacattgttatcgtttaaatcattatcataatcaaaaatatcaaagacccagtcattcatcagtctttccagtgaagtcaactgcctttgttttttgtttgtttatttttgagacagggtctctctctctgtcacccaggttagagtgcagtggcgcgatctggctcactgcaacctccacctcccaggctcaagcgattctcccacctctgcctcctgagtagctgggaatacaggtgctcaccaacatgcccggctaatttttgtgtttttagtacaaacaaggtttcgccttgttggccaggctggtctcgaactcctggcctcaagcgagccccctgcctcagcctcccaaagtgctgggattacaggcgtgggccactacgcccggcctgaaaccaattgcctttgaattcatcctggggaatctgctgaagtggacagtttatgtaaacacaaaaacatcctaatgaatggctgcctcagtaggagtggcagacaaaacacatggtgcacttttcatcaaaaacacacaaggaaaaaatttttcatcatatcttttgtagttgctaataaacttaattcacgcacttgtgtttttttgtgggtttttttttttgtacacttcttagtaccacaaagaggaagtgctttttctccttcctttaagaaaaagttccagttcaaaccatcagcctctgtaggttgtcttaattgctactttgcactgcactggactatgactgatttttggcacatgctatcatacacaaagttcctgaaataaaatgctccaggatatcctaggaactcttagaaggctttaaaaagggactcacacactgaaagaatatctttgatgaagacaattcaggcaagcagaatgattcttgcaacagaattacatgattaattgagatcttgaagtgggtccggtgaatcctggccacctaacttatcatgatttgggggagtttcacgagaatccagttttgataaaacaattgtttttttcctccccaagtgactatacatttaaatagctaaaacatctgttcagcaacatagtaaaacatatatactcggaacgcttgagagaagagcctgccaaacagggactttgctgagggagagcaccaagataaagcaacactgtttgttttgtctagtcagggggaaagccaaggcaaccaatattttggtttttataattttcatttgtgaagaattatttgagaaagggtggcgaggggagatttcctgacggcagtttcttaagctgtccattagtagaagagcaagaaagccttggatgtcaacgcctcgctcttgagaccagccaccaaaccacgaaaagtgactttcttctcgtgtgctctctacggcccttctgatggaagcagaaacagggagcagcgtggagactggaaagaaggccaacagaggcactcgaattgccctggtcgtgtttgtcggtggcaccctagttctgggcacgatcctctttctaggtaagtggagtgcaggaggccgggggaactgggtgtgtgtcgagaagtttccttgtgctttattgtagcaaaacttgtcataacacaggtatagggctgtttgcctgcgttcataggtggtgtatctttagtttctatcaaatatgcaaatgataaagaaggcttttttaaggagcctaaataaataaatacacccaagtaccaaatgtatagtccagaaggcaaagtgggtgtaagtggcttcgagtggctggctgattctgttgcattgggtggaaaattttttatgtggtacatttagcaaaatgagtgtttgtgaattcatagtcacatagtttcatttatattttgaggaaagactttacattgtgatgaaaaccatgctggagtgtctttccatttgacttttattaatgtttgcttgaacgaatcatgaaatttaattcacaaaacacaaatcagtcctttaaagtgtgcttttaatgatattcttcaattcctttcttatccagtgactctggtgagatgcaatttgatttacaaattaatatgaaggaaaacagaggttttcccccaagatttgaaagatattgtgattcagttattttaatgactgttggtgagaatgatgtacccagagagtatataggatgatagaagtgtattcccatgaaaaagaatcaaatatcttggaaaggagtgagggattttctaaaattctaggctttctgaacccttgactattaccgttttaatttttctcatacaacccataatacttcattaacttgaacgttacataggaacgaggagattctaggtgcagtttgaaatgtagcaaacctgcaggaggccatgtttattttggcaggggtaaaccagtaattaaactttaaaagagttagggttgtgtggttgaaaactgctaaaatgagcaaaccatctttccacgctttctgtggctgaagatttaggaaattagatgggtttattgctttctgataaagcgaaatctcctactcctgcaactgaatctgtggctcttgaaaactcttgtaagatttctcagcacttagggtttaaacaagggtcctctgctgaaattccaaacaagaggaaaaattctatgggcatgccaaaagactacaggctacgtgcaacgtgactgcaaggttaggttttgcaaatgctcccaaacttaaaaatcccaataattattgtttatgtaaaaatatgtactctttttaacgatattaccactgcacgaaacttttacaaaactctacttttatgattacctcctgaggccgtggcatatcggttgaaagattctccgcggcagcaaatctttgttctttcagagaaaattattctcaggaaatagtgccgatgtttttagagcaaagtaaaattcatcaagccagacgctactattatggataaggaggcctgcataaaatatgaaagagaactttccagcgtgcccaataacctggctctcaccttgactctctaagaggagctcaaatgatgttagagaataagggcaaactgaggctgtggcctctacaactttgcttctcaaaatggggtctgtggaccagcagcattagcatcactggggagcttgagctccaccccagacccgctgattcacaatctgcattttcacaagacccccaggggactgtttgcaaatgcaggtttgagaagcattgcttcaggtgaccatatctatttggatgtatacattcagggacacttctttttgtcaaatatttctgcactattttagaatcacccccttaccccctctccccgtccctctcctcaactctgccacccacctccactctgcacccaggcaaagtgcttgtctgaaaagctccagggacctgcctggcaatgctcttcatgacaatattctagttagggtcgtcgtctcttcaaggggcttcctgcttgactttgtggtatatttctctgcctgtccacattcacttacatgcctgcaatttctagcatcccttcgtacctcatctttgtatctgaggctctgggataatctctcctcgcaaccttagtgcttctacagtaagagtgattgccagtggtcttgcagtggcttctgagaagctacagagcaccagaatggaaaacctttcttcttctccttcccctctctttcctccccacaatctgtttctcagatgcactggctggcaaactttttctgccaagagccagatagatagtgaatatatttggctctgtgggccatacggcctcttgcaactactcaattctgctgttgttgcacaaaagcatccatagacaatatgtacacaaatgggcatggctgtgtgccaagaaaatctgatttctagacactgaaattggaatgttatatacttttcatatgtcatgaaatattattttcctttttatttttcctgaccatgaaaaaaatgtaaaagccattcatagctcatgggctgtacagaaacaggcaatggatttgacctacaggccatagtttgctgacccctgctttctggccattcttatgctcttgatctgtggatgactccactgcatcctaagggcatttcctctggttatagagaaatctacaatgagaaaccaaactgctatttacatgtattttttaaagctcctaaccattcaaaagtaacatcttaatttttatattaaaaatattttctttattgtctctatttcattcacttacaccttcacattatctgggcttattgatcctcatttatttggagaattttaaaataaccccatccatggagataatgctcttccttgaggggttgggtctgtcagtgtcccaattaattaattatacacacacacacacacacacacacacacacacgtacatatatatatatatatatatttttttttttttttttttttttgagacggagtctcactctgtcacccaggctggagtgcagtggtgcgatcttggctcgctacaacctccgcctcctgggttcaagcaattatcctgcctcagcctcctgagtagctgggattacaggcgtgcaccaccacgcccagctaagatttgtatttttagtagagatggggtttcaccatgttggccaggctggtctcgaactcctgacctcaggtgatccgcccacctcggccacccaaagtgctgggattgcaggcctgagccaccgtgcctggcctaattagttatatttaaaaccttccttctgctcatcgttagataaagatacctgattttacttcttcctttgaggttttgggtcaagaattatctctcatgaaaggaataagtctttaacgattttattagctattttgttttttaaaataaggctaggatcaagaaggtattgtccagaattataaaaatattatttacaataaagcttatttttgcattatataaaagaacacatgctcactaaagaacattaggtcaacatataaaaattgactgatggggaaaattccccctgaggttctgccacccaggcatattggaatattgcacactaatctttatgctgcccatatatatttttttacataactttttttttttttttgctttatacagaaatcaaaacacacctttttgctaagaaacttattttcttaaaaacaggactgagatgggccaggcgcagtggctcacacctgtaatcccagcactttgggaggtcgaggcgggcggatcatgaggttaggagatcgagaccatcctggctaacacggtgaaaccccatctccactaaaaaatacaaaaaaattagccgggcgtggtggcgggtgcctgtagtcccagctactcgggaggctgaggcaggagaatggcgtgaacccgggaggcagagcttgcagtgagccaagatcaccccactgcactccagcctgggtgacagagtgagactcttgtctcgaaaaaaaaaaaaaaaataggactgagatgtttcatcggcagttttcttgaatctctaatgtaacacaatgcaatgcaaagaggctgtttggaggatggcagcagagaaaaagaacaaaggaaaagcaggctccatttagagagtgggttaataaataataaaaactcgccacactgggtagtaatctacaggtcttccatctctagcagaaatataggtactgccgagctttctgccacagagggccttggtccccattcacctcccaccatccctctccccatggccacatctccaaatgattcattgtttctgctcacagagcacagcaagaatgaattccccagaatttcctcagctactacaaatacttttgaaatcttaaactaacatctgctaatgcccaggtgctacctggggttgacaaattgggcacccttctgtacttctgcagacacctatttagataatgttgccaggcagatggagatattaagccattggtgaaaagctatttcaattttagacttttttttttttggagtgggggaagggaggaaatagctggaagcttggtccacaaagttgcaaatgtctggtagctaagctgggcctggtgggcggagagtttgtggggttcagggcaggcggacaatgactgttgctatcaataggtgattgagatatgttcagtatattctttacccctaccccttttttggtccgtatctgtatggatggtttagataagatccagaactctaaaagccaaacatgctagctttctatttccactctgattggctccaaatgacatagtttaaaagtttcaattttcccatcttgaacatgggcatggagttataaaccaatagagtgaaagtatgagacttaaaccactgataattggaggctgaagcgactttagagagtgtctcgcccagtggtgctcatatttgagcatgtatcggaatcacctggggggcttgttaaaccgcagatggctgggccccacccccagggtttctgagtcaagatcttggagtggctttctaacaagcttccaggtgcagcagcagcagctgctgctgctctagagaccacactcttaggagctctggtctagttatactcacttatcttacgtacgagagaactgagtttcaaagcaaccaagagtcttaccaaggttatttagctagcagctagagtctggtttcgtgacattgaaccaactgggttttggaataccgtgtcaacactgagaaggatgaactgatatcaaatatcttgcgtatgtttccgagggtggtttaccggatggtggtctgctacaactcagccatttattgtggtctgttttttcagtgagtcaaggtctcttaagtctccaagctaaacaggagtactgcctgaagccagaatgcatcgaagcgggtaagtcacagttttccatcctgtgtcaagttataattatggtaccttgggaagtggaagagaagacaggtggtatttttagtattctgtttgcttgaggtttaccaagtacgaaatgcaattttgaagaaattttaagtttattttcaagttttggtgtgaaacagtggagcttaggtttcctgttttctttttccttgcaaaaactgtggtattctaagcgttgttacaaggaaatcaggaaggggcttggaaggctgaatggcctctcttaagacccacaggcagagaacattggtcttcctatggctccgctggctatgaattcctctttaccttaagcagttgcctatcttctggtctgtgggtctgacttgcctgcctctaagcaaggctcctttgcaaataaatccacgcttccattgtcagtgggagtcccttttctcttttttaaaaattgagacggagtcttgctctgtcgcccaggctggcacgatctcagctcactgcatcctccacctcctgggctcaagtgattctcctgcctcagcctccctagtagctgggattacaagtgcccaccaccacgcccggctgatttttgtatttctagtagagacggagtttcaccttgttggccacactgatctcgaactcctgacctcaagtgatccacccgccttggcctcccaaagtgctgggattacaggcaagagccactgtgcccggctgggaatctcttttttctgtcacacgttgcaagtcaaacttctcttgaggtgaccaggctgtgtatcagtggatatcccagggtgaagatgagtgtttaaagtggccgcagttttgccacagtgtcttatcccatcaaactcatggctggagttgccccaaaagcagcaacagggaaattcccatgagggaatatcccatcccgagatggggccagttgggattccaaagaaagaagcactaaataaatgccagggcggccggtcagtccaaagcatttattagtgcaacttatgttgaaagtgctgcagtgtatcctcaagacagtgagagaaaaggggtgttctacttagggcattagggtgtggagactatatgcgggtttaaggaatttggctcagagccggtactagtttctttcagtgttttgtgcatcaacctagatacctttatcagtgcctgggaatgttcaagggtccagtctggacctaagcctgctgggaaaaaccagcagctggaattagccgggcatggtggctcatgcctgtaatctcagttactcgggaggctgaggcatgagaattgcttgagcccaggaggcggaggctgcagtgagctgagattgcaccattgcactccagcctcggtgacagagggaacttctgtctcaaaaaaaacaaaacaaaacaaacctgcaggtggctgggtcacagagtggtcaggggattgtgtaatttttggttaggacaccgaaagcggcggtggggaggtgaggggaaacctgggggtcccacacacagctattagatttccctcctaaatcagtgttagggcctagatttcagggagccagattctagccctcaccctcattctttaagtgggcagggacacttttttcctttttccaaaaggaaagtcatcaaacaagcatgtggccctttcactttcctcttggccttaaaaggttaatgaacaaattcaccaaatatttgttgcacatgaggtactgagttaggttttggaaatagagcagtgaaccaggtatgggaagaaagacaataaggcaattaatacaatgagaaaattatgaaactgggtgtggtgacacgtgcctttagttccagccacatgggaggctgaggcttgagccctggagttggaggccagcctgggcaaattagtgagaccccatctctgaaagaaagaaagaggaatatcagtcagtggaaaatgttatagagaaaattaaaaaaaagatagaacaatgtgatagcaagtgacaggatggctagattgaaaagccggaggacatgaccttggaggtgacctttgaatgatgaggagggaactgctgtgtgaagactgaggcaagggctttccaggtggggggaacagatggggcaaagggtgcatagaagcatgaacttggtggacttgaggaacgggaggagcttgctaggtgaggtgcaagtgatgaggagtcaatgggggacccaagtgccagtgagtttgggctttccttaagtgtgctcgaaagcctctggaggcttttatgaaagagaatacatcttaggagcatttcaaaagatgtctcggtggagggctcagttagagggagtctttcttgatggagaagagaccatagggagcaagaatagaagaaggtgactcaagtaggtttatttctgtacgccaggtgacagacgatgctgtcttgaattcaagagatggagagggagaatgggggaaggtttaggaggtagagggcctattgaaggattcgatgcaggctgtgaacaaaagcagacaattgtgggtgacgcttagatttttggtgatggttgggcagtggtgtttattgagatgggaaacacttaggtgaaagagcttgtaaattcggagaccttatacaaaggtagtggcttagataattatgttagtagagttctttttttgttccattcttaagtgatctctctctctctctctctctctctatatatatatatatatatatatatatatatatatattttaaccaggctgtgtgttgagtgccttacaggcaccatctcataaaaccttcataagacccctatgaagtcagtgctatcaccagcctcactgacagatgaggaaatggaggcttctggaggctaaataactgcccagggtctcatcctgagttagtagcagagctggacttcgtgtccatgtctggctcctttccgtcttttccttggtgatatggggccatgccaggcaactctttttggccctggaactatctgagaactcccaggccctttcctgctccaggcttgagtagttgacctgaggttttctccagtggtgagagattgtcatggagtggggtgagagagcaggcggaactatcaggacaggttttagagtttatgtcacctggtgctttggctgtggtggggttcttgcagatgtgtgaaatgggaatttttgagctcataaattttcaacttgagtttagaacacttttttgtatggaaggccacttatttcatgagttttagttctgtattatgaatcataataatgcaagactaaaacttacagactgacattcaaagatgttgccttctgccagctagtgtgttctgccttgctgtcctgtttttaattttcacattggcgaatggctttctaatgttgaaaaaaaatattgattttgctgtttctggagtgaaaggctcaccaaagacccagttctctttagtgtaacgtgagcctcagtgtgcccaggggtctgcagaacagctgtgagtacacatggcaggagaattacggccaagccagggccttaaacaagaggctgtgcgtgcgtgggcgtgcatgctgaaagttcagaagactagagtgtttgatcgccttctggaccatttctgagcaggtgccaaccacttctgagatgcttcctctccataactctcctcttctctgtgtcctcttattttaatccctctttcaaaataagagctgtgcaaagaatgcaaagaaacaaggaaagggcatgcatgctcatgatcacagataagggcagacaggctgactgggtttgaagcatgatttagctatttacaagccacatgatcctgggctaaatatatagccacgctaagcctcagtctcaccaagtgtgaaatgggaataacaggttttacttatactagtcgtgagaataaaagaaaataataatggactgggcacggtggctctcgcctgccaccccagcactttgggacgctgaggcggacagatcacttcaggccaggagttcaagaccagtctggccaacatggtgaaactccatgtctactaaaaatacaaaaattagccaggcgtggtggcgcaagtctgtaatcccagctacctgggaggccgaggcaggacaatcacttgaacctgggaggtggaggttgcagtgagccgagattgcaggttgaatctgcacttcaaccccaagggggaggttgcagttcagcctgggcaacatagtgagactccgcctcaaaaaaaaaaaattagaaaaagaaaataataatggtagtagcagtaatttaggttcacaatgctgattcttaaccccaaacccagaaaacgatgtaactctcagttggcaagatgggggcctgatctcaattcctttgatggcaaaattggatcttaactcatgtgaggctgcttcagatttcatttatcctacttacaagaatatgcatatgtttccctatagaaacattaatgcacttgcttcaggcctgccactccagccattgctgaagtattacatgatctgtggttatatgcaatgtatttattttctaaaatctgaaaaatctatgagctctgaaacatatctaacctcaagagtttcagataagtgattgtggaattacagttcccagatttagctaactacatacatacgtacatacaggatgcttagtgaaatttgattgcagatacacaatgactactttttctggtgtatgtctcatggactatttggtacctacttattctaaaaggtggttgtttatcagaaattcagacttcactgggcatcatgcatttatatggtaatgtgcccaacactattctaagcactttacatatatttaatttgcataatgattccatggggtgctattattatccccattttcaggtgaggaaactaagacacaggttaaatcacctgcctaaggtgtcttagctgctgcatggtgtttctctcattcaaacacaagtggtctgactagagtttgtgacgataccatattgctaaaaaagggcttagcgtaggtcctggcaaaaaggaaatactcaatattggtgattttattattgttaattattattattactactctctcccttcatccttgattaaatctaaaaacagaggctggtatttagggaggatgcctccacctctaccacacaaacagcaactggtgactgtgtgacaattaaccttatatatagtgacttggaagagtacacagcctgagctttcacagatttccttcatcatcatatttcttttattaaaacaagactctgggttttctccatggagctgagtagggggaaaggcgttttggtgtcttgacaactatggtcccttgcaatttgaagtcacagttcccctgcagaaagtgcagccctgtgccccgctgtgaattgtgaatgatgaattgggaggctgcaactagagttttctcactcagcaggcttctttccaaattcaatgtgagtgatgtatttcccaacttttgtatcagggccaaggtcagagctgaccttgcagtttttctaggtacctgcaagaatactggcgagatggagaggatacatttgagggttgggggcagggaaagtttgagaaggaggctggaaaacagtgtactcatgtgggtaaaaatgcgtgtgagggctcccctgtgtgactgtaaatgttgtgtgggactgagacgtgtgatccatgtctctgaggtgtcacatagcagattcattctgtggctgcatacagtaactataaataccaaccaaaagaaagattttgttatgtcctagcacatttgcacattaaatattaatgataaaatagtagcagtaagtggccgggcacggtggctcacgcctgtaatcccagcactttgggaggccaaggtgggtggatcatgagatcaggagatcgagaccatcctggctaatgtggtgaaacctgtctctactaaaaatacaaaaaaaaattagccgggcgtggtggcgggtgcctgtagtcccagctacttgggaggcagaggcagcagaatggtgtgaacctgggaggcagaatttgcagtgagctgagatcacgccactgcactccagcctgggcgacagagcaagactctgtctcaaaaaataaataaataaataaataaataataaaaaataaaaaagtagcagtaattaaaaatgtaattagagacaactgatgctagttctgaagcacgaaaatgttaagccaatttgaaatttatcaaacttctaagtctttatttttatttatttttttatttttttaagagacggggttttgccatgttgcccaggctggtctcgaactcctaggctcaagtgatctgcccacctcagactcccaaaatgctgggattacaggcatgagccacagtgtttggcttctaaaccaattttttgctagtgttttttttttgtgtgtgtgtgtgtgttgttgggggaggtttgaaaatggtggggattttgaggccctatagaaattagaatgtttttatattattcacttcattgaagacaaaaggctgtttgaaatttttgtagaaagtctaggctggagaaatatctagccttatttttaaacctggaggaaccacacatgtaaccaaactgtaagatatgtatctaaattgacacagattgtacttttttggggcagttcattcatatttagctgaaatctctttgggttttcattacttcaaacaaaaatatattctggcattatttaaagtatgaaaattgcccagaatgtcatcttttcaatgtcattaaaatattgtctggttttttaaaaaaatcaattggtacataactttgtgctagaatggtagccagcaattgcatggcagctggaagagcattggagttcaatattgggaattctcattttgtaatgaagggttttcttttaaagttcatggttacatatttatgcacacatctcctacctgtgggttatcttctatatgtaattgtgtatgggcttatgaaagaggaaaaaaatggtagatcagtctattgtgtctttctgttaacttatacacatactcagttctactgctagacctgggtccctcatttagaacaccctactttggccctcctctggccatgcctctccttcagccaaggcgtctgtggagccaagtaggcagccctctccttctacaccccagaattccctgcctgatggccccaagctcccttccaggatctctgtgagtctcttctggggcttcatttctctgagagttacactgaatatcaaggagctcaagaatttgaaagtattttgtaaatataacttttaaatatttagatagatgacatatgaacttctgtttccattagccttcactgtgaggcaaaccacccaaaccatagaggcctggaacaaaaatgattggatatttctcatgattttgtggatttggtggatggtttctctgccgatttttgcctaggctcatttgtgccactgcattcagctagatgggcgcctggactggaaggcgaatgatggcctcagtcaatgcctggcagttgtgctggcttggttcttctctatgtgtcctcttgtcctccaggaggctgcttcaaagggcagctaaagggctccattcaaagggagttaatatggaaggtgcaaggcctcttaaggcttagctttgaaactcacagaaagttacttctgccaattctgttggtcaaagcaagtgacaaggtcagtccaaattccaggcaggggaaatagactctaccacttgatgggaagagcagcaaggtcactttgcagaaggacaagcaggatagaagaaatagtcacagttatctttgcaaacaattgaccacacgctctatttgtattcttgtcccataccccacagatgttagggatggccctgcaaaaaccagtgatgataataccaccaaacttttatccattccctttttttttttttttttttttgagagacaggttcactctgtcaccccaggctggactgcagtggtgcgatctcagctcactgcaacctctgcctcctaggtttaagtaattctcctgcctcagcctctgagtagctgggattacaggcatgcatcaccatatctggctaatttttgtatttttagtagagatgggttttcaccatgttggccagactggtctcaaactcctgacctgaggtggtccacctgcctcggcctcctaaagtgctgggattacaggcatgagcccttgcacccggcctatccattcactttgaatgtagtcatttcatatagtgaggtagattcagagagtttatttaaggggaaatataaatgccaaggcttggaaactggttgatatggaattgttgtttaatttggaaaagaacagtatacaacattcagtgcttgtcattaatcctatgattttctttctaaatagctgctgccatcttaagtaaagtaaatctgtctgtggatccttgtgataatttcttccggttcgcttgtgatggctggataagcaataatccaattcccgaagatatgccaagctatggggtttatccttggctgagacataatgttgacctcaagttgaagggtaagtttctactggggtttggtgatacactttatagagagcaatatttgacaggaaaaacatagtttgggatttgaagcatgacttctcactttttaactaccatgctaaattcatttccaagaatttttaaaatgaaagattgaaaggaaagtttgcagaattctggactcccagatctcaacataagactaatgtaggttgttatgttcatgtttggtaatagtaaattctactgccaaaggataaagagcatttgattgagattggaagcaaaggaatagttaatgaaaattatatcaatatactcatttgttgtattcagagtaaacttcatttcttgctcattgtgtcctggattttcatggcttacaaaatgtacttaacacctcatcatcttttgacatcacttttgagaactctggatgaccttgtggttgtcatattgttcttgttaacttctaagttggctctagggagattcacttttctcccatggccactctagcaatgacaagctcacacacacatactcacacgtggatgcatagaaacatacatatgttctcaaatacattcccctgccccccgccaaagttggaaatgtctgttattggaggatattctgttagcattggatctaatttttatgctaagctattggagaaggccacctcaggagggaagtaggaagatttcaaagccagataaggtaattattttgagaaggcaaaaatagtatggtttttttttttggctctttttgacaactgtgagttacaccatgtaacttgcattcagtaacacctacaaagaactcctgagaaattataaaaatcattttcccttcccatttacattttcccaagattttaaatacatgaaaattaaatatgtatcattttacaataagtaaaactcttggcaaaataaataattagatacctattgtcaattgtaaggaaaaatgtacttaaatttcacaactagatataaatcacatggacttatattttctattaggagacccaaatttagtcttggaaaattataaatgggaatttacaaggatgtcagggttttctcctaacccaaaaggaaaattctcatactataaaatcataaataagaccttgaggagtgagtttactaatacttttttccctgtagaacattaattcatgttggtctttgatttaccattcttgtccatttcctatttcccttctctggcttttcttaatagacagatgtgtacacacacatgtgcacacacacacacacgcgcgcacagtcatgcatacagaaacattactgaaagataagaaaactacaagatttccaggcatatgctccttttgcatttgttataacccaaagatttctatattcaggacatgaagtggttaacgataacttaaataactttccaggggtgtctggaattttaacataaaagttaaaatcagtgtcaatatgctttgtttgaggagggtactgtctacaggctccttcaaaatcaatagaaatgcaagtaaattgttaagcacagggtttttgtatttgctagcttccttttaaaaatcaaaaattttatttctcagctccattgaagaaataaaaaaagagcaaaaattagaagaaaggtcgctcataaatccgtcacaagaaataactgctaataaagcaactggggatatttctttccaggttttgttgcatgtgtgtgtccatatgcataacttcatatgcacacctatatattgtaaaaattagctgatattatacatactactctaacttaatttttaaaattagttggtattatacatactactctgtaacttaaaactatgcattcctcatagacatagattatgtcagtagataacttttcttttctttccttttctcttttcttttctttcctcttgtcacccaggctggagtgcaatggcacgatctcggctcactgcaacctccgcctcctgggttcaaacgagcgattctcctgcctcagcctcccgagtagctgggattacaggcacttgccaccacgcctggctaatttttgtattttttagtagagatggggtttcaccatgttggtcaggctagtctcgaactcctgacctcaagtgattggcctgcctcagcctcccaaagtgctggggttacaggcatgagccaccgcgcctggccaacttttcttattataaataacactgtaataaacatccttgtgtacacatctttatgtccttatctaaatgtatccttaggataaatttccagaaatggaattattgggttgaaagagtactctaaatttcatttttgatgcatatagccaaattgccttttagaaagtttatttcagctgggtacggtggctcatgcctgtaattccagcactttgggaggccgaggcaggtggattatctgaggtcacgagttcaagaccagcctaacatagcgaaaccccggctctactaaaaataaaaaaattagccaggcatggtggcacctgtaatcccagctactcagaaggctgaggcaggtgaatcacttgaaccaggagggagagattgcagtgagccaagatcatgccattgcactccagccggggcaacaagaatgaaactctgtctcaaaaaaaaaaaaagtttgtttctaggtctttatatttttttgatgttttaaaggataactttttcccatcaactgctttctgtggtataaagtagaagtcatcaaaccattgccagtaggcaaaatccagtccactgcctggaagttttattggaacacagccacatccattcgcttatgcattattaatggctgcttttgcactccaatggtacagtcgaatagttgcaatggaaactggatggcccaaaaagcctaaaatatttactctttgacctttatagacagtttgccaatccctgatgcctagtataaagtaaagctttgaatgtatgtattggattcaattagaactgtcttattagttgatagctccttggtagcttctttgaatttcttagatagttaataaagttaagaaataccagaacaggctgagcgtggtggctaacacctgtaatcccagcactttggaagaacaaggcgggtggatcaccttcaggtcagaatttgagaccagcctggccaacatggtgaaacctcgtctctaccaaaaatacaaaaaaaattagccacgcatggtggaaatcccagctcctcaggaggctgaggcaggagaactgcttgaacccaggaggcggaggttgcagtgagctgagattgcaccactgcactccagtctgggcgacagagtgagacttcatctcaggaaaaaaaaaaaaaaaaaaaacagaacggtgttgaaataatagcaatgataatgggtgtaattttcttatgccttgcttgggtggtaatgcctccagtatttcccctgaaaacgtacactttttttgtttgtttgttttagatagttattcttttttgtgttctgttgttcctagtttgcaaaaagctgctgctcaagaaaaatgcctctttgccatttatcaagagactcagatggagtatctcttttaacttatcttgatttacccatgctgaactaaacttataattttgaaataaatcctgcctattaatggtttgtattttttaagacattaccagaattgaagaagctagcattttgtttcacacatttgtctctatatttatgattcatattggtttgtgattgttttgtgtgctaggtttgtcgaattctgttattaagattgtgctggccttgtcaaacaaagtgggaggcttcctatatgtgtttctatgctctgggaaagacataattcaataaatcccaagttactctatgacaagcactgtaaaggccaaattcacaaactgacattagggttcttgcttcatatgtcaagaaggagagcaaatggtggaaaaggatctcttaaaattagtattttttaacaaaaataggtaaaatataaaatagctggacgcagtggctcttgcctgtaatcccaccactttgggaggctgaggcaggtggattgcttgaggtcaggagttcaagaccagcctggccaatgtggcgaaaccctgtttttcctaaaaatacaaaaatcagctgggtgtggtggcaggtgcctgtaatcccagctacttaggaggctgaggcaggagaatcgcttgaacccaagaggcggaggttgcattgagccaagatggtgccagtgcactccagtctgagtgacagagtaaaattctatctcaaaaaaaacaaaaaacaaccgcataaaatatctattagatttaaaaactttttattttgagataattcaaactttgataagttgaacaaatagcacaaggaacttctatgtaccctttacccagattccctgattattaccatttactacatttgttctattatatatatactttcattttccatctgtaaatatatatatagtgtatcatcctctacatatatacttatatacttttatacacatgggcagatagtatatgataaaataatatatctataaatgtagagataaatatcgatataaatacagatacatagatttttttctgaactctgcaagtatgttacagatgattagatattcttaaagtgtatagaggttttcaaatgtcaaatgtgctaaaaatcttatttcttttcctgaaacactgaatctttaaattctatctatatcttttaatatattctatatctatctatttatgtgtctgtcagtctagctacctagtcatccaactatctattcatttatcattctatccaggtaatacaggctcatcgtagaccaaccacaaataaacagcaaaagaagcatacttcaccacccagcaataacaactttttaaatgcaaatataggtataaaattatacatatcttctaagggatcatataatacattctatttaattaatttatttacttatttatttatgacagagccttgccctgttgcccaggctggaagtgcagtagcacgatttcagctcactgcaacctctgccttttgggttcaagtgtttctcatgcctcagcctcccaagtagctgggattacacgcatgcgccaccatggccagatcatttttatatttttaatagagacagggtttcgccatgtttgccaggctagtctcaaattcctggtcacaggtgatccgcctgcctcagcctccccaagtgctgggattacaggtgtgagctaccgtactcagccggatatactataatttacttaatcaatgcctgtgttatttaggttattttttatgttttcttcattgtaagccacttggaacatgagtttagaaacatcaagagctggatttgaatcctgattccctttcatttaccctctatatcactttgggccaattactgatctcacctagttcagttttcttatctttaaaatggagataagaatatacatatcagagtatgcaaaggcatacagagtggtgtaatagaccttggactcaaaggggggagggtgggagaagggtgaggaataaaagaactacaggttgtgtacaaaatacactacttggtgacaggtacactaaaatctcagacctcaccattatccagttaacctacataaccaaaaactacttgtaccctaaaagctattgaaataaaaaatatatatattttgaaaaaaggggaaaaaaaggaatacccatatcatagggattttgtgaagattaaaggagatgatttatataaattacccagtccagttcctggcacatagcaggccttccgtaaatatttgtcctttgttcctcgctttgtttcaaagatagttctaagattcatgaagtaatgtctatcaaatgctttaagttttattctggtattatcctttgtgtaaatatcatgtgctttcaaaaatattgaatactgtcaagatatttttgctcactcttgataaaaagagagaacatcccaaaataaaacccaatactaccaatcgaaagaataccattttcttaaggctgatagaaaacacacagatacggctgtccaatttgtgaaataaaatggacttgacagacctggctgatgaaaaattgccctctactgaagtgagcaacctggctttgtgaatttttttctttaaatggcatataagactcagattccgacttgggaaataaaattacttcctattctctccaagaagtgagattttttaaaaagccgaatataatcatatgtttgtcttaagatccacattctataaaccccccaaatttgtcttcatgtgaccatgaagaagacacagcatgcattgcttatgaatgagcagatggaaatttagcaaatgagcacttatgaaacatgaggcaatgaatgagatagaacacttatgtcacacagaagacagatgactcaaggtacggccagatcatctctattacggaatagctatctttgccaatattttgtgaagaaatgcaatatattattttcaagcccagcttcagcagaacaataagatgaagtagggactctgcattaatgaacagaaagagatgattgtgattcatagaccatttatttgtaaataccttctggctgagattcaaatagttctcgtaattaaacaccaccccctccccaaataatctttttttctgtaaatgatcctagccaaatcatcttttgcagacaatggaaatctgaaaacttcagttcctataaagtcatttagtgattaggaagttcagattattgaaaacagtgaattgtcattttcctcatgttgtatgtatagtagagctttgacttcataaagttcttaattttttaaaattattttattattattttttgagatggagtttcactcttgttgcccaggctggagtacagtggcaccatctcacctcactgcaacctccacttcccaggttcaggtgattctcctgccttggcctccctagtagctgggattacaggcgcctgccaccatgcccagctaatttttgtatttttagtagagacagagtttcctcatgtcggccaggctggtcttgaactcttgacctcaggtgatccgcccacctcagcctcccaaagtgctgggattacaggtgtgagccaccgcacccggccacttcatgaagttctttgaaacaagtaatatcagactagcaaatgtggggatgcagtggggaagtgctaaggaccaagcatccattgtggtgggctttttattactagtgaaaactcagcttctgtaattttgtgtgagtctcctatgtaaactgggtgcaccccttcagagaagattcccatttttctcagatcatgctggctctttttcacgtggccacatagaaagcaacaaattgccaagttacaaatatatcaccacagtcctatatgtgcaaaggggtgctgcatgaagatttgggcctgtattgaagacttttggaatgtgagattaaataattttacttgaaaagtttgttgttattcatagttttcctgctctgatataccgtttgagtattggtaggtgtgcgtgctgcatggagtgtggggagaaggtaagaagttgtcagattagggctgggcgtggtgactcacacctgtagtcccagcactttgggaagccgaggcggttgggtcacttgagatcaggagttcaagaccagcctggccaacatggtgaaaccccatctctactaaaaacagaaaaaattagctgtgcatggtggcgggcgcctgtaatcccagctacctcagaggctgaggcaggagaattgcatgaacctgggaggcagaggttgcagtgagccaagatagcaccactgcactccagtccgggcaacagagagagactccagctcaaaaaaaaaaaaaaaaaaaaaaaaaaaaaaaaaaaaaaaaacagacctagtgctagatatgaaatattcccaacacacaaaataatgataaatgtttgaagcaatggatatcccaattacccagatttgatcattacacattgtattcttgtatcagataatcacatgtaccacataaatatgtaaactataatgtatccataatcattgaaaattggaaaactggacaaatatagaaatttttttttctgaaggctctgtggaagatgtgaatgtatctctaggatatgttctctttctaaatagctaaatgaactaaagaggccatcagagtgactactgtgtgtaaaagcttgtgttttggtagttctgacagtcagcctgtcaggttttctttttttttttgaggcggagtctcgctctgtcacccaggctagagtgcactggcacgatctcggctcaccgcaacctctgcctcccgggttcaagcaattctcctgcctcagcttcctgagtagctgggattataggcatgtgccacatgcccagctaatttttgtatttttagtagagacggtgttttgccgtgttggccaggctggtcttaaactccgatctcagttgatccacctgcctctgcctcccaaagtgctgggattacaggtgtgagccaccgctcccagacaggttttcttcttatgtgtgcttttccaccctcagtgcatgtccttgtcttactttttgactcttgtctgctctaagccttccattttaagatctgatctcttcccctattgctttaatgtagctcctctgtcattagcggtttctactacaaataagttgggtatgcttggtaagaaccagctctgttcattccattcattctaagttgtatgatattcagctggcgggaagttcaccacttcaaatagattgaaatgcacaacattttgattgtactactctgtgaaaatagtcttatttaccaagcatttacttttattcctggcactaattgctttcaatcgtaagtaacagacagcccaactcaaactggcttaaacaataaaatatgctgattcatgtaaccaaaaagcctagtaattatgtagacttcaggtaagggctgatccagcaactgaaccatgtcattaaggatcacattttttttttctttctctctctactctgacatccaccatgtcgtatttccttctaagtctgtttggtcatgagattgttgctaataaccagaatttatacttcctcattcatatctagcaagaggcattgtgttagacacaagggatacagaagtacaaagattaataaggtcccctaggctgggcggggtggctcatgcctgtaatgctagcactttgggagcctgaggtgggtggatcacctgaggtcaggagctcaagaccagcctggacaatatggtgaaaccctgtctctactaaaaatacaaaagttagtctggcgtggtggcgggagcctgtaatcccagctactgggaggttgcagtgagccgaaatcgctccactgcactccagcctgcgtgacagagcgagactctgtctcaaaataataataataataataataataataataataataataatgtcccctagactatcctcatggaaattacaatctgcatcttatgagtgttcccataggtattgtaatcaatactctagaactgtcctgctcagcatggtagccgctagccactgtggcttttgggtacctgaaaatatggctaggtggaattgaggtgtgatgtaagtgtaaaatatacaccaaattttaaatacttcattttaaaaaatgaaagcactctcattaattgatagtttcatttataatcagtaattgcatgtagaaataatattttgagttatattaaggcaaataggatataccattaaacatctcacctgtttctttttacttatttaaatttagctacaagaaaattaaaaattacgtatgtggtttgggtaatatttctaccagacagcattgctctagagccctgaacaggctattagcaaggtgaaatatctgggaataactcaaatggatttcagtgctagagaaagctcagagaacacctttatttaaaatagtcctctggctgggtgccgtggctcacggctgtaatcctagcactttgagaggtcaaggtgggcagatcacttgaagccaggagtttgagaccagcctggccaacagaataaaaaacaacaacaaaaattagccagacctggtggcatgtatctgtagtcccagctactcaggagctgaggtgggaggatcacttgagctggggaggccaaggttgcagtgagccaagactgcacaactgcacttcatccagggcaacagagcgagactcgatctcaaagaaaaaaaaaagaaagtcccctacccaatctccaatccctttgtatttgtgtcctttgtggtccttataaccatctgaaatgatgtcatttgtgtacatgcttgctgttcttctcacttacacccatccccgctcctgtagatgttaaactccatgagaaccagccccttgtccattttgggtgtcactgtgaccgcagcaccaagcatagtgcctgccataggaggtgctcagtaaatacttcctaaagaaaggaagaaaagaatgtgccctctgtggttggctgagtgcagttgtgggggcagctgactgggtagggaggagtggctttttcttctccgtttcactccatctcctcctgtgcccacagtcccagaagactcttgagatgcaactggggcttgcccctgaaaggaggggaagcaaaatcatcagtcattttccatttgtgttctgggcctcaggaaggcaggacagggacgtgggcaatgagacaggcctgggcccttctaagactccctgttggtgggatctgatgcaagttacagacaagaaaaataacttgcaggtggttcaagtttgggttctgagaaaagaaaaaaaaaaagggattctgccacttatcagctgtgtggccatgggcaaactacttctttctgagcctccgtttcttatctggtgatactgttggacaaatccaatgagatgcgtagaaagtcttctacacatggttcaataaatggaatccgttgctactgttaatttcacaaggattaatgttttaaaagcacttggcacatagtagatgcttaagaaatgttctgcagccaaataaaaataacttagaagaagaccttgacatcactattaaaataaaatattgtgatctagttttttttctcaaactccccacatgcctgtaaataaggaagctggttctgaaagaggcaaggctggagataaaaaacagcagatgaggacatttgtacgtattcccaacttgcattgccagaccttggtcatgaccctaaaccctggacggttttgataatctaattgtcagataacacattcattggaggccatgtgatttttaaatcactcccacaggaagagaaagaagaggaaaagggaattggtaaaaataagaataactatcctcttacgccgctctagagcttctctggatgccacttaaaaaaattctaccaatttcccttcttttttcggacatggagtctcactctgtcgccgaggctggagtgcagcagcacgatctcggctcactgcaacctctgcctccccgattcaaatgattctcctgcctcagcctcccgagtagctgggattacaggcgcctgccaccacgcctggctaatttttatatttttagtagagacagggtttcaacatgttggccaggctggtcttgaacacctgacctcaggttttccacctgcctcggcttcccaaagtgttgggattacaggtgtgagccagcgtgcacagccctcatttccctttgttctctcttctttcttatccctaggggatccttaacttgagtccacagtcttcccacaagagggctgtcaatacaattcaggtacttggatgggaaaaaattgcacctttgttttcactaacctctcacagaattttagcattttctttaattatgaatgtaggcaacaaaccctggtactattagcagtgcctgtgactttgttaccaacagcaatcatgattatttttctaccttattgcagatgttgcaggtatcttgaaatgttatgtacacgtatcactacttcaaaattatagtagttgtcagactcaaagttagggcttggtatttaatgaattaatcaaatagcacatatatatatttcacacagtaaaaaaagttgtgctgtgttttgaaatacctgtttttctttgtaagcctatgtttcttattttatgtacttataaacattattctcagaatggtccataggtttcaacagactgctcaagagatgtaggcagaaaaaaccattaagaaccccagtgtatgtaaggattgctagagcaagattcaagaaggcagttttatttagctccagcctcttgatccatcttaattcaggtgcttggagtggcattgactattacgtggcctcatgggtccactcatgcccaaatctttgagtacttcactgtctagactcccggggtaatgagcatgttactgacagttaatatgtgtttatgaggatattagatgaaactggagtttgtaccagtaccaacccttgaactgattaaatgcagtctttatgattgtctatgccttggaacctgtatattttcaggtgaaattactaaggcttgccatgtgcttatcatgaaagcagggcattaaaggtcaattctgggcctggcagtgtacatctgtagtcccagctactcaggaagttggagagggaagaatgcttgagcccaggaattcaaggctgtagtaagctaagattgtgccactgcactccagcctgggtgagagagcaaagccctgtctcaaaaaaaaaaaaaaaaaagtcaattcttattcgaagtgatatagcttttatgaacagtgcaaatgattggaaatagtaatacaccaagtagagtgtttatccataagcagatactacatggtgtacaacagagctagcttgttattcaatgttgaagacaggggctgttgattgaacttagaagggtggggagtaagggagtaggggaactgcaaacctggaggtgctgggagctaagtcctaagggtcagatccaatatatatagcttggctttgttggaaggaaggaatgaacagggcctttggtgagagatgacaggagataagagatgttgaaatccattggtgagatttttgacttgcagcagggaatgctaaggtttctgagaagtggagcaatagcctgcaaaatgctatgcatgggaatattggctgaaaaaaatgaatgggaaagcagacaagggggcatttttgtagcataaatattgccacacattatgaaaagtttcctgtgagttagcttgaatgttgtaggaggaaagaaacatttcactttagaagattgtgggctaaatttaggttcctttgactaaatataagttcctcagcatgactaataacacaggatatgtgcatcctgagaaagacgtatacacccacaatgacacttttccacctgcccacacccaggtcctgttttacaaggttggtatgtttaagtgtattttactttgcagttgttcagaaggattgcatatttttgaaaaactacttcctgaaagaggatgactgtttggaaaggaaagaaaaatcctagctggctttggtggtaacagttgggaggcatacccacgtgagctttggtggtaacaattcctgaagcttctccaagggtccacgtgttcctgctgttggttgccagaagccagaataataatggagctgagaatatgggatttttgtgagaaattccaggggcattcagatttcacagcagaagcagatgactcagatgtcctgcgccttagagagatgcgtgaatcccttacctttaccatactctgaattggtcaacggcagaatggaagccctacaaaaattgaaaagttggttgcatgctaacattcatagtggaactgagttgaaaattttatccttgtatttccagactctctgattagattgttttagctatgctctcacccccaattctgagaacttttcaactgtgactgaggtgtggatgggtcaagcatctttacaatgtgacaaaatccccatttctcctctgatttactactaatggggagataattcattactgtgaagtgagcctttaatagattaaaaaagttgtaagaatatgtcacatagggcaggacctaacagggctgggcactttattgaggtgaccttatttaataatatcattagttatcatttattggactctgaactgagctcccaacacggaagatgtaagatttatctgcattttacagatgagaagacagaggcaccaagcagtataactagcccaaggtcacacggctgatatgcaatggagccaggattagatttgggccatttgacctttactgcctggtaaaagccctgaaaactaggaaggtgatattattcctgttttacgattgggcaaactgtggcttagagaggtgtattagtctgttttcacactgctataaagaaatacctgtgactgggtaacttgtaaaggaaagaggtttaattgactcacagttctgcatggctagggaggcctcaggaaactgaaaatcatggcggaaggggaaggaggcatgtcttacatggcagcaggtgagagagagtgagcaagagcagggcaaactgccttataaaaccatcaaatctcttgagaactcattcactatcacgagaacagcatgggggaagaatgcccccatgatctaatcacctcccatgacgttcttccctcaacacgtggggattatggggattacaatttgagaattctgccactgaaccacccatgcggggattagaatttgagatgagatttgggtggagacagagccaaaccataacaacaggttaagtaatttacccatattcacacaattagagacctataaagataccttccagagtagtattgtccgatagaaatataatgtgagtcacaaatgcaagtcacatgtgattttatgttttctaggagccacactttaaaaagtaaacgtgtcagcagttgggatgatatattttatctaccccaatatatccaaaatactgttatttctacatgtaatcaatgtagaaaacttacccatgaggcattttctcttttttctttcttactaagtctttcaaatgtggtgcatatcttaaacttgcaacccttctccatttggaccagccacattgcaatacccagtagcctcgtgggactactgaaaagtacaattctagagtggtggttctcaacccttgctgtgcagtggaattactagggagcttataaaacacagatgcctgaggcccattctcagagattctcatggaattgatctggggtgctgcttgggtgttaggatttttgtttgtttgtttgcttgttttttgagacagagtcttgctctgttgcccaggctgtagtgcagtggtgtgatctcggctcactgcaacctctgcctcccaggttcaagcgattctcgtccctcaacctcccgagtagctgggattacaggtgtgtgccaccatgcctggctaatttttgtatttttagtaaagacggggtttcaccatgttggacaggctggtctcgaacccctgacctcaagtgatccgcctaccttggcctcctaaagtgctgggattacaggcgtgagccactgcacctggctagatgtgaggatttttaacgacctccctcccgaccaggcagtgcccaaactaactgagtagaaaactgtagcctttgtacattagagaagtttctgtgagttttctgagatgagaaccattcagaatgactgctctggcagtatgctttgctagttgacattaatgaatgccaagcaatgcccaactaatttattaatttctctccatttacatttcccaacatgttgaccaagtctccagaataatataagaaaagagattttctttctcttgctgatttacacattggtctggatacataccagtgaaagtaaattcagacataaaattctactcttttaattgaggtcaaaggtgttggtgtcagcctggaatctctgagctgtggagaagaggaagttggggtttgaaagctgcaggtggctgccagaatgagacaagtctagtggggaatgcgtgggaggtgctgggtgaagaaaggaggcaattgtgtttcgcctgaggtctgaaggctgcatagcccgctgtgtctcaggacgttcacaaagctgccctcaccagaagcgtcgcgtccaccttcccactggaccaaatttttgattctgcccctgaaccctggatatgaaacccaatactgaagaattaaaatgtctcatctcacccggaggttcagttgtccttaaaatgcttttggattcatttggaataatttctatattggcttctttcatttaaatccaaatatagcttcagtatttctgacatatttattactttccagaatggaaatactagttcttctgaagtggtagctatttagttatagtcaattttgttagttatgtttatttgacttcaaattaagccagagaatatgcaaacactgcagtgtcttccacagccttaccaaaatgaataccatatttcatcaaatcaaaaatattgtcaactgtaagatgcaccattgtttcacatgagctaagaaagagtaagctattacatgacgcttttttatcacttggaattttattttgtgttcattgaagttcttttagcctgacttagacataactgtttaaaaatattttaacttttattataggtttaggggtacctatgcaggtttgttacgtaggtaaacttgtgacttgggggtttggtgtacagattatttagtcactagacactaagcatagtacctgatgtttgttttttttctgaacctctcccctcttcccaccctccaccctcaagtaggccccagtatctgttgttcccctctttctgtccatgtgttctctcattatttagctcgcatttataagtgagagcatgcagtatttggttttctgttcctgcattagtttgttgagaataatggcctccagctccatctatgttcctgcaaaggatgatctcattcttttttatggctgcatagtattccgtggtatgtgtaccacgttttctttatgtagttccagaaagttctcaggcgatgcccatgctgctggtttggggaccacacattcaatagctaggctttagtgtgtctaaggacatagtatgtcactgaagaaattcagtacctctccagggtacatggatgttttaatttttcttccatttgtattattattttgatgaaaatgtatatattgcaaatttgtttgccttgcattgggtaaatgcaaaggaagaaagcaggaattttgtatgtctgatcttatggtacagggagagagatttttttccccttaatttgtttcatgaaagatttgttcatttccttttcctttgctttctttatccaacttgggaaacttgaatttattaggaaatctgcatgtaattgcagattaataacctacccattaataccacattagttcatcatgattaatagcatctatgtgaatacttaatgaatttgtaatgatggactatttgctttaaagcgtcaagagaacattccatgtaaaaaggcactacccgtaacaggaaaattaattatatgctggttggataatagcttgtcacaaagaagatatgtttgtttggaaagcctcattggtattgatatttgcagtgagaggtactttttttaaaacattcatgaaccttttaatttgtaaaatgagaaggaaattttattttcatgaacagttaaaataggtgtagggactgatatttatgaaagagagcagcacaaacacaaatatgtgctaatatactcataagtttacctatgtcactaggcagaaagacttcctatagtggccatttagattaagttccgaattgaactgcttctactacccactggtctatcctaaattcacaagttcacttctttaaggctcaagcattttttttttcttttgagacagagtcttgctctttcaccaggctggagtgctgtggcatgatctcggctcactgcaagctccgactccctggttcaagcgattctcctgcctcagcctcccaagtagctgggattacaggcatgtgccaccacgcccagataatttttgtatttttagtagagatggggtttcactatgttggccaggatggtcttgaactcctgacctcgtgatccgcctgcctcggcctcccaaattgctgggattacagacgtgagccaccgcgcccggccggcccaagcatttcttgatactcattttatttcttcagagaatcatttgttttctctactgtcttcactctaattctgtgatgtcagcagtcatcattgtttatttctgtctttgccctatatctgaggaagtgaaggtcaagaagattatgtgacttgcccaaaccaatccagccatataatttgttcgccacagattatgggtctctcatttcaaatgtctccagttttaaccccggcggaaagagttgcaagcgcagagactctgtccagctggtgcctttgaggaaacccaagaagcccagtgtgattggagctctgagttggaagggaagaggcataaatgataaaactgaggagaaaggcgggggccagagcatacaggctttgtaggccgtgtaaagattttagactctatcctagggcaatgggaaggcgtttgtaaatgtcatgttgagggatgtaatgagcgatatgttttgccagagcttgctgctgtctgtggagagtggcttggaggaggtagctgacaaatggcgaccaattcatgctttacaggccccatcatgttgatctattttctagtctggtatccaaacgaaggtggagtttgacttccttgttacagaaaataccaaggcatgattgtttatccttttctctattttctccttaggtcaacatgaaagatcattgcttcttctttgttgcccttgatttctttgaacttaggaaggtattttgtcaagcacccccactcatggggcaaaatctgccagggaagtcatggcagctactggtgggcatggtagttagtactcgttctaccagcacttttgcccctttgggttcactgcttgtgccaaaggtgctgttgcttccccccttttgggggagaggattctggatagagaaggaaagaaagccttacccctaatcactcactgtcggaaacccagttctggaggagcagtctccctcgaccacacattgtggtttgaacagccaggaatagaacccctccttctctcacctcctcatagaaggtgggagtgaaaacaggggttagttgggaagtggctttttaaacctatgtttacagtgttttgatgtcactttcatagacgagggaggaattgtctgaagctcagattttttaggatttcagggatgtgatgtttatctctctcttcctctcttgaggatgtggtataaactggaattgaaaatagatacccggctgggcgtggtggctcatgcatgtaatcccaacacgttgggaggttgaggtgggtggattgcttgagcccaggagttcaagaccagcctgggcagtatggcgaaacctcatctctactaaaaataaaaattaaccaggcactgaggcacatgcctgtggtcccagctactcagaaggctaaggcaggagaattgcttgagcccaagaggcggaagttgcagtgagccaagatcgcgccactgcactccagcccaggcaacagagtgaggccctgtctcgaaaaaaaaaaaaagaaagaaataccctgtatggtattctttctttcactttgagagtctttctggcatagtgctaatatttttttccactcttgaatctgtgaatcaaccctcacatcaaacccctattgcattttatgtttaagaagggaactttttaaagctgaggttggcagaactgagaaacttagacctaaatgggcctatgcaaggagggtgtttccaaaacaaaacaaagtgtttagtgtcctccttgaagaatgttgacactgagttaaaatggagctgcagagtgaggaaatcagtaaagacaggacaaaagttccttttttgatttgaggtagggtaggaaaggcagaggtgggattctgggctggtgatgtttccagggattgcaggcatcaagaaagaccggtgagtgctgttggtttaaagtagttgttctcaaagtgtattcccccgatctgcagcatcaacattacctggcagtttgttagtaatgcaaaatcctgggtcccaccccagacctactgaattagacactcaagttaaaacacagccatttgtgttttaacaagctcccattttttttttttttttaaatttttgagacggagtttcactcttgttgcctaggctggagtgcaatggcacggtcttggctcactgcaacctcaaccttccaggttcaagtgattctcctgactcagcctcccgagtagctaggattacaggcatccaccaccatgcccagctaattttttttttgtaattttagtagagatggggttttaccatgttggccaggctggtctcgaactcctgacctcaggtgatccgcctgcctctacctcccacagtgccgagattacaggcgtgagccaccgcgcctggcctaacaagctctctttattattccaatgttcactcaagtttagaaaccactggcttagactagagcaaaatgtgaggtcaagccttgaggaccagccaactttgttctgttctaacctcaccaggcctcctacctctggttaggtgccccaggagtctgtgtccctggtcaaaaatagggtgacagggcaaagggagtagatggctcatcacaaagacattgcaccactgcaaaaagaagttatgatgtaaccagggaaggtctttccttcagttatggtggagagatctgtcagggaattccatgagggcatagctgcctctcatttagccactgggggcccattctctcacaggaaagcaacttgcagaatttttctgggtatctgatgtttgaattaacaggagtcagagacctgagtccaaatcctagctctaacctttactaactgagtctccttggacaagttcttatagttttcttgcctgcacaatggagttatgatatatgtttcttaggattgctgggcaggttaattgaggttatgtattaatacaatacatctggcacagagcaggtgcttaaaaaatgaacactgtcgttactggtccttggatgtcttaggattgttcaggaacgaccattgcagggagtatataaacatacacggctttttccttgtaacgttaagatggataaaataggaggcagaggccaggtgtgctggctcacatctgtaaccccagcactttgggaggccgaggcaggcagatcacttgaggtcaggagtttgagaccagcctggccaatgtggtgaaaccccgactctactaaaaacatacaaaaaaattagctgggcgtggtagcacgtgcctgtaatcccagctattcatgagggtgaggcaaagaatcgcttgaacccgggaggcagaggttgcagtgagctgagatcatgccactgcactccagcctgggtgacagagtgagactgtctcaaataggagggagaaaaaatataaataattagagttagtagtaaaaatgctatacgaaaaaactgaggatagatttattttaaacctcaagtttggcacagaccttacatggaattatctgctaagatacaaaatatctaaataggaaagctatttatattgagttaaaacataagattggcagattcattgtaatgctatgctatcaaagaataatgctaaaattgaaattattttgaagtataaccttgataataagtataattcttataaattcacttataagtgaacataataaaagagttatcttctgttagagttttgtagtatctggcaattttatataattaatttcattatggacaaggaggtcttttgtgttaacagggacatttttgtgttatttggtaacccatgatttagaatgatttagaggattttaatccccttaaaatcatctctgcacctttttcttaagctgatgctaaccaacaattatcatttataagatcataaaaaatgaacagagaaaataattctgacagcttctatccctatatttaggtgggagttttctagaggaatgagaaagatcagctcctattggcttttcagtatgtcatacagattcagttaatcccatgcttgactggccgtgaggctgaggaactgccaagctgagtgtcacacaattcgtgtgaaaatatatgagagttacgggatccacggaccatgacttagttaacttgaattttattttttaatgagaataacaataagctttgcaagcttatttagagtctgcagctttaagtgcataagggtttaatacctttaatacccatgcagtgtgagttagaaaaatgaaaattttcagtatagtaaataaactgaggagcctggaaaccaaattgaaatctgtagcctagaaaatcaacaagagctaaaaatagtaggattagaggcagcattcaaccatagaccatccaaaggtagtttttaagtaccaccaaaggagaaagcaggccattctataataagttttaaaaaaaatctaggtctagagaacattctgttcattatgtagatgtggaagcttaaagtatagatttggttttccagagttttaatttttcatgttctttttttcaccagaatcagagggcactccctctgatttccaaaagagaaatgttaccacaatctgcatgaaattgagaatttaccttgctgacactgacgtgaagattttagaatgcagttgctggccaggtgtagtggctcatgcctgtaatcccagcactatgggaggctgagttaggaggatcacttgagactaggaattgaagaccagcctgggcaatatagcgagaccccatctctacaaaaataaaaataaaacaattagccacggtgtggtggtgtgcacctgtagtcctagctacttgggaggctgaggtgagaggatggcttgggcccaggaggttgaggattcagtgagctgtgattatgcctctgttctccagtctgggtgacagcacaagaccctgtctctaaaagtacccattaagcaaatcaagcaagtggctccaggattcactggtctcttagcaaagagccagaggccccctttcagaataggcacatggaaatattgcagggtcaggagaaagaacccaaaggagggtgtttttaagtgttcctgtgctcctgagccacttcattcaaatgtcagctcaatcaaggttcttggtaggtttttgctcataggcctaaaactttgcatgtgtggagtttttgaaaaatgttttaggtggatatgtcttagatattgtagaaactttaaatgattggcctgagctgcagatggctgttatgaactcttgactaagcatggtactgtaaaatcctcaagggcctcatccttcctttggaatttcctttttgtattctagagcactcaataaatgtcctgtctgagcagcagaattgaattgagtgaggattgatagtcctctctcagcttccgagcagaactaagtattttttttctccccagtgtagaagagcagggcattgggaatggatgataaagctgagacaattgatgaaaataaaacttaggtacccttaaaactggcgttcatgaaaacagatgaatgaagtcttggatttcattgtatgatatagggactgagatgtgaaaaaaagagatggtgttgttagtatgatcagggcattgctgattgtaaaaagaaataataaaagtagtcagtccagcttctcatagttctttttcaattggatgaaagtctctctcagactttccttgtcaggaattcaactcagcgaacattcactaagcaccagccatgccaagctctgggtcctgggtgttcaaagatgaatgtgacccagcccctgcccaaaagagtattcaatctaatggagcatagccattgttaatgccaatgttttataccaaaagtatttcttggtgatattatttgaggcccaatgaccaaaaatatctttattattaaaattctcacgtttcatcccctttgaggctaggcttgggttacaaaggcatggttgtccacaccatggtcaaaaacaaattttagatggactgtagatctaaatgtgaaacaataaagattttagaagaaaatgtaaactgtcaccgggcgcggtggctcatgcctgtaatcccagcactttgggaggccgaggcgggtggatcacctgaggtcaggagttcgagatcagcctgaccaacatggtgaaaccccgtctctactaaaaatacaggctgggcgcggtggctcatgcctgtaatcccagcactttgggaggctgaggcgggtggatcacctgaagtcaggagttcgagaccagcctggctaacatggtgaaaccccacctctactaataatacaaaaagttagctgggcatggtggcgcatgcctgtagtctcagctacttgtgaggatgagtcaggagaatcgcttgaacctgggaggcggaggttgcagtgagctgagatcctgccactgcactccagcctggcgacagagcgagactccatctcaaaacaaacaaacacacaaaaacaaaaaacaaaaaatagctgggcatggtgacatgtgtctgtaatcccagctacttgagaggctgaggtaggagaatcgcgtgaacctgggaggtggagattgccgtgagccgagatcaagccactgcactccagcctgggcggtagagcaagactccatctcaaaaaaaaagaaaaataaaataaaatgtagactatcttcatgagtttgggataggcagagatttcttgaacgggacactaaatatggtaaccatggaggagaaaaatggagaagctgaactaaaataatttcagtttattacaagataccattaaaaatgaagtctatgtaatgggatattttataatatattcaaaaaggactcgtacgtagaatatagaaagcacttctacaaatcaataacaaaaaggtagattgctctataaatatgtgatatagacttgaataagtattttaccatagaggatgttaattttcttgcttggggttagtgattggaagggagcacaaggggcttttggggttccagtaataatgctggttacttgagcgtgttaactttgtgaacattcttcacattatgatctgtgtacttttctgtatgttgtattatttgtgtacttttctgtactttcattggaaaaatttacataaaaaaagaaaatgctttgctgtccaggatgaagaatgtgagcagaatatttttggaggttaacactgattgcaaaatatgtcttcccatttagaattgcctctactatagaagcagaggaaatgttgagagcatggggctttgcaaggtggctatagcaggtgcagtttgtgaaatagtcctacacacagcctggcagtgtcttaggttagcataagtcctttggccaacaatatcctgagaagcaagcaggagaacaaacacagttatggaggaagcactagaaacaagcttgattacttgacagttttgtatagggcgaattctgcctgtaatcctgtttaagtcaccacttactgatccccgttatcatgtgcccaggcaccaagatgggggctttctgtgtattaaaaattttaaatcctcagcacaatcctgggaagcatgtactattattatttgactttacagataaagaaactggggcttagagggattaaataactcgctcgaattccagctagcaagttgcagcaagctgcaactggaacccatgtctgtgtgattccaaagcacccccttcccacatgtctattatgttgcctttaaaaaaaagttatttgatggagcatagtgagaagaaaaatacttaatatgtacttaatgttcaaatttgatgatcagaagaacttctcaaaccacttttaaagtctgaggtttgctgtgctatagtttttttttttttttttttttttttttggaaacacactttgtcgcccacgctggagtgtagtggcgagatcttggctcactgcaacctctgcctcctgggttcaagcgattctcctgcctcagcctcccgagtagctgggactacaggtgtgcgccaccatacccggctaatttttgtattattagtagaggtggggtttcaccacattggccaggctggtctcaaactcctgaccttgtgatctgcccgcctcggcctcccaaagtgctgggattgcaggcatgagccaccgcgcctggcctgcagttttatgaactgctattgtcctttgcagttgtaaggtggtaagaaatacctgggtggggtggaggtggggattgagaaatcctccaagaaacaacacaggctatgattggaatgcccctgtatgggtgacccatgagcctttctcaatgctttggggacattttaataacctgagtaattacctgtggtacgcaggctttgttttctactcattaataactctccaggctacattttattcttcttactgctaattcacatgcagagatacataaaatggatgctgtcaactgattgccacatcactgtctgcatatcaatgctctcctgtctgcttgggctcagagagaaggaaagaagagaaggaaaagggtatggcaaggaacttgtgatagccgaatctgttttaaaagccaaattctggtacagaaaccagaattttgacatatacaaattattgatatttgtgcatggttagtgttttgggattgccctatttagcatctgctgatcctctttttccctccctgtgatagatagcatgccttggaagcagacacaggtaaatatttaatgcttttagttttttttgctcctgtggcttgtttggcccttagggcattcatgttttttagcctgtggagtgcttatagcatcagaacatcatcacaaccctaaatgaaatttggattatttacttctaagtatgtttcccaaatagtctaatgactgtgtaagcaatatagtggaagggtacaggagccgatttgaatggaaatatatgtggatatggctttagatctttctgcgtattaaaaaaaaatctcctttaaaaaatccttggggacctggcacggtggcagtggctcatgcctgtaatcccagcactttgggaggccaaggcaggtggatcacctgaggtcaggcgtttgagaccagcctggccgacatggtgaaactccatctctactaaaaatacaaaaaattagccgagtgtggtggtgtgcacctgtaatctcagctactcgggaggctgagacaggagaattgcttgaacacgggaggcagaggctgcagtgagctgagatcctgccactgcactccagcttgggtgacagagtgatactctgtttcaaaaaaaaaaaaaaatccttggggctagttatcttgattttattattatgatgatacacaagaaagaaaacaccaaacaagctgaaataattgaaaatactcacatccaacccaatttaatttatttcactggaatctatctagttatatggacttgttttaggtacaggtacttatttttaaaaaactagacaggagctctgggttgctttttttttttttttttttttgaactgtagaacttctggtttagaagtaagattcctcttcaggagatatacaattatttattaacttaattagtgccgtacattttgtcttgaagctattcagagtattataggaacatctgttgtactgtgattatgatggctgctaggctgtttccccaaatgccttgacaaggcagtttgacatagttcggtgaaggcagtgccctggtgctgcagtcaccatagggatttttcatcttggcttcatgttggtagattgatactctcaagtacgttcaaggttctctttttcgggagagggttgttttcattgagtcctggctttcctctttccttatttaatgaaatagtgacaactatcattttctaccttcaaacattattattagtgattttataaatagaaaattattttccaggtgggcctatgtctgtgctggcaaccattgtgtacacacggactctcttagatgtttaggactttgcatgtgtaaacgggcaagttttcaggcaattcgggtaggttttccaatcttgtctttccatttcctgtctaaagaacttcttccatgtccacagcatgtttattcaacaatggataaaacttctaatgggaaatttcttccgggtgacctccttgagaggctgggctgtggagaaatcttaagaaacacaaccctgatgaaattggctccgttgagaatattacttggtccaggaacaagggacagaattcagttatttttggttcttgaataaatgaattctgtttccttttgtgtaggtggcagaagaaattaacccctgtagaacatccattctcagttggaaattaaatttttggtttcttttgagttaggagtaccctggataagagaatgtaaaactgtttttatttgaacctcatgcaacttggaatctgttctgttgtctgcatatctttgatagatttgtcttttccagggttgtctgtctttgtatttaattttctggaggttggaattgtgattatcaaatgacttccaacttggcaccatatgtgggtggatactaatgaatcctttcttaaccttcccagaacttttggagaaatcaatcagtagaaggcgggacaccgaagccatacagaaagccaaaatcctttattcatcctgcatgaatgagagtgagtgatgaagaaaactaaataaaatatttaccatccctatcctttagagttctattaatgttttaatatattgtttgaggaagaagagaactactaagaattctattaatgtttaaaggtgttaaaggaatgattgtgaaagactggattttgactagtcccatcttagttaatgttgttactggcttggtggagaaaatcttatttatatgagttggattctttgggtatcatttactccctgagaaacttagacaaagtcagcagggcaaactccactgtatctggtagagaatccagaagccaggccaagtctggcttgagacagagactgggagggagtgcacctactggagcctagagaaatccagattcccaggcatgccaggttcctgtgtcagcctaacaggcatctttgttgggtccttagccctgtctcaatatcttgggtctgattggaatcagaacagatactggccacttgacctggtctgccttctcaagcccaccacaggaagaagccagtgcctgtgggaagtgtgtcaactggtctaggatttggggtatcatgtggtgagctagaaaagagcaataaaagacaggaatctgaagcatcacttcttcttcattgggtagtgattggctttattgaggcattcctttagttagggttgtaacttagtcccaccaagtattattcattggctgggttccatgtagagaatccatgtttattgtagtgaatatccagcagtttccctggtcagctctcctggcaagaacactaggtatagacagtcacattgaagcgtggatcgtaggtagttctgtctctgtgattatgctcatcccaccccacctcttttacctactccctaacagctgaaattttaagttggagcattatgggaattttgtcttgagaagatgcacttaaattctagtgtgctgatccagtttgcaattctaactttctcttcatatctgctccctttcagaagcgattgaaaaagcagatgccaagccactgctacacatcctacggcattcacctttccgctggcccgtgcttgaatctaatattggccctgaaggggtttggtcagagagaaagttcagccttctgcagacacttgcaacgtttcgtggtcaatacagcaattctgtgttcatccgtttgtatgtgtcccctgatgacaaagcatccaatgaacatatcttgaaggtataatgaggacccattcatcttctttgctcagtcctagattagccttttggggtgccatcctggggaaagagactcatgctgccttagtgaaataataacataaaacacttttattgaatagtagaatccagaatattcccttctcccggctttgcagaatgtagaccattaccatacaagttttgtaagccttttggaaaactagtgaattagtttcaagtgatctgtgatctggccctcatatgcctactcagagcaagcctagggttcctaaattccagtgggaaggggactgcaggtctcctgttgttagcagagattttctgagccctgctcttgtccttgcctcctcactcccttgatagaggagaaaacacgtgccatgattttttgttcctctttcactaacattttcttgtgcacacacctaaattttagttatcaacttcactctgaatctctcctccctcctttccaaagatacagcaaaacttgttctgttccaagtgcttggttgcgttttctgttggaagactaaccatgtctcccataaagcaatgggccacatggacataccctgaggcatttcacactggtaaaatcaggaggctgtcagaaaactaccaacagctaaagactcaccaatgaaagagctatgcaagaattcaaataacattcgtcaaatagttttgtgctttgatcctgctgggttttgttttgttttgcttccacagttactttgactaataatgaaaatgttattgcatgactgattttctccccaattctgtccttagtcaaatcagaaaatattaatgaaatattgatattcaaattgtagacatgtattgccctcacctcatgcattttaaccttctaaaatccaaatcttaaagttcatcgtttgattgaagctggtcatcgtttgatcagagattggcacattttttgggtaaagggccagataatacatattttagggtttgcaggccgtctggtctctgttgcaactacttaattctgccattgtgtctgggaaagcaactgcagacaacaaaggtatggctgtatggcgggctggcccagtggctgtagttttctcacctctaggttagacaatggaattctcagtaaaaatctttggtcattgaaaggactcccctctactcaggaggaaattctgagttccagagacaactgtgtttctatgtttggtgatgaaatgagccatcttctaatgctatcaggataagatgtgctatgtaagacacaatgatgatgacgacccaactgatctctgtactgtgttgatatatcactcattttttgaaactaggttttaagactatcattatcagttccagaactattatgatgttctttcaaacaccttaagttggtgttttgaagtaagctgaaggctgttttccaaacttaagtttaagtttatacattctattgagtgatagaagatcttgattcacacacagatgaataattgcaaacggtagccattttattatctttctcacctatttctggatctattcaattgaatttattgctttaaactttttattattaaaatgtggtacaaaattaaagaatagaaaaataaactcccatgtatccatcaacccagcttcaacaactctcaaccttctgatgttatgtttctttctgcagttatgttttaatctagagccctccttttttgggaggtggctagaacattttatagcaaattaaaaatatatcattgcatagtaaatacttcagtgcttagctagtggaaaggactattatcacaaccaaaaagataatcataattccataattaacatctaataactagttaattttcaatttttctgattgtcttaaacatgtccttaaaaaaaaaaacagttggtctttgattcaatctccaaataaaaatcacaggtgaacttagttgatatgtctgttttactccacaagggatccccctatttttgttttttaaaccacatttatttgttgaagaaactggagtatttgtcctgtaaactgtcttacattctgaatttgactgttttcagggtaatctaatagctgatgaaagttcttgtttataggagaatcacagcttaaaaatgcagaagaaataataggaagctatctatttaaaaaaaaatccctaaggaaaggattgatctaggcaattatcatcaatggctgctaaaaccattaggtaaatggttgattgggaaattcatgatatcagaccgatatcacctgaaccctaatatcaatgatagcattgctaaaagtggggcaaccagatattgtgtgcctcctggtatcagtaggaagtgcacactatcaccagtgatgttgtcgtgcccccacaattgagcctctagttttaagaggagcttacagaaaacatggggaatagagaaacatggtaaccaatttttaatagcttgccttgtatacttaatattcaattaaactgatcctagaaacactaaaatgtcaatgatagaatactttccaaatgtaaggaggcacccatgtacttattattgctctcttttgtcaagatggcagcttgttccaaactggtgtttgaacattgtttggcatttgagtgcggcaaacgtttgcttaagttctgttcctgtttgtacctttttccatgactgaatattcacacatctgaactaattgccttccctcagatataatataattatagtcttcctgatgacacatttacaagagttcgagcatgtatctggaggtggtaggagaagttttattctgagagctgcatgaaacccattgaacctgataacaaaaattagcgtactggtggctgccaaagttgtagaatttgcaagtgttgcttttttattcatttaaaaatagttaaaactataaaagacaaaatctaattggatgaacatttgaagccccccccacttataggttttgtggaacatagtttgaaaactactggtatagttaaaaaacaaacaaaaaaaataataggctttggtatttaaaagattgaggtttgcagtttagctttgtgatgtactcaccgaatatcctcgtgcaaattacttcacctcgctgatttcacttttcccatgtgtacggaagggtgaattagaatttacttttaatcgtcattgacgttcaaatgaattgacttttgtgacagttttcactgtagatactggtccacagtagcacacgacacaaggttccgaacctactcttcaagcatgacccagcaactggtcaggaccatttggagaatgtttttctttgacatgtggtacccgatatgcctctcagagctcaaactcagtagtgcaaggaataggaattttgtttactcaacctaatatttgacttttagctcccacccaaccttttggtgggaaactgaaccttagtctaggcatttacctcccctcttggtggccccatttctcggtcttttcctagggtattgggaaactgcaataaccagttatctggtttctgagaagaaacccactatggaaccatgtagcctcttcaagtgtgcccctctgatgctgaggtcctgcgactcccattccttctcagatcctgccatgttttggggtgatcagttcctctgctcatgagaattcttgacttcttttgctgcttgaaagatcctctttctgctctgggagaaatccctcttacctgaaactctcttccctcaatgtcgttaggcttccttttccatcgaattcaattttcttcggtgtgcttagcttttctaatcccacaaacccacaggaataagagaagggccttttgggcaggcacagcactgtgggcatccttttgggtgagcagatggtgcctttgggtgaagagacaggcaccctttctaagggttagatatatccccatgccaaagacatgcagtttggccagcaggggtcgctctaatctacacagcgtacttctgcaaagctcccctgtggcaaaatgatacagggtttgctacaggcttaaatgaggtaaaggaattccaaaaataaagaaaacaacagaagttagtgaccaaaaacattatcttgctgcacacgtttggatttattctatgtcaggagatagtatgaggatttaagggacaataaaagacgtgagtatatgtgatcctgaaagagtatttggaaggccaaggatgtcccagtatgtattactagttaatgaagacaacaacttaaagtcatcatctcacaacagcctgcatttttctggctctcagcaaaactcgtaaaaaatggcaaggagaaactccaagaaaatttgaaaagtttcattctctttccttttcctttttttctcaggaactgacagaacatagaattttattttattattgttattttttattgatacgtaactacacattttcatggtacatgtgataatctgatacattcatataatcaaatcatggtaactgggatatatccaataatgggattgctgggtcaaatggtagttctgttttaagttttttcagaaatcaccaaactgctttccacagtggctggactaatttacattcccaccagcagtgtataagagtttctttttccttatatccatgccaacatctattatttattgactttttgataataaccattctgactggtgtgagatggtatctcattgtggctttgattcacatttctctaccgattagtgatggtgagctttttttcatatgcttgttggtcacacgtatgtcttcttttgaaaagtgtctgtttatgtcctttgtctactttttaatggggttgtttggtttttgcttataaatttgtttatgttccttgtaaattctggatattagacctttgtcggatgcacagtttccaaatactttctgccgttctgtgggttgtctgtttattctgttgatagcttcttttgctgtgcagaagctctttggtttaattaagtcccgtttgtcattttttgtttttgttgcaattgttttgggcatcttcatcatggaatcttgcccaaagtaatttacagattcaatgctatttctatcaaactaccaatgacattgttcacagaattagaaaaaggctattctaaaattcatatggaatcaaaacagagcccgaatagccaaagcaatcctaagcaaaaagaacaaagctggaggcatcacattacccgatttcaaactatagtataaggctgtagtaacaaaaacagtgtggccggtacaactacggatacatagatcaatggaagcagcccagaaataaagctgcacaccaacaaccatctgatctttgataaagtctacaaaaacaagcaatgggtaaaggactgtggtgctgggataactggctagccatatgcagaagattgaaactggacccatcccttttatcatatacaaaaatcaactcaagatggattaaagatgtaaatgtaaaacctaaaactgtgaaaacccttgaagaaaacctaggaaataccattccagacataggccctgtactatattttgaagtcaggtaatgtgattctccagctttgttatttttgcccaggatcgctttggctatttggggtctttcgtggttccatataaaatttaggatttgttttttctattttgtgaggaatgtcaatggtattttgatagaggttgtgttgaatctgtaaattgctttcagtggtattgtcattttaacaatattctactaattcataagcatggagtatccttccatttttttgtgtccttttcaacttctttcatcaacattttatagttttctttacatgaatcttttatttcatgggttaaattgattcctaggtgttttatattgtaaatgatattgtttattgatttctttttcagattatttgcttttggtgtatacaatgctgttgattttgtatactcgaactttactacatttgttgatcagttctaatagttttttggtagagcctttaggtttatccaaatataagatcatgttatctctgtacaaggctaatttgacttcttcctttccagtttggatgccctttatttatttctcttgcctaattgctctggccaggacttctagtattgcgctgaataaaagaggacaaaacaggcatccttgtcttgttctacatcttaaaagaaaggcttttaatttttcaccattcggtatgatgttggttatgtgtttgtcagatatggcttttactttttgaggtgtgttccttctgtacccagtttgttgagggtttttgtcataaagggatgttgaattttattgaatgcttttacagaatgtattagaatgattatgtgatttttgttcctggttctgttaatgtgatgtgtttatatttatgtacttgaatttggattttccatttaatttattttttttgagatgggatctcactatgctgcccaggctggacttgggttcaagtgatcatctagcctcagcctcctgagtagctggtactacaggtgcatgccactgcacccagcatatcatgtctattgatttgtgtatgttgaactatcctggcatccctggattaatcccactcaatcatagtgaatgatctttttcatgtattgttgaattaggttagctagtattttgttgataatttttgcatctatgttcctaagtcatattggctggtagttttcttttctccttgtgtccttgtgcagttttggtatcggggtaatgctggactcatagaatgagtttggaagtattcccttctcttcagtttttttttttttttttttggaagagtttgaatataatttgtattgcttctttaaatgttttgtagaatttggtagtgaagacatcaagtcctgggcttttctttgatgggagaccttttattatggcttcaatcttgctactaggtattagtttgttgaggttttctacttcttcatggttcaatgttggtaggttgcatatgtccaggaatttattcatttcttctagatgttccactttgttggcatatagctgttcataatagtctttataattctttgtatttctgtggtctcagttgtgtcttctttttcatttctgattttatttatttgtgtcttctctcttttattgttagtctagctaaagatttgttgattttcaaaaaaaaagccaacttttttcattaattttttttggtgtttttatagtctacatttcatttatttctattttaatctttattatctctgtctactaatttggggtttggtttgttcttatttttctagttccttgagttgtatcattagattgtttatgaattgttatttgaagtctttcaacctttttgatgtaggcttttattgctataaaattccttttcagtactcctttggctgtgtttcatagattttaatatgttgtaatttcattttcatttgtttaaagaaatttttaaatttcatttttatttttttcattgacccattggtcattcaggagcatattgtttaatttccacgtgtttggccaggcatggtggctcatgcctgtaatcccagcactatgggaggtcgaggcaggtggatcacctgaggtcaggggtttgagaccagcctgaccaacatggtgaaactctgtctctactaaaaatacaaaaattagccaggcatggtgtcgggtacctgtaatcccacctactcgggaggctgaggtgggagaattgcttgaacctgggaggtggaggttgcagtgagctgagatcatgccactgcactccagcctgggcaacaaagcgagactccatctcaaaaaaaaaaaaaaaaagattccatgtgtttgtgtattttccaagtttcctcttattattgatttttagttccattgtggtcagaaaagataactgatatgatttctgcttctttgaatttgtggagacttactttgtggcttaaaatatgatctatcctggagaatgttccacatggtgataaaaagaatatgtattctgcagcaattgggtgaaatgttctgtaaatgtcagttaggcctatttggcttagtgtctagtttaacgctgatgtttctttgttgattgtctagatgatctatccattagagtggagtgttgaagttccctatcattactgtattgcagtctccctctccctttagatctgttaatatttgctttatatacttaggtgctccagtgttgggtgcataggtatttataattgagataggcagtatattgctatatctccactaggtccttgcctttttttctggcactaaatggcaccttaagcctacgtttgctttgactctagcccaagatcagagcactcccagtccagatataggggaggtcctaaagaggatatcctggcagtgtggaaaagctggctggcggctagtgtacaggtgacctttggaatgaacctcctatagcataatgctgctgaacagccactctgatttggtgtctcctttggccgagttacggagcagagtttccagggctgggtatggtagtcccacctcccctctttgtctcttgctgtcttcagaaatatatctcccttcaggcactcatgatgccttctgtgggttaaggtatgggcaggtcttctgtcaaagaacccaagatggtcaggaagctggttgtccaccttgatctcactttttccagtgtagaaactatgagtcagggaaaatttctgcaggcttgttgctggacagattggttggaagggcatcatagagaaattttattatcctttgtctgcttggagttttttcacttctctgtggcctcagcaactgattcatccttatatttgagttctgggatattgctggtgagaatcttagtgctgtatatttgtttttagtttcctgtgtatatgttggggtggggagggaagccagcttctgtctccaccaccattttgaaacctgaagtccagactccatttcctacctcaaaatttgtaagctctttcttcttgtattactactttgtcttctaacttgaggtttattatcattggaatgccagttgtaattggagaaaacatttatattttcagttaaatgtgttggatttcctaaaaaacatactttattttctgcttacagtatttagatcagttgtaaatgcaaggatttaaaaaatctcaacgcagtgtcctgattgcttcatgagaaagtcttttgcctcaagagtttgtatgtttctaatgagatttatttgactgaccttattcaatttgttggttggtgtgtttaaaatgttccctagaaaccataacaatctgaaagtttataaaaggtctggtaacctcacttgaattatctaaacttttacaataagtggatttaactttatttcatgagagggaaactttggctttcttgataatatctacacagtttcctttcctatgagactcaagctcaaaagattcttcaagtggtccaaatttaattgaaagccaaagtgtcttaatcataatattgtgtttcatgatcgtggcttgcttaatttttggaagaaatagtggcagattgggaattgcagtaggacgaagccaggaaggcttgtgactttgttgtttcaggccaatgagagagggttgaacaaaataatttgaggattttagcagtatacacagacaagatgggtgttttgaaagtgccttttttcccctgaaacaagagttatgtttttcctggaatttttcataatatcactaattcttaacgtggcctttgtaaaatttgttgtatattaagggcagtttcatggaaaactgtaatcttatacaaatttatgtatttaagattatagtaagacgaaaaagaagctggaggagatgggtcaaaacagtttaaagtcatataaactaatggtatgggcatgtaggattcagtttttattcagatattactaatttttaatttgttgtttagattttgtttcttattattttggcttaatgtttaatgtgtgaattagagatttaatttggaaaaatctactcttcttgagattcattttatttatctttagtcagttgctgatattcaagaaagaacaaaccacagatttagagaaggtgctggaaatttttttaaagtatcttaaaatttacataaattcattttttgtgatgtacatgtctaagttttgacaaatgcatagagtcatgtaaccaccactgtaatcaagaaatagaatagtcccatcatccacccccaaatacctcatgttatccctttgctaagtcaagccctctcctcatgcccaaaccctgttagccatcactttgttccctgttcctgtaaagtttggctttttcaggatgtaagtaaaattcacccatgttgtatcagttcattctcttttattgttgagtagtattccattgtataccacagtttatgctttcatgaattggaggacatttgggttgtttccagttttgggtgatattgaataaaattacatacaggtttttgtgtgactttaaatttttttcctgggtaaatacctagaagtaggattgctggctcttgtgtaaatgtatgttgaactttataagaaactgtaaaattggtttccttccaaagtggctgtgccattttgcattcttaccagtaatacatgagtgatccaacttttccacgtccccaccagcagttgtcagatttttttttccattttaacagatctatggtagtgttttattgtgggtttaatttacattttcctaatgactaatgatgttgggcatattttcgtgttcttattttctatcttcatatgttctttgatgaagtgtctgttagaatcgtttgctcaattttaaattgagttgtttcttttcttatggttgagttttgaggaatctttatgtattctagatacacgtcctttgtcatatatgtgattttcagatattttccccattctgtggcttgtctttttattctgttaagtttctttcaagagcaaatttgttcaatgtcgataaagtctaatttattttttcttttaaggattgtgattttattgtcatgtctaaaaactctttgtctaacccctagtaacaaaaatttttcccaatattttttccagaagttttatagttttaggttttacatttagggctatgattcattttcagttaatttttgactaaggtgtgaggtatgtgtaaaggtttattttctttttgcttatggatgcccagtttttcttttctttgagatggagtcacactctgtcacccaggctggagtgcagtggcgccatcccagcttgctgcaacctccgcctcctgggttcaagtgattctcctgcctcagcttcccaagtagctagaattacaggtgcgtgccgccacacctggctcatttttgtatttttagtagagactgggttttaccgtgttggccaggctggccttgaattcctgacctcaagtgatctgcctgccttggcctcccaaagtgctgggattacaggcatgagccaccacacaaggcctggatgtccagtttttctaacacgctctttgaaaagactgtcttctttcttttgtttacctttaaggtgctgaaagttttttttgttttttttttgttttttttgtttttttttcctgagacagagttttgctctgttgcccaggctggagtgtagtggcgtgatctctgctcactgcagcctccatctcccaggttcaagcaattctcctgcctcagcctcctgagtagctgggattacagccacacgctaccatacctggctaatttttatattcttagtagagacggggtttcaccacgttggccagcctggtctcaaactcctgacctcaagtgacccacccaccttggcctcccaaagtgctgggattacaggtgtgagccaccacaccagcctaaggtgctgaaagttttaattcaagaatttatactatacttttctatcactgtaattctacttatttagttgtctggttattatttgtgtttttatcacttatcctaaaccttccagagagggttctaacatttgcgaaggtttctcaaaacaaaattattatttgattccattcaaataaaaaaaaatcaatgccatatgttattttagagataaggagttggaaacgtctgattaatcaactctatacagattggcattttgcaaaacactgcaatgagaaaaatactggaactggtgataggagacaacgattttagtctgagctctgcccaatcatgttaccttgggaaagtcacaacaattatctggcttttgtttctcctcccattgaataagggagaatagctaataatctctaagatctattccaactgaaatagccttgttgttattcagtgttgataggacctcaaaaggtttagaaaacataaattagaaaagcaggggcaggtctctgatagtttattatatctgtcattgccaaagtgcctatttgcatgtaattctgagtgtactgaattgtttttgtaatggtgacatgagctcaaaatatggctgggatgcagacgatttcatcactcttgttaacatggtacgtaagaatttacagtgctagcagaatgctttctgtttttgtttttacagctggaccaagcaacactctccctggccgtgagggaagactaccttgataacagtacagaagccaagtctgtaagttttactcatattcaactatgtgccttaccaggctgctgtcaggcccattagttctaaggccgctgcttctttattggaaatgagcagtgtggctattcaatgaccatattcccaatgcaggaagacttttattcaggcagataaattccactccctgtctttctagaagtctgctcatcaaggctgtacaagtctcagtactcaatgcccttatctagcttgggagacagcactcccaaatgaagtaacaaagaaatgagcttgcagtcattcattcctcagaagtgcagagagctcactatcaattgcagaaataaagcgtcagaagagatacccaggagacagatggttcccaaattgtactgctttagaatcacttgggaggctttcattaaatgttgcttcttgggtcacagccctggagagtctgacttagacttgaggtagggtctgagaatctatatttttaacaggtgttccaggttaatggaggtttaataagaatcagaaaggatcaatcaagttagacttcttggattggcttagaaatctagcagtctcctggatattggaaagagctggttcatttctgacactttcaatttattttggaaactttattgaacttccaaaggagcctcagacctaggtcccctgggtctatgccgatactaacttctatacatagaaggctctggagggaagctaactaagatgctgggcagctttcttgctgaggacactcaccaaagagggttggcaagttttccttcctaaaagtggacagaatgaacatttgccaatgtggggggagggtgtacccctggtattgatggagtctcagcaaccaggctcaaaatcgtctccccctataacctatctgtcaagtcctaatgattctaccttcaaaatatctcttccatccacttggtccctcttttctatcctgactgctataggtcagattcttgttaactcttgccttgactacagcaagtagccttttaactgttactgcttctccttcatcacattgcctccttagcaccagttgacaagttctgttctcaaagcactgctcctagcatgccttcgctcccaagacagggtctaaattctttagagggctttcaaggctgcctcatgactttatcccaagtcatctttcctatctcatctggatttgttcttcccccaacaaaagcagcttgcccactgtattagtccattctttttctcctaataaagacatacctgagacttggtgatttataaaggaaagaggtttaatggactcacagttccatgtggctggggaggcctcacaatcgtggcagaaggtgaatgaggagcaaagtcacgtcttacatggtgtcaggcaagagagcttgtgcaggggaactcccatttataaagccatcagatctcatgagacttactcactaccatgagaatatgtgggggaaaccacccccatgattcaattatatccacctggccctacccttgacatgtggggattattacaattcaaggtgagatttgggtggggacacagccaaaccatatcacccacctcacaggacccttcactgcgttggaaccagtctccctcaaatgctatgtccccagtttctccgggctagatttttctctcagatcttcagtttccaagcgtgtagcagctttattaaggaagttattttgatgtctttaatgttacagttcataattacatgtttatctccctcactgtttgggaaccagacacagcattattattttttttctgtaccaccctctcctaacatatgcacagagggcctaccaagccaccttgtacatttgagtaggtactcaataaatatgttttttggtttttctttttagatagagtctcactgtgttgcccctgctgaagtgcggtggcacaatctcgactcattgcaacctctgcctcctggattcaagtgattctcccacctcagcctcccgagtagctgggattatgggcatgcaccaccatgccgggctaatttttgtatttttagtagagacagggtttcaccatgttggccaggctggtcccaaactcctggcctcaagtgatctgcccacctcggcctcccaaaatgttggaattacaagtgtgagccaccacctccggccaataaatatgttttgaattgaattaggaatagcaaaatattatttctatttaagacttcttttcttttctttctttcttttttttttttttttttgagatggaatttccctctgttgcccaggctggaatgcagtggcataatctcggctcactgcaacctccgcctcctgggttcaagcgattctgctacctcagcctcccgaatagctgagactacaggcgtgcgccaccacgcccagctagtttttttgtatttttagtagagacggggtttcaccatgttggccaggctggtcttgaactcctgacctcgtgatccacctgcctcagcctcccaaagtgctgtgatttcaggcgtgagccaccacgcccagcctatttaagactcttttcaaagcttgcttactgattcaacaaagatttattaaaggcctcctgtatgctaagtactgtataggtcctaaggtcatacatatagtaagaatagcttacagagtcaaggtataagttagtaaatcttattcccaatgcatgagaaggaggtcatttaatacctgatgcgttgagatctcacaaatatatctgaaatgagaggtgggcctaaggcagttctttaattcccattaagtaaggtcacccctgccccacccaatgacatatgattatccccaaaatgggtttatgagtatgtaagaaggaaattctatatttgctatttgttaggtttcctatcatcgttcctctcttttctcctttttttcctgagctagggagcaggactttgtgaaaactgtaaaaacctgaaaagacacagggctgctgtcactggtcttttatttcttagtgtgaaggtgggtaaattgagttgcaagagaataaatcacacctcccaccattctttatggatcaggcctcctgcttttagaaacagttctttcccattgttttattaaagcctcacttgtctggaaagaggaagtctgacctttaactttctattcttgtctcatttggagttatttcatgtatccataatatcgacggttgccagaaaactagttctcttgttgcttgatggctggacatctctgtctgtcatggaaacagtactcaagtagccgtcactctttttttctcccaaagtgttatatgggtgcctggtattgcataatgcctgcaccatactttgagtacagagtgaaaataaaagacatttatttctacctgctattttctgctcttccatgtctctcaaacatatttcctaagaagctattgtcatggtcactttgttctttatttcttacagtatcgggatgccctttacaagttcatggtggatactgccgtgcttttaggagctaacagttccagagcagagcatgacatgaagtcagtgctcagattggaaattaagatagctgaggtaagtcttcactgaaaatctctttctttcctttactttcttttcttttcctttactttcttttcctttccttttattaaaggcagtatatcctgaatgaaaatataaattgcaaacaaataatagcgttttgtgtcattgcccattgggcccaaggtagaactaatagcatcccctctaggaagtaacaaggactgtgacagaaaagctcctcattccttccacctccctggtttaagcccattcagtgtccatacgttgctcagctgtggccaaagaatagcagcagagagaccctctgaccgtttttcctggagaaactcatgtttggcttaaatagaagatagatgtttaataaatccttagtaatctggcttgaatggaaggttgcttttaatccagcccatgttttatgctatccccactcagagtcattctggcttaagttctgggctcagggaaatctgtccaccaatactggatataaaagttggtatagaaataggtaggacatgctggtaagcatttttaaacgacctttctggtattactttgtacctgcccctgtttttcattattttcttgccctactttaatgaatatcattgtgtcatatacatgacacagaactacatgtctatgtaaattaccttaacttcttgttggctcattgtagagacaaaaagatgtaaaaacaaacttgtgggcaaaataatgagaactcctaaatggttagctttgtttatggaataacttttttctagaagaaagaaagtgtaaaaatctctctatatgttcctaggccaagagggaataaatgtggtaaaatctgcttctggggaaaccctgtagtgaaaaaaatgatactttttaccaagaaagttttgcgtatgtgttgggaatcttttacaagagaagttggtaaaaatctcgagatgaataagagtccaaatgttgattggttttgtttggcgaggtggtggtggtgtgttgaggtatggagtagggatgaaggataagggtaaggaggaattggtctctctctctttgccgtggtgatgttcgtgtatagctctctccaaactcctacttgcagtgcaaaaagttcattcctgcatgtcacctttgaagactgtgaagactgctgcagatgtttcgaagtccaggactgtgcctctgagccatgtctagagtctgtctgaattctctttccaggcacataggaggcccagggctctcatttggactaaaactctgaaacagcagggaaggccttgccctgagccagggatttggaccaaaaagggaactaaaaacagctgggctgaggcaagactgggaattgtcaaaaggctaaatgaagtgacaaatctattgtgtggaggggagtggctggcagagagctgaaaacagctctgaggccaaagggctccaacttggggctgtgagactccgagggcggaggagggattggtggaagaggagtgtggatatcctctgaggcaatgattcacaccgagccaggaggctgtttgtaagttacatgtggtctctcctgtggagggtgaagaaagggaagctaaggacactgaagcatttagcaaagaggggccagacgtctgccagtcagccctctgtaatttttaccttgaaaaatcactgctagtaatgctcacttccatatcttacactacacatcactaggtacttttaaaattagtgggatacatagtcctatggaaacttctgaagctgggaagacaagacagtccagcccagccaaatacgtccttgtaattacaaccagggaagcatatacttaaccaatccagctagagagatgtgtgcacaaggagaggttttattgatggagtagcccttgtgattggaaccaagtggagtgtaattggaaaggcttgctagatgcagtgagtcttgggcagtcctgagtcatagttcaaaccatggaggtggtgatggtggataggagatgcaagagtcggagagtcatgtgtgcagtgggaaggtggcaagtttaatgcaagggaattagatgatggaaggcccgaaggcaaagtcatgacgtgattgaggggtggatatgtgagctactgctggtcaatggaagtgattaagatgatccttgaggaagataatcattgctgctgttcttaggttaaacatagtggaggctagaagctcagatttggtgttggccaaatggccaagagcatgagtattaggaattgaaagagtatagagccagggctagagagaggcaagttttgaaatgtgtgtccaggcggtgactaaatccatacccccagcaatggggctagggaaatctcaaggccaaagagacaagaggggaaatgagggaatgagctgttgacaaaatgatcacggggaacagtggcatccagatagtcttgtgttcatcagtgaaaatttgcccctagaggtgaagggatggtctgtggttcatgaaatattgaaatcattatctggagaccacaggtgacaatgggatgtttacctcaatgtccaacttaagtttgattgtcaaaattgagccagcaatagattttgcccatccacattatagattgggagggagatttggggtagttctttttgtactggggacaatatttcacacagaggaggatatgaaagtttattttcttaatcctgcctaaagtgatgtctttttttctcttccccgagttggggaccacaccaaagccttgaaaaactttataatactatgcagatgttttggcacatgtaggaagtaatcatacagtaagaaatggttcacttgaaaaaaaataacaaaaatctcttttcaacagataatgattccacatgaaaaccgaaccagcgaggccatgtacaacaaaatgaacatttctgaactgagtgctatgattccccaggttggtgaaaactatccagaaaactttctctcaactcatcattttagaagggattggatttcatctctgtgtaaatttgtgtcttgtaaaacctgctctcagtcttggttatcatcatctttgtcaacaatcacataaaatatcccttgtctgtgtattgggatgccttctgttacagggaacaaaacatctttccaacagtggcttagaaacttaaagcctatattctcacatgacaaaagtctagacataggtaattgttggcattggctcagctgtttaacagtgttgtcaaaggcccaagttctttctatctttccatcctactgtgtttagtgtgttggctttttgacttcatgtttgatgactcatggttccaaggtatccatcacagctccatatatcacatctgctgtcagagcaggaagaaggtgaaagggccagtgatgtgtctaactcttttactaggaaaaacaaacaagcctttccagaacatctccagatgtcttccctttatttcttattgagtaggattgggtcacatggccactcctaaccacaggggaggttgggcaagtgagtaactggttttccgtttcaacagtggacacaggcaaggaagaaaaggttgggaaaagacttttagagtagccaatctaaaaaacaccatatggtgttttaggtaggatagggatgctctgaagaatggaggcatgttactttctgtgtttttatttgtttttttttgagacacagtcttgctgtgtcatccaggctggggtgcagtggtgtgatcttggctcattgcaacctctgcctcccgggttcaagtgattctcctgccttagcctctcgagtagctgggattacaggtgccggccaccacacctagctaatttttgtatttttgatagagatgggattggccaggctggtctcaaactcctgacctcaaatgatccacctgcctcggcctcccaaagtgctgggattacaggtgtgagctaccatgcctggctgcatttactttctgttgctgcttatttcctcttgtgtttttttttttttttttttaaaaactgtgtcacagagacaaattatgtactggggcatctgtttctgtgtgtatgtgagagtgagggagagtacaggacagagaaagggagggagggagagagaaaatgtaccgtatagaggaagaatttagaaggaggaagagaaatgcaggagagaaggagggaagagtatgggaggaagaaagagtatagaatagaggaagagtactggacagggagagagcagaatggggagagaaagacagaggggagagttcaggaaggaggaagagtactggagggggccaagggagtgagggtgcatattactgtgttagtgtgtgtgtgggtgtcgtccagatgtagatggtacagaacacatgctccatttgtgattaagacaataggtcaggccgagcatggtggctcatacctgtaatcccagcacattgggaggccaaggtgggtggatcacttgaagtcaggagttcgagaccagcctggccaacatggtgaaattccacctctactaaaaatacaaaaaaaaaaaaaaaattagccaagtgtggtggcaggtgcctgtaatcccagctactcaggaggctgaggcaggaaaattgcttgaacccaggaggcagaggtaacagtgagccaagatcatgccactgcactccagcctgggtgatagagcgagaatgtctcaaaaaaaaaaaaaaaaaaaaaaaaaaaaaaaagacaataggtctggatggcaatgatcaggagtttattttctagacttgagtagttgcatcttgaattattaggtgtgaaatcaaaagaaatgaatgatgctcaatctactctatctgcctttcttacttgctacctaaccgagattctctcattctgttttgttctctctcccctcagttcgactggctgggctacatcaagaaggtcattgacaccagactctacccccatctgaaagacatcagcccctccgagaatgtggtggtccgcgtcccgcagtactttaaagatttgtttaggatattagggtctgagagaaagaagtaagaactttcacatgaattttactgtgacttttgtgttttctttaaattataagggcttcccttctcacatcctttgaaaactgtttttaaagaatgttacatcaaaagagtcatagggaaaatcccggtgtcctttgtgatgaactggccaaaagcactgtctggtgtaatttacttgctgcaatgataacaaatgtttttgccctttatttctggtctttctccatgctgttctctttgagatcctaaattgtttatgagcttggggagctagtcatataatgatgttattttctaaaatgtctgtgtgaacatctttttttttccccagttcattctcaatcttttgctgcttttttttttttttcctggttcctttttaaccattaagtcactttctggcaataaactaaagtaactgtattgagaagacacaagaccaccttgagagtggtagaaaaattgcacggataaaacaactttaggaactgccaggtttttcttattttaaagaatgttttagaatttgttgctttgctagtttattgctacaaagaaaaatcttccaatattccaggaaggagaattttacaggttccttaaggcattcagctttgactacagaaaatgaatcacagagcttacaaaatgaatcaacgagtttacaaaacactttactgagttaattgctgggccatgattaaaatcacattttcttatttggactcagacaaggctatgttgccagaagttacgttttttaaaaaaggcacaacagtccttggaagaaaatgtagcatttatcccctacggaaacacttagacacctgagaggagctgctgctctttttaagatactttctgatgataaaagtaatctgtgttcactgaggaaaacatacagaaaaaggagagaagaaacaattaatttacttaaaattctatcatttagagataagccaggattctttgaaaatgttctaaatggaaattgaatctagaggtacgtaattatattgcagggtagagccttgctccatggaccaggaatgtcagcagcatcacctcgggtgcttgttaaaaatgcagattccaaggccctcctccattgagtctgatccagtagagctggaggggaggccaagtaatctttattttaaacaagtacctcagaagaatcttatgattaacttttcttaggggaggggaaggggatcactgtattagaaaatttctttgtaagtacttcctagctctcaaatactataaaatatgacccaaacgattttctactcatatgccattgagttacggagcacattttaaattttggtggtaatttccattgaaaggtggagtttggcctgctttagattcatccttcacctcgtgagtcagtttcttctagtatctgtgttaaaagagtaggtacttctgaacactgattgattttacttccaaaaaagcctaatttacaatcaggggatagattgggatttggtttactgtattagaaaaagcatctctatcgtgatgattttacttggtaattgcaggacctttcataacaatggaaaagagcatgattggagggagattttactctgattcttgtcaaaatgataacttggacaaatataaacgtagagaacaacagtagaaaaaacatagatggaaaagtcaccttagatgttatgtacacatacaacttcatttaaaaataaggacaaaaattggccaggcgcggtggctcacacctgtaatcccagcactttgggaggctgaggtgggcagatcacttgaggccaggagttcaagaccaacctggccaacatggtgaaaccccgtctctacttaaaaaaaatacaaaatttagctgggcgtggtggctggcacctgtaatcccagcgacttgggaagctgaggcaggagaatcgcttgaacccaggaggtggaggttgcagtgagccaaggtcgcaccactgcactccagcctgggtgacatagcgagactctgtcttaaaaaataaataaataaaaataaagccaaatcccaaatctctttcacacagtttatccctcaaccaccagtttataaaaagcaacttgtgttctgcgtattcttgtgagatttcaatacaacgtacacatcatgagaagtctgacagcattttatttgcagactatggtgatgttttttcattgatgatcgtgtttaatcaccactcgtgtagcattacagggctacttgaggaaaagtcttcttgggttcccataattgccatattggtcaggatatgccagttgctataaccagcacctctaaacactcattggctaaattgtaccctctgctcatggaacagtctgaacatgggtgtccctgtaagagagctttcttctaaatagtgacttaggaagccagactcctttcatcttatggctctgccctcccttggatgtttggcatcctctctattcagctggaggatggagaaacagagagggtggaggattgtataggttttggtgggaaggcctagaagtggggtatgtcacttctacccataatccataagccagaactcagtcttgtgactcatctagctgtaggggagactgggaaatatagtttagctatatacccagaaggaaaaggagttggagtttccctagacatgcctttatcaaagagcctatctcattttcttgaaatgaccacttttctctcaatggcaaatacttccctgctccctacctctatgacactgtgagcacctcatggcaggcactcttttttaatttttaatttttgtgggcacaggacatattttgatacaggaatgtaatgcataataatcacatcaaggtaaatggggtatctatcccctcaagcatttgtcctttgtgttacaagcaatccaattatactgttttatttatttaaaaatgtacaattacactatttttgactatagttacctgttgtgctagcaactactaggttttattcattctttctatttttttgtacccattaaccatccctccttccctccttcccctctgctatccttcccaacctccagtaaccacccttctattctctatctctatgaattcaattattttaattgttagctcccacagataagtgagaacatgtgaagtttgtctttctgtgccaggttatttcacttaacattatgatctccagttccactcatgtttctggaaatgacaggatctcattcttttttatggctgaatggtcctccgttgtgtatatgtaccacatttttaaaaatccatttatctgttgatggacacttaggttgcttctggcaggctgtcttgtgattgcttttttaagtgttgtgacctagcacagtgcttctcatgtagtagacactttaaaaattctagaagttaaccagataccccatcaccaccacaaggaggtgacatatgaatggaaccccaaaggataaagaggaattttctaggtagggaagaatagagaaaaggggatggtaagcatcttcagtggtggaaccaatgtgaacttgggtgttgcctgcaaggcagggggctagagagctgagaggccagcttgggctcaggatatgtagaggaaaagcatcagatgaatgttctgaggatccccccacctcctacctttcccttggaggcaccattgaagaaaaagccagccaagccttctcacattgggcatctctgctgtgcctctgtttcgagaatctgcctataaaaatcatatacaggtaatggtgatgttaaccaccactatggttaacatctttgatctttacaacaattctatgcgttgttcccactttacagatgaggaagctgaggttaagtgacttggccaagatcacacctctaagaggaaacagagctgagattctaaatggggtcaccctcatttctatgtcttgtctctttttttccataaatgtcttggtgtgaaaagagatacttttcagatgcttcactgctcattttggagatgctagcgtattgtaccctcagctagttagatattgctagctttggcaattttcctgcaatgttcagcagttcaaagccatcctgtgttggtgtcagctgttcatttcttattttttatttttatttttatttcaataattttgggggaacaggtggtgtttggttgcatggaaaaattctttagtggtgatttctgagattttggtgtacccatcacctgagcagtgtacattgtacccaatatgtagtcttttattgcttaccccctcccactctccccctgagtccccaaagtccattatatcattcttatgcctttgcattctcgtagcttacctcctgcttataagtgagaacatgcgatatatgtttttccattcctgagttacttcacttagaataatcatcttcagctctatccaggctgctgcgaatgccattatttccttcctgtttatggctgagtagtattccatggtgtatatataccacattttctttatccattcgttggttgatgggcatttatgttggttccatatttttgcgattgcaaattgtgctgctgctataaacatgcatgagctagtatcttttttgtataatgacttcttttcctctgggtagatacccagtagtggtattgctggatcaaacggtagttctatttagttctttaaggaatctccatactgttttccatagtggttgtactagtttacattcccaccagcagtgtaaaagtgttcccttttcaccacatccatgccaacatctgttatttttttgatttttgattatggccattctcacaggagtgaggtggtatctcattgtggtttggcacttccctgataattagtgatgttgagcatttttcatatgtttgttggccctttgtatatcttcttttgagaattgtctattcatgtcttttgcccactttttgatgggattgtttgtttttttctttcagctgctcatttctcaattgctgcttctcccttcttatattactcccactgccagtctaggggattaggcctctttctctgactgagtggctgtggggacagtggcactgactctttggtaggtggtgcatggtacagaattagagcaatgagatcctccagtggtggtggtgccaaaccacaccagcccttgcagtccaagggggtaggtggccagggagggacccttggaggaatgagctggaggctgcctgtggggaacaagagctggtgtttgaggtggaaaggggggtggggtaaggaggtagtgatgatccctcatgttatgtgcatctcttcctaactacatgttcggtgatctcatgttgatagtttcaattcaactatgggggattttgacaccatggaaattggcaaatgtaacaaatcatttttctttttcttgacaaggcagttggcaacctttactagcacatcactgggtgaggggcactatagacttctctccctttctgtccccctcaattctcctcctcactcctgactcgaggctgcctcagacacttcccatctacttttatctgaggagtaagagtgggaggaggagaggccaaggaaggttggcatcaggaggagctgacgtgatttcctcttgcaggccagggctggatccatggagatcatctgcgccaggactgttttcttttgttgttgttgttgttttgttttttagcagactggcctagagcaaacccttggagttttgtcaaggaccctgtaagtattcctgtctttagttttattttcatataaagcaagtacaatgtacattaaagtaagatgattcttgttgcatgttcccaaaggatgacctggaaaatgtgctgttatgtggacctctcctgggggccagctcttctgagagtgatctagggtcttgctagccaaagaatggcctacagatgagcagcagagacattactggggagtttgtcagaaatgcagactctcgggctctgccccagacctactgaatcagaggctgaaattgaataagatccccaggggactcatatatacattcaagtttaagaagcactgatgtgggatttaggaagtcctagttgagctgtgtgtgcagaacgatgcggagatggagttttcctagaccagctgttttcaaacctgacacgcctcagaatcccctggagggtttgctaaaatacagtctgctggccccccaccccacagattctgattcagcaggtctggcggtaaggcctaggaattttctaacaagttctcagatgacgctgaagctgctggctcagggacacactttcagaatcactgccttacataagcctctaggcagcctgtaggaagatctctggctttgagaacctttaagaagagcctctgtggctcacttcagatagtatgaccaagacgagcaaatgcaagttctggaatctgaaaacccagatgttagtcctggatttgacacattcttggaagtaccttgacctcttacctttgttttcttcacctgaaaataaggataataataataatcacctcacagcactgttagaaatatcaaagaaggtattttatgatctcttaaatgtgatacaaatgtaagctgccactacaatttgagtatcccttatccaaaatacttgggattggaagtgtttctgattttggatttattcagattttggaatatttgcattataattaccaattgagcatcccaaatctaaaaattaaaagaatcttccaagtcagaggctttaggaaatgatttcatgttgctctctttgtggtgggtgctcttttgagatgctttgcctttctctgtttgatttattgccacttggggaaattaccatatggctgaaaatgtgtttttttgggaaaaaaggatattatgtgttattttcaaggactgttgctgactgtgatttttgctttttgatatatctgagcattaggtgacagtgattcagtcattatggttatatctgttcctggcgtggtaatattagcactccaaaactgtgctccatagcattctgtcagtgtatttataacacactgaagaaactcatcagtgccattgtctcgctgtgtgaacttctcagcattacagcttccagcttgcagaggtctggttgttatgctatcacctttgtaatgccttgtccaggaagtcctcgtaattctttttgtgcccacagatttctgtgaagcatctttgttggagtgttttggggtctctgtgactggccaggaaatcttagctaaattagaggctttggccaggcgtggtggctcacgcctgtaatcccagcaacttgggaggccgagttgggcggattgcttgagtccaggagtttgagaccagcttggcaaaatcatgaaaccctgtctctaccaaaaatacaaaaaaaaatgtgctgagcacagtggcgcatgcctgtagtcccagctacttgggaggctgaggcaggaggttaccttgagcctaggagatcgaggctgtagtgagctgagattgtgccattacactccagcctgggtgacaggagtgagtgaaactctgtctcaaaaaaaaaaaaaaaaaaccaaatagaggctttaattcatcactatctggcatagggaaaagcatgcaggctttagagttagacacacctgggtctggtccggcctccattgcttattacagtggttcttcaacttggcctcacattggacttagctgaggagatttataagcaatatttatgttgggtcccactttagagattgtgacttaattggcctggggtggcctaggcatgtggacttttaacaacttccccaggtgactctactagtttgagactcactgaatatgtgatcgtgagtttacttaatggttctaagcctgaagtctcctcatatgtaaaatgggtataataacatctctcttacagcagcactgtgaggatcataattaatgtgagatgcctaaatgggatgatctcaggggagctggaagggcccctgcttctcaaaccccagtatactttgccatactacatcttccaccaccaccattgggccccctaacaacttccctagttattctggctcatcaccacccctttgagggaatatcttttgaactgatgaaaggacatctgctggctgttgacctccttctcgtctccacctatggatccagcatggttcacatgcctggtaagaggtattttagagacaaagaacataaagtccttgcactaggaccaagatcggcccattaatgtgctagacaccatgacctggtcgctgtctgcatctccccagtgtggctggcctttctgcccacttccttgagtgatgatcctgttcaccatcctctccaacatatcagccgattccaccattatttagcctgtccagagttcacgttcctgtttgcaacaccaaagccttttaacctttcggcatgcttctctcatgaagcctactcttaaccctcagtttgagatgtactatccttacagtgaagtgtctggcacatacttttgggtgctagtgtctaccaaatcattatttatgcacttgcctcatctcccctgctcagctaaaagcttcaggaaatcagggactatccatctccccagcacagagaactgttagtatatatgtgggtgctcaggatgtgttgattgagtgaatgaaagaaagacccttatgtactgacagtgtgtcccttcaattaaacaacccaattacatgaacaagctgaaatctgaagtcctgtgttcccagctggactttgagttctctaactgtaggtgctgggttcttacttctttacgttcctcatggcatctggcacaatacttggccaacaataagtgctcagtgagcacttcttgtcctattaaggagtggagatgtgaatgcaaaagagccaaaggaatgaccccaaaccacttagtggcctcaacagagatgggcaagggctggactttgctgattagtgcagtggtgtcttaggggaatgcgcatatcctaacaagatccattgggtctgagaagaacattttagaacttctatatctttatttaaatttaaaaataattaggctttatacagagtggtataatggactttggagactcagaagcagggagggtaggaaggggatgaggcataaaaaaactatagattggatccagtgtacattacttgggtgatgggtgcactaacatctcagacttcaccactatacaatttatccatataaccaaaaaccatttacatccccaaaagctattgaaataaaaaaactttataaagaaaaataattacactttattgagttctatattgatggctatggacccttcatttgatctgtatggaacatgtgagaggggcactgtcaccctcactggcttgttttcattcaatatattaaaaataatctcagctgatacggtggctcacgcctgtaatcccagcactttgggaggctgaggcgggaggatcacctgaggtcaggagattgagaccagcctgaccaacatggtgaaaccccatcagtactaaaaatatagaaattagccagtcgtggtggcgggcatgtgtaatcccagctacttgggaggctgaggcaggagaattgcttgaacctaggaggcagaggttgcagtgagtggagatcgcgccattgcactccagcttgggcgacagagcaagactccatcttcaaaaaaaaaaaaaaaaatcttgagcggtttacatatagctgtggatttatgaattttattatctagtttatctagtttactacttacaaagtagacaagtggcttaaaaattcttgcaggaaacaggaattgaaatgattattgatgatgtaagcacaagagaacagctagaaattggcagaagtgacccttctcccaggctggtatgccatgttggttagccagatgacaaaagaaatacaatggtggtctaacaagaacaaggacaatggcaatctgacaaagacatgtcatacatttttgaaatagtcaagaagactctaagaaatgtggatttatattcattgtcattgttgtattaaccaaatcctatatggacactgtgtcttgaagaattaacccaatggtgtttgaagaattaatgacttttgaagattttaaatttcattttacctcatcttttgaaatttctgtttttgtatttgttaaaaatattcctaatatattagtctattagtatatctctatagaaattaaacatccatgtattgggtgtgtatgctgaaaaatattttactagtaggagcgcatgtccactgtgtcagaatgtcatacaaatgagagtgtagtttgttcttgatgggcttttagcatcatcatgtcatattgctctcatgtgattggctcaccagaaagccatttcaggaatgtgtgttattagtcaccatggtaatggcacagctgggaggggaatggatcattaaagatccatcatcactattgagttagaaattaactgagatcacacattcttctgaggtcaggtcatcttttgcttatagaaaaaggcaacccttaaaatttaacagatttttaaagatatgtattataggcattacatgagcttatgaggttgttcatacatttggaagtgaaagacaaaaccctagaaattgactatttgtcaagcattttgttatttatttgaaccctgcaacaactctgtaaggtagggatcatcctcattgtatgaaaaataaagataaaatcacagaccttaagtgacttgtcgaaactcacatatttagtaagtatagaatgagggtgcaaaattagatgattggtattagccaatattttgctgttagtttccaaaggcaaagaatacataggcattgtatcaagtcacctaatccagtaagtcctcacttaacatcatcgatagcttcttggaaactgtgactttaagcaaaatgacagataatgaaatcaattttaccataggctaattgatgtaaacaagagttaagttcccatggcatattcctgctcacaaaaacatcaccaaacttctaaataaagaccaaaacacttctaatattgaacattgaatacatgtgagctatgcgtacatttaagaaagacaaataaaagcaagtaagataattttttttgatctttggaacccattcaatgtttttgtagacatattcttttttttatccttgttttcattttttaaattatactttaagttctagggtacatgtgtacaacgtgcaggtttgttacatatgtatacatgtgccatgttggtgtgctgcacccattaactcaactcgtcatttacattaggtatatctcctaatgctatccctcccccctccctctatgcagccataaaaaatgatgagttcatgtcctttgtagggacatggatgaagctggaaaccatcattctcagcaaactatcacaaggacaaaaaaccaaacaccgcatgttctcactcgtaggtgggaattgaacaatgagaacacttggacacaggaaggggaaagtaagataattattaacccagttattctagttcagggttgcaggtgctggagcctatctaggcagctcagggcaccaggcaggatccagccctggctaggatgccatcctgtcacagggtgcagtagctcaccatgctcactcacactgggaatgtgtagacacgccgattaacctagcaggcacatctttgggatgtgggaggaaaccacagcacccagagaaaacctgtgcagacttgaggagaatgtgcaaactctacacagacagtgaccctggcccagaattggttttttccttatcaactgtataacaaaaggatgttgaatgaaatgatgttattcgaggatctgctgtaatttgaaggtactcacaatttccagacacgaaaggctgtgtaacagtggactttataccctgagagtgaaagtaaaatgttcactctgagggctggagctggaatctttccttcatctatctctgttaggtggtgaaaagcaagccaattttggttgtgcttattgacattgtatcatcttatgtcatttctcaagtgaaagttctgcatttttgtatgagtaagaggtccctcgatggagctttgccaactgtttctctcaagatgttctgcagagcatcagatattgacctaaaatacaataaatgggcatctctctctgttaacaggaccattgccaactatttggtgtggagaatggtttattccagaattccaaaccttagcaggcgctttcagtatagatggctggaattctcaagggtaagtttaagaagattgcagtgttacatcgctggataactttacatgctggaatagtccatatattaactgatccagtaaaaatcatctttagggattagacagggggagtttgtagcccaagctctattgtttttgtgtgtgtgtgtgtgccttatttatttttatttaggtataaattacatatggtaaggtacactcaagttttactttgatgggttatataaagatatttagagaaatacttgaggccacacattgttttcaaacttccccgtcttattagtgtattcccattttcccccagagtttttaactgggtcactgtaattatagttttaacatttctttgtgatatatttgtaactatcttttattctcagtattctgaatatttaaaatgtgcatgatagagatattggatggtagaacttcattttcaatttggaaatggaattttgtcttaaactttgcctataccttccatctttgaatctatcctctgctaggtccaagaggctccaatttagttttcttgctcaactgtctgagatggttttcctccacctgctcacctggctctttatttatttatttttattagagatggggtcttgccatgttgcccaggcttgtcttgaactccagagctcaagtgatcctctcacctcagcttcccaaagtgctgggattaaaggcacgagccactgtgccgggcctcacctggctctttaacctttgcttctctcccacccttgctcgtctcccagtttgtacccatgttactctcacctttgtttttgaggcttatgtctgactaattctcctaccactagaggccgtaaggattttgtatctttgaaacagtttttatttttctatcaatttaaagttaagtgaatggtgaatcttataagctatgatttcattcaagaggcattttagttattagaggaactaataagtatagaaattcttagtgggccattactctggaagagtagtgcaattattttggatatgctttgaccctataaagtcactagcatataaagttactttagggctgggtgcagtggctcacacctgtaatcccagcactttgggaggccaaggcaggcaaattgaggtcaggagtttgagaccagcctggccaacgtggtgaaacctcgtctctacaaaaaatacaaaaattagccgggcatggtgtcacgcacctgtggtcccagctactcggggggctgaggcaggagaattgcttgaatccgggaggcggaggctacagtgaactgagatgatggcaccaatgcactccagcctgggcaacagagcaagactccgtctcaaaaaaaagaaaaaaagtcttttttacagagaacagcataaaacaactatatatatatttaggtcatattgatgggttaagatacaaaacaagtaggttttgtgtgtgtgtgtgtgtgtgtgtgtgtgtgtgtgtgtgtgtgtgtgtgtttgtgtgtatttttaactgctacgaatcacataaaagatgatgcccagctgctttccacccctactgtgaagagaatgagagaggtgtaagaagcactgtgtgaacatttaaggttaggtatgaggggatgtttcttgagcacgaagtgctaaatataatattgaattgccgaagaaggttgtaggatctctttctctagaggttttaaaaatagattcatcgcttacctctgagagaggttaccagaaatcagaggaagaatagatgaaattaagccttaatcccattcctcaaaacaacctgggtctaacattgtgcaaaggacacttctgaccaccattctcagggcctcccttcctccctgcctgcacccccagcttccaagggcaacttacactatatttatttctctgcttttattcccaagagtaaacctctgacccaggtcctgcttgggaaacttcttacttgtttgtaaatgttttcttgcaatggtataattgggacagatgggcaaagcatttacatctgtattttgcttgtttatcagtgtgttttttgctgtgacacaatgtaaatatgctccctgtgttgttcatggtgggccatgttcttctggtctgccttgttgagtgtgctactcggagcaaggaaaccctcactgggcaggaactttgatcacccactgattctagaccttcttagtggaactttagttctcaggagatattaaatattatctagacacttggatagcatcctctcatgtccctgctaactgcagaaaagtgataccattgtccagattctttgtttaatggggaaaattgggaagaaaggatacatatattattttaactgttaaatcactttcttttcttcttcttctttttttttttttttttttttttccagacagagtctcactctattgcccaggctggagtgcagtggcccaatctcagctcactgcaaccaccgcttcctgggttcacacaattctcccacctcagcctcccaagtagctgggattacaggcatgcaccaccgtgcccggctaatttttgtgtttttagtaagcacggggtttcaccatgttggccaggctggtctcgagctcctgacctcaggtgatctgctcacctgggcttcttaaagtgctgggattacagatgtgagccactttgaccggcctaaaacattttcatttagtttgaaatataatggggacaagcagaatttttttcttcaactattttacctttgcctctactatctgatgcatatatatgggttagggtgtgcagtgttttgtagactgttttcttcaggttgtttgaattgttttcagccatgggttttatccaaatgaagtttaatctggatcaattatctcccacaggtaatccaggggaccacaactttgctgcctcaatgggacaaatgtgtaaactttattgaaagtgccctcccttatgttgttggaaagatgtttgtagatgtgtacttccaggaagataagaaggaaatggtaagtggtactccccagctagcaaaaaataatggcaatttagccagatctgacaagggtatattcaacaggctaatgtcagccttccaggtggtagtggcctgtgggtattgtcttcagattctttcaacttctaagtgaaataggaagaaaggtcatcaaacgagagtgaggatgagttagcaggtattgaaggttagaggagagagaaggtgtgtagttttccaggggagtgggagagtgaataaactgagggaatgtagtatagctgcttgagggcaggcatgtccagatgtaggtgaggtttgaggtattgaatttaaagagggactcatcactgtggcaacgtgttcttctccatctgtttcaactgcattggagaaaagggtgtatttttttttctttcagctttattgagatgcatttgactaataacaattgtatatattcgaagtatacggccgggcgcagtggctcacacctgtaatcctagtactttgagaggctaagccgggcagatcacttgaggtcaggagtttgaggccagcctggccaacatggtaaaaccccatctctactaaaaaaaatacaaaatttatctgggcgtggtggcaggcacctgtaatcccagctatttgggaggctgaggcaggagaattgcttgaaccccggaggcggaggttgcagtgagccgagatcgcgccactgcccttcagccaaggcgacagagcgagactctgtctcaaaacaaacacaaagtatacaagatgatgatttgacatacattgtgaaatggttgccacaatcaaatgaacacatctgttgtcacacttatttaccattgtgtgtgtggtggtgggggatgaggacacttaagatttactgtcttagcaaattcaagtatacaatacattattagtaactatagtcaccatgccatattttagatccccataacttattcatcttagaactagaagtttgtaccctttgatcaatatctccccatttccctgcccccagcccctggcaactactgttctactctctgcttctatattttaacttttataaagattctacatataagtgagatcatataatatttgtctttctgtgcctggcttatttcacttagcataatgtcctctggctttatctatgctgttgcaaaaggcaggattttcttcatttcttcatttttatggccaaatattccattgtgtggtacacacatgcacacatcgcagtttccttatgtatttatccattgaagggtatttaggtttattccatatcttggctattatgaataatgctgcaatgaacatgaaggtgcagatctttcttccatatactgattttacttactttggatatatacccagtagtgggatggctggattgaatggtagtcctatttttatttttttgaagattttccatgctattttccataatggctgtaccagtttacattcttaccaacagtatatgagcgtttcctttttttccaggaatattttgccaacacttacctcttaaatttttgatcatagccatcctaacaggtagtgaagtgctatttcattatggtttgatttgcatttccctgatgattagtgatgaaaaccttttcataaacctcctgtttatgtgtcgtctttggaaaaatgtctattcagatcttttgcctattttttaatcagattattcgttttttcactattgagagggtgtattttgaattagaaacatggatttggccaagttttttgtctgcattttatttttgatgaattatattttacaaatgtcatgaagtaaaagatccaggcatgattaataataatccgtgtagtcaataagatacaaatatatgagcagcttggatgcaggtggtcaataaacactgaattaaagggcaaagacattgtaatgtcatgattgttcaaatgattggtatcacgtagtgatacataataataccaaatggttggtattatgtatcagtacatagtcattattgatacataatacatgattatgtattatgcactgaagtttgctttgcaataccatatctaagtacatttgtggcaggccaggtctcactaacacaggcctccatcacaactgtcccagcacgtactgagtagctaggttaaacattaaaagctgattgaaccactgcccatatacaaagcctggaatgtaacaaagagcccaccaagagttttgcctaggcttttcctggatcttgaagcatgacaagataatgaatgaattcttaacaggacccttttaggattaaacaagttttattgggggtctgaagaaactccacaggcctccacaaacaagtttactggggtctaaaggaactccccaaacctttatgatttagcaggagacaagataagggtaattacctcagtacctagacccatttagattaagtaaacttactgaggctccagaagaaggtcttcaagactcacacctagttatagattaaaagaagttaatcatttatgtctttcgacgattgcacactttcacgtagacatatagcttagaaggtatatgagctctagaaaactttgtaactttgagttggtctggtgataatttccaggctttctccctgtaaccagtggcagaaaataaaactctgttcttccccagttcatttgcatctcgttattgggccgtgagaaatagcagcctgaccctcagtttggtctgggaacaaattgacctatgttaacttgtttttactgtctaactatgagactttatgtttgaacctgaaagttcccttgcaaataattccactgaggaattaatggcttatttcaaaatactcagtattctcattgcgtgttttcttttgctctttggtcagagtaaatagattgagatcttatcagataatcacagtagtaatattataatctctgggaaggctataaaaacaattaaaggataatgaaagatttaaaaaaattatagcaggttttttggcagtagaagaattttaactaatatgaaaagtatgtggattaaacttgtttttctcagttttggtgtgaaagtcccttttccttgtgtcagggtatgacattctaaaataaagttaattttggcatcttcccccttattttgatgtacgtgggggtagtttggtagttaggcagatactcatctctttaacgtaaaattgtttgcctcccttgtgctgaagctgtttgcctcagggaatacttaggttggaaacttataagagaaatatctggccttttatagcctttttttttacagggctcccatccaagaaccacctggaaccactgatttacttgaaaaacattcagtattattagctacagtctaaagaaaaagaaaaacagaaagatccccaaaggggcaaattccagagaccctaactcagatggaaggctgccattgtttatttaccaaaaaagtttgttaagcaaatgaatacagtcagaagcttaaacttcaggtatgtctcaaatttacatgtgtacataaatcacgtgagcatctgcttgttaaaaatgcagattctcattgcattttaacaaggttttttttttttaagttgtgtttggggtaggacccaagaatttgcctaacaaggttccaggtgcgactgctgctgctggtcgtggaccacactttgcgcagcaaggtcttctcatgattcatttgtttgtaaacagcaccaaaaaaaaaaaaaaaaaaaaaaaaaagcctcggtgactcacaagagcaggccaggccagttgacatgaatagcagtactttatttaccaaaaccggttacattagtgcaagtaactgctttaattttcagatcattgaaaatttctgtgattcagattggtttaaatggactgtgaaaaaccctgcgttaggacctccaggctttatcttttgaaaactgatacctaggttttactaagagactcccgccccacttctcctccgtgtctgttttgagaacctcttgatgacagagttggcccaactgcctgtggttggtaccctctcttctaaagagtgagtgggagagagcagttcacattgaggtttcctacctatcagtgttctcctccttttcactggggaaaacacataattctatattactgtttcactaagacttcctacatccaactgtgcatttggacacaccgatacaccaacgttctcatactcattcacacacacaaccatgggaatttagcaaattgaattagaaatgagaagaatagcatgtagaaaaggagagtccttcaacagaaagccaccaaaagaggtcatatagtacaatcccttgcctcccagttagcaggacagagccttaactcgtgagattggctgcaagtgttgctttgtctttgcagtccaaagtagcactacccaattgaactggaatatgagccacatattttttttgagacagggtctcactctgttgcccaggctggagtgcagtggcgtgatctcggctcactgccacctccgcctccctgtgttgggattacaggcatgagccactacccctggcctccattgacttttatattaacattttctccctccttacctccctttcttcccccattccccagaactaaaaatcataactttgtctatcagaggacttctttaattttttatcttatttagatgaagattatttataattttaaaacattccattagctaagcatttaatattacttttgtggaaagttacatgaaagtgggactcccctagagaattgatgatatatcatcactgtaaatagagatgatgctctcgttccactgtgccaagccctgatccatatgctcatgacctaaatggcaggagagaggattagttgtgttcaggaaggatgtctagagttatcacttgctaattttcccctttatttatttttattttttaatactcttgtctttttctttttcttttttttttttttgagacagagtcttgctccatcacccaggctgaagtgcactggcatgatcttggctcattgcaacctctgcctcctgggttcaagccattcttgtgcctcagcctcatgagtagctgggattacaggtgtgcaccaccaggcccagctaatttttgtattttttttgggtagagatgtggtttcctcatgttggccaagctggtcttgaactcctgactttaagtgatctccctgcctcagcctcccaaggtgctgggattatagacgtgagccaccacgcctggccttgtttgattattattattattgcttatatctgtaatgtataagtaagtgccccaggtagatactcatgtccatggagggcaggtgaaggttccaacgaaggccagggaatgaagggattgtcaccatgggcctagttgtgactgtgatggtcaggacatattggttttaaaatgtggtgatgataataacagtagcagttagctttcactgaggtttaactagctgtctggtattcttttaagtgctttcagtgtgtgaactcacttatcctcacaatgaccctgttactgctgttagtgccctcattttccagatgaggaaacaggctcagagagttgaagtaaattctctggagtcatatagcttgaaaatggcttaggtagggttcaagcccagacaatctacatggaaaccagtgttccattcccttgcttatctctgaaggcacttgaatctttgccagttttacgaatatgaggagaccagaaccttcttagtggcttatcttataattacccttgttagcaaattattctaatattaagatcctaaaagggcatacatttcatattttttaacatttcagaggtaggaaacagttggaataggtttggcttccagtatttcaaaattttaaatataaatatagtggaaacctaattcatatccaaccagttgacatcacatttttgtattcatataattctcaggagaaagacggaaatgataagaagcaagctactattgatttaatctaagaataaccttgcaggtatatctttggctcagtctacacactgagctcaatttctcgtattttgtacatacgtcattctaaggagtgatccctgatgtttgcagtggtaacccaaaggctctgtaagatttattatcaaagtttaaaaaaaaatgtttaccattctctactaaggcggaaatgtgaatatatacatcaaagaaattttttttctattgtgttgatgggaaaaaaggccttgttgctgtaactctagtttctagaaaattcagtaaagctgaagttcccatgtgaacattttggctgggctaagttcttctgtataaaccatgtcttggtttgtttcattgtagacactatgtccccaaactgcttatctttattcatatatctcatctctgccagtaggtattttttgctgctccctcaaattttctgcatttttcttatagagtaaaccctgctaaagcaaataattattttgacacttgttaaaatagtaatgaagactattcaggactattgcaagaggtgtcaagtctattgcaacaggggagaaagattaggcccaactctaaatacagcaaagatagctggagatttatagccagtgaggagaatgagggggtcagtggatggaaaattatgaagaggagacatcacgagcagggaaattcttgttaaaccaacttgacaggattcttgtggaaggcaggccaaggtgatcaggatggggattctttctaaagtgacttagcaggattcttgctacaactggactagacaggcttgtcgaggacaggatgggggtgggaggctgggaggagggtaagggcaagacgtacttgagaagagggctcagaggagcctgactaaactttggtcaaggagagagtctttgtcagctctcagatcaaagctaaagtcactgatctcctgtcatatattaaaacattctatatgcagaaggttaatctagttaaagcagagcaaatctattacacttcagattcagattttattaagtgaagaactaaaacttgactccctatgtagaacaattcactaatttctcctgcactctagcagctattctatttctctttaaagacattgttcatgtccccaagtaatgccatggatgccctaaaatatcttccattttttctgagctgctctctgcctgagcaattccagtagtaattcttatcctaagaaaagaattctcctcccaccccatactgctacatctggtgttgaagacttaaatacccacgtgggtccaattgcagtggcggagtttgaacttgcaacctcaatacactagaagttcacctcattagtgagctaagataattgaattgatgtactgccattaatattctttaagttctccaattccctcgctcactgtttctctcagtggttgagtaaatgagatgtaactataacgttgatggcagaagtcacatgaaactcagtgtcatgcattatagcattgcccttatactgaggagtttttcgttccttgcaaattcagctgctcacaaaggttgttctcagtaaagccactgtacagataaagacaatggtcccttcatcacaaattgtgaaagaaaggatattctctttggctactaaatgcccgtttctgtttgtctagtaagtggtgttggttattattatcaagatcactttccagagaaactttgctgaagacctgtccaaattaaggcaaaccatgatgatttggttttttaagggctttttaatatatttataaaatattgacctaatatagaaattacatctgattttctgcaaagttgcattgatagctcatagcccagctctgctcttaccaacatgggcaaatcagttaacttctttgagcttgttttcctgttataaatgatgcaagagtttctgttgctttggtaatgctgtgtaacaatcaatcacaaagcctcactggcatttgacaataagcagttactgctgatgcatctggagtcagtggtgggcccccatgcagctctgttgattttggccaggctggcttgaatttctgggggttggctgatcaaggttggctttggcagaggtgattggaatgactcggctctgcttcatgtgtcctgcttccttcagccggctagcctgtgcatgttctcatggtgatggcagaagttcaagcaagcaagtagaaacatgtgaggtctcctgagacctaggctcaggacaggcataatgtaatatctgcattttgttggccaaagcaagtcacaaggccggtccagatttacagactagggagatagggtctgcatttttttttttttttttttttttgagacaaggtctggctctgtcccccaggctggagtgcagtggtgcgatctcggctcactgcagcctctgcctcccaggctcaagccatcttcccactttagcctgcgagtagctgggactacaggtgtgcgccatgatgcccggctaatttttgtattttttgtagagatggggctttggcgtgttgtccaggctggtcttggactcgtgagcttaagcgatctgcccgccttggcttcccaaagtgttaggattacaggtgtgagccacctgtaactctgcatttttaatgagaggatctgcaaagtcacacagtaaggggtgtggataaatgaaggagtatggcattaaagctgtcagtgctgtgtatcacaaatagggataaaagtatacctccttctttcatttgaggtgagagttaaatgatataatctatgtagaaggcctagcataatacctggtacacaaaaagtgctcagtgaatgtcatctactcttattgctaatattgccatgcctaatgttaataattaagatagaatttataatatcaacttcctggcacagctgtggcaacttctgcatttagattgcctctttttaatttatcatagagtgagggaggtgcctggggggttttgctgtcgctactcctccatacatgcctagtatagtagctttcattggaataaagatccttttcatgttagtgccctggccacattccagaacccaccctatcatttaacgccaagtctggctcatacaagagtctcatgaaattactcatgaaattactcgaggagccaaatataatttctttttcttttttttttttttttgagaccaagtctcgccctgttgcccaggctggagtgcagtggtgcgatcttggctcactgcaagctctgcctcccgggttcacgccattttcccgcctcagcctcccaagtagctgggaccacaggtgcatgccacctcgcctggctaattttttgtatttttagtagagatggggtttcactgtgttagccaggatggtctcgatctcctgacctcgtgatctgccctcctcagcgtcccaaagtgctgggattacaggcatgagccaccatgcccggccatgtaatttctagaataggtccagatttcataaccctctgcaggctaaatcttgttacaacaaatatcatccggtcccaatcgtgacagctcatttatgcaatcttcggtcaagtaacatccagcaaaacaagtaatttagatagctcattgggaattcttttgaaataagtatgaacacttactcttgtccttgtctttgagtgtgctgccacgacgatgacacattggctcacctttcttgtttgttttctccatttctggctagcattgggcagtgttgcctttgccacatattatcagccacagtcttgtcaagcagatctggtcagacctatggaatgtgaagaccctttattagaaattcatttacctaaagaaaacatttatgccttccaacagatctgaatgttggaagtgaccagacatagttacttgctggggagaatttacccacagccaaaggctagactatttgagactgattgacttgtaaatattattctggtttctgatccatcctctcttaaagttggaaagtggaaaacaggaaaagatgagttataaaattagaacacagcctatatgttcatatccagcaaatagaaatataaatatctacctgagtcttatgaatatatacctttagataaaaggacatgagaaactcctcctgtaccaccagaataacccactttatagcaccaaataatttgattttttcttcttttgccaaaatgtttaatagctatgtaacactgctaatcctgacaaactgatatgatttattcactcacttggctgccagaaacctcagcattttctaactatccttagttcttctggtttaaccacatgtcccacttcaatataggtcactttttacttattttgttgccattattttttatcaggagccaatccaagggcatttttataaatagttatagtataagtaattaattaatgaatatttcatatttattggtgcattcatttatttaatgtctgtgtttctagtaaagtgacaattgccagaaagaaaattttaagagtccccctgagattaaagcctatttcttcagggttatccacataaattattaacaacgatttccatttttcacattccaccaatcagtggttacaactcaagaaaacttgccctgttctagagcaatgagaagactggaaacattttaatctcatggtttttttccagatattataacttctaagtatgttaaagaggaaagcctactcaacattatgccttttcgttaagaattttattaacattaaattagtttaaggttaatgcccataatcaaccttactgattttttttctttttcctttcttttctttttcagaactcctagcctataattattcctactagatatgtactatatttttaaaccattccaagctgtttgtcatgtaccatgttgacatcacctatcttagaatggactaggctaacttacagagtcacttgatttccactaaagtttgtgtttggtagtaggctacagtcattctggagacatttgctgtgaaccttgtcccctaatataacgatggattttctattcactgataagttctactcatggattcaggctttgaattactaaatcagagtaggtctctcttttcaaaaatgacttcacctaaaaagggtaccatgcattttttttttccctttttcagctttcatgttgttaaatctcatgatcatatctgcacagcaccatattttctatgagtgagtttgttaatattttctctttatactattggaataactgttatctgttagcatatatgaaagatatttgattcaatttcaactctgctaggtgccaattgaaggtttcaaaaagcataaattgatcagcttgtatttactgagcatctgctatattttagtattaggtatgaatgtgagatatggactcgtgaaaaatcatatcacatgagatatgaaatcataaaactaacaaaattttaaattagcagaatacttttttgtttgcttacatattcatgatctcatttgatctaaatcatggttcctgttctcaaagcttatgggtcttgttagggagaccaaataaatataaatgaaaagacaacaattaaacacacacctatgtattattctgattttaagcctcacaggaactcagagagggaattgaaagtgtgggtttaagtgtttgggattcatgggtatgagataggatttgagttgccttgtgggatttctttattatcagggacaaagctttgaagaaaactacaaccgatcatggggcaaactaatccctccttaaagcaatgttggcatatgtcccttcaaatgtattaatagaaccatcatgactcatttatgcaaagtacagaattcttatgtctatgtgatgggaggaagggtaaggagagggcaagaggagcaggagagataatttataatttgctaagataggagcatctcattaaagtaaagccctggattgaagggtaacaagtgcctatgcatatgtgactcaccaatgtctggtgtctgatgtagaactctatgggcaaaatcctggggtgcaaagaatgaaaaaggaagaacctatttttagataacactggttgaggaagagaactaagaactgcccatagatcaaccaaatgaactgtatttttatagtgtggatccataaaatctgaaatagttgtttttttttttttttttttttttttgagacagagtcttgctctgtcacccaggctcgagtgcagtggggtgatctcagctcactgcaccctccacctcccgggttcaagcgattcttgtgcctcagcctctcgagtagctgagattacagttgcccgccaccatgcctggctaatttttgtatttttagtagagacagggtttcaccatgttggccaggctggtcttgagctcctgacctcaggtgattcgcccacctcggcctcccaaagtgctgggattacaggtgggagccattgcgccctgcccctgaaataaatagatatttaacaaaacgttgctttgcctagagggctcttaccctgaatatggcagattttaccaaaataacacttgagttaatttttatatgttatattttgacctttgactggctctaaataaatatttcctatggataacttcaccttaagacttccactttaagggatttctattaatgttatatgctgcctggttgaggtgtgaggtccaagtttggtgaagaaatactatttctctatttttttcttattttaaaattacagcaggtttttgacttgactgaaggcaatgttattatgtgatgctgtagagtagtctaaagataaaaatcagaagtgttcagtgatttatcttcctagttccagcatgctaaaataattatttctcttatttgcattgacatgtcaaccaatgaaattaatcaccttcaaagattttccttgttcttgaagtctgctggggtagttcaacaccatttcacagaaaatgttatacaataaatctgtaaagtctgccaaaaaaaaaaaaattgagaacctgaggtgggggatggtgtggggagtggaggtgccagagaagacaagggcaaagagcagctgaggctcatgggaaaaaaaaagtgatttacccgcgttttgacaaatgtgagagggccacaaagagtgagttaccgaagtgtggattcagggaagacagaggtggtgggggcaggggaggaggtggaagaaaaggcagaggagggaggaactggcatgtgaataaactatttgtcatttttcactctggcagtgggctgaaatgtttttgcctctttttattttcatttagaatgccaatcaatgggttacagacaaagagctttgaaaaccttttcttatttatttatttagagacggaatcttgctctgtcgcccaggctggagtgctgtggcgcgatcttggctcactgcaacctccgcctcgcgggttcaagcaattatcctgtctcagcctcccaagttgctgaggttacaggcatgtgccaccacacctggctaatttctttttttgtatctagtagagacggggtttcaccatgttggtcaggctggtcttgaactccagacctcaggtgatccaaccgcctcagcctcccaaagtgctgggattacaggcgtgagccactgcacccgccctgaaaaccttttcaaaatgcattaaattttaatgaatttgatagccattttaatgcctgggagatgctggacagggagggtcctatgaaaccaagctgcttagagagaagtatctggaaacactcagccccattttaataatagccacatactccataaaaatacctcaaagagaacaggagcaaaatgaccttaagattcatcataggaatccaaaaattccaaaatttgctgaagatctttttagcttggagagtgcttatttttttgataatttattttaaaacctaataaaatgttttgcttttgtacaccttgtcccaaataaatattttctttggacatattcaactttttattatttattgggtgctttctattattgctacatcctggccagggtattgagagggaaccttttattgtcctctttgtccctatctgtaaatatagtaatccccccttatctgagacagatactttccaagaccccccccaacccccgcccagtggatgagactggggatagtactaaactctatatatactatgtttttcctatgcatatataactatcataaggtttattttataaagtaggcacagtaagagattaacaccaataactaataataaaatagaacagttataatgatatactgtaataaaagttatgtgaatgtggtctctctttctctcaaagtatcttatggtattgaactcatgcatgtacttcctatgatctgtctgataaccaagatagctagcaagtgactattgggtgcgtatatacagggtggagatgctggacaaacgaagggtgattcacatcccgggccagacaggctgggatggcatgaaacttcatcacactaatcagaatggtgtgcaatttaaaatttgtgaattgtttatttctggaattttccatttaatattttcagaacacagttgcccataggtaactgaaactatggaaagcaaaatcgtgaataagggggtactactgtacttctcttcctagtaatatgttcatgctgccaggatgcacatagccatgtgcgaagaaatataattttttagataaacctccctttaagcagaaggtctcaatcctatttcatggagaaaagacccacgtttatactaggactctctcaaccttctacatctaatctttagattcttctgcatgcctgcctatcattttaatcttctctcctctcataagtctgtctcatatctaaggtgaatccttccatatagtctctggatcccatcacctcctttgccctctgagacaccactcatggcttgctttgtcccatattttcagtctcttccttttcgctggatcctttctattggtatttaaacatagtcaaatctctcagcttttcaacaacaacaaaaacagtaggaacagcattagcaagcatatgcatgaaacccaaactccaaaccctcagacccttcccttaaccctacctctacttctctcctatctttgctttttctccttcatagacaaactcaattaatttgtccagacttgctgtcttcgcttcccacacactcttcatcccactagtttggcttctgtccccatccctctttttcttccaattttctcagtcttattgaatgacggtgtttgccaatatctttctgaagcctaggaatgaatctgactctctctacgttcctcactttcccacataaaatgagtcacctgtttccattggtttggtctctaaatctctcctttgagtccacccacttctttccctccccattgcccctccctaatttgggaagatataatttctttttctctgtgaacgtgatgggccagccaatgcatgttgctacatgatgagtccctaaagacttagggccaggtgtggtggctcacgcctgtaatcccagcactttgggagactgaggcgggtggatcacctgagctcggaggttcgagactagcctgggcaatatggtgaaagcccgtctctactaaaaatacacaaaaattagctgggcatggtggtgcatgtctgtgatcccagctacttaggaggctgaggcagaagaatcgcttgaacctgggaggtggaggttacagtgagcagtgagccaagatcatgccactgcactccagcctgggcgacacagtcagactcattctcaaaaaaaaaaaaaaaaaaaaaaaacttaggcatgctgataggcaaaagatctagtccccggagatttccttgtcattttaacatcctcctgatgtgggttttctgtttgaaattgtgacttatgcatctctcagttgattccctttcactccctggcatttctctctgattttgggagggatcctctgttgttactagaggctctgagctctccactgttattttagctctttggtcaggtcctggctctggtcctcattagctgtgtcagcttgagcagatcatagactccttgacccttaatttccttatctgtcaaataaatggtttcccctggtctagtgggtctcagccctgactgcacattagaattacctggggaactttttaaaccctcccaatgcccaggctggacctcagaacaatgatactagcatcccgatgcccacgacgcaggattttttattttatttagaaattttttgtcagtattattttttttttcttttgagactgagtctcgctctgtcacccagactggagtgcagtggtgtaatctcagctcactgtgacctctgcctcccgagttccagtgattctcctgcctcagcctcctgagtagctgggattacaggcgcctgctactacacccagctaattttttgtatttttagtagagacggggtttcaccatgttggccaggctggtctcgaactcctgacctcaagtaatctgcccgcctcagcctcccaaagtgctgggattacaggtatgagcccctgcggccagctctcagtattttttaaagttcctccaaagattctaatgggcagacaaagttaagaaccaccgacttaatgatttttaaaggaccttttgctctttgctcttctagcagtttgtgttttatcccaagttgaagtttctcttcttttaatgtttttaccaagttgggaagaaatagctgtgaagctcccccgacccccttccatctgctgtttgttcttatttacatatgatggaacccagcccactgatttatagctctggttccctcacaactgttattgaactgaaaacatagctgaaaacttattaaacagaaaaaacttattttgagcttcatgctgacaatttattatagaaccaaggaaacatttcaacgtctttccttctagagttaatgttaacaattgatttacaaccccatgctctcaaatgaaaaagttcattctggggccaaacccagtgttttttttttcttgggtgtcccattgagaaagccaaagcatctctgcaggagaactggatttcgaggggtttgtatccatgaacaggcagggcctcctcacattgctgccggtggcctctaatgtgacgtgtcagtagcccctttcctccagtcctctcttctggtccacagacaccggcagcaaagccaggcacgtacatcctcactatgggtgtggcctcactgttcaaatgctttgcgataggtctttcagaagtccacctttcggtagcagccccctttagacctaccattttattttattattatttttttagagacaaggtctcactctgtcacccaggctgaagtatagtggtacagtcatagcttactgcagcctcaaactcctgagctcaagtgatcttcctgcctcagcctcctgagtacctaggactacaggtgcaggcgccaccatgcctggcctttaaaaaataattttgtttttatagagatgaggtcctcttgtgttgcccaggctggtctcgaactcctggcctcaagcaatcctcctgcttcggccttccaaagtcctgagattataggggtgagccactgcccctggcctatacctacccttttaaattggaaataacaagacttttctgagctgccaaggagtagagaggagagtaggaagatgatatagaagagccgaacatttagtttaacccacggaactaaatctggaaagaactggggtcctgacataagtgtgattcatattggtgaagtgtcctttggggtgctaagtctccctgcccgtttctctgtgttaacagttatctctttcaactgttcactttcttctgcaatacctatctgaaatgcacagcccatgcctttcctgtctctctcagtcctttattaaatgattaaaattagttggcaccttgataaggatgaactagtttagtagctacagacaggtaagttattggtttgtcataatctatggtgaattcctatccctgtatacccgtataattcattttatagctgggccaccacattattctcatggaaagaaatggttttttttttttaatgttttttattttttggagacagggtcttgctttgttgcccaggctggagtacagtggtgcagtcatggctcactgcaacctccacctcttgggctcaagcaatcctctcacttcagcctcctgagtagctgggactaaggcatttgcctctacaccaagctaatttttatattttttgtagagatggggttttgccatgttgcccatgttggtcttgaactcctgggctcaagggatctgctcatctcagcctcccaaagtcctgggattacaggcatgagccaccatgcccagctaatttttatatttttggtagagatggggtttcaccatgttgtccgcgctggtctcaaactcctgggctcaagtgatccacctgccttggcctcccaaattgttgggattacaggcatgagccaccatgctgggcctggttagttatcttttagtggtggaaaaaagggaattttcctggaaaaagaagtgttgccagagcatggagtcaagctgaaagaaccccttacttaccatgttgagtaaagagtcatttctcatgcaagccaattttgttccagaaaacctcgactgaagcttcttggctttgacgttccctctttgggtattttcttgtagatggaggaattggttgagggcgttcgctgggcctttattgacatgctagagaaagaaaatgagtggatggatgcaggaacgaaaaggaaagccaaagaaaaggtaaggattccttttgatgaaaaaaaaataagacttctggtttaatggatgttcatgcttgacattgactgtgtagttggtttttatattgactgaactgttgactctgaatgaccccagagttagctgtctgcttttggatgaatacatagatttttgtttcaccaggaggtaagagaaaataatacctgaatttttcgaactgcattttcaaataccttgtaattcggcctttcctttctcctaattgctgtctgtaagaggcacatggcttgctgcctggtgaattgtgtcataaaccatcactggatatggcagaatgcagagcagtggggagtcacagggagcagctggaacaagagcccctaagacaccaaaacgaagaaaacccatattggccacatgtccttctgctctgtgcatgatgcatgcaaatgtcctggggcaaatcctttcctgtaaccaagcatatctccttcccgacccatcatttggcacaaatgacccaaatagtatactgataaactgcagaccagtgttctaccattgcttaggactacaaacgtatttcctaatagaagtggacacttgctgggccttgtaaaattttctgatactatgcgacacgataagggaacaaaggagaaaagtattgacagccatgctgtttaaaagtagaaaacgggctgggtgcagtggctcacgcctgtaataccaggactttgggaggctgaggcaggtggatcacttgaggtcaggagtttgagatcagcctggccaacatggcaaaaccccatctctgctaaaaatacaaaaaaattagtcgggtgtggtggcatgcatctgtagtcccagctactcgggaggctgaggcaggagaatcgcttgagcctgggaggcggaggttgcagtgagttgagatcgtgccactgcactccagcctgggtgacagagcgagactccatctctgaataaatgaatgaatgaatgggatccattttgaattccagagattctgatagagctggaattcaagtgggtggagcatacctgctagactcttgatggatgcttctctgcagctgagcatttcttgtatctagaggtatttttgaaagcttcctgagtataacaatcacctgggttgcctggacgctctggctttctgggccccttcccagcaaggcctgggttaatggatcatggatgcaggctgaacagctgtcactttagccagtctccgggtgattgttatcactaggcaggtctggggaaacactgcctggagtcatactgagtcatactgagcacaaatatttttgcctcagcgttctgggaatgcttaaccttgttgaaatgagaacacgtagagttttagcaaggatattttctagtgctttaaactcatggtactggagatggataaacattgccatagatacttttgtcagtagatgtgaaaaggcgtttgttcagtgtttataatgaaggaagaactgggatggtgggtggcaaggcagcgttggaggaagacaaagagtaggtttgattttttgtttccccttcaaaaatctgtcaaagctgtcctcagtcacataaggcacaggctgatgaaggcaagagcacatgggctgtgatgggaaactctccagatggtagacaactttcaacaccaacatattgttgttttatgaaggcttcatttatttgctgagctagcttgtggtatgtggaacaggatgtgtcttgccctgggcagttgagcgcttagtgtattaagggctctttatcctcgcctgaccccacatgaaccgaagaggtgcttgcatgaattagtacaggaccaccagggtggagggtggggtggagtgtgtgtgtatgtataggtgttgggggtaatgtgttatgaatagctggatgccaggggaatgttctgggaagtgcagtcagttctttgagcagtgtggattgcagttgcctcagggagctcttctgagtggcataagggagtgggtgcctcacagttggcccttctcggcaagtggcccatgggtccttcttgaagcaggactattctcagttcttctaatattagacatgttcctgtttgcctcccgagttgctctccagtcttctattttatttcaatgagagctgtcagtttttcttctaaaagcgttctttgaacactctgctttctttgagctgagttcaacctgccaggaactctgctagttccacgacaggtacaaatatcaaaggcaaattggatctcacaaagttccccgactgtatcttgcatttcagagttcagagaagtttctttaacgaaatgcaagaaagatggatgttgttgaagcaatttcagcagttctttgaagtgggtcctttcctggaccccagaagatgtaaattttttttttttttttcccctcaaaattaaatgaacatgcagttcttaaaatgacctctgggtggagctcgtggtactcacaaagaacactagcggcgttgaaagcttttatgcagctttctactccggcgttgtttttgaaaaaaaaaaaatttcttgccctttttctctgctgtcctcgatttgattgccttttaatagtcaacaagaaaggagagactttgcctaataattccttgaatcttagatggaaatctcccactatcttagggttttgtctttctgatactgagtagcccctgcattaagaaaggatttgcctgcatttgaagtggaggtgaataactcgcctgctcttcctggtatgacttggcactgttctttgggcatgtgttgtatgcagtgtatcacccaggcggaagatttctcatcaataatagtgcccacactgggccaatgctgagtcacttggcaacccattgggaaagctggaaaaatgttctgatttgtgaaagggagaagcttttctttccctcaccatgaagctctggaccgcagctaattacagagcctcctaagaagtgttaacctcagcattccatagtgaccgacctcctgaaccgggcaggtacagaaagctgcagtgttctgaggcctaataccttggcttttgtagcaatgacctcgtctcaaaatggaagtgtgtggatgtggctttgttgtactctttgctaggggtgttcactgtaaaagataaatgaggatgcctctgctcccgtgaagggtaaatttgttttctctgtctccctgccttttcctgctcatctcttaagaggtcacgagtagtttttgtattgtgaaactgatggtgtaggtttcaagtggaaatttagtatcgtgaaataagcaccgctttttgtttaggattctctgttccctgcaagcatgtgctcttattgtaaataagcagcaaaggacagggcatctgttatttttctggtgaccacagctgttgaatgagtgtcaggtgataaaataatgattttaggggtgtcttctggaggatttgcccttgccagagtagaagaggaggatctcaaggtcgctacatcaggattctgactgagacctggcaggagagcgtcagatcaggaggagcaacttcctgagcttggcttatctccagctggatttgactatatagccaaaaagctggatcccttcggaattatttgtttgtttgtgctctttgcccctgggacctaagtttgtcaggtcacatccaaagaaaaatagcaggatgggactcacagggaggtggcatcctaatgatgctctgagggagtggccttaaccttggccacagcaggtgcagagaagtcggctgaatggtcctaaatttattggcatgtgactctcacacacaggctttgagtgaggtggtgagagttttcttgcagagggcgaaacagaggtgtagcccacttctttggctttgtctctaagctctaccaggcctaggtactggacttctcccaggtatgcggtcagggctctgcttatatccggagcctggtggttctcaaggtgtggttccagaccagtagcagcagtggtccctgggaactcattagagatgcaaattttcacatccccacctgctgagctctgggagtagggctcagtgccttgtgttttacctggtgattctgctgcgtgaaaagggttgggaacccctgtcttgtccttaccacttcacagcacacctgcctgacttccaactgcagcctcctgcattttggccaagagcattctctccctgctacagcctgctttgctactcataaagagggcccaaaggacggggaatgaccacaccttcctcagaagtcctcacccaacagttgatgggagttgctgtgtgtggcccccgctccctcatccctctagtgcgtgttccacatgggctctgggagcttttccaatgggctagagctattatactagctaagatactcgttgctgactgcctttctttctctacatatttcctctttctcctaccagtgtttcttttgctgcccaaatgaactgctcgcacttgaatccttgtcttagagtctgtttctgggggattcccaactaggacacagcccctgggggtatacgctttcccagtgcttccttgcctgtaaggcaacagcacatttcaccgagtctggttgctagcactgcttcagcagactcaatgccacaaacatttctagcacaccaacagcatgccaggtgctgagccgggattcggactcagagatgagcagccacagtcccttttctgcgggggccttcaggctcctaggagagaacaggaggccatggatgcagggcagaccaggagaagtgttaggtaacgtgatggagacgaaaggggtcctgggagtctaggggagctcaaacatgacatgtgagggtgccttacttgggaagtgcctactctgcccctttctctcttcctctgtggtgttcccacaccctgtcttgcagccttgtggcaagtcttcctcttccttccttactaatcccaactctgcatctggctgtcacttccccttgataccttcactcctgcttcacctcactgtgcattttaaattgtttcgtaggagaaaagaaacagaagggctttcatcaaactgtctcctgccctttccagttacagattctagcacatttgcataaccgctcaagaatgcagtcaccctgcgtctggcatccactccagggctcaccagggacagtgactggtagaccagcatggaaaccgcgggctgtggctccctcccatgtgccaccttcccgagcttgtcccttctctttggctctatgtctctctcacacacatgcaggccaagatggcggccttcatacttgtatctctttcctctcactggcctcaacaggaagtatggtatagaggtcaggagtatagacaggtgagagactgcctagtttccaagccaacttctacaccttattgactgtatgaccctttggaaattacttaacttcttccaccctcagttttcacatccataaactggggagattggtccctgtctcagaagatttgttatgaggattaaaagagccactgtgcctaaagtacttataagaatgcctggagcatgagaaaggctccccaagttgtcagccgtttggtccaaactgctgtgcctctgggaggggaggctttggctggaccagacggtgagaggagggatatttgtgagcagcccctgctgagagggtgttggaggggatgcatttcttttctctggattttggattttgtggttttgaacaaattcagtattgtcgttgtgatatatattttaaacacaaaagtaaatatctggtataagtgggagtttgatgcatatatctatttattttttcgagttaaagtctcgctctgttgcccaggctggagtgcagtgttacaatcatagctcactgcagcctgaaactcctgggctcaagcgatccacccaccttagcctcctgagtatctggaactataggtgtgtgcccccacccaccttagccttctgagtacctggaactataggtgtgtgcccccacatccagctaagtggttttcttaatttttttttttttttttggtagagatgggatctcactgtgttgcccaggctggtctcaaactcttggcctcaaccgatccgccagctacagcctcccaaaatgctgggattacagtgtgagccactgccacacccagccaacatatatttattaaaggcatagtacatgtgatatcttaccggagtgattttccatgctctagagcctcatgtaaatgtcatttagggggatgctttaggtcattcattctcacacttgagcatgcatcagtgccatctgaagggcttgttaaaacaccaattgccagccccacccctagaatttctgattcagtagtgctaaggtggagcctggatatttgcatttctgacaagttctcaggcaattctgatgctgctggtctggggcctgtgctttgagagctctaggtgattacaagtgaaaatgtccttatgccaagcctgtgttaatagaagggtataatgttcattaagtgattgtcttacctcttactggagtccccttttcaccatttctcgcaggtgggtcccctgagtgagtactaggacacccagaacccagccaggccacctactctactgttgctgtctctgctaaagagccctgcttgagagagatccaaaggctctttcttggtcatttctgctccttgactccacatctgtccccaggaactacccaggttaagtcttccacataaaagcccttccaacgtttgaagatgtttaaatgtttttcttttttctttattttattttatttatttatttttttcgagacagagtcttgctctgtggcccagactagagtgcagtggtgcaatcttggctcactgcaacccctgcctcccgggttcaagtgattctcctgtctcagcctcccgagtagctgggaccacaggcatgcgccaccatgcccggctaatttttgtatttttagtagagatggggttttgctatgttggccgggctggtcttgagttcctgacctcaagtgatccgcctgcctcagcctcccaaagtgctgggattacaggcatgagccaccgtgcctggctgttttttctatttcaaataaaacacctttagtgtttctcacattaaattaaccaacattacagtcagactggatgttctaaatgcttcacaaatattagctctctcaatgccataatatccgtatgaggtaggtactttttttttttttttaatacagatgaggaaactgaagcacagagagtgtgagcacacttacccaaggtcacacagctagtaggtagaagagctgggattccctccctagaggtctggtttcacagtctgtgcttttatccgcaatgccagtgggtctcaaagtgtggtccccagtccagaagcatcgccatcactcaggactagctaaaaatgcagattcttggctctatcccacatctatagaatcagcaactctgggagaggccctaggcatctgtactttaatcagtcctgctggtgattctgatgcagcccaagtatgagaaccattgctctaaggtgtggttctgatgcctcatcctgctggctgctctccagttttcaatatcttttttagaagcttaagttcaaggctgtgcacaatattctaggtatagtgtaactcacacagcacaatgggaatattattactgcctttgtcttgcatacaaattatattaagaaatccaaagtttacattatggctatcttttcccctcagccattcactgttggctcataacgaatttctagtcagttaatttctaggtctttttttccccgctcacaggaactgttgttaagccctgttgctccagtcctaaacttggcattaaaaaacaaacaaaaaaaaaaaccctcatcccagaacttcacatttattcttattaaaatccatttagttgttttggttcatggctctggctttcaaaaagtatatttctggacctcctacatgtttattattgttttaaaaatctatgctcatttaaaaaatctggaaaataaagcacaacagtagaaagacaaaaaaaagttctagttccatcatctaaacataactgctgctaacattttgatgtatcactttgacttttttcccatacataggctttgaaaggcattcttgaacaatgatgtttataaaaatttgagttcttttttctcttaacatttattataagcatttcttgtattattgcatattctttatgcaagaatattcactgttggctgggcacagtggcccacacttgtaatcccagcactttgggaggccgaggcgggtggatcgctagaggtcaggagtttgagaccagcctggccaacatggtgaaaccctgtctctactaaaaatacaaaaaattagccgggtgtggtggcaggcgcctgtaatcccagctacttgggaggctgaagcaggagaatcgcttgaacccggaaggcggaggttgcagtgagccaagattacgccgctgcactccagcctgggcgacagagtgagattctatctctcacacacacaaaaagaatattcactactatgacatattcttctagtggtggcacaggaggtactacttaaacatttctctatagttgcatgtttaggttgtgctgttatagttattactatgatacacatcttttgcataatgccttctccctaaatgtaggactaattccttagaatggcatctcagacaacctttgaaaaggtcaactctttccttcagtatatcaactactgtttctatgtcgttcataacttgataagtttgttttttagttttattattttggggttattatgaatggacatgctcaaaaaaagggaattggaatcagccaatttgttcatcctttggcaatgcccttccagatttatctattgaacaaaaatattcagggagaaacttctaagtggtgagtcttttgttaggtgccagtcaattcactaactaatagatttttggtctagttgttctactttggacaaactccatggaactatgatttaaattctcccttttgcctgcaaggagaccttgagatatttagcaatgcgttgatatcatccagttatactgtatttagggcattctttaatttaccaatgtattgttctgtttaaaatgtggaaacctgaggaaatgaacaaagcttcactgggttctcatttttctgaagttccatgttacctaagtgcagattatatcattctgtgaaaacagccagctgttcaggcaaccaaatcagaaatctcagtctttcctcttagccaacttgtaagcacaaatcgtgttgcttctttctgccagctctcaaatttataccatttctgttttagttattcccctcccttagcttctcatccttaaacattttttttaattgaggtaaaattcacctaacataaaactaaccattttaaagtgaacaattctcaattagatagaagaaataagctctcatgctcaatagcagattatagtgactacagttagcaacagtatattgtatattccaaagcggctagaagaaaggacttgaaatgttaccaacacatagaaataatgaatattcacagtgatgggcactccaaataccctgacttgatcattacacattctatgcaggtaaaaactactcacatgtacccataaatatgtacaaatattatgcatcaataaaagaaaagaaatgaagtgagcaattcagtggcacttagaacattcacagtgttgtgtgatcaccacctctatccagttccaaaacatttttgtaactcccaaaggacactttgtacccattaagcagtcactctccattccccactcccccagctcctgacaactaccaatctgctttttgtttctatggattcatgtattttggatatttcctgtgaatgagatcacgcaccaatgcgatttttgtgactggcttctttcacttagccttatgttttcgagactcatccactttgtagcatgtatcttctcattctgtttaattggcgtccccattgatagtcttggaaaaggaatagcaaaataaacccctgtagcatttctgatagtgagatctttcctgtcttctctgaactttttgcaatagcatcgtagtgtttattcatagctgaaatactatcccccagctatatattactgaattgaagcaactcctgtagggaaagaagtatgtctgactactttatttttgtattttcagaacctaatgtggatctgacactccattctttgaccactgggcagaacttagtaagaaccatggctttaccaaacactagctatgggacctcaggcaagatgggcagttttgggggtctcagtttcctcactcatgaaatggggacaaatacttttgtccctatttttactgagtggaacaattaatatatgtgcagtggctagcacagagtaagtgctcagtattagtaagatgacatgttcatttttttttcccaagtttcctctaactgcctccctcactaaataacatgctccattatagtgtcttaaaattgggaatgaaaaagtgatgccagttacataattacattgttttctttggggcagaggtacaaaatagaattttattaaactttgcctctaatatttaaaaatatttttatggaaatttaaaaatgtacgcaaaaatgtacataactaatctccgtatacttatcacccagactcaacagttagtaatattttatcatgctgatttcatctactcccctacttgtttttatgcttgagaattttaaagctaattccatctatgaaatcattttactatgattccatctctgacaccattttactataaatatttcattatgtatctccaacatataaggaattttaaaaacctaactataataccattaacatacttgacaatattaacattaattccttattagtatcctgtctgtgtgcagtttcctataattatctcaaaattgtttgctttcttttttttgaaaaaaaaaaaatggttgatttgaatcagtatccagatgaggtctgcatattgcagtcaataggtacatcttttaaagctttttaaattttaagagtaccgcctctccatccatgaaatttatttatgaaataaattgagtcatttgtctggtagaatttttaacaatcttgttttgctagttatttcttaatgttgtcttttaacatgttgttctgtctcttacattttctgtaattggttctatctagaggtttgattagattcaggttcaattttctttggataagaagacttcataggcagtgctgtgagcttcctgttgcatctatcaagaggctcacaatgccacgttgtcccacttgcaaagcgaagggcgatccgtgtgttcaggtgttgtcagcctgatcctttcatttgaactttcttaccattcctcatgcagcagtcctgtttcttggctgtacattagaatcacctgggaagctttttaaaaatcctgaggctcaggccacaccccatatgaagatcagactctctgggagtgggacacaggcattttctaaagttacccaggaggggcccggcgcagaggcttacgcctgtaaacgcatcactttgggaggccgaggtgggtagatcacttgaggtcaggagtttgagaccagaccagcctggccgacatggtgaaaccccatctttactaaaagtacaaaaattagccaggcatggtgtcatgcacgtgtaatcccagctacttgggaggctaagacaggagaattgctcgaatccaggaggtggaggttgcagtgagccaagatcatgccactgcactccagcctgggtgatagagcaagactctgtctcaaaaaaaaaaaaaaaaagttacccaggagatacaaatgtgcagccaggcttgaaaccactgacttaattgtttcagtggccattgataatatttcattgattcgtgattccattcggtgttgcaatgtttgattttcaaattctatcattctttttgcatttattagctaggctgtttttataaaaaaggattttccctcatcaaccacttgattactctgacatatagtttatacaggaaagacagcataaatggctatctttctcttgattaattttcacaagttggtgccctaagcacttccagaggtgccaaaatagttttctttttagtatcaccaacttagggaatcttatgtatttgatgtgtttaaatttgttatgatcatcattcactgaagctcagattgtcccatcttggccaatgtggggctcttcctttagtgaattttgacatgaccctagttgtttttgaaagcatctttgcctcctggcacaagatattctctttaatgtttaacctctatttaatcataagctgttttgaacaatttgtaaatcagtgcctaaattagttctcccaccaatgaacagtatattgatttttttctgatggggaaagggtagcaccttactaacttgaaatacagcattttattaatgagcaaatttgcagaaatatctgttagagactgatgtaaattatcttttgtaaggggcagtagcttatatcaatagaaacacacgtaatatgtactccatggtttttgaaaacctctgcagtgttgcattttcagtgttgatcatcaagaatacaaatatataaccatgtcatacattttaaaaacaaataatgctagtgttgaggaatataactaatttcaaatttgtggaacagtgggactatattaaaagatgagtctgggtgtggtggctcacatctgtaatctcagcactttaggaggctgaggcaggcggatcacttgaggccagaagtttgagaccagcctggccaacgtggcgaaatcccatctctactaaaaatacaaaaattagctggacgtgttggcacgcacctgtaatcccagctatttgggaggctgaggcaggagaatcgcttgaacccaggaggcagaggttgcagtgagccaagattgtgccactgcactccagcctgggcaagagagtgagactctgtctccaaaaaataaataaataaaataaaattaattaattaattaattaaaaaaataaaagacgaaacttggaatagtaaatacttaaaaattctaacaatatcaacaggtagtgatagtttaaacatgtactgtaaaagtgtttggtttttaagggtatgtaagagactggttgtctgtgggactttgaaagcagttgggaaatgccacaatagcctcagtataaaattctagagacccaaagcggagagagatgcctcttaagaattatggaggatatttattacttttattcatgggatgggtggtggtgatttaatgcctgtctcttgtttcttttgtttttttttgttatccaaatccaaatccaaattatatgaggaattcacttaaaaatatacgtttagtttggtttaataaaaataatcagttttgatgtattgacttttaatttcatgggggaaagagtccattaggaatgttcaggctttctgtgtatattttgtgttgctcattctctttggcccaagatgaaactaatagccacaatgtgtctgctttggtgctgtctctagggttgtgtctgctgctgtcagctgcacccttgttatctggctgctggtcctgctcagtcagttgtacaggaatgtcatttccattaataaccccagggccggacaggcagatagtggaaaatgggtgaagagagagaaattgtatttaacccagtgttctgagttgtcatttttgagaccctagcatagctgggtaaaggcaagcagagggcatgacagcaaatctatttctggcagaatctcatatacaaactggagaaacagcctgataccaagagaagaaagggtgaaatatactgggaaaagagggaaagatttggggttggaaaagtcagaggaaacaatgttaggaagaaataacatgatcaagtattctgatagaggtgctgacaactttgcaaaataaatttaattttgattgtaaatgccatcatttgtggtggttcaaatgaacaaaattcctttttaaaaaatgaaatttatgtaaggattgctcatagaagattttggagttttgtgctatgtttttttttttttggttctggatcagtgaaaggcccgaggaacagagtaggttttatttttttttccatctaggtagaatgactcagttactgtagttgtctgtgttttggttatttattgctgcataacaaattaccccaaaacttgctggcttaaaacaagtattttattatttcctatgattctgtgggttggctgggctcagctgggtggctcctctgctggtttcacctggagtcccttaggcagttgcagtcagatggtggctgtggctggacgtccaaggtggcttcttcacacatgtgtctggcacctcagtgttcctcatgtggctttctcaacagggtgctgtggtactcctacagggtagctaagagtgccaagaagagaaagcagaagctgccggtcctcttaatgtctgttctcagaagtctcagaatataattgacaaataataattgtatatatatttttggggtacagtgtgatgttttgatgtatgtatacattatagaaagattcaatcaaactacttaacatatccatcacttcacaaacttatttttttggtaagaacattaaaaatctattattttagcaattttgaaatatataataaattattattaactgtggccaccatgcagtacaattggttactaaaacttattcttccagtctaattgaaattttgtgccctttaatcaaaatctcccctttccctatctctccccctccctccagcctttggtaactactttctactctctgtttctatgagaacaactttttaagattccacatataagtgagattatacagtatttttctttctgtgttttgcttacttagcattttttttctatttttctgtttggttgattaggctatttttcattattgactgaattatttttttctgtttagctcaagaccattgtatacatcgactcacagaagtatttgagtaagcctaatcattgttgaactgtgatggggaaaggattcagccttgggacacgtgacctttgtgtacaggtgtaagaaattcctactaggttttagggcccagaactggactaggccatgagggacccaacccatcctagtaggcaaatcattttccagttttatatttgagttcattagtaaataagtttactttccattatagacaccccctccactgacttatggggtcctgtacgccataaccaaagactcagtgttggaaaggtgatgctccactctgtgtctttgtttagctaaggtgaaggggacaggtctgccaccctggtatattctggtattctctcattggcagtcttagtgaaggctcatgagagcttcctcacagaggtttgtaaggattagaactgagtggaatagacctgttccagggcagagtgaagccgaggacaacagtgagattgtgtccttcagggccacagaccagaacctttactcaactctgatgttaagctataaagctagtttacaagtttatggaacaattcagcttgttcttccaggctcttgaaaatgaaggttaaggctgggcccgtggctcatgcctgtaatcctgtaatcccagcactttgggaggccaaggcgggtggatcacttgaggtcaggagttcgagaccagcctggccaacatggcaaaaccctgtctctactaaaaatacaaaaattagccaggcgtggtggtgcctgcctgtaattccagctactcgggaggctgaggcaggagaatcgcttgaacctgggaggcggaggttgcagtgagccgagatcatgccattgcactccagcctgggcgacaagagcgagactccgtctcaaaaaagaaaatgaaggttaagttttggcaaagtgatttgtatagatctgtaatacatcatgttctaatgaggtccaatgagttctaagtaatttctgatttccattaaaaatgattcatgaaaaaataagaatctcatcagagagagagagagaccacttttgaaatgaggaaaaatgacagaatagaaaaggagaaagtctcttttctctcttcttccccaagcccccctcatcactggttacttatttgagcatcctttatcagcatctaatgagaatgagaacatagtgggatgccatgtgaccttttgagtaggaattggaagctcttatgaagtttccagcctgatgtcacttcagatccaggtcattaatatttaaaaaaataaaaaaaataaaaactcttaggtgattcgaatgagcagccaagtttgagaagcagagccctactggagcaatgcttctgcaacttgaatgtacatgcaaatctcctggggacttggttaaaaatgcagattcttaataagtttggaggggagcctgagagtctgcatttctaacaagctcccaatggaggccgatgctgctggacaatggcctatggaccatactttgagaatatagagcagggggcagcaaacttttcacatatgaaggcctgagagtaaatatattgggctttgcaggtcatgtggtctctgttgcagcaacccaaatatacctgtagtacagagcagcaataggcaataggcaaacaaatgggtgtggctgcgtgccaataaaactttatttacaacaccaggcagtatcctgaatttgtcttacaggccgtgagccaataaaactttatttataacaccaggcagtatcctgaatttattttacaggctgtgacttgccaacttggtctagagctttccctgtctcaagtttttgagccgtatcttgcttcttccctgttttgttgggctgaatcttaggtaagaattaaatggttttgaaagaggttactcaatggctttgttgaactgatgaataattgatgatgacatttaggctctgtttacaaacagccccaattgtcccttggttgtggctcattgctttgccttgaatataggtggcctttctgatttctctccctagactgcctcttcagcaatggatcgaaacagagctagggtttattctaaaatgtggcccacgggcatctcagaataaataaccaggtctgaactgtagaggcagagggtggcttcaggtcacttttccttgacctgcattttacaactcatctctggtgttttgtctaaggcgacagaggctggtattttggctatctgagaggtagagagcagagaggttcctggacatgtacattttgtgttgagataggtcatgccccagatatggctattaatggtagcagagagttaaatgttgctgataatatattctaataagtagataatacagaaccaagttgtcagagttttggggggacccaaatttggaaccaaggactcaaagctcagaagggttccatcttgtgggcttcaggagtaaggtgcaagattcctggtctgctgctcatggtaaatttcctgcatttcaaaccccaaagtcagttaggcctaagcttcaggaaagttttcagtttaattggttcaaaactgaaacagactctcatctatctttatgacagtgctaggattcctaagggagaggtgttactcctcttctgaaatgggaggatgtgggccaggaatccttgggccagggatgcttatggcagactccatttctcagcatggttttggctgggaatttcctctatgagattgacccttctctccccgaggtgccattttctggaataccaccttctctctgctggtaaaatctaatttaccttagtgccttgactggtctgcaaaataaatgttctgacgtttcctgacaggagagcctgtcctctctgctttctgcttctttatcattcttgtactttcttgccttgccttttccattttgatcttctctcttggccaagtcttgtcttccgggggctctcagtcaaagtttagtcccaccgatgtccagaacagaaagctcagtggtattatttttagagagggagggagaacctcttaaaagcatacttaaaattctatctgtgtgtgtcttttcatccttacatctgagaatattatttgtcttggcatgttgaatatggttactaatgcagatgtggtctgtgccttacatgttattcagtttgatttataaaaaatgaataattatataatagaatatttaatcactcagaagataatatatgttgggaaaacatgaaatttgaagtcagattaaggctaaattaatctaggtgagaagttggttttggccctcattgcctgtgtagacttggggtgagttgcgctcattttctgagtcttagcttatgagctgtgaaatggggatgatctgtacctaccttgtacagttagggtaggatttggatctgatgatgaagtaaagtacttagcacagtacctggtttatagtaagggtttaatggagagcattacttttgttatttaaaaaattatgtctattgtttctgtttctgtttagctctgagatctcctcctctttgaaaatgtcctttccacaaggcccttcccttcccatccattccatctgaccctctaccttcttctgttgttttttctcttacatcgcattctctccctatgaccaactatgaactcctgaaggaaagaaatccagtttattaaactgtgtgtcttcactccgtctaaacacaacaacatggacaaatttcacagatgtgttgttgagtggaagaagccagatacaaaagagtacacactttttttgaagttcaagaacaggaaaaagtaatttatggagacagagatcaggatagcggttcttttgaaggtggaagggttattcactggggaggtacccaggggagtcttcaggatgctataaatgttttaaatcttgtctcaggcctactaacacagatgtgtgtatgttttaaaaaatatttgattggtatacttagtatttgtgcactttgtacgatatagtgcagtaaaaattttaaaagatgtttcccagtatgcagggcttatttgccttttagtgatcattcagtaaaaggttgaatatttaatggatgtcatgatgaagtaaatgatcaacttttttttttttttttgagacagggtcttgctctgtcacctaggctggagtgcagtggcaccatcatagctcactgcagcctcaatctcctgggctcaagagatagtcctgcctcagcttcctgagtaattgggactataggcatgcaccacaatgccaaactaatttatttttttgtaaagatggtgtctccctatgttgcccaggctggtctcgaactcctgggctcaagcccccaccttggcctcccaaaatgctgagattacagctgtgagccaccgtacctggccctaagtggttaatcttaatcaccatgtgaccaagaccaaattttaaggaagatgtagcatacattttggaaaacatggtagacataattcataatttatagccagaattcacgctgttgttcatggcgctacttggatcttcacatagctgtttcagaaaatatagtaaatgcgaacggcaggacttgcaatttcagacagtttgtgcagttggcaggacagagaacacagagtggggatacggtcctgtcagattggtggaaaacctcatttttaattgattgtctattgcatctatgcccctcttttcccaccctccctttgtccttttatcaattctacttggaaataaaatctgcaactctaatagatgctactgacactcgtgcagcaattctaccagatggcattcgaatctcgggtgttctatgaaaaatgaaaagaccaaacacatgcacaaataaatgaaggttgaattaatctttataattaaacggaatattaccctgctatgactgatttttgctttcaaactggattgcgtgctaatttttcagtgaactgtaattgtattaacatggcttttttgatgcctgaaagtacttaaaaatagattttgcgaagttactgagagaaaagttattagaacttttaatctaaacatctctaagatcctgaggtatatttatatcacgacttacagctgcaaagcattttccaatagttttttattctttgtcccttatcatcctgggatttaggtggcactggccagaaattgggttgaattgcaagtacctgaggcacgttagaaaattgatgtcctactgtgtacccacaaaaattaaaaataaaaattagaaaacaaatatgtacaactgctatgtacccacaaaaattaaaaattaaaaaaatgagtgggagggaaggtggtagagttttctacataaagtgcacctactagcttagtagtggtgactattagtgaaatccctaaggattattgaagcagaggatgagtcccctacttatgaactgataacacagtgttgggggttctcagaagtgggtccagaagccttggtaccatggcaagtaccatgatctacagcagagagtatctcaaatttcagcaggcatgagactcccctatagtagtggttttcaacccagagtgatgttacacacctggagacatttggcaatgtctggagatatttttgatcacaactggggggacagagggtgttactggcatttagtgggtagcagccaggaatgctgctaaatatcctacaatccacagaacagtccccagagataagaatgattctttcccaaatgtcaatagtgccaaggttgagaaaccctgccttatggtaaggctcattataatgcagattcctgggtcccagttcagaagcattctaactcaagagatgtagcattgtcccacaaatttgtgttttcaacaagctcccacgtgacacagatgctgccagtccaaagacaaagctttgggaagccctaagctagacgatgccagtgtcaaaggaacaagccatatatgtgggcactggccctatgacattcccttcttttagaaaaatgatatgaaaattcccacttgcattgattgattgattgagacggggtctcgctccgttgcccaggctcgagtgcagtggcatgatatcggctcactgcaacctccgcctcccgcatttaagcaattcgcctgcctcagcctcccacgtagctgggattacaggcacacgccaccatgcctagctaatttttgtatttttagtagagacgaggtttcaccatattggtcgggctagtttcaaacttctgaccgcaggcaatccacccgcctcgacctcccaaagtgctgggattacaggcgtgagccatcgtgcccagcccacacttgtctaatttaataattcaccaaagttatctcatttgatctctccccaccagtttatgagggaggtacttcacaaggtttttaggtggtaaagaattgttcatataagagctaaccttaaaggaaagaatgacaacaattcccacttaaactgttgatgagacaaggggatatgtttatctaggttaatctccaacttgcctcctgtttaaataagtaatttaacaactggaggaggattaagtagctgattaaatttctctgagaaacgttaggtgttagggccttggtatttattgcaggtgtgtttctaagccctttcaaccttgatatttgaaaatgtttttaaataatttgtaagtattttttcccattccccaaaaaatgcattgatttatttcatagtatttattcccattttggttaatatttctatactggctgtgttttaaatgtagatatttacctcaacaaaatatgaatattacagctaattatagaattatttaaatagttattatttaattatatatttctatcttgatgaaactttccgaaaagattaacctttgtgccttatttttcccttgctatctttactattggttttgaaaaatggggaaacctcttgtgtagaagaggggttggcaaaccatttctgtaaagagacaaatggtaaacatcttaggcattgtgtgggctatatggcttctgttgcaactactcaaactccactgctgtagcatgaaagtggcagtaaacaatacttaaatgaacgtggctgtcgtcagagagaaaaaagcaacttttcctttaccactttaggtttaatgtcagggcctgtgaattaaactataaaagatggattaacaagagaaaagcaaagtttattcactaacctgcatgagagcttacagaaaacacagcccagagaaacagaattggggggttacatattgtcttaagaaggggtagggttaggattttaagggacaataaatggtgggaaatgactgagaaatatatgaggggacctaacagaaagtcaggcttgctttagtaaggtctgtttatgtaagttctcatcctggcgccaactttttatccccggtgagaggagttattttcccccggtgcaagaagtgtctcttaaaagggggatttacgacagttgaattcttttggaagtctctgcttgtaggccgataagggaagcatggagaaagcctctttctgcttgtcttgattctcagataccttcagctcaaaatagtcctttgctacagtagcatattccggaccaataaaactttctttacaaaaaaacatgtggtaggctggcttgggctgtagtttgctgacctctgatacagagccctgtgagtgagacagagacaaacataatttattttggctcatataaaagcctaagtgtgatataggattgttcccactcttgggctgttatcattttggttatgtctggataaatgggcttagctaattgaggcttagggtattcatttgactaggtctagcagctgttctatttgcaaactttgtgagcagtttaaccacatataatcgaaaccaataaaaacattgatttaaaaatttatgatttggccactcttctgcccagtttcttttcatctttttttttttaatttaatttttatcatttgggacagggtctcactctgttgcccaggctggagtgcagtggcacaatcttggctcactgcaacctctgcctcccaagttcaagtgatccttctgcctcggcctcccaggtagctgggatttcaggtgcaagccaccacgcccagctaatttttgtatttttagtagagacagggttttaccatgttggccaggctggtctggaactcctgacctcaagtgatacacctgcctgagcctcccaaagtgctggaataacaggtgtgagccacggtgcccagctcctgcccagttttaaaggaaataaatgagccgggtgtggtggctcacacctgccatcccagcactttgagaggcagaggtgagcggattgcttgagtccaggagtttgagacaagcctggacaacacggtgaaaccctgtctatattaaacaaacaaacaaataagggaaataaatgagagttgcctctatttttaaggtaatattgctaccactctaaggacgatgggtgtgttgttttattaattaatcataaggtggctttggcttctaaaatctattgctactacctgctccatctgtttaccaagaaaactcaaatattactttctttctttaactctgttcagtacagggctcacccaagtaagaggagcatcacaaagacaccagggaaatgtttagtgccagtatggcaaaattaagatttacttctgccagagtagtttccttttgcagacagaagaaactgcccacctccaaaatatattgagttggtgttttaggagagagcatggatggtgcttgtttataatttggaacatgccttcctagaatgttgtctatcttagagagtaatgagggttttctgctatactggggcattattcacatggggttgagggtggatgacctgaaatctgatctttcctgtcttttacttcttgtacaattagaactgtgatttgcacttagagagccttctgattcatggaagtgcttatctatcttctacccctgtatgatgcatctgcttgtggaccgcacccaaaagcaatttgcagaattaaagtttttgaagactcataataaatcagttcaattttatcaagagaataaaatttgattcatcagataactgcattgttattatttgtgggatcctgatagacccagaggatattaaagcctgttcccctgactaattttcatcaataccattagctccgcttagggtaatatcttcagctaaggcatctatactagtcaatcatttgtttggcattatggaaactgccattgttttgaatgatagtgtaattcatgtacagtctcctgaacttctgggtgcttaaagctcagaattttgattgatgtttaatagttattacagaactcatcagagaaaatgaggccttggcatgattgagcctgactgaagctttcaaagccactgcaagcttaggaaagttgccctataaattttttatgaaagggcagtgatcagttgttccatttttttcttaagttggttaaattaataaaaaagaaaaaatatgctgagacttaaccacgtatactaaacatacagctatttaattaagtgattaaagtggtctctttgatgtgatacatgcaagacatttgagaatttatctgactctcctaaatagccaagtcagtggggattaaaataaatgagctttctgtcttcctttctgtagatcagcttaatagtaagtggctttgaaaattcaggagtaaagcagtcaacctagccaatctttaaatcagttcagtcacatatataaaaagtagatgccatttcagagctcacagctaaataaagcagaattatgcctgattctgttcttcccaccagcattatcaagttgtagtatacagtattgaaaattctgggaaggtgggggtgatttgagagtttaaatcatgttgtatattaggttttcaatgttcctcatttttctgagttcatttgtgatagctgttgtttctctcttcaaataataatctttacaaactctctgttgtctccatggaaattaattgtgatttttaaagctctagcactaagactttagggcagggagtcaactcccaagcaactgagatctgtcgcatgtaaatggtagtaatagcaaagagcaaagcaaaaacaaataaaaatcttgatagctaagccgtgcgtgcacgtgcacacacatgcacacagatgatgctgttgagcatggatcagtttggaagcattgttaagcacttactgtgtactagcccctgtgtcatgaattgaggcaactcagcgaataacctagctttatttaattatctgtgttggcttagtaagttatggcccttgggccatatttggcattctgcctgtttttgtgtgaaccacaagttatgaatggatttcacattttttaaatagttttaaaaaatcagcttggcacaatggctcatgcctggaaccccagtacttagggagggagatgtgggaggattgcttgagcccaggagtttgagacctgtctgggcaacgtagtgagacctcgttctccacaaaaaggaaaacaacaacaacaacaacaacaacacaaaaggacaaaaaaacacaccaagtgtaaacaaccaaaagaagaatatattatgatacatgaaagttgtatgagattcaaatttcagtgtctataaagttttattggaacagagtcacagccattcatttatgtgttgttctagcttgtttctgctttctcaggtacaatcacagagctgagtagttgtgcagaggccatatggattgcaaagcctaaaatatttactatttggcactttacagaaaaagtttggttattcctgatatgggtaaggcaaacttcataattcctttattatctgaatacttctcccaactctctattttactttattggtattagaactaaatgtatccatattctacagacgaggaacctgaggaacagagagattcagaaaattcagctattgctaataccttatgtgatgatgataacttgttatagaatggttttcctcagctttttaaataaaaatgcagttaagtaatcgataatattacgtttgtatgttctttcagcattaaggagagtcctgagccttgattttatgttcagtatgtgtattagtctgttctcatgctgctaataaagacatacctgggactgggtaatttataaagaaagaggtttagttgactcacagttccacatggctggggaggcctcacaatcatggcggaaggcaaaggaagagcaaagtcatatcttgcatagcggcaggcaagcaagagaaagcatgtgcaggctgggcacagtgtctcacgcctgtaatcccagcactttgggaggctgaggcaggtggatcacctgaggtcaggagttcgagaccagcctggccaatatggtaaaaccccatctccactaaaaatacaaaaaattagctggacatggtgtgggcacctgacatcccagctacttgggacgctgaggcaggagaatcacttgaacccaggaggtggaggttgcagtgagctgagattgtggcattgcacttcagcctgggcaacaagagtgaaactccgtctcaaaaaaaaaaaaaaaagaaaagaaaaaagaaagcaagcatgtgcagaggaactccccttcataaaaccatcagatctcctgagacttactcactatcaagagaacagcacaggaaagacccaccctcatgaatcaattacctcccactgggtctctcccatgacgtgggaattatgggagctacaatttgagatttgggtggggatacagccaaaacatatcagtaagtatttgctgattgattgaaatagcttacataaaatatatagttttgtttgccaccaagaattaattgcattggaagctgagtgtggtggctcacacctgtaatcccagcactttgggaggctgaggtggacatatcatttgaggtcaggagttcgagaccagcctggccaacatgatgaaactccgtctctactaaaaaatacaaaaattagccgggaatggtggtgcatgcctgtaatcccagctactcggtgggaggctgaagcagaagatgcttgaacccgagaggtggaggttgcagtgggctgagattgtgccactacactccaacctggttgacagagcgaggctccacctcaaaaaaaaaaattaattgcaatggattttatatcttgcttaattttccagaatgttttatatgttctcacaaaatatctcattttctccccttttttctctcctgtggtaagatcagttaatattgaaatataccttaatgttagctgggcatggtggcacacgcctgtgatcccagctacttggtaggctgaggcacaagaattacttgaacctgggacatggaggttgcaatgagccgagatcgtgctactgcactccagcctggatgacaccgtgagactgtctcaagacaacaacaacaaaacccagggaaacgtaccttggtgtgaacagcactgaatgatgtttatgattgtatgttaatcctcttatatttaaaggttaaatgtaaaatatagccttttatattttctgatactcttgatgacattgatcatagtgggtttatcaaattattcattatatgaattaatatttattgagtattggtcacttgctatgttacctgtggtaacatggtgattaggtggaataggctattggtttaatttgaatagtattagaagattctctcagctacaaaacctctcatttaattgtatttattcctttggctaataaactactcttttaaataaaagtatttctccagagtaaatatattagattgctattagtgacttacattctattataaactagtttgaggccccagtggcagctagtggattagcaaccttgaagaattaataattttgatggatgagaagggaagggggagatatctttggagcacagagtattgctaaggaaaggccaactagggtacgatggtattgcaagtggtatgaacacataggacctgctaggtgttgaaaggaacagataagagaaagagaaagaggaggaaggcagaaaccaagatggcaagtgctaaaagcaacctgtatctttgatcttttctagggttagatttggtagtgtttcttgtgtctgttttcagaggtgtgccaatagtggctctcaaaagagtcctccaacttttggggggctgcaaatagcctggattcttttgactcatatgcagagtctggctttgctaggaaaatctcctaccatgctccaagaagcttgtacatttgtcttccattgataagagggttgcctcaatagcttttctccctaagcatttcttttctcgatatttttcctctcaccacaagtgtggccttctgaaactggacctatgactaaaagagtgacattatttctcaggggtttcaggtgtttggttaggggtataagatgacctggactcttctggaagacctccaaacactacacatcacagttactccaaatccttggaaaaagtcacgtttctactttcttggtgtagtctacaactaacatttgctcatcatgtactctggaccaagggaaaaaagtgttttacatgcaatgtcatcctgaactcttgcagacaatgctatgaaataggtactaatttttagtaatttttttctcaacatctgatgtaaaggagagtgtgttaggattacattagctaatggaaaacatgacacataatgcctcaaacaaataagggctttattttctgtatgtcatgaagggaaaagagggaggcagtccaggtctaatatgctggccttcgaatgccatcagcttttcatcccaccatcttcagcatgtagattttttcctcatatgtgttgccttgtgattactagatggctgctcggcttctggcattgcatcagcattccagaaaggaagaagaggaaaggctaaagcagtagttctcagctggaggtgattttgccaccaggggcacatttggcaatatatggagatatttttggttgtcacaacttgcggaggggggcatgggttgctcctggtatctaatttgtagaagccaaagatgctgctaaacatcctacaatttataggacaaaccccagagcaagaattatctggcccaaagtgttgagaaaccctggactcgaggcagaaagcatatgctgatgaatctgtccccttttaaaatggatcattggaagtgcaacaagaagtttttcttaaatgtcattggcccgaatctcatcctgtagctgactccagttggaaaggaagctgggcaacacagctattttgttgttgttgttgttgttgttgttgagtccattgtcatcctgagcagaattggagtcctgacagtaagagaagaaagggagaatagttattaggtagacagtaggcggtgtttatttcaaaaagttaagtactctgcctaaggtcacagaggtagtgaagatcagcagctgcgtaaacctcctctattgaggaacggatgtccagctgtcaagtgcagcttctctctacatgtctgtatgaataaagcatgaaaatgcatgcactgggtatggaaagccctggagtttttgatcagccacaaacagcctaggaaatatttcttgcaggatataatatgcaatctgttaaatatttatatcactgctctctcagcatttacagtgggacttgcctttcctttttgtccatgtaaccaatagggtaattaatctcagacctgactcactaatactttgcccttcaagccatcaaactattggtgcttcacttctcccattttgaaaaattaaaaagtgatgtgattactatttgccttacttagggttcattcaggaaaccagacactcttctaagtatatcaaccagcaagacatttaatacagggaattggaggcttaggtaacctttcagagggctggggagtgaagggcagagtctgtcaatgatctctgctgcttgtacaccaaagaggtctttctcaggagaatgcctggaagttgctggaaaagggctgtatctgctgtctgcagatgcccacatatctgtataaggctaccaacagcaaatgaatggcatctcctcttctacctttggaattgcctatgagtgcttctcattggcagtctaacctggagccatgggatattgcaagatgtatttctgaagcttctcagggaaaaatgtagaatggggtggggtaggatgaggaggaattgacaacgaagtctgtggcagaaaaaaacatttgaatctgaatagaggaatacatatatagcatattttaggaagaagaacactctcttcagatgttggcaatgttgctactagtattattaccttattctaggtatgtatctttgggaggtaaatagggattctttgtatgtgttctgattatcttcaagtcatgatgatgctcaataaataataaaaaaggattcaataacctgcatagatggtgcagaaggtaatatattctgtgaggctctgtagtgcagtgggggtcccagagatgaggtttaaaaaacaatgcataattcaccagcatgctctggaaagaccagtcttcagaaaacaattgtggatgactcagcttgtccgttcgttcgttcttttcttttcttcttttcttttctctctctctctttttctcactttctctccaaaactatctggaattctttacttgctatagttatgcatatgacttatagcgagctgataaaatatagtgcaaaattaaatacaatgccggaaataatagaataatctcagaatgaggtaacctatagatgtatgacatagtttggtgttgggggtagagttgtaacctctagttatctgctatctgggtcacatcaagcttttagtgtgtgtaactcacagagttttgaaggtgtaatttgatctgtgctatacttgagtctgtgaaacagcaaaacccattatgactatgtcctacagcccttgtaaaatcctaagtcttgagcttcaggattctgctgatatttaatatctgaattatttcaaggaaggtaaggaaagtgtactatcttactatgtttatttcttgagtgaggaaaattgaaagggactaaaggaaagaactcgttgccaagagcagtgtccagaggtcactggttttgctttgtggctttgctggaataaaaccaacgtgtttggggttgcctaggtcttatgttgggtcatctggaggcagatctggagatgagaattcctgtgtaagtgattcattaaacaaatactcccaagagaaatcagtaagggaatgggagaagcaagacagggagggatgagagtccaatttcaggagacatctcagaactagtctgatcctgcagggaactttggaagtacaaattatacctcagagtttgtcctgaattgaggcaagggggctgggctttcatattgccgcttagggctgcttgggtggaggcagaggcggaggcggaggtgcaggtgcaggaaaagtgggtagaaggcaaataaacccccaggaactagctatttttgattgcaggcaaggagctctagtagttcctagggcaggccttcagaaagtctcaggtgttggccattagaaaagaaaaaacatagatgctggagggatgtacagaagttataaaagggatcccagggaatctggtcagagccctgacagtgtacttgtaagcttctcttttgcttttatgaaacccagaatctggagaagggagagagaaattttcacatggaactgtaaagtttctctaaagcaagggttgacgaactttttctagaaagggccagataaaatatttgaggctttgtgggccacagggtgtctgacccaattattcaactctacaactgtactgcagaagcagccatagttgacaggtaaacaaatgagtgtggctatgttccaataaaactttatttataaaaacaggggtagggtggctggatttggcccagggaccatattttgccaatcgctgctcttgaggttctttatatgtgcctaagtttgtttttcctttatttattccctatctgttataaaacacagaggataattagtacctttgtctatctaaatgatggttatgacattatgatgtatcttaaattattctagatcactgcctccaatctttctggcatcctggccatctttcacaatgttgcaaagataatcttcctgaagcatgactcatctccttttattcccatgctaaacatatttagctctctcttagctgtaaaataaaatataggcttgttaacatggcattcaggaatccctgtgatctgaccccaggccaattttcctgcattattttctgttctccatcctcatgtacttatagtccagctacattaaattactcgccctctctccaatatgccatatcgtgtgtgtttgctatctccttgtagtttttttcatttttatgtatttaaactgactatatactgtcaaaattttatatatatatatatgatgtacaacatgatgttttgatacatgtatacattagaaaatgggtaaattaacatatccatcacctcatatatttatcatttttgtggtaagaacatttaaaatctactcccttagccattttctagtgtacaatacattgatattaactatagtcactatgttgtacaatacatctcctaaacttattcctcttatctaactgaaattttgtatcttttgaccaactccctaaccccattcccccacccctggtaaccaccatcctactgtactctgttatgagtttgactgctttaaatttcgcatgaatgagatcatgcagtatttgccttttggtgcctggcttatttcacttagcatgaagtcctacagattcatccacgttgtcacaaatgacaggattttcttcttttttaaagctgaatagtattccattgtgtatatatactacattttatattccattgtgtacatatactacatttttaatccattcctctgttaatagacatttaggttaattccatatcttggctattttgaatagtgcttcaatgaacatggaggcactctctttagcgtactgatttcatttcctttggatatatccccagaagtaggattactgctttgtatggtagttacatttttaatttttagaggaacctccatagtgtttttcatagtgactgtaccaaattatattgccaccaacagtgctcaagagttcccttttctccacacccttaccaacacttgttatctcttgtcttgttgatagtcgccattctaactggtgataggtaatatctcattgtgtttttaatttttatttccctgatgagtaatgatgtggatcattaaaaaaatctgttgacaatttgcatgtcttcttttgagaaatgtattttcacgttattttccctttttaattttttaatttctttttttttttttttttggagacagggtcttgttctgtcacccaggctggagtgcagtagtgtgatcatagttcactgcagcctctacctcccaggctcaagtgatcctcctgcctcaacctcccaagtaattggaactataggcaggtgccaccatgcccggctttttttaaaatttatttttgtagagacagggtcccgctgtgttgcccaggctggtcttgaattcctggcctcaagcaatcctcctgcctcagcctcccaaagctctgggattacaggcatgaacaactgtgcccgacctcctttccccattttttaaccaggtgatttgctttcttgatattgagttgagttttaaatatattttggatattaaccctttatcagatgtatggtttgcacatatttttgcctctgtctttgcccctgtttcttctcctggaatgttcttctagctctacattttgaaatcctaaccattctcttaagactcgattcagtcaccttctccattaagcattttctccatgcagaaacagtctctcctctggactttgataacaatattgtctatttctattaaattttttattttgtttacattgtactagacagttatttgctacattcactgcatttttagtatactgaggtctctcaatatatatctatatatttttgcccttcacagtggcttgcatatagtagatattcagtaaatggagttttcagatgaagggcgcatttctacatcttgtgattattaatgatttaagtgctgaaactctgacattatttttctttttcctttttgtaggcgagagctgttttggcaaaagttggctatccagagtttataatgaatgatactcatgttaatgaagacctcaaagctgtaagtgctaaatttactgtacttttttttttctggcaagttttactggccttgtgcctttcaactaacccaagtcctagcaattaaaactggtgatgccagaaaacaccaacttttgattaattccttggctagatatgagcctgaatatgccaggcagatcacaagatttagggcagattcaaaataaagaagtgtcagaaacgatgcgtagctgagtgggtaccaaaaaacaaatggacttgggtttggcctaatttgatcataaaagaaagaattaagcaaattgagtatgttacaattagtgggcatgttctaatggcaaatgcatcatgtttgttgttaaatactttttatttgcttcattcgtattaaatgaatagtaataaatctgcctgctgggagttaacttcattaaactttatgagtgttttggcaaattaaatgcatatacatacgactctataatttattgtgaattggattgtgtatttgcagtaagttactgatgaaaaatggtcataattcttttttatttcaatatttttggacatgtattttccagtaggtgtattaattacaggcctttctattcacaagcactgttatttcctctcctacaaatagttctgataagtgatttttcttcctcatttaaaaaaacctgtttttactattcactagattttcttgaaaatgtagtcttttgaaattctttaagtaactatagttctgaggtatagctctttcctgaaattgtggttcaacaagtggcatatctgaaaacgatcccagctttgtagatgagcatcaaaattttacaagactattcaaaagtgagagaaagcattaattagaatcttcctccattgggctctaagatatagcctcccaaaatattgatacagttgctctggaagaaaataatgatgcctcatagcatcctaaaactcagtctatcttattatacactgttttgatgatgctgaaaatcccattattattatcgtaactaaaaatattgaagcacttgacatattcatgtacattatcttttaattccttcagtgattctgtgaaatagatgatgttcattcccattttgcagaaaaggacatagagactcaataatttaagtgagctcctcagttccacacagactttcagagccaggactgatatctgggctcaggaagctctgcctgtaatcagacaagggattcttgagggtcctttttaggcagctatgctggaggaacagaggcatcagggtggagacttggtgggggcagtgtgaccagggctgttggaagaagagcagagggaaggccatgttatcaaatggttaagagcacaggctccagtatcatgggcctgggtttgaattctgcttcttgtacttactagttatttcatcctgtgtaggttacttaacttcggttagcctccctttggttatctggctactggaaatataataaccaagtcttagtattgttgggaagattagatgagactgtataaatgtaaaagcacttggcataatactctggctcagagtatagcctacttcctataaagggtagctttgcggatcaatatggaccatttgtggtccattttcaaatcagccatataaaatattccatttcattgatccttaatagaaatagactcaagcgtgaatttctaccaattttggaaatatatctgtatcagccaggaaagcaaaaagcacagtaggtattttaaacagggaatttaatacaggaaatgggttggaaggcaagaaaagggaaaatagataaaccacaggttaaactgctgttgctactaagaagagtatcatcagggcacaaagtaccttagcaggagaacctgggtaactccatactattggtatatattctgagtcagcatgtggatgagaaggtttgagagacagtttgatgtagaggttataaatagggaccgtggagtcaaagtgcctggagtaaaacccccagtctaccatgtaccaccttgttacctagggtaggttatgtatcctctctgtgcctttcttcatctgaagaatgaaggtcataccaatccctcccatataggatttctgggaggatcaaataagttaacatatttgaagtgtttagaatgaaccctaacatacaatcagcacaatacatgtgttagctatgacatcctcaattcacacttgtggtagtgaactattttggtttgaaaaagtcctcatgaattaactcatgcactgtccaggtccctcaaattgatttaaaagggtatacagatggagcagtctcaagctttaatcgaataaggtagaacttaaggcttactcacaatatttagttgatcaagttttgttggcattctgttgctaagttcagagccccaaatttaaggacccattgaatgcaatatcttttgtgaaaagaaaccagatgccaaacaggatgccatgttggctgtgcttctttgtttctctggggcctgaactgaagacattacacaccaagatttttaatcacttctttgaagaaatggctttcatctgactcattgccaaagcagacacaattacgcccaagagttttaacagtttaaaaacctgacagtgaaaaaaattccaggtacatgaagtaaaaagacatttgtattcagaaaccgattgttttagtcaatttacacggtgctataaagaaatacccgagactggataatttatagaggaaagaggtttaattgactcacagttccacacggctggggaggcctcaggaaacctacaatcatggcggaaagtgaaggggaaacaggcaccttcttcacaaggcggcaggagggaagagtgagagttcaggaaaaaactgccacttttaaaaccatcagatctcatgagaactcactatcacaagaacagcatgggggaaactgcccccatgattcaatcacctccctcccttgacatatggggattacaagtccctcccttgacacgtggggattacaattcgagatgagatttgtgctctctcactttctctccccctcaagccccgcccttttctttttctgacagtgacttcagtccctcctccaaacctcagctctggagtggcaggcagttctcctctactctcctaagtgatggtaccatcacctcctcccttctgtgaccctagacacaggagtcgcagctgtgtactcctgtgactctcacagagccaaatcatatcactgatagagaaaatgaataaaacccaccctaaaaataggtaaaggatgatatgatagattgtaatattgtcactgagggcaatagcaaaaagactgaagtattcctggtacacaatgagactgttttcagttttaagaaacatgtagataaggactgctataggacctatgagaaatttctggtaatacgagctctgagcatgagaggctgttacaaatgaaaaacagcatgctgcatttgagacaggtggagatatgattcatcaggcacaaatgcaaaaggaaagaggagcgagattacctgatggatcagacgaaggtcaaggagaaatgttgaaaattgaagttgggctcatgtggaaataaaagcaaatgagatagaattaagaggtaaatatgcaaaggaatcagaaattttttaaggatgacaaggtaaactgaggtactcagcaaagcatttccgaacaacaatcttgtagtttttgaaaagaacaggaagaaataaaatgccctttatttgaacccccatcaacatgcaggaaagcctgttagcctaaaaaggtaggcatgagcccattttcaaatcagcctaataaagtattccatttcattgattcttaatagaaatagattcaaaagtgagtctctcccaattttggaaatatttcagtattagccaggaaagcaaaaagcacactaggtattttaaacaaggaatttaatacatgaaatatgttggaaggcaagaagagggaaaaatgagataaaccacagattagtaactttagaaagcagctgcgactcctgtgtctagggtcacagaagggaggaggtgatggtaccgtcacttaggagagtagaggagaactgccactccagagctgagctttgcaggaggaactaaagattcttccagagttattgtcagaaaaagaaaagggagggagtagagggggagagagagtgagagacagcaacacagcacccttttcccttctgcaacccactaatttcctgtagtgcctcctatttgcaggaagctaattggcaaaggagcttgagaaacagttttcagattcccagtccccagcattacggaacagagtgaaagggtaggcatgtagctgaaaaactacaggtaaataactggcactattaaggacgttactaaggaccaaagtcagaatcatggctggcctccatttacttaggagaattggaaatgagaaaattttcagaggccaaagtttctggtgagtgatacacacatatatagacataaatgtgcatatagggatatgcagatatgtgaacctatgtaagattctctgtggtgggtctggtctactttggccagtgaaacactagtgtgtgtgtgtagtgtgtgtgtgtgtgtgtgtgtacatgacagagagtgccactctgcaagagtgaggtgatattcagatggaatgctagaatgctgcagaaaaagaggttgttaaaatattaaaataattctttactatttgttaaaaaacacaaaacattgcgctcagctctttcaagggacccctggccatcatggcactggagagctaagggtgggcattggaggtgggacaccctggtgccccccaaccttccagccaggcctctgtaactctctcacattggccttcatccagactgttccactggtcagagcagaccaagaccagccccagtgtggagatgggacatctggttccagtgctagtgtgctggctggaactccctcagacccaccttcacatagctgtttgtaggaattgcatcctccatggtacactgtatatgtggattattaaacattttgagcatcacctcagtatatattaggttggtgcaaaagtaattgtggtttttgccattactattaatgccaaaaactgcaattacttttgcaccaacataataagtatgtctacatgtatagacacacattacttttgggcaaagccatctaaacacaccaatcttgcatgttgctttgttgtttgaataaggggacatgtagatataaaatacggattccattaagtattcagaaaatcctttgggtgcctaacataaagtctttctaatagatatttggatatatctctgagtatctttaaatggatttaaattaaatgaaaggtatcctagaatttacacttcctactggcacagtaaggaaagtaccacaattagtgcttcagtatttttcatctgcctattcctacatgtaggccgaagactatactacagatcatttgcattcctatgtactgccttataaacatgtacttatcctacagagaagctgaacacatttccttgttctgcgcttattacaggttctccatctttggggtggtggtggtggtaataactttattcttccatttagtctgtggatctgggataggatattcaagaagagaaatgtaggctctcctgaattttatgatcgggacagctgttcctgggaaatgacacaagaatcccaattaattccccaaaggtcacgcaattgaaaagtcaagagatggaattgattgaaagtgatcatcaacttgacctagactttttccagtaactgaaaggacaagaggcttttgagccaagtattgtctcttgccaaatttaattttttcattttggagattacaagcggctttaaaatattcatgcgaattcattcttgtttctacttctagaaaaaatagaactttctcaatagttgctgggtttcaattctttttctcatccaagggccttttgaaatatttaaaattatcaaaatattattacaattagcaagtcttctaaaagtaaaaactgatcccactgatattattttttaaaagttaatatttttgaaggaaattcttctgagaaaatttcccagaaagtgttctgagcccaagaacatatctgaattttctatcagttataatcatattctgaaggttttggcagaaaatttgggaactagagaaaacgcactcataatattgctacataatatatacttctgttacagtttattaatttgtttttctctatttctgtactgccgtaattgatgtttacatataatttggtacaccaacctttacagtaacatattgttttgctactgtctttatagcctttgttaccatgattttaactgctgtatagtatttcaagtaagttgtatcatgattgatttaatcactgcttctactcccttcctcaatctcactttgtccttgaatcactggttctcttattaagaccaacgaaaataacattggagtcagagccaaatgacttggacggtgtagctttgccaaattccgtaatctccttagccctgtttcccatctatcatatgtgaataacagtgactggcccctgcctacccccaaacacttaacctgtctcaaggaaaaacgtaagacctgtcctctattacttgtgatttccattaaataaatggaatagatcaattaaaccaggctaagaaagaagaaatattctcaacttaataatgaaaacaatttttaaattatctttctaaacataaataagctatggcaaattgtaattaattacctctgagttttgtttcccccaattattttcagggttctggtaggtccttacttatctaatgtatttttagacttgggacccttttcttctttacaacgttttttttttttttaatttttaggcagagtctccctctgttgcccaggctggagtgcagtggcacaatctcggctcactgcaacctccacctcccaagttcaagtgattctcctgcctcagcctcccgagtagctgggattacaggcatgtgccaccacacctggttaattttcatatttttagaagagacgggatttcaccatgttggccaggctggcctcgaactcctgacctcaagttatctgccagcctcggcctcccaaagtgttgggattacaggcatgagtcactgtgcccagccctttagaaagttttgagatggctttctgtttaatgtctgtagaccaacctgaatatcaagggatttttttttttcagatggaacagtaatgaaagtatcacaattagcaagttttctaaaagtaaaaactgaccccactgatattatttttaaaaagttaatatttttgaaggaaattcctctgagagaatttcccagaatgtgttctgaacccaagaacatacctgaattttctatcagttataatcatattctgaaggttttggcagagctgtcttggaaacaaaagctgaaaaaggcaaagggttgaacagtggacacatcttttaaccatatgatctgggaatgccttaggattgctagtaaggttgctttctataacaaggtgcttactctgtttcttctgaggctaaaagaaaacctttatcttaaaatataatcaattataagattttggccagcgcggtggcccacacctgtaatcccagcactttgggaggccaaggtgggcggatcacttgagtccaggaattcaaggccagcctggccaacatggcaagaccgcatctctactaaaaatataaaaattagctgggcatggtggtgcatgtctgtaatcccagctactcgggaggctgaggcacaagaatcgcatgaacctgggaggtagaggttgcagtgagctgagattgcactgctgcactctagcctgggtgacagagcgagactgtctcaaaaaaaaaaaaaaaaaaatatatatatatatatatatatatgtatgtatatatgatttctttttattatgaagcatttcaaatgttggaacatgagtaaaataatttgaacacatctattttaacacatagtaaacatattgccatattagctttgtacatgcacacacacattttaaatgaacagatgcatttgaaattttgtctgtaatcttccttgatctaatctccttcctctgcgtctatctccatctctgcatataaacactaccttgagttcagtcttattattgttattcccatgcctttctttatgcttttgctacataggtacgcatccatcaacagcatacagtgttgttttgcatgtttaaaaactttaaatttcctcatagatacaacttaccttattcactctgcataatttttaagattatttcatgttcatgcatacagaacaatcatgtaaactgttgtattgccttccattatgtgaatataccacaatttgtttatcagcccctcttccctgagcaagcagtttgagggacaatttaaagtcatagtgttataatttgttggccaagcagaacacagagggtgccaggaatcaatacttttatttctgcctttctccatgtgccttcagttattttactccttcctttatattttggcttggtctcctggaaagattgttaagatgactccttaacaaaaacttctccacggacatgagaacccactctgtgttagggaggagctaaatgtgagccagacattggtcaacaagtaggtgactgtcgagcctattaccatcaaattgcatatatacattcgtatctataatgtaatgccttgtgggtttcatatacacgagtattttactttttgcttttaaaagactattaaagttataaaaattacagtttataagaatttggttacccttggttatctccttattcaaatgtgtatttttcttaatttccatagtaatatatttaaaaacccaagcattggaggtcactacaaacgattgcatgaacagctccacagatcttatttacaataaatagctaggttaggtattgctagttttgtagatggagtgcctatagaatggaaaccgtctgccattctccttccaaaacaaggaaaggaactaaaaaagcaattatgtctgtttccttgtcttaatagacaacattgttgtgagctgctaccagctttctgtgttcccatgcaagctataatctatgatttgcctctgtaatttcattaatatttagtgaccagagactttttgagtgttaacagatacattctgttaataattattctggtgacttcattgtgcttatggtggaaaataggtctctgaatcacatttattgttttcctttacgaacaactaccaattatttgactaaatcattgtctataagctaaatgagttttcagccaactaaactgcatgttactgaaaaaacttacgtgacaaattaacaaagtacacattttaaaaaagatcaaggactcgtgagccaagaaatttcaaaccaaagataatatggtttataaaggttgaagtagatttttcaattagaaagtaaatggaacgcattgtaaatgactgcagcttctcttgttgtgtttttactgtgatccagaaatgactatattgatttttgaagtttttacgttaacaaaatcactgagactaaatttcatggctttgtgacttctgggtcaactgataacagctgagagaggctgtgactgatgcagcttctctgctagttgctccttcctatgctgaagtatttttttagagccatcttttatctttacttagaacaatgatgttgtggtttgttttattcagatcaagttttcagaagccgactactttggcaacgtcctacaaactcgcaagtatttagcacagtctgatttcttctggctaagaaaagccgttccaaaaacagagtgagtattaaacaaaaaaagttaaatagataaatacattggtgagaagcggagtctctttagattaaactttgtaattcccctcaagtcagagtagctggcttgccagttaacttgttttagcaaaatctgtgtcatgttttgccaactcttattttttatattacgtgattcagatcttaagtctaattacaggtcccccatttctagcatcaacacatatcaagagaaggcttattagaatgcaaacattaaagttatgtctagatctagttatgaatatatagagagggaataatttctctggatttttacattcatgtaataacttttgaagaccttaaaaaagaataaatacttaaactatgattagaaatgtcaaagtaaatgtatagaagcaactagaaaatatttgttgaggtaatgcctatcaaagaactgatagctatattgtttttatctaatagcagttatgatttatttgccttcctctcagctgcctataggagtttttcctacagataggagagtttccttaggaacttttaggcccagagcccaccagctacgatttcatcccttagcaaaatgtcagtgatgaatgtagcagctaacaattattatttgtttacattgtaccagaaagtgctttacaatttttaattcattttatcctcatacgaattctgtgtggtataggtactgttatccccattttacaggaaaataaaaggcttacaactgagaaattcttcagcttaggtttggatcacattttgttctgtctgctggtgcttttgattcctgggactggattctgttctgctaaggcccacttctccaatgcttttttttctctctgttctccagattggataatttctattggtctggatttcaactccagaatttctttttttaatttaattgtattattatttttttaacttattttttatttcaatagattttgggggaacagatggtggttggttacatgaataagttctttagtggtgatttctgagatttcagtgcacccatcacacgagcagtgtacatgtatactgtatcagtgtgtagtcttttattcctcacccccctcccactctttccccctaagtctctaaagtccactgtatcattcttatgcctttgtgtcctcatagcttagctccctcttatgagtaagaacatacaatgtgtggttttccattcctaagttacataggataatggtctccaattccatccaggttgctgtgaatgccattatttcattcctttttatggctgacaacttcggaatttccgtttgttttttgtagtttctatttctctgttgtgattctttgttaagtcattgtcatcatattttctattaattcttcaaataaagtttattttaattctttgaagtcatctataatagtcactttcaagtctttgctaaatctaatatgtgggctcaaactaactagagttagtttctattgattgcctttttattaaattaattaatttttttttacagtttttcctttgcttaacattttttgttgttgttgctaatgacagtttagatagcatgttgtagcaactctggattctgatttatttttctgaggctttttttttttaaaatcaaaagtaactgtcctaacttatactgccgaatagatcttctctgtggtatgtagctgtcgatgtctccactcagttttttaactcttatttgtagttattagcctcacttcctgctggttgtccctgtgtctacatagcttagtgctcaatcagtgattaggtcagagcttgtgcttaaacaccttgagtccatagggcttctaccctctgccagttgctctgtgtgtgggttgggagcaccttcaaagttatagccagttctcagtccaccttcaatttcaccttccaccaggccctcactggtcttccctgcacatgtgcctagtttcccagtcagccagggatgtgtggagtgcttatttggcccttctattactatttcagttataggatctctcttttaaatttctgactgggttttcctcgttagttttctactaagttggccattcaaaaattaaaaaaaaaatgttgtgggtatgtagtaggtgtacgtatttatgaggtacatgagatatttcaatacaggcataaaatgtgtaataatcacatcagagtaaatggggtatccatagcctcaagcatttatcctttctttatgttacagacaatccaattatacagttttagttatttttaaatctataaaaagttgttgactgcagtcaccctgttatgctatcaaatagatcttattcattctatctaagtatatttttgtacccattaaccatcccctcgacccagtacccttctcagcctcattctactctctatctccatgggttcaattgttttcatttttagctcccacaaataagtgagaacatgtgaagttttctttctggggctggcttatttcacttagtattgtctagtttcatccatgtagttgtaaatgacaggatttcattcttttttatggcttaattgtactccattgtatatatataccacattttctttatccatttgtctgttgatgaacacataggttgcttccaaatcttggctattgtgaacagttctacaataaacacgggagtgcagatgttccttcgatgtactgattttctttcttttaggtatatacccagcagtgggattggtggactgtaaggtagctctatttttagttgttcgaggatcctccaaactgttctccatagtggttgtactaatttacattcccagtaacaaagtacaagggttctcttttctcaacaacctcaccagaatttgtttttgcctgtcttttgaataaaagccattttaactggggtaagatgatatctcattgtaatttttgatttgcatttctctgataatcattcatgttgtgcaccttttcatatacctgtttgccttttgtatgccttcatttgagaaatgtctattcagatctttgtgtctatgtgtctgtttttatgccaatatcatgccattttggttactatagctctgtagtataatttgaagttaagtaatgtgattcttccagttttgttgtttttgctcaggataacattggctattctggatcttttgtggttccatataaattttaggaatttttttctatttctttgaagaatgtcattgatattttgatggggattacagtgaatctgtagattgcttttggtagtatgggcgttttcacagtattgattcttctaatccattaacatggagtatctacttttttgtgtcctcttcaatttctcgcatcaatgtttttatagttttcattgtggagacctttcacttctttagttaagtttattcctaggtattttattttattcgtagctattgtaaatgagattatcttcttgacttcttttacagatcgctttctcttagaatatagaaatgctactgatatttgtatgttgattttgtatcctgtaactttactcagtttatcattttaatagtttttttggtagaacctttaggtttttccaaatataagatcatattgtctacaaacaagggtaatttgacttctttctttctaatttggatgccccttatttccttctgttgtctgattgctctagctaggacttctagtactatgttgaataatagtggtaaaagtggacatccttgtcttgtctagatcttagaggaaaggctttcagtttttccccattcagtgtgatactaactgtggctctgtcatatatgactattactgtgtttaggtatattccttctatatccggtttttcgagagtttttatcctgaaacgatgttgaattttattaaatgcttctttagcatcagtttacatgatcatatgccccgtgtttctttccactgtgataggacagcactgagttccagtgcaaagtcccacaatcaccgtactctccttcccccaagcgcagaggtttttctctctgtgcccatgtggctgctgctggggaatgagggaaggacggtataggcaattcaagactggctttcctaccctcttcagtgcctctttccttgatgtgatgttaaaaccaggtattgtgattgttcacctggattttggttcttatgaagatgctttgtgtgtgtgtgtgtgtgtgtgtgtgtgtggctagttgttcaatttggtgttcctgcagggaggacacttgctggaggtttctacagccttcttgctctgcttcatcctctatgttggccatttttatctgacaaagctgtggcttttcactgccacccccagttgagtctacccactggggcagcaaagctgctgatttcccagccagcctttttctgacaaaactaaggtctcactgagctaggagggacaggagtagtctcaggcaaaaaggccatagtgcctgctctacttaatgccaagttctagcagtttttaaatattaaattttgtttaatttattgctcccccttgatgaattcccagattcctaaaatggttatttgttgacaatgttgtccagttttgtacttggtttttgtagaaatgatttgtcaaccttctcatgccattatacctgcaagcctggcttccatggattacaattttttttttcatggcccactttttaaccttggctaatattctgatttctagatctttgactggctgtttttatgctgcctagtcttttgctactctccctttcaagtccctgttctgtcctggcttctagaaactctgagcccctgtgctttcccttggcttaagtggtgattaccacttctccctcttatgtttccatccggccatccctgctctctgcccttcaaaccttcctataatatgcacctgaaaaattcattggaggttactgactttaagaggtaggcctaaagctgaatctctcccctacctaaccctgactccagtcaaaagcacaaaggaaaacagctttagaactgctttgaaaaatgatagataatggtttaaagccatttgctccactgtctttggttctttcctctcatcacgttatttctcagtccacctatcctgtttcattcccagtctaaattattcaatagttttagatttaggcttcttaaatccaatactcaaatctgatgactttggcaaatgatttccagtatccctatgaccatctacatgtaatacggtagtcacagatctatataatcttgcccttcaatatttgcttcagatcagttccaactcttttttaaaaaaaaaaatctgtggaaaattgaagggtttcaccaattttttggtgaattttcagggtcttctcaggggctcctgcatattggcaatacagtcagtctaattgtttgatttcaaaatgtcattattcatttagttgtgtagaaaggcctggattagtaattgaaaaactcctaaatgtgttatctttaacatcgtcctaggatactgatgaactttcagattctaatggtcttaactatttctaatattttattcatgccttagaaatatactggctttgcaggcttaggcaaactgagatttgtgtggttttcttttctgtcattgaaaaacaaatagctctttcacaagggtattaaattggttaacttttgggaaaagttctccagaaatggaaatcagtgcaatgcttgtaattcttgtttcctcagactatatgtctatttcagggaaataacatttagaaatttaaggtcttctttgcatagtaaagggatatgagtaaattccttttccttcttgttttttttttttaaaggaaacatctggctggaccttttcaggcattgtagagacttttagcctcatgatactcattggcttgaatggacatctttcaggtctgaaaattcatgagttaatcgagtggggatcattctggagtagctctactacactagtttactttgaacagcatcatgattatattttcacaaagccctgaaataacgttttgcttctttgtgggtgtaggagataaagaccctttatcttttattctcatggaatccattttagctgcactaatgtgcattaagaagtttctaaggcgatgggaaatgtcagcaagaatgaaattaattgggtggtcatccctgaaggtacatatttaggggttggttcacagaattgtcacttcatcagcttgcttaaaaatagaggatttacttactgctcggcttgagttgaaagtaatttctttccctcaggatcaccttctttgacagaaattattttagcccgcctcacttttaactcactctcattctactgagaccaaacacgtctgaattctctatcttttgaaaaatatgtaaaaatgcattaaatgtctttataaattatgttcctgcccagaacttttgtttgcaaaagcattatctatagcatggaatgtgagtgatataatctgcaggatattaataagaaagcaataaatacactattgcttttccattccatattccctagactatctgtaggagttgataagaaaaatgtaaaactttagcctgatgtatatctattttatatggtccaaagaaataggtgtaccaatgtctttttcttcagattcttgtattttggtattatattccttttatgtatctcattctccagtataatttcatccccattattgtgggatttgaaatttctatgagacctctccttaccttatccaccaaatcctttctcaaacacagactgcagaagcaccctaaagacatagtaagaagaatttaaagcacttgaatgatattctctgtttattgaagtggatgtatacatgcaataaattcattttaatggatttagtgatcttctgttcagcacttaccatttggacaacagtcaaagcccataagcaacttaaaatcttgttgggacataagctgtgcaaactcagatgccttcaggggccagtcagttaacaaatggttgacctacatgggtgtaaacaacagggagtggtagggactgtagaaaactagtaattacacacaccacttgaaggaattccaattcaatagtttgttaagccattgtgttgggcaagcaaaacagttttctgggaagattcagcccattgggttggacttagtctgtggatagccaacttttcagcattccatttatctattgctgtgtgataaacctcccccaaatttagagtactgaaacaacagtcattatttttctctctcatggttctgggggtcactaggctcagctgcatggttctcgtttgtggtttttttttttttttttggacacagagtctcactctgtcaccaggctggagtacattggcgtgatctcggctcactgcaacctccgtctcccaggttcaagcgattctcctgcctcagcctcctgagtagctgagattacaggtgcccgccaccacgctgagctaatttttgtagttttagtacagacagcatttcaccatgttggccaggctggtttcgaactcctgacttcaggtgatctgcccacctcagcctcccaaagtgctgggattacaggcatgagccactgcacctgaccatttgtggtctttcatgtagttacagtcagatagtggctggggctagagtcatatggaaggctacctctctcacatgtctaatggttgatgctgactgttgactagaacatctacatatggcctcttcatgtatgttgggtttccttacagcatgttgattgatatagaaagttcaaagagcagcttttctgagaaagaagaagggagggagggtgtgtttgtatgcatcagggggaagttgtatcacctttaattacctagccttggaagtcacactgtcatttctgctgcgtattattctttagaagtgagtcactaaggctaacccataatcaaggggagaggaatttagattccatctcttaatgggaggagtgtaaaaaagttcacaaacacatattaaaactagcacatgtagccttacattagagaatagtaaaactaaatatataataaacttggatgtaatacgggagatatacaaaatgtttaacagctggtttggcatgggccctgaacaaatagaagaaataacagcatcaacaactggtaggatctactggtgcagctgcttaatatcagctctgggtattatcaagtctccatacgtgccctagagtcaataagagccctgggaggtcaggaatggtaagatcatgtgtctgaaataagatgttttcgttattcttgttgaagcttcagaagccccattaaggtctagtttcagagactggttgtttggtttgctttgtctacctttgtctaccagcagttaggaacattttccctgcatggcccttacctgaatattttaaaagtttgttattttaaagagaggggagttgggaagaacaaaaagagaagggacaagctctaggaatacacgttatcttttgtatgtattatgattcattccagtgttatttagaagccaaggcacccacctggattttcccctcttgacctacaaatgttgggttctttggatagtgcattagtttcctattgctactgtaacaaactcctacaacctaagcagcttaaaacagcacagatttattatctcacagttctctagctcagaagtctagggtagcttggttgttttctctgctttggatttcataaggctgaaatcagagtgtcagccggctgggctcttatggggaggttctgggaataatccccttccaaggggattcaagttgttggcagaatccagttctttctgattgtaggggtaaggtctttacttccttgctggctatcgcctggaagccactctttgttctcagagggatttatgcagtccttgcccattgcccctacatcttagagccagcagcgtgtcaaatccttcttacccttcctcctctccgacttcctcctctgttgcatctctctgattccagccaaacaaggttgtctgcttttaagggcttgtgattagattgagcctacctgaataatccaggataatctctctattttaaggtccttaagcttaattacacctgcaaagtccttcttactatgtaatgtaacatgttcataggatccagggattaggacttggccataattttacctactacaggtagccaagttaggtcaatagaggtgctttccccttcacttgtttcctcaggaaagtaggccaaccagcaagtttatgttaaacactagggcttaattgaaataccctaaatttgaaggaaaagaatatgcattttatggaaatatgtctaggtttcggttttgaagagagaagaggtgctctttcttgatttccagtaatgtctacagtataatataatgcttaggcgaactggtttgaagtcagacagaccaggcctcgtacaagcacataatgctcataaatctcattatcctcgtctgtgaaatgggctaataattcctatgttgccatggggaaaaactgatgaatagaaggtgcttaggacatagtaagtgctcaatgaatgttagctaaatataatgataatgataacagaatgacatattcatagacttctttgtagctggggagaaggtatgagtttaccaactagtatcaataattgggtttcctattagtttcatattaacctgatataaattaatttgttagtctgacataattatcctattagacgtaaatgagtaatacaattattctagaaagggatttatacaagttttttttttctttttaatttttttagagactggaacttctgggctcaggcagtcctcctgcctcagcctcccaagtagctggaactatatttgcatgccactgctgggcctaggagtttatttttagcaattttgcttaagatgaattgcttggttttaatcataacaagcagtcactgaaactcacaaccatctaagtcagggtttggccactatggcctgtgggccaaatctcacctgctgcctgtttttgtgtggcccatgagctaagaataatttttagagataaatgtttgcaggtggtttgatgatggggaagccctaactttgttctgttttttgtttttgttttttaattaaaataacttttgttggtacgtagtagttgtaaatatttatggggtacatgagatattttgatacaggcctgcaatgcataatcatcacatcatggaaaatgggagtatccatcccctcaagcatttatcctttgtgttacaaacaatccgcttatattattatagttatcttaaaatgtacaattactattgactatagtcaccctgttgtgctatcaaatactaggtcttattcattctttctaactatacattttttgtacccattacccatccccacttctcccccattcccctaccgcccttcccaacctctggtaaccatccttctactctctatctccacgagttcaatcgttttggtttttagatcccacaaatacgtgagatctcacaaatacgtgagaacatgcaatgtttgtctttctgtgcctggcttatttcacttaacataatgacctccagttccatccatgtgttgcaaatgacaggatatcattctttttatggctgaatagtactccattgtgtatatgtaccacattttctttatccattcacctgttggtggacacttaggctgcttccaaatcttggctattgtgaacagtgctgcaacaaacatgggagtgcagatatctctttgattattttctttcctttgagtatatacccagcagtggggctgctggatcatatggtagctccatttttagttctttgaggaacctccaaattggagaagcataactttgaaccccaattaagcaaaaggttatctcatcccaaaataattccgttattctcattaataggcatatattagaaataattgtactcagctgggcatggtggctcacgcctgtagtcccagaactttgggaggctgaagtgggtggatcacttgaggtcaggagtttgagaccagcctggccaacatgccgaaaccctgtctctgaaaaaaaaaagagaaataattgtacttgattactattgttattttttggatttcatcaataaaatttgtggacagtttgctcttaagtacctacgtaatatccttgattttgcctctttgcctgtaaagcctaaaatatttatgatctcactctttacagaaaaaaatttgctgactgctgatcccagtaacctattgtgcatttaaggtttgggtgtagactccttttagatagaagggatcctttagatgtcctaatgcaatgccttaattttatagctaaaaccaaaccccaggaaggtaggtgactcttcccacacaattcagctagttagtgatagaggcagtacactttccactggagcaggcagaccctctgggtggcatagttggactttattcatctttctttaaatggacctctgtgttgtcaccaatccagaacttttaaatggacaggccagaggtaatgcagcatagaaacccaattgtccattcaacccattgaatagggcctggcaaatatatagttgctgtgtttccatttgcagggacagccctttagattctagaatttctctttaaaactttttcaaaagcactggtgtgctgactttttttctgttaagttagtaacaataaataactgggcatgttaatatattttcattgagccatgttcagtttaggatgagattgttcattgagcagtacagtagccccaaactgagggaataatttcccctcatgtccaacatccccattgttccatgttatctgctaataaacccagccatgctgtgtttgtctttgcttccctcctgcctgtataatgatgattgctctctggcatttgtttctttttctacaggtggtttacaaatccgacgactgtcaatgccttctacagtgcatccaccaaccagatccgtgagtacgggttccttgtctccttggtaacctggtataaaatgcaaagaacttttccatgactatgatggagggtaagacatttcttatttcccccaaaagtggcagggtatgctggtgaaggaaggttgttctcctacctatatgccaaattttcctcactctcttcaccttaccagttttttttaaagctttatgtcaccactgattgaaaaaaagtcaactacagtaaaccaaattaaaccataatgaagtttgccatgaaaaggagcaagtttccactttcctttcataatggccttactgattttgtccatgccattttattcattcctaggattggtggggaaaacagcaggtaactgagcagattgtagaacctgagcggaccatctgtatgtaagaaagaagcttggaaatattcttattaacgctaggaagttatgtcttgaggttttctacttacatgtatcaggtatatgtaattaaaaataccatgataaatttaaaaaattattatttttattattttttaaagacagagtctccctctgtcacctaggctggagttcagtggtacgatcctggctcactgcaacctctgcctcccaggttcaaattattcttgtgcctcagcctcctgagtagctaggagtacaggtgtgcaccaccacgcccagctaaattttttttatttgtatttttagcagagatggggttttgacatgttgactaggctggtctcaaactcctggcctcaagtgatctgcccaccttggccttccaaagtgctgggattacaggcgtgagccactgcacctggccttaaaaaattattaagatctgaatggcacaaataaaaagtctgacagcttccagccttggcaataaggacacatactcactgctggtggaaagatagatgggctcatccactttgcagggcaatttgacaatatctcaaaaagctgaagttgtgcatgcatacctatgaccatgatgtgtgctcctggaatgtgctctaatgttgtgagtcttgaaatgtggtccttggacctgcagtaatagcatcatgggggatcttgttagaaatgcaaattcccaggccccaccttaggtctattgatcaaactttggatgtggagctcagaaatctggtgcaataaaacctgcaggtgattgtaatgtatgctaaagtttgggaacagctgccctagagaactcttgcacaaggcataaagaagcccatgcaaaaatgctcataacagtattatttataatagtagaaaaagcaaaataacctacatattcctctgcaggaagatgagtcacatgtggcatattcacacaaaggaataccatacagcagtgaaaaatgagcaacatatattaacatggatgaatttcacaagtaaaacaacttgggaaaatatatcaagtatgatactatataaataaagttgaaaatcatgcagaacaattctacacatggtttggaggtccatccatttgtagtgtaagtgtaaagacattcatgagaatgacaaacaccaaattccggttggtggtggcttgtcttggggagggtgggccactgttgctcaaatccttgctggtttctcctcatctcccatatctcttaatgatggcatgccccaaggctcagtctgcaccttttctgttctcttctctccatctttgctcacttgcttggtgataacatctaatctcatggttttaatcacatttctacagtgttgaatgcaggggatggaatttatcacccttgttcataccactactatctcccacctggattatggtaatagcctcctcattggcctccctgcttttgttcttaccccccttcagtctattctaaatataatattgtagcgattttaagacgttttacaatcacatcgtgtcacttctttgctcaaaagcttttatcagcatcccatctcactcagagaaagagccaaattatttataatggccttaaggtctgttatctttctgcctgtacctcctgctactctcccccttcctccctccttctgttccggccacactggcctccttcgtgtttatagagcacacctgacacgctctgctctgggagcatttatacctggggttggctttctcttggaaaacttccccaagtgacctgcctggtttatgctcccatttccttcaaatctttattcaaaggccaggccacctccttagggaggcatcctgccttccctctggccagttggccagtctgccgtgggtcctccatactggccgttgttcctacaggactctggtcagaggacagccggaaggctgtggctgctcactaccagctggcacatcttcttagagccgccctcgtgtggccactgttaggaatggcagtttctgcccgacttcggtctgagagagaaatgaacagaaagacgaaagacaagcagatggcgggatttttttatttatacattaatttacataaccaagtaagttgttaaatattttgaatgtcacttcttactgtataaatattcattatcacgaaactaccattgctttcttaaggccctaaatgccaacttgagaactaagttgcatatgttatatgggaacttatgatatttgagttattaattataactaatacttataataatttattattaattataatcacatttaggacattctattgggaaatagaaattgtttagattattcacttaaaaacgttttattgtctaatatttggtacatgcaaaagaacatgtaacattttggcacatataagttataaagaatatatgaaaacatgacgaaattaatatgtgcctacgacgccctcaccccatcaggaaccatccctccctctcaccacagaagtaacactcttctgatttgagggtttatcatttttgttttgtttttttaaaataaaactttatttatataggtatccctaaagaatatgttgtttatttttacttgtttcttagtataataaaaatggtatcttactgtatgcaatcttaaacaactgcgatttttcagtcaacatgtttttaggatttgttcgtgtagcatgtggtggtaggttgttttcatgttcactgctgtataatatttcatgactgtacccccagattgtttattcttctgttgtccagcctatgagtccccacacccaggtttttgcttatgaacagtgctgctctgcatattcttgtgaatgtctcttggaacaagtgtctgagggtatacatccaggagtggaattattggctgataggaagaagttatctaccagataatatcaaatgttttccaaagctggtgttccaaagtacagaagtgtttctgttgttcctcattttcatcaactcttggcattggtagatttaattttcaccagtctagcgagtgtaagagatcagctctgatgcaagaaaagccgacgtttccgcattcactttaaaatgtcactgaaggcttactgctccttggggtacttaagtgtgtctaataatagttccatctccagggttcacccctgctcagcctttttcttgcctgggaagggctaatcctatcagaggtttactgaggaagaaaccatttcagggtaacccaatggtttcatgaaagctcatgggcagagggttttttttaaaatgaacaatttgaaacagtattttaattaagagattcaagctgtttctgttttcctaatgaccagtgcttgctctcattgtaaattacattcccaggcaagatgacaaggaatcctttgggtgacttttttttcccctctctcctttctgattttctggactacaaattaagacaggtggagtttcttcttacacacttccccaccgggtttcctgggacttcccccaccctacaactgccttctttttgcttcgctgaagaagtgaaaaattgaggtgattctctaaaatgaacatctttattgattaggggctgattctgacagcatgtggccatctgtttaattgggttttacatctaagatgtaactatacttagtaacgtgatttatgacaatttcattcagttcccattatcattttctgatttatgctacttaaatcttcttctgcacgcaatagagacttgaatagaaaacagaaaaacctgtagttgttttttctttttcaaatccatgcctttgtgtggaaccctatgatttgtggccatctttcaatgttagatttttacagggtggttacaacttcttatttttcttcccttgtcaagctgggtagcaacgtctctagacatggcatgtagtgtgaaattataatgatttaaatctgctgtatgaggagttaaactcagtagctgtcataaaatttaattatatttgaataaggtggttaaagaggaaaacacaaatctgaaatgattggtgcttaaccctaactttgtgataactgcgacactgatcttgctgcttttcagagtggcaaggtgagaacatgaatcagagatctagtttgtatggccttagtcgaggtttttatccttccagacccctattgtcctgtctgccacatgttgaggctatctagcccatagggttttaggggaagatttaatgagacgaatttgtaaagtgccagcacattgccaagctcagggcttgtatatctaaacctggcatgccaggaatccctgcgataaccattgtgtcacaagacaaacagcaaaatataaagatcggcaggggggattatttcaaacttttgccctcaagagatcttaggccgggcatggtggctcacgcctgtaatcccagcactttgggaggctgaggcaggcggatcacctgaggttgggagttcgagaccagcctggccgacgtggtgaaacctcatctctaccaaaaatataaaaaattagccaggcttggtggcaggcgcctgtaatcctagctgctcgggaggctgaggcaggagaatcacttgaacccaaaaggcggaggttgcagtgagccgagattgtgccagtgcactacagcctgggcgacagagtgagactctgtctcaaaaaaaaaaaaagagattttattataatgttccacattataatatgtatgcatgcaactgactaaatgctgagtaaaagaagccaggtgtaagactaaatactgttctgtttcatgtgtataaagttcaggaacaggcaaatacatctatatgatagaagttaaaataatgactacctttgttgggggtattgactgagaggaggcatgtgacacattctttatcttgatctcagatgtggttacacaggtgatacaagagtaaaaactcaccgtgttctatcattaaaatttgtgtctggctgggtgtggtggctcacgcttgtaatcccagcactttgggaggccagggtgggaggattgctttaacccaggagttcgagactagcctgggccatatagcaagaccctgtgtctacaaaaaacaacaaaaaattagccaggtgtggtggcatgcacttgtagtcccagctactctggaggctaaggtgggaggattgcttgagcccaggggtttgagacagcagtgagctatgattatgccactgtactccagcctgggtgacagagcaagatcctgtctttaacaacaacaaaaatgtatgcttttactgtatgttaagtgacacctcaaaataaataggaacactgctccttttctccataaaaatgtttggaacagcgtatagtatgcatggacatctggagctaataataggttgcctcaggctaagtctctagatgtgtagaccagggattggcaaactatttctgtaaattgccagatagtaatatttttggctttgcaagtcatagtgtctttgttgcaatttctcaactctgccatggcagccatagacagttcataaaccaatgaacctggctgtgttccagtaaaactttatttacaaaacaggtggcaatattcaggtagtggtagtggtgggaagagtgaacagctcatatttggttttcatttctactaacatggattggtctttagaagaaaattcattttaagtattcactatcaatgaatatttgaaaagcgcctcatttaagtatttggtttttattttcatacatctcaaatcaaattaaagaagtatcttaaacagataagatcttggcttgaaaacaagcatggcctaagggctaaaaccaatgattttattatctttgctgttatacacaagggatttttttcccctcagtttaatcacagatattctgctaaagaagataagcctttgtccagaggctgggcttatgggggcatcgaattatggaattaacctggaaatcaaacatagatttgttttgctgttaaggaaataactgtgtttcaaactgggagaatttctcatacttcactggctctgcctgaaaccataaagtaaaagctaagttagcaaatactcacctgtggcttctcttggaatttaatgaaattaaatctttgaatccacttgatgttccatctggggacatgagaatataagactaatatatagaatttgggaatagtcttccattgtttttagagctagaaagaaacttaagtggtcacctcatccaaatttctcactacctaaaagagatcctgacactcagagcaattcttagtaattttttttccacttattcacttgattttcaagtgaattttcaaggccccaatgattttcacttcccggtattcattcccctgtctagtcccctgccacactgagtaaggcttaccactgtaactaataggatgctatggaaattctagattatgacttctgaggctgggtcataaaaaacattgtggcttttgttttttggataatgttcactctgggggaagccaaccaccacactgtgagggcattcagggagctcacacagagatccacatgtgaaggaactggggccccctgctcattaggagtaccatgtgagtgcgccatcttggaagtagatccccagtgcagccaagctttcagatgaccgtggcccaggctgacatcttggctgcaacctcacgagacactgatacagaaccacccaaataagctgtttccaaactcctgacccagagaaatggggagatagcaactatgtctggggatgatttgttacacagcaagaggtaactaatatagctattagagcatgcccaggtactaactgagtttggtaggagggtatataactttgtgtggtttagtggttaagggtgtgagctctgaagtatgacagtttgattttgaatcctggcttggccactaataacttgcaaccttgggcaagttacttaacatctttaagcctcagtttaattatctgtaaaatggagctaatagtagtaaccatcctatagggtttttgtgaagattaaatgatactatatatttaatatctaatgttatctagtacattttataatctaatattagatacataatattaatatgtaatattaaatattaattatatctaatattaatatacatttatagttatatattataaattatacatataatatattatataatatttatataatatatatcaatatgtaatatataagtatatattaaattatatatacttatatatatgttaatattgtatatataatatcatttaatcttaaccctataggatggttactactattatatatatatataaaatgcttggtatagagtgtggttcatagtaggcacccaataaacattagctattagtccttgcttttgaggagctgggagagagagacttgttaccaggtcatttagaagacatcatggtgagtgtgcaacagaagggtgtgcagtgcattctgggagccacagtggaggggcaattaagcctgggggagtcaagattggattccctatgaaactgatgtttgagtggactttggaaagaaaaagaaatttctctgggcacagaagtgagattagggcatttaggaagaagcactgttgtttggtgcaaaggcgcagatatggcagaacatagcacaggaacagactgtgagatggccacaaatgctggggcacagcttgcactggtggaagagacagcaaagggagtgatgggagatgataagtggaaggaaggctttgtgggtcatgtcaaagaacaggccagagggagctagtatagtttttttgcggggaggcaaataacttaagttttacttctgtattggtctgttttcacactgctagtaaagacgtacccaagactgggtaatttataaaggaaagaggtttaatggactcacagttccacatggctgggaggcctcacaattatggcggacggcgaaggagcagcaaaggcatgtcttacatggtggcaggcaagagagtgtatgcaggggaactcccatttataaaaccatcagatctcatgagacttattcactatcatgagaacagcatgggaacaacctgcccctatgatttaattacctcccactgggtccctcctacaacatgtgggaattatgggagctacaattcaagatgagctttgggtgggaacacagcctaaccatatcaacttccttaatcctagtattaaagatcatggtctggagagggacagattgcagccactaagaccagttaggagttttgcaaatggctcaagagaaggacggggagggcctaaacttaggcaatgacaggggtgaggaggagtaggaagtttataaatcatatcccaggagataattgtcaaataactgcataatgataatacagatagcacagtgatcctcccttatccatggttttgcttttcattgtttcagttacctatgggcaaccaagttctgaaaatattcagtggaaaatgccagaagtaaacagttcctaagttttaagtcgtgtgccattctgagtagcatgatgaaatctcttgctgtccagctctgtgccacctgggacgtgaatcatctctttgtccagtgtatccatgttgtatatgctacttgcctgttagtcacttagtagctgtctcagttaccagatcaactgtcacagtgcttgtgcccaagtaacccttatgttacttaataatggccccaaagcataagagtagtgatgctggcaattcaggtatgccaaagagaagcttcctttcagtgctaaggtgaaagttctccacttaaggaaatttaaaaagaaatcatatactgaggttgctaagatctacagtaagaacgaatcttctatacatgaagttgtggaggaaaaagaaatttgtgcattgtgtgcgtgtgtgtattagtttggtactatctgaggtttcaggtgtccaccaggggtcttggaacatatctcccaaggacaagagcggggactactgtacttttctaacttttccactagggctttacaggacttccatcaaatggagattataactgttctgtgcagctaggctttgctgaggaaccattaatatgccaaccattatgccaggtactttaatgtatgttatctctaatcttcacaacagttctataaacttggtattatgggctcattttacagaagaagaaactgaagctcagagaggtgatgcaacttgcaaaagactgcaaaactagcaaattgcagagctgggagtataacccagcttatctgattgcatcctgtttatcgtcacactacactgttcaaaactggataggaaatgtgagaattacagtcacgtgataggctgggtgcagtggctcacgcctgtaatcccagcactttgggaggctgaggtgggtggatcacttgaggccaggagtttaagaccagcctggccaacgtggtgaaaccctgtctctactgaaactacaaaaattagctgagcatggtggctggtgcctgtaatcccagctactcgggaggctgaggcacgagaatcacttgaacccgggaggcggaggttgcagtgagctgagatcgtgccactgtactccagtctgggtgacagagtgagactctgtctcaaaaataaaaataaaaaataaaataaaaaatagccatgagatgatatacaggaacacactctgaaaaggttaagggtatgatataaatgtgttagagtaatcattattatatcaccccctcacccatgctgctcgttcactggttgggggattgtttctcttctggtatggaaacaagatattatagaatgtaaggcagccaggaggtgagagtgagaagtttagatggtccccaagtcctactgatttcatgtccaaaagggttgtggcatcaagcagttcattattgcctcttctaacgatgctgttctctgcaagctttttggccaagcctgtgatctccttgggtctttagcttatgggaagagtggaggaggggttattctgtaagctagcttaaaaggagtatttagatatactcccccaaaaggctttactttccaaagtttacactgagattttaaaagttttgttaagtgagctgaagttaagtcatgaacaaactttgaatagtttgtgaaattgacagatgatgcacttagcaagtctgtggaacacctgctacaacttttttgtttttgttgttgtgacagagtctcactctgtcacccaggctggagtgcagtggcccgatcttggcttactgcaaccttcacctcctgggttcaagcgattcccctgcctcagcctcctgagcagctgggactacaggcgctcaccaccacgcctggctatttttttaaaatatatatttttattagagacaggagtttgccatgttggccaggctggtctcgaactcttgacctcaagtgatccacctgcctcggcctcccaaagttctgcgattacaggtgtgagccaccatgcccagacctgctacaccgattttaaggcattcttgtcctggtctagttgaggaatttggaggtcctgatacagacccccagtttctgaagcctaaccaaggaggcacctgagaatggtgttctgggtagtatcctgggaggacaaaactagcttcatctggaatgctctgcagtctcatgggattcctgttaccatggtaagtcccagaaccaatgcctgtaaggatgcaatttgccgcttgcagggtatttctaaatgctgttttcagacatagtgcactggtcaggttggctgcagggctggtagtaggaaagcatgaaatgattatcagagtcaacctgattaaagacaggatgtaagcaagccagggtgaggtgagcatagggacctaaaaaccagccatgggaacaggagacaggatgtcagggagaaatctcattaattgaccttgatggtcacagtctcatttgtcttctctttaaaaaatcaattgttttttacccttatttacaaaaggagttcatatttattgtagaaaatctagaaaaattttaagtgaactaaaaatttaaaaagttaatatcatttaaagatagtcatggttaatacctttgttgaataccactgagatgtatgtttatctacaaatattttacagtttaaattaactagactcatccaacagtactactttttccccactgaacattgtaacatgaatattttttccatttattacatattcttccaagtcatcgagtgtagtgttcaattgagaaaacaccttaatttatttaattacttcccaatggacatttaggctgtttccctattgttaaagaaccctctgtattaataagttttgtggctttctgtctaaatctgagaccatttctttagagtaaattcctagaagtggaggagttgctgtatcaaatggtatgccccatttgagggttttgaaatgcatcttacccaacttctctcaagaaagcagtacaaatttgtatttccagtaacaacaaatgagatggtttaacctttaatgagttgcatcttaaagatactgttggaggaaatgaatagagagactcagttttttgtctaactgatatagggaaaatatcagtcacatttcattcttgagaccattattgcataaccagatatggttcagtgaacccacataagcatttgttgagtacctaccatgctcccaggcctgggctgaatatccctgctgctagtgtcagtttcaaatacttagtacagcaatcaataaatgagaggacctgttggaatatgagtagaatatgagacaccgagctttatagtggaaggaaattagtgttttctttgccagatgttaaactatagcagtggttctcaaagtgcggtccctggatcatcagcatcgcttgtgatagatggggattatctggccctacctcctgaatcagagactctgggatttgggcccagcaatttatgttttaacaaggtcttaaccaccaaacttctgcaagatgccaaagattgaggaccgctgagctataaaaaggcagcaaatgcagaagaggtcagacttgttgggtaaaggtggggtgactaacttctcctggtttgcctgggaccatcccagttttagcacagaaagtctcgcatcccaggagccccttctgtcccagctagacagggatggttggtcaccctggtaaagggtggcaggggtgaagggaggttctctttgttgcagcctaaaggtaattatggcagaaaaagaatagaagggccagcagagaaggtttcaagatggagggcagatttcagaagctgctttctgcttgtcagctctaggctgatagatgtggtggcaggaggttacctgcaggaagccagcagatggctaaggcatcttgctgaatcccttgacaggagtcacagctgttagaacttgatactttctggaaaggggaaggttggcattcaccaaactactgcaagatgccaacttgaaaaaaaagccatgattaatcttagcagtgatgacaatgaaatcattttacagcaaaaaccataaccaaaagtgctttgtaattgcagcaatttccatgtcctgactgatggccccctagattctagaatggtgtcgggcttatctgattacaagaactaatcctgaataagatgtaacattcattcttagagtaagcattcatcccggattttctaaagcaggtgcaatttaaactctttttgttctttactacagtcaataatgtataaggcatgtaaagtttcagttttgaaagtatagtgtgcaaaattttaataaaagtaatcatacgttacattgttacatgcatggtgttgatgacagaaagacaggagggctgatttatagatcagttaaacataagaaattccttatttttcctaaaccaacaattctgaacctgttttcatagtcgaatcacctggggagcttttaaaaaatgcttatgttcagggttccatcccagagatggtgacttaataggtttgaggcaggggcttggacatagatattaaacaagcaaaattccccaggtgatgtgcatttggggttgagaatactgtacttaccctgatataaaccaatgggtcccaactttagcatgtaccagaatagcctgaagtgctattcagtaggtctagggaggtgggggtgcaaacatttgcacctctaaggagtgccctggtgatgctgatgctgctggtttgcagaccaagatttgatcaccagtttcctaaaccattcctactccaaaccccagataatcgtacaaaccacatctgtcacccattagctagacatgtgaataaataactccctctcaaaacacttctgcacatctactcccacgtatccagtatttcttttctctactgagtttaaaacatatttcaattaaaaagcatactttagaaagcttggtataggtttaccttcctctttaggtcttgcaaaataggattatttgtcgagtggtatcctttctccctcactagattgtaggttctctgaggacatttgtttgttcgaaggttgcccatgtggcttaggacatcataggtgctcagtaaatgttagtagtcagtggttatgcatagaaattgcatcatcataaccaaacccacctattcccagtagtttttataatgggatctaaatagactgacactccaaaattaggatcataaaacgtattcacttagagaagtcgaagctattgcacaggacaagtaaaataatcaaagaagttagcagaaggtaactacaagggaatttcaccaagaaggacaataatgtagataagatgatatatcagcaatagccctgaaatgtggactgatacatagagtagtttagtaatataagcacacacttaaggcttttgaaaaaaaaataactgtcacaacttgtactggagccacattaatacatcaaaaaatccatgcaaatgaccaaatatcccattgtttgacaaaactaataatgcaacagaatgtattgacatagtccaccccttaacaaaactatcacaaacatccacactgaaagaaaacagacacaggtacacacttaatgaaaaaacccaagtatatttctggagaaagcagctacagcaaatatggaaacagatttagttcaataaacagctgaatgtgtatgctggtccacacatcctcaagcccattgaattttcctttggaattttcccttggtcacctttttttggattgaatttactttgtcatttgcccctggctctgtcacttctgtccagaggctgctgcagggatcctaaatgaacaaattcaatgatgcttattccttcagaggagtcaaaagagatgttgaatttaagaatgaaatgctcctgaaggtagatgagttcaagttgtcttgcattgtgttactacacttacaaaagtttgctatagagaaaggagaaaagcacatggtctgggtttctgaagactggcagtgaaagttggaggcttcctattttgtaaaatctgaccaaacatggaaataacaggaaaagatgtctgagtctggttcatagttgtctaaaatcatcagcatttataagttattaacacatcaatattaaaaattaatattaaattattaatttattaatactttattaatattaaattattattattaatatttaaaaaacttccaaataacatacaattttggaaggtaatgttttaaaaatattttctgtatgataacttttctgaaccatacacttatgaatatggaacttaaaattaatgctgcagtaaagtgaacgcaacaatgaatgtagggaaaatggattaaattagttcaatattctgcaggccgaaggcctttgatcaatattttgtctaattttctctttccagcatatatcacaaacataaaaaggaagaatattccacttttattgggggtcagcagggagggctaagaggatacaggagtgatggtatttgcataaaactggctggactatttagcttgttaatatctgtattgtgattgaaagtttattggaaaaatgtgctgatctcaaaactacactagttcggcaatgatagcaagagaatggaaccaacaaattctttcatctagaaggaaaatgaaaaccagaacttgaataatgggatgtatcttagatctggtactgaatgtggaaaattcaagaagtaatacattggtactactaatagtatcatgtaaggttttaaactttgtctaacaagatgtactcataatgataggtaatgcttcaaccccagtcatccctctgagtttcacaagatacagaatcagttaattcaacaagtatttattgagtgcttaccatgaaccaggtattgttctagctctgaagacatcaccattaaagaatagtaaaaaataaaaatcccttttgtcatggaacttgcattctagttggggaaagacagaaaacgcatacaaaataagtcaaatgtaaactgtcttagatggtggtaagtgttacgatgagttacaaagcaagaaagtgggtagaataacatcctgccccttaaaaaagcactagggaaggggttaatgaaaagatgatcttagcctacatacctgaagcgagccatacagatagtggcggaaagtaggttctaggttaggagaagagaggcgtagggcaaaaggaaaattattccctttttgcatgtccttctatacagtgtgaatttgctaggcctgaatatatttatttatttgttttcttgaggtctgagctgtggaataatgtgctaaatttgttttcttctctatacttgtttgtactaaaaaaaactctaattaatgcagcttacaataatgtgtactgaaacccagacacattgaggcatttaacttttctgggaaagctgtagctaccgtcagggtatgatttatgactataaaagtcaaatagttgagcctggggtaatcacccactgaatgtgattggttctttggcaattgtgtcctaaacaaaagcactctgtcttttatggtcagcattttgctaagctccaactaggttactccatatttactgataggagaattgtaatgagaaacaccagtaaaaaggagaggttgaccccagtagaaaaccaaaagcaggttcttgtggctttcccaggtgcagatttgaaaaagacagtattactgataaataattaggttattacaaagaccaatattttcttttgtcagaattttaatcattgaagtggtataaccacaatttgtatttttgcctgaaataggagtggaatttgctggtgttaacaaatgcaagaacaaaataatactatataagcttagttaactgtttttcaatagcctttagaagaattttctgtaatacacacacacttctttttttttgagatgctaaaagaaattttaataattgttacataacatactgtgtagctatttgatgaaatctacctctgtgtaataattattaaagtaagtcttgaaatgtatgataagaatatattagttttttgggtacaatttccatgaaaaaaataagaaaacaaataaataactaaaataagaaataggaggttttttatacatactgttgtcatcatacaaaattactctattaactaaatttacctgacattgtcaccgttaaaagcaaaatcaagacaaaactaattctcaaatttatttaattttagtaatatattttatttaaccctatatacccaaaatattttcattctaatatgtaatcaatatacaaaaattattaaagagatgttttatgttcttttttcatactaaggcttgaaaatccagggggtattttatttatttttatttagtgtactttaagttctagggtacatgtgcacaatgtgcaggtttgttacataggtatacatgtgccgtgttggtttgctgcacccatcaactcgtcatttacatttggtatttctcctaatgctatccctcccctagccccccaccccccgacaggcccctgtgtacacacacacttatttctaaaagaattaattttaattacacaagtttattatctttggataatcaaaaggtaaaacattacgtttatgtgtagagccctttttacgagccaccaccccaaatcctgattttcttcaaaaggtaaccactgtgatcactttgataggtattttacagacttttaaggaatttacatatgtatacacatatacacacaatacatgtatatgctcacactggtaggatagttatgtaagaagataaatggtatttatatgtctatatctgtaccttgctttatgccaacaacatgtcttggggattatttcccatgctggaattttaagacctacctctttcttttcacttactgcatagcagtccacaatatggttataccataattaattggcctcttatttggacatttagcttgttgcacacttctcaactacaagccatgcagcaatgaattctgtagtgcacttgtgcaagtgatcaggcagtggttctcacggtggcacccagaccagccgcatctgcatcgcctgagaacttgctagatgcaaattcttagccctaccctagacttattgactcataaactgaggatggggcccagcaatctgtagtttaacaagccctctggtgaatctgatgcattatacaatttgaaaaccactggcaggtatgtctgtttctacagacacacatgtacggatacagtcagttctataatgtaacatatgtgttcttaaacaccactgtgctatgcaaaagtatgtaataaaaggcctcggggcttttgagaaaaatgaggttggggcacaacagttaaaaacttcatcagtgacacgttaaaaacaaaagctgggagaccaataaaaatgatagtgcggttttatacatgttaaatgggtaaatacacaaacgctacagtaaatatggcaccttcccttgaaaagaccagaagtttgcttgtgtaagttggtattggaggggttgacccttgtgagtttttgggtagtggcggaaggagggttacatgaaattggaaggtaagttttaacagcagatgtggtgagtgtggctcctgccgcacgtggtgaactgaggcagttggtcatgttgaggtgtgtgtgtgtgtgcattttgggtattcctatatggctcagtccatttgggtgcatttttctgcttttccctagcatttcttgtggataagcaaatgcgaaattggagttatgtccaaattttcccccagtgtatcaatttccttggaataaatttgccttttcgatacaggtgtcacagctgtatgtatggatgcttattcttttgcgtacattacacaaaataactccatacactgtactgaatgctgtttttcacttaatatttcttagagctttttccatatcgccacatagttactcgtttttttttttaatggcatttaaagcattaagagatgactaaattgatctccaaaatgcttgcaacaacctacactcccatcaacatgcttcctacaccttggccaatattacctattatcacatttattaacttttgccaaccactagttaaacgtctctctccttcctctccctccctctcctccctctcctccctctccctctcttccctctgctccctctgctccctctgctccctctgctccctctcctccctctcctccctctcctccctctcctccctctctctctccctctccctctccctctcctccctctgtctcctcccccacctccacagagacatttacactgtgaggaatgcctcccgtaagtacactgatagaaaaaggaactttaaaagtgtgaaacaggtggcgaggtggtgttgaaatggtaaaaaaaaaaaaaaataaataaataaaaataaaaaggaaataaaatggatatgaaagaatacataaaaacctattaaaaaggcagaaaaaaggaattccctttctgcttatttttcacttctacctttgctaaatacaacttatccactttatgagataagatattgagttgaccctgtaggattccatctatcactctagctggttgacatctccaaaaatgcagcttacactattaatccattcacttcagcaaaacatgcctaagggcatcagattcttctgtttatcagtattgggttccttggccccaacaagctcagcagatacagctgaacagagtgatgtgtggtggcttcaactcttgagtctggggcttctaacggcaaaagtgacagacatagaggctcatgcaggtgtcagatgttttcctgtaaagaggttggcaatggacgtaaatgcttccagctgggcacattaccaggcaggataagccataatgatttaataatgaaatcacattggtttatgatcattgttcttattaggaaatatcattgctttttgatgatttattatgtgaaactgagttttcatataaacactgtgatttgcatttatttgtaatatatatttgcatatgtatatatatctgagtgagaatgacttactaaaagtaatcaccaaaaaaagaggatggaatattgatgtaaatatgccacaaatatttaaggaaatgtagaaattatgaagattattatgatgttgccacttcaaaataatattagatgcattttcctttatgtgaaactgacagagaactagtagctggatccatctctgttttgcaattaggcttttgcacctaatcacaaactacgatattattaataaaatataaagaatatatataagggttatatagaaccaccatttcccttctaaattaaggacttgctttcctgtcctcatttctcctcatgtgttctgacatggaggagagagagaaaaaaaaaagttaagaagagggaggaagaacattttgacttatgaaagagctttcagtctcatggggcctggaacagttgctctggagcagtgaaggacactacagaaggcttctctctctctttttggttatgattctttgctctatcagctgtgatgacttgtaagtacagttcctaggatcaacccagggtgcaaaatttagtggtgagttgcaagggcaaagcaaagcatgtctcccactcatctgcactcaatgtcaggtacataatttgggaagcccagtgcaaaataaaaatgtggggtctcttgttccaaaagcaggaaaaaatgccattgagggggctaaaatataaagccttgccctatctttcatgggctttctctttcaacttgtcatggtattgttttatttgctattcagtgctactataagaaaaattaaagacgtaagtcattagcctgagtgttacttttcatctcaatattgtgcaatgtcagttttaaatgcaaacataagagcatttaacttggatgtggaatcaccaaaattacatagtttgtattttgtagcttgtatgtgcgtatgtattttgttcttaccagcatggaggaaatgctgaacaaaactcaactgtttttattttacttcttaatacatgtacattctaccaatactctctacctttggtttactgatgaataaagaaggactaaaaggaaaagaatctataggttattgtataagtctgttctcacactgctaataaagacatacctgagactgggtaatttataaaggtaagaggtttaatggacttacagttccacatggctgaggaggcctcacaattatcgtggaagataaaagaggagcaaagtcatgttttacatggcggcaggcaagagagcttgtacaggggaactcccctttataaaaccattggatctcatgagacttattcactaccatgagaacagtatgggggaaaccgcgcccatgattcaattatctccacctggccccacccttgacacatggggactattacaattcaaggtgagatttgagtggggacacagccaaaccatataattcaccctttctctgtccttttctgtcatcgttttcagtgtaggtgtttggccaatacagggaagtaacaggtataagaaaggttatgacaggattccttggtcattcatgtttcttagaatgccactaccttcttttggtggttgaagcaaattctggtttgaatggaaagtatggcctcttagggctatcagagcttactcagttctagatgtatcgtatttaccttgtatttgtttggcatctcgctgaactcccatgcactatgggcctgatggagtcctgtgctcctggggcattgtgaatgctgtgtgtaaatggggctcctaggaacaacagacacatattgtgcacattttctctgctcacacacacatgttccattgtcccctcatgctccactcaaaaaatacaagttcaaagataaaaatcattaagaatttcaagatagtggcaggagaagattaaactaagtgcaggacccttctctctgtggggcctgtgtgactacacaggttgcacacccacgaagccggccctttctatatcaggcaaagctgctggacagcctgaagcctcatgagcatgccatgtatgaaggagcccagcttacagcaggctggatattgccaatagtgtaccagtgcaaaatggtttccctgaaacctttaatacacttacttatttcaaactcagttgaattgatatcattgagacagctagatctcttagagggctcccagtgccaggaggagtgcctttcagatgggtctttgaaacctcagtgttatagctagaaccaggtactcatcattgaatcaatctctctatatctcttaacattttttccttctcataggatttccagcaggagagctccagaagcctttcttttggggaacagaatatcctcggtgagtaaatgagtacagaaaccagttactgaccaattaggaagaacatgttgctttggtagaggacagaagaaacaaagtcaaaggttattcagcagaaagaagccatggaatctggcgtgggtcgcctgtactcttatcattttaggtatttgttttctgatccttgttaccagggtgtatggctggacaggaaagccatcttacacataggtggctttcatttttatgcatttattctcttacccattaactcatactaccagtatttggacattgaaggattgttgggatttgaattgatgggatgagtctaaaaccattccaggtagaagaaacagtgtgagataaggagggaaaagtgcttctataatggcagagtgtagtttggctagcccaaatggtatatgaaaggaagtagtggaaaagaagattgaggtttgatattggagggctctgcatggcaaataaggagcttggatactaataggcaatagaaaatattgaactttttgagcaagttagtaagataatcgaatttatctttagaaatataacctgtgtagctacagaataagtcaaaattggtagtgtatggacttagggataccagtttaaaggtcattttaataccaacagattgtagactcatgtaattcagaatttccatacatagtagagattctgataatatttgatgtcaataatatcaccatttctattatatactttttacttttgtgttttaatgcttggaaaattttagtcttgattctatacattgagtctcttgtgttttggtttggatatatgacaatttaaaaatatgtaggtttaaaagatacagattcccataaatatatcaataagagaaatatgttggcaatgttttcatttggcctttgggctttcccggtagcagaccttgtggtaagtattcaagtgcaattagttctttcgggaggtggtacaaggaaacaccagtaggggagtggagaattgagacagtgagggaaataagccaaatgaattatgtcctgtgagtcttttatggctgccaaaatgaattactacaaacttagtggcttaaaatgacataaacttataagcttatagttctgtaggtcagaagtccaaactggttctcactgggctaaaatcaagttgtcagcagggctactttcctttctggaagctctagagatgaatctgttttcttgccttttctagtttctagagggggcccacattccttggcttatgacctcttcctccatctttaaagttccatagtcacatctccttctgactctcatcttctgtctctcccttctacttataaggacccttgtgattacactggtaccattcagataattcaggataatcttcctgttttaagttcaactgattagcaaccttaattccgtctgcagcccctttactgtgtaacataacatattcacaggttccaaagattagcaatatggacatcttttgtaggccattattccacctaccacatgtgtgttacaaagccagttatcaccatgggcaactggagctcagtcttgctggggaactgtaaaacatgcttcagagtgatcccatctcagggacatgggagctggggtatttatctgtcctccaactcaccttccatcattgattgagggctcctaccaggggtacctggcagtgcccatcctaggccaagagggctctagtggctggagaaagtcttcaggcaactagtttcaggtgctgacatttgaaggctgtcagattggtgtgctcaaaaatagtgagggctacgaggacgtgggcagccatcgataaagcttactacagggaagcaccatcgttagagtaaataaaaattgcaggttcttatttaaccaaatccattaataatatcccaggcctcagctccatagttttctttggtgttcagatgtttggactcaatttgccctgcttttaagtttagaaatatatatatatctaaaaaattaaaggtttaggataaatattctttaagctcccttcaaactaaaaaagtcctataattctttgattctgcttactgttaacaatttaactgagcttctattattgtggttatatagctggagactaggaaatagtctggttggatttctgaagttattgatgaagtaatttgtttattgggtctgtgagcatgttagtgtctatttgtttgtaccttaggctaggtcatagttaatacttgagtgtgaaagagagtttttttttcctaaagacttgtttgtcctcatccacttaatgaatagctactacatatcatttgggtactcagcattgggaatatgaagatgctaaagacatgggagtcatggtccagtgagatggcttcccatatgttcatctagtctgtattaataaatggatagcctccagaatcaagggagtgggtatcctttctgctcacagtggtcagcttagtcctcacctgagtgttgagtctaattatggggcatgaacaagctgaattgtttccagaagagagaatcaggactgtaaatggttgaagacaacgtttcccaaagtgtgtgttccatgaaatagtaatagaggtaagacatcctcccctcccttcagttttggggaatcataataattatcaccataaaaatttcctagaagctctccaagaaagaaacctatttagatgtgtttaacacaactaccttttttgtacccattaaccatccccacttctgaccccagccccccaccacccttcccaggctctggtaaccatccttcgaaatgcagaggttcccaaactccccggtgttttgggaaatgctgatctagaattcatgactgaagaataagagttgaaagaacttaataacacttgaagtggaacctcataactgtctgcatatttttgaaggaaagttaaggtggtagaacgacttattatattcaggagattcagcaagtgttcagttagaggctacactagaccaatagatgggagccatagaaaagacatttcagatcagcattatggagagctattacgtttagacccgcccaaagaggaaatgggttaccttagaaggggatgagctcttggtcattggaaatacccaagcagggtattataaccatttgaatgggtttttctagagggggcccattcctctagtaggaagttggagtagatgacctctaagccatttccaactcagaaatttttatgaatttatgattcaggcataggacagcccttacttgataacagtgtgagatcatgattaagctagacagcagtatagttgttttgttgttgacagcaaatccggtgcatatgttaaacccactgagtaattagaacaaaagagaaactgagtaggtagtaaaagtggtgtcttctccattttatttttggaagactagatcttcagtgcaagaaatcttccagtttctggccagccagtcaaggttgcattttaaaagggcgagtttatttttttatgcttatttatttatttatttatttatttatttatttatttatttatgagacagagttttgctcttgttgcccaggctggagtgcaaaggcatgatctcagctcactgcaacctccgcctcccgggttcaagtgattttcctccctcagtctcccaagtagctgggattacaggcatgcgccaccatgcctggctaattttgtattttttaatagacatggggtttctccatgttggtcaggctggtctcgaactcccgaccccaggtaatccacccgcctcggcctcccaaagtgctgggattacaggcgtgagccaccacgcctggccaatgacatgctaatttaaatactcttcattgataaaatagaggacatgaatctaatattatgaaatattattattgtcaggcttagtcatataaaattactttttctttgtctcttgtccaaaggattgtgattaagtaactgagaattgaaacttaaaatgattcaatcattttctgaattctctattgccttttgcaaataggaagcttgttggagcagccctgcttaaaggacatttattgcacagcaatttctataagctcccattgttcatgccttcaattcatccagtcaacagcattgactgagggatgtagaggaccaagtacttattctcagagctgagagacctggaaaaactaaatgttgcaatctgcacactgatagctactgccgcaaaaattaacactatgtaaaattacaaatttgtcccacactgctatgatagctctatgattgaaatgaataatttcactcttacttctttaatgaaggtttgcaatgatggaaaaacagtaggaagcattttttcaaatgcaaattaccttacaggaaagaaataacaaaggaaagcattgccaccaaggggaaaaattaaatcttacaccacttccttgggtgtagttgagacaaacagttagcatggtaaggatcatttatgtcctgtaataacatattactttaaaaatttccattccttccagttatgggtcctatctatttgctgggtgactttgatgttgcatgtcaggaactaactgtgagatatttttagcataattgcaaatctcatgaagaatcttcacaataaggattctaagtggtgtgtaattctcatccacaggttgaatgactaaattaagatacatacagatctgtcacttgcatgagatggtaaagttaactaatcagttaaatcattgttactttcttacgctgtacaaggcatagaggatgtagcaatgaacaagtagataagagagtggcctcaatagaacttacatttgagagagaaaatcccagacatacatatggaaaccccattattgatttcttcatatattcttaatatgctttgctatgtaacaaagcaccaccaagcaaccatttattagctcatgattctgtaatttgggcaggactgagctgagacagctgctctgtatggtgctggccggggtcgctcaactagggctggactcacagacaggtgagtgaaggcgacctcactcacctgtctgtgccccagttgggctggctctcgtggctggggcatggcagggcctctctctcttcctttggagtctctcaacttctggggtttctcgcttcttcatttggcctcattccctctagctgtgtagttgaacttctttgcaagtgacttccaagaaggtggaaaatggaagctactaagtttcttaaggcctagacccagaagtcatacctgaccccttccactgcattctgttggtcatagcaagtcccaaggccagtccaaatttaagaagagggaaatagattgtctcttgatgggaggaggggctatgtgcattcaggggtagggagaattgttggtgtccccttttatagataatctaccacatgcttcttcagaggtgaagagaaataatgtggcacctttttcaaatctttgctattcagttgctatcttgtctacaacagaaagaggaacgtgactacctttgaaaatagagtgatcccttttaatctctactctattcctttttttatgactacatttggaaaacaatttaacttctaagactatagtgacttttcaacaagtttccagataaaatatacatgatatatttactgacaggatcttttcaagccctgttctaggtgttcataaatatatagctatagcagataaaaaaatcatagcaatcttaaggctgaaagggactttagaaatcatctctttcacatccctaatttcagagagtagggcactaaggttcatatgtggtaataatgacaatgtttgttagaatttatattttctttgtctatttcaattggaaggtatgtttagattttttacagctttatgggtatggttattcgattgttattaccatggttactagaaagcagtttatcttggctttccattgaaaaaattaaaggattatgctctgagattcatgcttgtaattgtctccaaattatgtattaatgccatagatctctgagttatggtgctataggagtaattgtcggacatgaatttacacatggatttgataataatggtaagtaccggttcattttataagctgctgcttttataataatgttgactatatggatgttaattgttatgattatctttgcatagcagcagcatcatagcttgaagattatccaaagcaatatgattgctgattgaaaacttttcaccgtgtcttgctgtgatggcttgcaataagtaaacaattgttcccattggtgatcggggtagactttaaaaggcagccttgtaatttcaataaaattagctttgcatttagatcaggattgctgtagctgccacaatagttacagagattgatttatagcttctccctttgtcatttattcattgtcttgagatattctccctggaggagcaagctctgctccaacgatgattatacatgctgccaagttaggactcgttgagttaggactctggagcttggctgactggttcccttttacgatttcgaagattatgcaatgcttaatctatatttttctctatactggcttatattctgattattattattattattatcattattgagacggagtctagctctgtcgccaggctggagtgcagtggcacgatctcggctcactgcaacctcggcctcccgtgttcaagtgattctcctgcctcagcctcccgagtagctgggattacgggcacgtgccactatgcccagctaatttttgtatttttaatagagacggggtttcaccacattagccaggatggtctcgatctcctgacctcgtgatctgcccacctcagcttcccaaagtgctgggattacaggcatgagctaccgcgcctggcctattctgattattttaaagtctatactttcctgataatttatataataggatatgctttgtatcccgatgacatttaagcaaaaagaaaaagcagaatatgacataaactaaagaaatggcttcctttgagagtcctcatcatcattaatcagcactcttttctcctttaactttggagtattatcggaaggccacatgaaatctctgaaacttacggattagtagcaaattactatcacatccatacccacacagtgatttacaggcagtctcaggaaccagctgccctaaggcaacgttatatagaaggggacctctttcttccatccctgtagtatctccaacatccttcctggatgcctaccccagggccagagacacttaggctcttctagaaaagtcttcctgtactcccaccagcccttccttaatcacctagattttttgctcccctggtcttcccttctctgttaaaatgtggctgacttgtagttataaatgtggctgacttgtagttatctgactctgcagagctagactttctgcctttgggtgtttggtttatctgagatgagagtcttagctaagaaaaaaaaaagctaatagtcctttcttcgttctggacctctcttgataggaaatttaagtacagttcctccccagaaccttctggagtctttctcaaaggactgaatctaatggtggcaatttcactctgtaaccaatgcttagaacagtgcattgcacatataagtacatgcccggtacctatttaatgattggttggttagtgggtagaggacagtgactccatactatcccagggggtggtgttagtagtatgtagccttgctgaagagttttggattgttccaattaacaactttacttacgggacttttttgtaagctctctgtataattaaatttaaacgatgcctctgattctcatagtaaccctgaatatagaagacagtctagcagcatccaaattttgtttcaaaggctgtagagaaaatgaagagtgagcacatagcaagaaagcatgtgtaatctttcttcccattgtgttttggagattttcattcttattccaagttttctttttagagcaatcttccctgtctaagcaggacagatgggccttccgtccacactagtggctgtggaatgaatcataacagaggttttatgtgtctttcagctcctggcaacttggaggaaacaggttcctatagggctgagtcagggtctatgatcgcacagtatggatgactcactggggctattcctatggatcatttggaatttcactggtagtaatgctctgattgcctccatgggctttctgaatgaagccattttatttcataatccagtgaacactttgggtcaaatcaggtgaagacacagaatccaagattgaataagactagtatatgtaataaattgatgaatctcatttttaaggtgctctttgttccttagaaggaaagaacttcctcaattgtctttatcctttttgccctttttacaattaacctgtgacattggagagaatgcaggagctgatctcaggaagagtgttccctgctgttatgactgctttttgaaggcttgtcgaggtgagggaaaggaaagatgaatttagtttccataaataacacaaatgtcttcgaacttttccttttgctaggtagaaaatatgataaaaatggaaacctggatccttggtggtctactgaatcagaagaaaagtttaaggaaaaaacaaaatgcatgattaaccagtatagcaactattattggaagaaagctggcttaaatgtgagtacaactgtggctaaggggggcaccttgtggttcatttttcctcatttggacattagcttgctttaaaccattggttctcaaagcgtgtttacaagatcaacagcatctgtcttccttgggaacattcttgagtcctaccccatacctgctgaatcagaatctttggggttggggcctggtcatcccttaaccaggcatgaactttttcctgatatattactagggctggaaaaatacctaaatccttgctatgcctcaaatctattatacttgtagatgaatttaggtaaaaatccatgtgcttcttttaaagggaatgtttataaacactgacttggttctcctggttcttaaaccatgctcagcccaagtgagaccactgctcattcaggcagagaaaccagagtctgtatccttgaatggtgtctagctcttttatcagtgtcctggacagccatttctctgcctatatatttttaaatatctacaactgtgacatgagaagacctaaaatgggtgcttctatgtatctctatatagtgcaggggttttcacactgtgaaaattcatctggagtatatgttgcttcaagaaaagcatagcagaaaggggttctagagtcagacatgggtccaaatctaggttcaactagttttatgaacttgggcaagttacttaatgttcctgagtctcagcatcttcatctgtgaaacgggtcaatgtttctgaactcatggatttgttgtaagaattaagtgagcaaagcaatgtggagcactagcacaaggcctgacataaagcaagtgctcaataaaagatcgttagttaatattcctgatccttcgtgacatactcattagtaccctatcccaggaaaaaacaaagccaaagatttttgggttaaaaaccccccaaaaaacaatagaacagctttcttggaggaagggaatttatatttcctgatgattagtatatacaggcatgaagatgaaacttttcacttaattgaaacaaatgtatccccatactagtcctgagaggtatagattattactaagtgtacaggttttacgtatgaggttcaaaggaattaaactgaggttcaaagagattaaaatccacggtagagtctagattagagtttaagtaagtctgtacgactccaaagtccatactgcttcccctatatcatgctgaggttcttattttaagttcattttatatctgggtgatgtgtgggtggactgctcttcaccattcattttggccaaagtgtcagagattgaaacttaattctgacaaatgtgtacctttgtcacaaggacgatagaaagggcatgcctgtcttagcaccaatccacttaaccatcagaaaacagcttcagtttcattcccacaggagagtgggtggcttcctttgtggatataagggccatgctttattatttttctggcttcatttataggagccgttcctttgtgcctgaatcttgctttgtagtgacttcgggggagctcagatggggcactacagatgcagactgtcagcagctgttgagtctttttttgttgttgttccttttcgtagctgttgagtcttgggagtccaaacctagggccacgtggtctactgaggcagaccagagttcaaggagccagaggggtgaggctgctccaaaaggctctaaattagatataaagcttagagtgaatggctgggcatggtgactcatgcctgtattctaaacactttggaaggccaaggtgggaggatcacttgaacctaggattttgataccagcctgggaaacatacggagaccctgtctctacagaaaattttttaaaaaattagccgggtgtagtggtgcatgcctgtagtcccagctactcaggaggctgaggtggaagaattgttggaaccctatagtgagatatgatcacaccactgcactccagtgtgggtgaaagagagagaccctgtctcaaaacacacaaacacacacgaaaccctcagagtaaaaaggaaggagattaaattttttaagcaggagtggatataatcataatcttcaagagccaagaggagttgggacttgagaaagtagcatattaggaagcaaaggctctggagacagaagactgcttgggttcgaatcccagtgacatgcgagcagtttacttcatcactctgtcttaggttcactagaagcagagcccaagaaggggttccttaggtcattgacttttttgagacagcgtctcgctgagtcacccaggctggagtgcggtggtgtgatctcggctcactacaacctctgcctccctggttcaagtgattctcctgcctcagcctccccagtagctgcgattacaggtgccagccaccacgcctggctgatttttgtatttttaatagatacggggtttcttcatgttggccagtctggtctcaaacccctgacctcaggcaatctgcccgccccagcctcccgaagtgctgggattacaggtgtgagccaccgcacccagcccaggtcagtgatttattcagaaagtcgtttcaggaaaaacctataatggaatgagggaaacctattggtttcaggaaatgtttagcctcaccctgattccacagaggattctggagcacgaactgcaccacagaaattgttcagcccaggtactgggttgttcaaactgcacatcagtcaattactggaaggtgggttataacctcccagcggtctccagatgaggtgactcccataagctaaggttgatctgagctgttagcagttgtgggaatgggtgcacagtttaggcagaaaaggggatctggtgggatatcgacatctgctacactctcggagctttagatcctcatttgttgagcaagggtggtggtaattagcacttacttacctcatacgactgtggataacaaagaatatacgtaaagcaggaatggtagcttttgtgtactgaagctaggagggtcctgagtgattacagtgaataatattttccaaagatttgtttttattcattgatattgcttgatacctgggtgactgggctagcttaaaagtaaagtgttggtaagatccatggcttgaaagttaaaagcaaggtatattagttttctgttgcttgctataacaagttactataaacttagtagcttcaaataacataaattatcatacagcgctgtatgatttattatcatacagctctgtatgtcagaagtctgacatggatctcagtggactaaaatcaaagtgtcagcagggccacattcctttgtagaggttctaggggagtatctgtttcctcgccttttctagcttttagaggctgcccacattccttagctcatggccccttcgtttttcaaagccagcactggccggtggagtcttctcatgttgcatcactctgacactcgctctcctgcctcccttttcctcttgtaagaacttttgtaattacactgggtccacctggacaatccaggataaagtctgcatctcaggatccttaatcacatcataaaagtctcctttgccatgctttatttttccagcttcattttgtggggaccattcctctgtgcctgaatctttctttcttcgcagtgaataaggtaacatattcacagattccagggatcaggacgcagacatctttgggaggccgttatcctgcgtgttatacaagagttgaatgacttttctgtaaagggccagatagtaaagaattgaggctttgtggggcgtatggtctctgttacaatatttaattctgccactgtagcaagagagcaaatacagactatatgcatgggcatggctgtgtcccaataaaacttgatttatgaacaccaaaatttgaatttcatataagtaattttcatgtgccaccacaatattattcttcttttgatttttccccagttgttgaagtatgtaacatccagtcttaccttgaagcctgtacaaaaacaagcagcaggttggatttggcgtgtgggctgtattagtttagaatatttgtgtcctagctcatttaaagttttgagaaacaatcttgaatattgggaataattttttttaccatgctggctggttgtcatacatatcgcagacctcgaccttgtgatctgcactacttctgtttgatttttcttccctaggagaaccactttccttttaattttccatggaaattgctgaaggtaaaatgatgatagttggtcttgaaatcttgttcctgtgtggatggtaaatttttggaaacacaggcacaatgagaagaatactcaaattatgtgagttaatcagagaaagtaacctgtgtattgacattcctgttttttcccattaaaccagagtcactcagaatattgttaacattttattggagctggctagattggttagaatgaagaggtaggtgaaaaagaagtgtgtagcataatgaaatagaaagtattacattccagagcaccttgctgaggatagtttgccatctttcttacaatatattatgcctacctctgatttattgaatgtgattttctctttaaaatatgatacttttcttgctataatattgatgcctcttgctgaatgatagttgaccgtgaaacacgcattcattttttttttttccttttttctttctgttaggtcaaggggaagaggaccctgggagaaaatattgctgataatggaggcctgcgggaagcttttagggtatgcgctgctacatttaccgtggttctaaaaatcaagccataaaacaccatatgggggtacctcaattcataccatagccatgttcttgaggagttagttagttagatattatggaatttctgtaaatagaagtgtgtctccccattgaccctattacataaagagaactatatttcttttttctttttggggtgtgaagtcaccctaaagaataatatttgttattaagaatcatgtatttaaagaatagcttttagaaaatacattcaccatcagatcgaagcatgctacagcaatctccttggggctaggttcatttgttttccttgagtacaggtctttctgtagtcctcctataaatttctcttaaaatatcaaacttctaaattatgaccagagggtagtggttctcatatactgggccaagtgatagttcataataacgttttcatcatccactagtttgtggtcaaataagaagcataaagataatacagaaagatttcataaagctaaatgcattaaatttaatgactagactgttattcctggttatatccttcctatattctagttgaaatatactttattttataaaatgagggcactagaagatgataggttttctcttacgtgtcaaaatgaaaaaaggtaatatgcggaccccaaaatgtattgccataggggccttgccattgtgttagatttgtttgtcccctgctaggaatggaaagaacagctttttttctccaagagttatttaacatctgaatgctttggtccagctgctttggtatacattgagcataaggcctttttgcaggtgtacctgcctcactggtaagcaacaggacatggacttgtgtttcttaagaaaattttgacatgatgcattttgcacgtggcaggagtatatatttgctattcctgtgctagctgagcaaagagaaaaacccaccgttgcagagactcatctcttcttcttctctcaccaggcttacaggaaatggataaatgacagaaggcagggacttgaggagcctcttctaccaggcatcacattcaccaacaaccagctcttcttcctgagttatgctcatgtgagtagactgaggaaggggcatcagggatgagatgcaggacttgagtttgctcccttgatcaaagaaagatttcaaacaaaagtttaatggcatgactttgattttcagcaaaaatgttatcttgattattttcagggtaaatctcatcttcttaatgttctgtagtacataattaattaactgattgaatcaaggtttattagtattttttaaatcaaatgggttagcagccctgtggtaattcatttgatagttcctcaatgtatcttgacttcttaatgtgtttgatactatttatttgtaaccatttctagtaacttgctctttggctttcatgggcctgctctttcctatattgctcctcctttgcctcatttgctgactttatgccaccactctcagcctgtgggggaccctcagggtcatgttcccaactgtctaatgcatatgcagagacccctagagctgaaaaagaacaaaggcaaggagagtcatgtcactcttttgtgagtttaataggctcttggagcagaaattgaaaggaagatgtacacgaaataaagcacagttccgagcctgagtctctgtctaatgaggcaagtgccaaatctttattagctattatactggtttatgtcataaacatacgggcagccttttcaaagaagtcagggataggtcaataaaggttctagtgaatggcctcaccgtgggcaaatgtgtatgaatatgctcaaagctagacaaaaattttcatcagtacaaccttttgttcctaagtctgtctttgctttcactgctaagtaagctcattctcacacgagtcttctataattcactctggtcacaggattcttgcttgcctgcggtcttttatttcttaaagctaataaaaaacactaaataaattattatttagcaacctaatgtcaacaaaactcaactctagtcatccacaacatgactttccttttacttttcctgtttctatcatcacatcccatctttagattttcctggttagaaagcctggattcttaggtcttatttgatgcatctgtcctcaattttacaacatgtattccagaagccagatgtttcatactttactttactttaaaaaaaaattatactttaagttctggggtacacgtgcagaacgtgcagttttgttacataggtatacatgtgccatggtagtttgctgcacccatcaacccgtcacctacattaggtatttttcctaatgctatagctcttctagcccccaaccaaccctctgacaggccctggtgtgtgatgttcccctctctgtgtctatgtgttttcattgttcgactcccactcatgagtgagaacatgcggggtttggttttctgttcttgtgatagtttgctgagaatgacggtttccagattcatccatgtccctgcaaagaacatgagctcatccttttttatggctacacagtatgccatggtgtatatgtgccacattttctttatccagtctagtctatcactgatggacatttgggttggtgccaagtctttgccattgtgaatagtgccacaataaacataagtgtgcatggcatctttctttatagtagcatggtttataatcctttgggtatatacccagtaatgggatggctgggtcaaatggcatttctggttctagatccttgaggaatcgccacactgtcttccacaatggttgaactaatttacactcccaccaacagtgtaaaagtgctcctatttctctacatcctctacagcatctgttgtttcctgactttttaatgatcaccattctaacaggcatgagatggtatctcatagtggttttgatttgcatttctctaatgaccagtgatgataatgagcatttttcatatgtttgttggctgcataaatgtcttcttttgagaaatgtctgttcgtagcctttgcccactttttgatgaggttgtttttttcttgtaaatttgtataagttctttgtagattctcgatactagccctttgtcaaatggatagattgcaaaaattttctcccattctttaggatgcctcttcactctggtggtagtttctttggctgtgcagaagctctttagtttaattagattccatttgtcaattttggcttttgttgccattgcttttggtgttttggacatgaagtctttgcccatgcctatgttctgaatggtattgcccaggttttcttctaggatttttatggctttaggtcttaagtttgtttaagtctttaatctatcttgagttaatttttgtataaggtgtaaggaagggatccagtttgttttctgcatatggctagccagttttcccaacatcatttattaaatagggaatcctttccccattgcttgtttttggcaggtttgtcaaagatcagatggttgtagatgtgtggtgttatttctgagggctctgttctgttccattggtctatatatctgttttggtaccagcaccatgctgttttggatactgcagtcttgtagtaaagtttaaagtcaggtagtgtgatgcctccagctttgttctttttgcttaggattgttttggctatatgggctctttttttttttttttttttttttttttttttttggttccatatgaagtttaaagtagttttttccattctgtgaagaaagaaagtcaatggtagcttgatggggatagcaatgaatctctctctaaattactttgggcagtatggccattttcacgatattgattcttcctatccatgagcatggaatgtttttccattggtttgtgttctctcttatttccttgagcagtggtttgtagttatccttgaagaggtcctttacatcccttgtaagttgtattcctaggtggtttattctcttagtggcaattgtgaatgggagttgactcatgatttggctctctgtttgtctgtgattggtgtataggaatgcttgtgatttttgcccatcgattttgtatcctgagactttgccgaagctgcttatcagcttaaggagattttgggctgagacgatggggttttcttaatatacaatcatgtcatctgcaaacagagacagtttgacttcctcttttcctatttcaataccctttatttctttctcttgcctgactgccctggccagaacttccaatactatgttgaataggagtggtgagagagggcatccttgtctggtgctggtttccaaagggaatgcttccagtttttgcccattcagtatgatattagctgtgggtttgtcataaatagctcttccaattttgagatacgtgccatcaatacctagtttactgagagtttttagcatcaaggggtgttgaattttgtcaaaggccttttctgcatctattgagataatcatgtggtttttgtcattggttctgtttatgtttattgatttgcatatgttaaaacagccttgcatcccatgtatgaagccgacttgatcatgtgatggataagctttttgatgtgctgctggatttggtttgcaagtattttatcgggtattttcgcatagatgttcatcagggatattggcctgaaagttttctttttttttgttgtgtctctgccaggttttggtatcaggatcatgctggcctcataaaatgagttagggaggattccctcttcttctgtggtttggaatagcttcagaaggaatggtaccagctcctctttgtacctctggtagaattcggctgtgaatctgtctggtcctcaactttttttggttggtaggctatcaattgctgcctcaatttcagaacttgttattggtctattcagggattcaacttctacctggtttagtcttgggagggtgtatgcgtccaggaatttatccatttcttctagattttctagtttatttgcatagaggtgtttatagtattctctgatggtagtttgaatttctgtgggattcttggtgatatcccctttatcattttttattgcgactatttgattcttctctcccttattagtctttcttgctagtggtctatctgtgttgttgatcttttcaaaaaaccagctcctggattcattgattttttgaagggttttttgtgtctctatctccttcagttctgctctgatgttagttatttcctgttttctgctagcttttgaatttgtttgctcttgcttctctggttcttttcattgtgatgttagggtgtcaattttagatctttcctgctttctcttgtgtgcatttagtgctataaatttctctctacacactgatttaaatgtgtcccagagattctggtacattgtgtctttgttctcactggtttcaaagaacatctttatttctgccttcattttgttatgtacccagtagtcattcaggagcaggttgttcagtttccatgtagctgtgtggttttgagtgagtttcttaatcctgagttctaatttgattgcactgaggtctgagagactgtttgttatgattttctttctttcttttgcatttgctgagaagtgttttacttccaattatgtgatcaattttacaataagagcgatgaggtgctgagaatatatattctattgatttggggtggagagttctgtagatgcctattaggtccacttggtccagagctgagttcaagttctggatatccttgttaattaattttctgtccatttatctaatattgacagtggggcgtaaagtctcccacgattattgtgtcggagtctaagtctctttgtaggtctctaaggacttgcttgatgaatctgggtgttcctgtatagggtgcatatatatttaggatagttagctcttcttgttgcattgacccctttacgattatgtaatgctcttctttgtctcttttgatctttgttcatttaaagtctgttttatcagagattaggattgccacttctgcttttttttttttttttttttttttttttttgctttccatttgcttggtaaatattcctccatccctttatttattttgagcctatgtgtgtctttctttgcatgtgagatgggtttcctgaatacagcacattgatagttcttgactctatccaatttgccagtctgtgtcttttaattggggcatttagcccatttacatttaaggttaatattgttacgtgtgaatttgatcccgtcattatgctgctacctggatattttacccattagttgatgcagtttcttcatagtgttgatggtctttctttacaatttggtgtttttcagtggctggtgccagttgttcctttctgtgttcagtgcttctttgaggagctcttgtaaggaaggcctggtggtgacaaaatctctcagcctttgcttgtctgtaaaggattttatttctcctttgcttatgaagcttagtttggctggatatgaaattgtgggttgaaaattcttttcttttctttgagattgttgaatattggccctcactctctcctggcttgtagagtttgtgctgagagagatccactgtttgttagcctgatgggcatccctttgtgggtaacccgacctttctctctggctccccttaactttttttcctccatttcaaccttggtgaatctgacgattatgtgtcttggggttgctcttctcgaggagtatcttagtggtgttttctgtatttcctgaatttgactgtgggcctgtcttgctagggaggggaagttctcctggataatatcctgaagagtgttttccaacttggttccattctccccgtcactttcaggtacaccaatcaaacgtagatttggtcttttcacatagtcccatatttcttggaggctttgttcatttcatttcactccttcttctctaatcttgtcttctcgctttatttcactgagttgatcttcaatctctgatatcctttcttccgcttgatcaattcggctattgatacttgtgtatgcttcacaaagttctcatgctgtgttttttagctccatcaggtcatttgtgttctcctctaaactggttattctagctagcaattcatctaacctgttttcaaggttcttagcttccttgcattgggttagaacaatgctcctttagctcggagaagtttgttatcacccaccttctgaagcctacttctgtcaattcgtcaaaatcattctccgtccagttttgttcccttgctggcgaggtgttgtgatcctttggaggagaggaggtattttggtttttgtaacttttagcctctttgtgctggtttctccccatctttgtggatttatctacctttggtctttgatgttggtgaccttcggatggggtattttagtagacgtgctgttcctttctgtttgtttgttagttttccttcttacaaacaggctcctctgctgcaggtctgctggaggtgcactccagactctgtttacctgggtatcaccagcagaggctgcagaacagcaaaaattgctgcctgttcttccctccggaagctttgccccagaggggcacctgccagatgccagccagagctctcctgtatgagatgtttgtcggcccctaccgggaggtgtctcccagtcaggatacacgggggtcaggtacccacttgaggaggcagtctgacccttagcagagctcgaccactgcgctggctgtcaggcagggacgtttaagtctgctgaagctgtgcccacagctgccccttcccccaagtgctctgtcctagggagatgggagttttatctataattccctgactggggctgttgccttttttttttagagatgccctgcccagagaggtgacatctggcagtctggccacagtggccgtgctgagctgtggtgggctcctcccagttcaaacttcctggtggctttgtttacactgtgagggtaaaaccacctactgaagcctcagcattggggaacgccccttccccccccaagctcaagtgtcccaggtcaatctcagactgctgctgtactggcagcgagaatttcaagccagtggatcttagcttgctgggctctgtgggggtaggacccgccaagccagaccacttggctccctggctttagaaccccttctgacgggagtgaacggttctgtcttgctggcgttcccagcaccagtggggtatcaaaaaaaaaaaaaaccacacacacacacacagaaaaacaacaacaatgaaacaacaaaaaactcttgcagctagttgggtgtctgcccaaatggccacccagttttgtgctggaaacccagagccctggtggggtaggcactggagggaatctggaatctcctcctgttctgcaggttgcgaagaccgtggggaaagtgcagtatctggactggagtgcacggttcctcaggctcagtccctcatggcttcccttgggtaggggagaaaattccccgaccccttgcacttcctgggtgaggtgacaccagaccctgcttcggcttgccctctgtggcctgcacccactgtccaaccagtcccaatgagatgaactgggtacctcagttggaaatgcagaaatcacccacttactttctgcattgatttggcattgatttcgctgggagctgcagtccagtgctgttcctatttggccatcttctagttcttctcgatgtttcatacttttaagtgcttttcagatttgacatcttctctcctgttttagacagtttgggctgctataacaaagtgtcatagactaggtggcttatgaacaacagaaatttatcacagttctggaggctggaagtctgcgatcagagtgctagtgggatcgagttttggtgagggctttcttctgggttgcacactgccaatttctctctgtgtcctcacatggtggaaagagctagctagctctctggcctcttcttataagggtactaatcccattcctgagggctccaccctcatgatttaattgcctcccaaaggcccaactcctaatgccatcacattgatcagggcttcaacataagaattttgggggatagaaacatttagtccatagcatccccattaccctatcttatcatatatagttagttatcatatataggcataatcttaataaatatcctctactctggattatcccaacagccttatggaatgttaatctgacttcagcatttttttttttaaccactgttatacataccattggaataccacttttatttcattaccaacctgctgaaagaactacagtggctcccaaatgcctaccacattgaagccaaatacctccatctggcttcccaaattttcagtatgatccaactccactcaatccaattcaatttcccataactaactccactgggtgagaaaaaactcagccttagtggggcaagtatcctcacttctaccctacaatgtcatgcccattactgtctctttggctttgcttctgattctccttctataatgcaacccttcctactcttccccttcagatgattattcaatctaagcttcatccttcaggatccatgttgagttccactccctccacatcttccataaactcttccccaaggaccccagtccttattattttcttttatcttcaactccttttatctttcttactttcattaccatgcagttgagtacttaactgctctccaaatgttcaagaattttagttttatctccacagctaatcttctggatccttacacttcctatctccatagcacccagcaaagatgctgggtatattgaagacagttgatatttttagatcaattgcttgaaatgactaaaactaacagttcaactaaggagactcccttttactgggtcagatatataaaataagtatacaaaaatagaactttctagagttgggattggcaaactagggccaaatatggcctgctgcctgtttttgtaaataatgttttattggaaagcagccacattccttcatttattcatgatctgtagctggttttgtactacagtggcagagttgaataattgaaacagggaccttatagtcttcaaagcctaaaatctttaccatctgtctcttttcagaaaaagtttgctaacccctgctctagaggacaaagtatagtgatctatcaatcagttcttactatttacatcctagcccacaatatctctttgtagataaaataaactaattgattgatagtgaagttacttataattctgaaatgtttccagatataataccaaactaaactatagctgactgatttattgtaaactaaagagatagatagatagatttaggggggaaaagtggaaagctattttatatcttatatcactagtgagaaatttatcttggagcttttcccactgacagaatgaagagatttttcagtcttttgcactttaaagtaagtctgcttataaggagtaaaattactttccctcctgggaaggtactaagaaaacagtagcaggcataatgtgttttcagaagtctcttaagtgatatattaagcaaagacaatactatattagagtataagaatataggaagaaataagaaatgaggtaaaatcaaatgccagaaacaacttcatattagccagcttctgaggaaatcaagggatcgcattacaaaacatcatcttcaaagtcaaattcagaaccactgtgactggtggtttatcttcatcaaaagcaacaacatcatatcacctttcctgctttctatgtccctgtagttgctgtgacctctcatttttctcagatattcttctaatccttctacttctttccattctattttctacttatttagtggacatccattgagaaccttcctggtatctataaataatctaactagcctctaatttcttccttccactatacacccctgccagataaatctttttcaaaatctgggttttattattttcctactcaagaatgacttttaaatatagtttaaacgctctgaccaactgctcaggacttcagaaatctgacactgtccttcctctcccactgctgcccgttaggcatcatatactccagcctagctgaatgtctggttctctttcccctcaaacatgtctttgttcccatttccccctccacttagaatatttttttccatatttatgtgtcctagttcaattcacacttgaagaccatatcatacctcaagtcatatggcaagtcaggattaaagtaagtaagttatgctgcagaaacaacacgacaaagtttatttcttgttcactctccatgtccaacatgagtcagcagtggggctcttgtagtttttcatcaagaagttgggttttgggccgggcatggcctgtaatcccagcactttgggaggccgaggcgggtggattgcctgaggtgaggagttagttagtttgagaccagcctggccaacatggcaaaaccccatctctactaaaaaaatacaaaaattaggcaagatggcttaataggaacagctctggtctgcagctcccagcaggattgacacagaaggcgggtgatttctgcatttccaactgaggtacccggttcatctcactgggactggttggacagtgggtgcagcccacggagggtgagccaaagcagggtgggacgtcacttcacccgggaagcacaaggggttgggggatttcctgttcctagccaagggaagccatgagagactttaccaggaggaacagtgcactccagcccagctactgcgcatttcccacagtcttcgcaactggcagaccaggagattccttacagtaccgggctcggtgcatcccacccccatggagcccagcaagctgagatccactggcttgaaattgtcactgctagcacagcagtctgaagttgacctgggatgcttaagcttggagttgggaggggcatccgccattgctgaggcttgagtaggctgttttaccctcacagtgtaaacaaagccactgggaagtttgaactaggtagagcccacagcagttcagcaaggccactgtgaccagactgcctctctaggcagagcatctctgaaaagcagcagccccagtcagggaattataggtaaaacccccatctccctgggacagagcatctaggggaaggggcagctgtgggcacagcttcagcagacttaaacgtccctgcctgacagccagcacagcggtcgagctctgctaagggtcagactgcctcctcaagtgggtcccggacccccgtgtatcctggctgggagatacctcccagtaagggctgacaaacatctcatacaggagagctctcactagcatctggcaggtgcccctctgtggacaaagcttccagaggaaggaacaggcagcaatctttgctcttctgtgtagacttcactggtgatacctagccaaacagggtctggagaggacctccagcaaactccagcagacctacagcagaggagccctgagttagaaggaaaactgacaaacaaacagaaaggaatagtagcaacatcaacaaaaaggatgtccgatcagagaccatatccgaaggtcaccagcatcaaagaccaaaggtagataaatccacgaggatggggagaaaccagtgcaaaaaggctgaaaactccaaaacccagaacgcctcttctccttcaaaggatcacaactcctcgccagcaagggaacaaaactggacggagaaagaatgattttgatgaattgacagaagtaggcttcagaaggcgggtgacaacagactcctccgaggtaaaggagcatgttctaacccattgcaaggaagctaagaaccttgaaaacaggttagaggaactgctaactagaataaccagtttagaggagaacataaatgacttgatggagctgaaaaacacagcacgagaactttgtgaagcatacacaagtatcaatagccgaactgatcaagcggaagaaaggatatcagagattgaagatcaactcaatgaaataaagtgagaagacaagattagagaaaaaagagttaaaagaaatgaacaaagcctccaagaaatatgggactctgtgaaaagaccaaatctacatttgatgggtgtacctgaaagtgacggggagaatggaaccaagttggaaaacactcttcaggatattatccaggagaacgtccccaacctaacaaggcaggccaacattcaaattcaggaaatacagagaacaccgcaaaaatattcctcgaaaagagcaacccaagacatataatcatcagatttaccaaggttgaaatgaaggaaaaaaggttaaggggagccagagagaaaggtcgggttacccacaaagggatgcccatcagactaacaaaggatatttcggcagaaaccctacaagccagaagagagagggggcaagtattcaacaatttcaaagaaaagaattttcaacccacaatttcatatccagccaaactaagcttcataagcaaaggagaaataaaatcctttacagacaagcaaaggctgagagattttgtcaccaccaggcctgccttacaagagctccgcaaagaagcactgaacacagaaaggaacaactggtaccagccactgaaaaacaccaaattgtaaagaccatcaacactatgaagaaactgcatcaactaatgggcaaaatatccaggtagcagcataatgacaggatcaaattcacacataacaatattgaccttaaatgtaaaggggctaaatgccccaattaaaagacacagactggcaaattggataaagagtcaagacccatcagtgtgctgtattcaggaaacccatctcacttgcagagacacacatagactcaaaataaagggatggaggaagatctaccaagcaaatggaaagcaaaaaacaaaaacaaacaaaaaaaaaacagaggttgcaatcctagtctctgataaaacagactttaatccaacaaagatcaaaagagacaaagaaagaagagcattacataatggtaaaggggtcaatgcagcatgaagagctaactatcctaaatatatatgcacccaatacaggagtacccagattcataaagcaagttctcagagacctacaaagagacttagattcccaaacagtaacagtgggagactttaacaccccactgtcaacactactgccaacactagacagattgagacaaaattaattaacaaggatatccagggcttgaactcagctctggaccaagtggacctaacaggcatctacagaactgtccatcccaaatcaaatcaacagaatatacattcttctcagcaccacatcacacttattccaaaattgaccacatagttggaggtaaaacacttctcagcaaatgcaaaagaatgaaaatcataacaaacagtctctcagaccacagtgcaaacaaattagaactcaggattaagaaactcactcaaaactccccaactacatggaaactgaacaacctgcacctgaatgactattaggtaaataacaaaatgaaggcagaaataaagatgttctttgaaactaacgagaacaaagacacaacgtacctgaatctctgggacacatttaaagcagtgtgtagaaagaaatttataacactaaatgcccacaagagaaagcaggaaagatctaaaattgacaccctaacatcacaattaaaagtactagagaagcaagagcaaacaaattcaaaagccagcagaaaacaagaaataactaagatcagagcagaacggaaggagatagagacatgaaaaacccttcaaaacatcaatggatccaggagctggcttttcaaaaagatcaacaaaatagaccactagccagactaataaagaataaaagagggaagaatgaaatagacgcaataaaaaatgataaaggcgacatcaccaccgatcccacagaaatacagtctaccatcagagaatactataaacacctctatgcaaataaactagaaaatctagaagaaatggataaattcctgggcacatacaccctcccaagactaaaccaggcagaagttgaatccctgaatagaccaataacaagttctgaaattgaggtagcaattaatagcctactaaccaaaaaaaagttgttgaggaccagacaggttcacagccgaattcgaccagaggtacaaagaggagctggcaccattccttctgaaactattccaaacaatagaaagagagggaacccttcctaactcattttatgaggccagcgtgatcctgataccaaaacctggcagagacacaacaaaaaaagagaattttagaccaatatccctgatgaacatcaaggcaaaaatcctcagtaagatattggcaaactgaatccagtggcacatcaaaaagcttatccaccacaaccaagttggcttcatacctgggatgcaaggctggttcaacatatgcaaatcaataaacataatccatcacatacacagaaccaatgacaaaaaccacacgattatttcaatagatgcagaaaaggcatttgacaaaattcaacaccccttgatgctaaaaactctcaataaactaggtatcgatggaacgtatctcaaaataataagagctatttatgacaaacccacagccaatatcatactgattgggcaaaaactggaagcattccctttgaaaaccagcacaagacaaggatgccctctctcaccactcctattcaacatagtgttggaagttctggccagggcaatcaggcaagagaaataaagggtattcaaataggaagaaaggaagtcagattgtctctgtttgcagatgacatgatggattgtatattaagaaaaccccatcgtctcagcccaaaatctccttaagctgataagcaacttcagcaaagtctcaggatacaaaatcaatgtgcaaaaatcccaagcattcctatacaccaataacagacaaacagagagccaaatcatgagtcaactcccattcacaattgccactaagagaataaaatacctaggaatacaacttacaagggatgtgaaggacctcttcaaggagaactacaaaccactgctcaacaaaataaaaagaggacacaaacaaatggaagaacattccatgctcatggataggaagaatcaatatcgtgaaaatggccatactgctcaaggtaatctatagattcaatgccaaccccatcaagctaccaatgactttcttcacagaattggaaaaaacttactttaaacttcatatggaaccaaaaaggagcccatataaccaagacagtcctgggcaagaagaacaaagctggaggcatcacactacctgactttaaactttactgcaaggctgcggtaaccaaaacagcatggtactggtaccaaaacagatatgtagaccagtggaatagaacagagccctcagaaataacaccacacatctaccaccatctgatctttgacaaacctgacaaaaacaagaaatggggaaaagattctgtatttaataaatggtgttgggaaaactggctcgccatatgcagaaaactgaacctggaccccttccttacaccttaaacaaaaaatcaactcaagatggaccaaagacttaaatgtaagacctaggaccataaaaatcctagaagaaaacctgggcaataccattcaggacataggcatgggcaaggactttatgtctaaaacaccaaaatcgatggcaacaaaagccaaaattgacaaatggaatctaattaagctaaagagcttctgcacagcaaaagaaactatcatcagagtgaacaggcaacctagaggatgggagaaactttttgcaatctacccatctgacaaagggctaatatccagaatctacaaaggacttacacaaatttacaagaaaaaaacaaccccatgaaaaagtgagtgaagggtatgaacagacacttcttaaaagaagacatttatgcagccaacaaacatatgaaaaatgctcattttcactggtcattagagaaatgcaaatcaatcaaaaccactatgagataccatctcatgccagtgagaatggcgatcattggaaagccaggaaacaacagatgctggagagaatgtggagaaataggaacgcttttacattgttggtgggagcgtaaactagttcaaccattgtggaagacagtgtggcgattcctcaaggatctagaaccagaaataccatttgacccagcaatcccattactgggtatataccgaaataattttaaatcactctactataaagacaccatgcatacgtatgtttattgcggcactgttcacaatagcaaagactgggaaccaacccaaatgcccatcagtgatggactggataaagaaaatgtggcacatatacaccatggaatactatgcagccataaaaaagaatgagctcatgttctttgcagggacatggatgaagctggaagctatcattctcagcaaactaacacaggaacagaaaaccaaacaccacatgttctcactcataaatgggagttgaacaatgagaacacatggacacagggaggggaacatcacacaccagggcctgtccagggggtcgggggctaagggagggatagcattaggagaaatgcctaatgtagatgacgggttgacgggtccagtaaaccatcatggcacatgtatacctatgtaagaagcttccacgttctgcacatgtaccccagaatttaaagtataataaaaaaaaaaatacaaaaattagctgggcgtggcggtgtgcacctgtaatcccaggtacttgggaggctgaggcaggagaatcgcttgaacccaggaggtggaggttgcagtgagccaagattgcgccattgcactccagcctgggtgacggagcgagactccatgtcaaaccaaacaaacaaacaaaaaacttgggttttagagtctatatcttggcatgtgcttctgtggataccacaggagtagaaaagacatacgaggatatgtgcactggccgttagtgtagcatcttaaattgttcttaaggctcttaaaacttctgtcaggttttaaagcttctgccaggaagtaacatatattacttctgcttctgctcacacttcattggccagaacaagccatatcgccatgcccaacttcaaaggagatggagaagtgtacttcagtcctaggcccagactagggtgaagcgagcaaggcactcaggggcagactactaacttctcatcaccatcctcaataatgggtggctgactcattttattgatttgaatgagtatggttaaatttgagaaggactatttcaaacattaaattcattgaatgaatacactggtcgattcctgggcacatatacgattctcttgatttaaagcacttgtctggaaacctttctcacttactcaaattgtgaaattattcacattgataaaaccttctactctggggatcagaataatagatgttattacagatgacggttttatttgatcttctaaaactgtttgtcatccattggttctaaaattgttcctcagtataatttggagcagttaaaacagcagaaaatacataattggaatgaaagctcatttgttgggatgcttttctcttctaggtgaggtgcaattcctacagaccagaagctgcccgagaacaagtccaaattggtgctcacagtccccctcagtttaggtaaatgggcaaatgggtgacggcagtttttaactgtacatctccccccttcctcccccacccagccatccaagggctctaccagataggtgatctgaaaaaaatcccacattgtggacgtgtgatttccattttgcagccaaaaaatatctggccacacggaaactaaatatcttctttcattagtagtaagctggtttagtcagcactctctcacctgaatttctgctgatggtacctgtacatatctagtctagtgctacatcaagtgccagtgagactatacaagactccagaggtaattcggaatccgaatcatagctttagtattacatcccattatcttctagtttttgaaagagtctcagtaaactgcattattggacttactcaactgcttacttttttgtccaaaaaaatagcctttattgtcttaggaaaggatgagatttgatgtactctgccttaaaacacctagcgctctggtttattttgttttaaagaatatcccctttaatacctcttgttctttcacacagtcaaccagcaaacatgaatgaatggccactttctaaatagctctgaacacaaaggaggatacaaagtattattcagcaattataatttatatctagagttagagagtctacattttggctttcaggtgggatcatattttgaaacggtagcttatacaaaaaaggaaaaggattatgaattgcagtcttatttgtcagaatgtataaaacattaagtacaaataaaattaaaagttaatattactcaccctgtactcggtcgtacaggttgacagaaattttctatagtaccggaaagataagtatgatgagaaacccaaaaaccataataatttatatgtattcattctttgtttagggcattatatctggatatctttatatttaatgtttaaacagatccattagcatattgcaagaaagccatctaaaatttcttctatatgttaaaatcttattcttaagatcttgccttagaaatgcttcagaaattgactataaattacccactagcataaaaatctaatcactatgttggaaatttctcccccactgggctaaactgtcatgaaggctgacggtctcgaacgtactaaaatgtgttcccactgaccaatggtgcagatgaactcacacagtagattaattactcaacagataagttttcagaaacttatttcctttaactagttgcctgtaatgttgaattttacagtgcatgcttactaattatcaactgtattctatctttaacacttgcctagggtgaatcacactatgaaatatgcatccctacccatatattcagctaaaacaacaagaggttatgaggattttttggatacagtccattacatttatgcaaatgcccgtaggtaacaaagtcattagggaagaaatagtcagggactgagaatgctgagtctctagtcaaccctttgaacacggagttgagtaagaaatagaaggggggaagttttttgtgtgtgtgtgtgctggcttgttactgaggtctgcagtaactatagattttgagtgcagcagaaatcacacaatggcaataccacttccaaaaggcagctacaatcaaagtgctgagtaggaatccagtctttgctgtagttggaagcctgtaagaatgtgacatattggagctaactccagtgaagaattatcagtaataactagataccattcattaattgactgattgttgcattaatcaaattctgggcaactgtgagcttcccatacctaacactaattcagagaaaatgttttgcagattgaatgaattctttaaaaatagctggaaatgcaacaacatggatgactcttatagacattatattcagtgaaagaaatcaaagaccaaacagtacataccatggattccattcacatgaagttcaaaatcaggcaaagctatggcaatagaagtcagaatagtaggttatcttgggagatgctgttggtatggaacaggcaggagccttctgggtgctggaatgtcttgatctggcagatagtaatatgggcatatacacacaaaaactggcaagtcctacgtttaatattttgcatactttatgtcagttatactttccataaagtttttaaaaagttagaaaaactaatattggtgatgatacagttttaaaagaattttgaagactgttcgaagagtaataggggcatgtgcttggcattcaggagatgctggatctagtctgttaattttttctggaaatttacttaatcattttgggctttagttgtctccctgtaaacagattaaaagaatgccaaccttctttctagcaatattctgctacagttttatacagaacctgttgatgtgcaagaattatatgacatatgctttgacatatcgtttttcagggtcaatggtgcaattagtaactttgaagaattccagaaagcttttaactgtccacccaattccacgatgaacagaggcatggactcctgccgactctggtagctgggacgctggtttatggcatcctgagacagttgcacagtgccagcggaggctgcactgagccttcatcgcccattgctttaggcctggagactttcatttttagtgcattttcattatttgggtaggtgacctgcttggatctagacagcatctgttcaaagttgtagggcttataaagtggaatataagaatgaactaagtatgtttctttagaaaatcaaaccaacaaaaataaatccctaggctacttttgttaaaatgctatctgctaaattgttgctattgtccattttagggtgttggccacagttatgtggtacatagcatttcaatctatagctttgtgggaagcctaaattgatgtatcctttaaaagttcaatctattaaacttgtagcctctcaatgatgaagacatgtgcatgaatacctgggagggcttgctgctctgtggaatgcagtgcacgtttttatggacagtaattacacagcattcctcaactgtaaggtagttaaattagaaatatgtttgatctccattttacactttttgatgaagttcttgccttcagctttggagtctgttggaatgaaactgtgtctcacagcttgcatctgatgtagcagattgccctgttcaagtcagcatgaacaaagctcgcagaaaggctactaggtaacggatttgagtttattcagtagaaaaaaagggaatgaggacatatctttaggtcccagaagcagcaaaacctcctagttacataacagcagggaaactaggagatgaaatctccaaaattttgtccagtctgtatgaactgcagtgattgtctgtctgctagacacttttttttagcctaattcttgttcgtttcattaccttcatatgtgtgcattgtactggttttgaaatgagcagacattgagaaaacaattttctgattccccattaggaacatatgattttcatttccctttagtgcaaaggaacaaacatcacattgaggagggagaagtgtacccttctttttcagcttaatgttacctctctttaaaaaaaaaacatttttgaaaaatttcttgactgatgacattctagaatttattgattcaatttaaaattccctgcatagtccaaataaacataatttttactcttcaagtcatctaaagagttgtgagaaagagcagtactatgtgttttatccttagagcattatccttctaagtgaactcctttcttattactgagcgtgtgtgtgtgtgtgtgtgtgtgtgtgtgtgtaggataaaattgtaatggccttaaagttgttacctggcatttttggtttcttaaaataggcatccccctactccctttacattattcattagacatgaggtgctgggttaagtgggccaataggaaaatctcaaaagcaaaatgacaaattcagattaaccacaggaagccattgtgtgtccctgtgatttgtgattcttttaaaaaaaaaaaaaatatatatatatatatatatatatatatatatgtatatctacctaagtgtgtgccatgtccttttgtagccatgggaacgtttgaatggagaaaaatggaggggcaccatcatgaggaaacaattatactgcattagtcagaggagagcgattttccctttgacttcttcctctctgaatggataaacttgtgaagggcagctaccttgtcctcctcttaacctggcttaatgtgaccttagtttgtatttccaaaaacaagcagtattaggttggaattgtatgtgtcttttctctggaggaagcattctgacttggtttagacatataagatactctgttttattcctggacttgggtgtttaaaatcagctgaggtttatcatgcttatatgaatagtgtttcccttctagatttcctttataaactccaaataaacacattcctgcaggtcagagaaagtgtttgataaaagcatagaattatggctttggaaagacaaactaagtcacttgttggtttagcaaaactggttggtgattagttggggccctcacagtttctagatgagaagcttaccttatcctgattaactttacttgctgtaactgttataccgaaaattgtaggtaggatgtccattactcaaacaaagcagaacaaaacaacaaaccaaaagcagcaataccaaatcatcactactagctagaacaatgagaaggattgaatttccaaatacatgcttatgtttaactcaactcttccaattacattctcattgtcctttctcttggataccgattgctaagataaacagacactgattaagtggtagaaagagaaaggtaaaatgcaactggaagggaaagaaaaaagtagggagaagctggcctatggatgtggctttgaagagaagacaggattttggcattccttgctaagcacgttcaatggaggagagccatgaagttttacaaaaataattatggtaaattaaaaggatattagatattggatctcagactagggctgctataatacagttctctgattcgcacaccagatgttctgccagcgaactgttgtctgggcattggaaggagttaggttttttgtgtttgtgaaaatctcctggattagtaaaaaaattttctagatataaagtggttttatttgggctcatgaccattgcccaaagtgtactgagcttttcactaagtgctcagcattggcctcctgttctcatttattcattttatgagatggacttggacatcactaatgcaaacacaggattcataaattattctgaagtttatttagtgccttgcctcaatggagcttaaagcatagcacataaattttatcttatttagccctggagcatcactaagaagcagctaggaactatggcttgccagacagattatgcttgtgccagagaagtggagaagcctgaaatcccttgtcaagtattccacaggaaggaaaggtagtctttgggctttggtctactgacctgtggattaaactctatcccttagattatcccatttctaaatacatttattcaatcagtatttctataatcacttagcatttgataggcttcttccttgatacatttaacataacgcctcagttgcatattacattatggaagaatatacgattgcttcatataacaacattctcatcaccagtgacagtgtcctactggtttgaagaaagatattcttggattatgtgttttatatctaaatggttattctgagactggttgtattttcttctcctactcgtgaaacgatgtgaacaagcattttaaggacaataaaaagttagctggttgaaggctttctgtgtctttcttttttaaaaatattaaaatctattagatctgttaacatattccgtcctgttttacacaacatttgccaaaaaatagtgtacaataactatacttactagctttcttggcttagaaaagtgagatttgaatgcagtaactttctccatagacaagaaggtatttaagaggttgtcattatattttcttccagaatgtaagtcagcagatacggtttattgcctttgtaataatatttctatagagaaagtgatgcctctgaggaaattatcagcgatgacaggggatagggctgatctcacaaaagtgacaatgaacatcacagttactatcaaatcaaacaatctctgtgttatcatcattctttaacaatccagtcaatttatagttattcattcagcacacagtaactgagcacccattatatttaaatcaccaaactagctatatttaggtggataatatacagtgtctgggcttcagtgaacagtctggtctaacatgggagatggatatataaactgtttcaattaccctactgagtgattatgatatataagtaaatcaggttgtggtttggaacacagagaaagaattcttcaacttttgtctggtggatactattggtgtttcctctgcgcagatcccagcaaattccttttactgggtggccttatctcatcttcggtctgcttttgtttctaattggctgtggctctctaggatggctgccctcatgctactggagcctctttgcccaatgcactttcagagaactggaagtgcctcgtgacccttagacagtgactgagtggtatgggactccgcatgcctgactacctcccggagttcagacaaatccagaggcatacaatagaatttatactgatttctctgtggtgtctttcttttagcattatgctgacagtgcaaattgagtcccctgttgattaaacacctttctggcactgatatgttctaagatctggaaaaggccgggtgcagtggcttacgcctgtaatcccagcactttgggaggccgaggtgggtggatcacgaggtcaggagatcgagaccatcttggctaacacagtgaaaccccgtctctactaaaaatacaaaaaattagccgggcgtggtggcggatgcctgtagtcccagctacttgggaggctgaggcaggagaatggcgtgaacccgggaggcggagcttgcagtgagtcaagatcacgccactgcactccagcctgggcgacagagcgagactccgtctcaaaaaaaaaaaaaaaaaaagatctggaaaagtaatggtttgtaggatcctaggtcagcccttctgtgtagtaggtcatatcatcatcatgtacaggaaatggacatcagatggcacagactgtgggtaataagtagctgagtatggcctgtttgtgcccttcttggagagtttatcctagtttctgagctgatccatgaaatgggaatttttgtgtatagggaagtggcacaaggaaagatgcatataaatgacagtgttacatatgtatctaagtggacctgatcaaaatttgcaagaggctgtttccaattaggtttaagatatttgcatgtgcctcaagttcactcgcttttttttattaagatcacactagctgtagaaacagataatggcttaacccaatttatttcttgttttcattacatacataatggatattaattatcagtgagtttctctcctctaactggtgactcagggacccagcctccttccatattatggttctgccattttcaacacatgatttaatgtatgctcatctataagaagccagtggagggaaaaaggccatggaagatactgagtggaagatttgcaattgtccttgaagttgtctacattacttctgttcatattccattggccaaatctaactgcaggggaggctgggacatgtagtctagctgtgtgcccagaatgaagagcaaatgggtttagttctcagggagcattcccaggcacaccttataaagtgacgtatggggcagtaactttgagttcttctgaatttagaaaattgcttttgagcacggcacaatgaaaactgaaaatgccattggtagcctgcagtttattctgtaggagtctttttaattaacagcttaattggataatttaatccccgttagaattggagatatgcaaatgaaaatgagatactccctatgatctgacaatactgtgctttaataaacacaccaaagtgagcctggaaatgagcaccacaaaagcattaccatgatttgtgatcagtgaaagaaaacctgatctataattttaatcattcctaaatggtttagatacatgtttcatttgaatgtgtattttgttttgttaattggttcaattagaaaggtaactgaacataagaatctgtggcaaagccatgaatttataatatgttctaagcttttaaaatatataccattgagaaagtaactaaaataccctacaaaatactgttgaaagtgcagtattttccagtattttcagataatttatatacaatagtttttacttctccattgattatgagatgaaaaatactacttaccatattcttgttatatgctttctccacttgaatgagaaattgaggctcagagtccaagaaatgaagatgagtgtccatgtacaagccacaaaagtgctgttctaattaattctggccggagactccactttacagagaaagaaaaactgagtaagttaaaatcccagtgtaaaaagctacctaaaatattgagtatcattttccctgccagtttggctgaaatgtctgcaaatgtcctagacaaaaaaagtggtatagtttaccatttggaagtacactgtgttaatttccaaattgatttagaagtcagtggaatcccagtacttggataacagtcagacagccctcccaccccagtgacatttgatgaatgtcaaaaatagcccaaagcatatttattccaaagttgaccagattttcaattggcatttgtatttttttttttttggcctaataataatcgtagtgaaaatggcttctgtttgttgacacccactatgtcctaggcactctgctggggcatgcctgctttatggccagtcctcacaacaatcttgcacatagttgttgctattccaacttcacaggtgagaaacacgtgacttgtcaagatcacattagtaactgcaagagccagaaacagtcagttttgtctaacttcagagcccattctcgaatgttctcctgggatatagaacaatgttaacatgattgtaacctgtgacttactgaagacttcaggttatacttctatagtaatctgttagaaaataatgtaaagataggagtcagtttacaataatttatacttactggtagtttcaagtccttcagaaaggattctagatactgctctttactgataatgcttgttaccatttattatctataacgtgccaaacatgtactaaataccttatttatattatctaatttaattatcacaacaactgggatacatattattatctctacttcacaggtaagaaacctgaagcttggagaggttaatgacttcattcatgatcatttagctagcagctggcagcatggatttgaatccagtttggtctaagtgctttcttaggcaaacattaactatggtaactcttaagtcctggatgtccaggctggggcatcccctcagttcagctggcagacctccctgaaatctacctgtgatcagccccatgattaccctcaccctgtctgttcagtccctgaaaccgaaaagtttgcaggttactttctccagacaacaaaatctttgtggccctgcctatgggtagttgagagactttcaagcagtcaccttggttttgaccctatgatgcattctttttaaaatttttttaagatttgacaacactgtgtgtatttatcatgtacaacacgatgttctgaagtatatgtacacattatggaatggttaaatctcactaattaacaattgcattaccgcatgcagttattttttgtggggaaagcacttaacattcactctctctgcatttttcaagaacataataaatcatcattaactacagtcaccttgctgcacaatagatcttttgaattaattccttccatctaactgtaattatgtatcctttgaacaacctctccctatcttccccacccctcagtctctggcagccaccattctactctctacgtctatgagaacaacttttgagatttcacaggagtgacatcatgcagtatttatctttttgttgtctggcttatttcacttaacataatgtgctccaggttcatccatgttgtcacatgtaacagaatttcattattattattattattattattttgagacggagtctcgctctgtcgcccaggctggagtgcagtggcgcgatctcggctcactgcaagctccgcctcccgggttcaggccattctcctgcctcagcctcccgagtagctgggactacaggcgcccacagccacgcccggctaattttttgtatttttagtagagacggggtttcaccgtgttagccaggatggtctcgatcttctgacctcgtgatccgcccgcctcggcctcccgaagtgctgggattacaggcgtgagccaccgcgcccggcccagaatttcattattttttatggctaaataatttgcccttgtgtatatataccacattcttcctcccttgatggacgctaaggttgattctacctcttggctattgtgaacactactgcaataaacatgggagtgcagatatctcttcaacatactcatctcatttcctttgggtatatactcagtagtgggatttctggatcatatggtagttctagttttaatattttaaggaacttccatactgttttccataatggctgtactaatttacattcccaccaacagtgtgtaagggttcccttttctccatatccttgccagcacttgtagctttatcatgcattctgacatttgctgttacctagagcttccaaatcctgaggcattctggtattctacagagtatttcagtttgcttctagtaggggggtctaatatttttgtctatgtaggtttatacctttcaaaagatatatttttagctttttgaagtgagagggtgagcagatctgcatccgagtctcctacattcaactggaagtctacatttaattttttaaatggggatatttaataaaaatttatttggaaagaaatgctgctatagatacagttctatatggaattattgcctttccccggtaatgtctgtaactaaagagtctaaagtttcctttaaactgttgaatactaggaggttttattttacacagaaacccatcctattttttcttagttaatttaataaaataaacacacacgaacatttggtatttttcatttctcctaaagacatagaacttagcctttggagaattcatcagagattgaaggaacctatctctgtgtaccttccgaagttgcctagagtggatttgtcacaaatgctgtggaggaaatttttacatatcaacaagggctaagctcgctccttggagattcacatttcaactctcatttgcacacacatagagtctctggtgcagattgagtttgagttaatgcacatagcttgttgggaagaaatcaatcaaaaacctttttaaggataaatggttctttaggaacagaaagttcagtatctcaattttattataagcattgaataaaaaccattttaaaacatgcagcatattaaaactacaaaaggcgctaataataaaggtattccctcacctaggtcagttggtgatatgtactaagtgatatttagaataaggaaaaaaatcaactgtcatttaatgtctgcctacaacacatgaggcagagtgctagttgtcatattgcaatttgagtaatccaggactctggtgactttagcccaaaacttcacgaacagtattataacagccttgtcattcctacgcttaagaaacctttagcgatgtttttcatggtgtttacaataacatcgaaacaactttccctgacttaaagggcctacaggacctggctctctgtttctgctgtcacttcttcatagcctttttctagctccattggtggtctttctgtttctgtaaatttactaaactttctcctaccttctcagtctcagggcctttgctgctttgcctgaaatgctttttgtatgtctttcacataacttcattgaaattaggccccttaactatgtagtctatcacctcacctgcctcacaccttcatagatcttaccactgttgctagttttctccttccttcctccctccctccttccctctctctcttctttcctattgtttgtcttcctccactgtcttgtaagtcccatgatattaaaactttctccggggctaggcatgttgacccgtacctgtaatcccagcactttgggaggccgaggtgggagaattgcttgaggccaggagtttgagaccagactgggcaatatactgagacccagcttctaaaaaaaaaaaaaaaaaaaaaaattagcttggcattgtggagcatacctgtagtcctagctactcaggaagctgaagctggaggatagcttgagatcaggaggttgaagctgcagtgaggtatgattgtgccactgcactccagcctggatgacacagtgagaccccgtctctaaaccaaaacaaaacaaaaaaaataagcctttcttttgtttattactatatttctagcatcaccactatatttccagcactcagaacagggtctgaaaaataataggcccttgaatacacatttagtaaatgtgttctttcatttcacccataaatattgatcatttactacgtgcttggcactctttaggggctgctgaggatattgcagtaaaccaaacagatagaaggtcttgcttccatagagcttatactctaggagacagacaataaaataaataagtgaaacatgatatagtagatggtaatacttgttatggaggagagaagaggatataatatgtggatgtcagagtgttgcaaatttaaatagcacggtcatgaagatgtttgagcaagaacctatcttggagaagagccttcttggcagaggcaggagtgagtccaaagacttagtggtaggagcatcccaggacatttgtagaagagcaaggaaactagtgtggctggagcagagcgagcaaggaagagtgcagaatgagatgatgtcaggatgaaaacaacaacattcagcttgtctatggtcatataggctgctgcaagaactcttcttctcactctgtgtgagatgggaagccactggagaattttgagcagaaaagtgacaagatccaacctatgatttccatgatgactctggctgtgttgagaatagaccgtggctgaacaggggaagaagcatgaagaccagttaggaagtggttgccatcatcccagcaagaaatgatggtggccgtgtcgaggagaggagcaggggaggaaatgagtgaatgaacgataataaaatttaagaaagaaacgctccatcatcctgttactttgaaatttccgcctatttcttttgtatttgtgtttttccatagccccatgtataaatatatggcataatttttattcagaggataatatgattttgaatctttttcatctaatagcatcggcctgcgtccataggtgcttcaaaatctttttttttttttttttgagatggagtctcactctgttgcccaggctggatacagtggtgcgatctcgtctcactgcaaccttcgccttccgggttcaagtgattctcttgcctcaccctcctgagtagctgggattatgggcgcaagccaccacgcccggctaatttttgtatttttagtagagatggggtttcaccatgttggccaggctggtctggaactcctgacctcaagtgatccacccacctgggcctcccaaggtgctgggattacaggcatgagccaccacacctggcaaaatcttccatttttaatggcagaatgatattctttagagtttctgtgacataatttgttcaattatttctatttagaaatttattattgatttcatttatcactattgtaaataatagagattaaaatcttgatatgtagatttattttctttcctataggttgtttccttaaaataaatacttaagagtaaatttacttcatcaaaggatgcaggtatatgctgttgtggcttttgaaatgcactaacaaattgcgttctaacaaggttgtatgcatgcgggtacctaccggttttacaatagaactggatcagaagtaggtcctgctcgtaagaaagttacaatataatgtgggaagaagatgtgtaaaccatcagctgtaataaaaagcacaatgaagaacagtgtaagaaggtaccacatttagaaaaaccttatcagctttaggtgttattaatttcatttttagtaacttttgcattcattaaataagtaaggctgaatgcaatggctcacgcctgtaatcccagcactttgagaggccgaggcaggtggattgcttgatcccaggagttcaagaccagcctgggcaacatggtgaaaccccatctctaccaaaaaacatacaaattagcagggcatagaatgtgcacctgtagtcccagctactggagaggctgaggagggaggattacttgagcccggggggttgagactgcagtgagccatgattgcgcaactgcactccatcctgagtgacagtgagaacctgaagtaagtaagtaaataagtaaataaataaagcgtgactggttgtttaattttaccaatttgcttttttgtttttacctctcttgatataaattacccacatatcaaggcccttcacccattaggctattaagattttgattttttctcattctcctaaaaagacacatgcacacgtatgtttattgcagcactactcgcaacagcaaagacttggaagcaacccaaatgtccatcagtgatagactggataaagaaaatgtggcacatatacaccatggaacactatgcagccataaaaaggatgaattaatgtcctttgcagggacatggatgaaactggaaaccatcattctcagcaaactaacacaagaacagaaaatcaaacgccacatgttctcactcataggtgggaggtgaacgatgagaacacaggggcacaggcacaggcagggaaacatcgtgcaccagggcctgtcgggggtggggggctaggggagggataacattaggagaaagagctaatgtagatgacgggttgatgggtgtagcaaaccaccatggcacgtgtatacctatgtaacaaacctgcaagttctgcacatgtatcccagaacttaaagtataataataaaaaagattttgatttttttcttatcaattaggtaagtttttgttgcttattattcatagacacttacttagctagaaaacaattctgctactctctgatcctcatctttgtacatttgtaagtagtggcgttcctttgtaaggtaatgtagatgggcaaaatagttcacataatttgtcttactgaaataaactttatacagagaagtacaaaagagttaacacaaatttaggaggtatacaatgttaagtgtacatcagttaaccgaacaaatatttattgaagcacttaatagatattattctagggttgggaatatgatgaataaggttgtagtttccaattgtttaacaatttgaaaattactcataaggaatagtagatatataaataaatttcagcagtgtaatatataattgaatagaggtgaacacagagttctttggaaataaaactggataaaagtatttatagagctaagcaatgaaaaaattctaatggcctcagctgtgaaataaaaataatacaaaatgaataaggcagacaactcaatagaaaattgggcagacgacttgaactaaccacaaaagaggatattccaaattgccaacaaatagatggaaaggtgcttaacttcactagtcatgaaggaaatgcaaatttaagccacaacatgattcaactatttaccccctcccctctagaatggctaaaatcaaaaagcatttagacaagcagaactctcatagactgctggagggagtatacatttgtatggccaccttggaaaactatttaacagtatcttctaaagctgaatatacttgtatccaatgacccagcaatccactcctaggtattaagttgtcatcttagtaggtaaacaatggttgaatattggcaattttatattgcttaacctaacgtatacccagcagaaatgcacacctatgttcaccaaaagatgtggaagaatttcatagaagcactataagagtcccaaaatagaaagtatccaaatgcccatcaacaacagagaaggtaaataatcgaatactgatctacaataacaagaacaaacaaactgcaactacatgcaacaagatgagtgtttctcacaaacataagttggatgaaaaaagccaaacacaagagagaacatacttcatgattctacttacataaaatataaaaatatgcaaaacgaatctgttagaagtcagaggagtggttactccttgggggttaggaactggaagggttcacaaggtggggcttttgaagttctggtaatgttgggtttcttgatctggatgctttttacattaatgatttgtgcacttttgtatatgtatgtgtattgcatcaaaaagttttaaaaaaataacattaaaataaatataagaaagtccaagtaagtcctcattttttccccacaacaatcactttgatgcttttctagggaaatactgaatatcaaattcttttaaaaagcttttctcccctcatttttggagccctttttttgctggcaatggtaggtaatcctgtacttgttgtaggaacacaggtaagagactaaactgggtgtggggtcctggctgggaagctttcctggaagagatgaagctggacctgagttttgtagcatccatcagagacagccagggaagcaagtggatggcagacagttccagggagagaggccaggctactcgaaagcgaaaaggtatggtagggaaagaaagagaacccactgagagggagtggacagagcttgctggagctagagcttgaagagtagctgaggaggggttaatgattgataagcaagagagtttggcaaaggtcagacagagaaagatcttaaagggtcatgatactgagcttggacttaatcttgtaggcatctgggaaccactgaccaatttaaatcaaacaggtgacacaattaagtttctacttaataaagagtaagatggtgatggtgtgagaaatacttgaagagggttaagaagactggagcctgggggaccagttaggaggccattgcagtaatccatgggagatacggcaggctggtggtatgggatggagaagtagggatagacatgagagctattgaggagacagttgttctgacaggactcagtaattgatgggtttgaaattgacatgtaggcatggtacttttttttctagtaaaaaaaaattggtagaaccttaattatgataaatgataaaacacatgtgcctttgtccttattcccccctttaacacctttttacaggtgtatacatcaaaggatgttgccatgacgaacgagagaacgcttaccaatgatttcccattgctgcttggaatgaaaacccaatgacacatttcaaaattttgcagtggtaaatcatgtaggtcatcttattgcactaccatgcaaacttcttgattttgccaaatcagtcagttgagaggaaaaaggaaaaaagtgttacctatatatactgtcatatactattgtaaacaaaaaacaatccgtatataggtttatatgattatacagtacaaaactatgtacacacatgaacaaacatacatatatgtatatacacactagaagcttaaacagctatgtgacacttgagatttttatatacagactttaccagggtatacaaaaaataacataaatttttacttaattttccctgtctttttaatggttccatttgggtgggggaggatccagaggattttttcctcactttaattacctcattgcatttccttcttttcgattttggtttttataagcgggaacactgtgttaatccattctaattaaaacccagccatgcaacccttcagttaaataaacaatttttgagtctgcctaggatatcatttagtcagaaattgtctctatggctttggaaatga

SEQ ID NO: 32746 - DNA, 2541 bp, Homo Sapiens
tgagaccaaatttacaaaaaaacgaaaaaaataaggattgactgggctacctcagcatacatttctgccacattcttaagtagcaaaaaaggaaaagtgctttcctcctctgcaggatgtaaggtttatcagccattaaaacttagacttctctagcttttcactagctgtgaaccagccttcctgtccatggacgtgaaactgcatagtaatgagactgtgcacactgatgtttacaagattgaaagagtctttctccgaaaatcatggtaaagaatactgagacaatgaaaaaaaatcaacaaatatgctttctggagaactgtaccttttatggtttgcttgcacatcagtagtttctgctgaacgtgctgtcataatgaagagatttccaggattttttttcctgattagaactggtagccagtatattaaatattgatataaaaataaaagaactggaaccagattccgaatcttgaaaacaacattttttacaacaaacaaaaaaactatattaaacagggtttaaaggaaaattaaaacagaactatgaagaagtacaatttgttatagtatagtatcaaatttctatatagattttatacctcagtggggaaaaataactgattccaatgacattcattttgttttcatctgtgatagtcatggatgcttttattttccttggggtgctgaaattgagctgaaaaaaaaaggctctttgaatatagttttaatttctctctacagttttttttgtttggtttgtgggctgttggaattgtaatttttaattgccttctaaaaaatggaaatttaacaatgtctgatctcagctgaacaaattagatgtttcagttgctcttgggtcaactggcttacagatttacatgtgcacacacacacaaatttcttatcacattttcgacttcttcacttgacctaactgattatgcgaaatacccaagattcatgctactgttccacatttgttttcacagcaataaatcttcagttctgttgtttatgattccacttaacaaggggcctgcaaatgtgatttattatttgggtatttggagataatacatttgagggttttttggaaaacctttttcactccatactcaaatatgcttcattgtcaaatgcatatttaaattaaattattgaattgtaatgtttatctgctgctttttttaaataaaatttgactgaaaatgtttaattggcattttttaatgacttacccaagaaaagtgcagctattattccatattaataggcttgcatttcttttcctaaatcttatttaggctaaatcagttttattgtcctctgattttttttaataccacagaaatcacctgagtgtcaattgaaaagttgtcaattaaaaggtaaccttttaactctcgtaggaggaatctcattaagacatttttcctgatatgtagagcagtctgttggcaaaaatgcatatattttctttcatatttgtaaaattatatttaatggaattcttttctttgattatcaaggactttcactgcaggcagtgctatttcttgtgcctaagaatgtttccaaaagtcgcatcgctaatgatatttgccaagttgagtgtacacaaagtttctcatatcctgttcaagttaatcaacatcaaacacatggggatgctttagggtgagtctataatacaaaatgcataaaccatgtccccaggaaatttgaaaggaagcaagtgctgaatggaatttttttccttttccatgagctgtgttaattctatctccagtaggcctaatgcttgaaataagcaagatgtctaatcaataaattattttcatgctcagaatttcaggtttttgtactccagcatagcttggtcttatttcttactgtatgaaagcttaacagcaatgtgatttaaggttttgttttaaatgggagatgtaagtgatttaattcatgggtacttttagaacctgatagataatcccattgcctttatttttctaattaaagaatcctaaatactttgaaaatacaaaatattcctgaatagttgtgccttacattggttttatttgaagttagagtggatccctgtttatcataattacttataattaggcagatgcttatcactctattataactcaaattgggaagaaaagaatgaaaaagaaaacaatggctgggtactggctcatacctgtaattttagcattttgggaaggtgagacgataggaccacttgagggcaggagtttgaggttgcagtgagctatgatggtgccactgcactccagcctgggcaacagagaagaaaccatgtatcttaaaaaaaaagaaaaaatgaaggatgaaaaagtgggattattatttaaccagtgaagaattcataaatgtgacaattaaggataatttgaatctcacaaatctattcaccccaccccagtcaaggtctatttaatatatctatcttcattggcattcttgagaaataatgctgccattgaacattggggg

SEQ ID NO: 32747 - DNA, 2433 bp, Homo Sapiens
cagccgcggcccatggagcccgccggcccggcccccggccgcctcgggccgctgctctgcctgctgctcgccgcgtcctgcgcctggtcaggagtggcgggtgaggaggagctgcaggtgattcagcctgacaagtccgtatcagttgcagctggagagtcggccattctgcactgcactgtgacctccctgatccctgtggggcccatccagtggttcagaggagctggaccagcccgggaattaatctacaatcaaaaagaaggccacttcccccgggtaacaactgtttcagagtccacaaagagagaaaacatggacttttccatcagcatcagtaacatcaccccagcagatgccggcacctactactgtgtgaagttccggaaagggagccctgacacggagtttaagtctggagcaggcactgagctgtctgtgcgtgccaaaccctctgcccccgtggtatcgggccctgcggcgagggccacacctcagcacacagtgagcttcacctgcgagtcccacggcttctcacccagagacatcaccctgaaatggttcaaaaatgggaatgagctctcagacttccagaccaacgtggaccccgtaggagagagcgtgtcctacagcatccacagcacagccaaggtggtgctgacccgcgaggacgttcactctcaagtcatctgcgaggtggcccacgtcaccttgcagggggaccctcttcgtgggactgccaacttgtctgagaccatccgagttccacccaccttggaggttactcaacagcccgtgagggcagagaaccaggtgaatgtcacctgccaggtgaggaagttctacccccagagactacagctgacctggttggagaatggaaacgtgtcccggacagaaacggcctcaaccgttacagagaacaaggatggtacctacaactggatgagctggctcctggtgaatgtatctgcccacagggatgatgtgaagctcacctgccaggtggagcatgacgggcagccagcggtcagcaaaagccatgacctgaaggtctcagcccacccgaaggagcagggctcaaataccgccgctgagaacactggatctaatgaacggaacatctatattgtggtgggtgtggtgtgcaccttgctggtggccctactgatggcggccctctacctcgtccgaatcagacagaagaaagcccagggctccacttcttctacaaggttgcatgagcccgagaagaatgccagagaaataacacaggacacaaatgatatcacatatgcagacctgaacctgcccaaggggaagaagcctgctccccaggctgcggagcccaacaaccacacggagtatgccagcattcagaccagcccgcagcccgcgtcggaggacaccctcacctatgctgacctggacatggtccacctcaaccggacccccaagcagccggcccccaagcctgagccgtccttctcagagtacgccagcgtccaggtcccgaggaagtgaatgggaccgtggtttgctctagcacccatctctacgcgctttcttgtcccacagggagccgccgtgatgagcacagccaacccagttcccggagggctggggcggtgcaggctctgggacccaggggccagggtggctcttctctccccacccctccttggctctccagcacttcctgggcagccacggccccctcccccaacattgccacacacctggaggctgacgttgccaaaccagccagggaaccaacctgggaagtggccagaactgcctggggtccaagaactcttgtgcctccgtccatcaccatgtgggttttgaagaccctcgactgcctccccgatgctccgaagcctgatcttccagggtggggaggagaaaatcccacctcccctgacctccaccacctccaccaccaccaccaccaccaccaccaccactaccaccaccacccaactggggctagagtggggaagatttcccctttagatcaaactgccccttccatggaaaagctggaaaaaaactctggaacccatatccaggcttggtgaggttgctgccaacagtcctggcctcccccatccctaggcaaagagccatgagtcctggaggaggagaggacccctcccaaaggactggaagcaaaaccctctgcttccttgggtccctccaagactccctggggcccaactgtgttgctccacccggacccatctctcccttctagacctgagcttgcccctccagctagcactaagcaacatctcgctgtaagcgcctgtaaattactgtgaaatgtgaaacgtgcaatcttgaaactgaggtgttagaaaacttgatctgtggtgttttgttttgttttttttcttaaaacaacagcaacgtgaaaaaaaaaaaaaaaaa

SEQ ID NO: 32748 - DNA, 5190 bp, Homo Sapiens; identical to SEQ ID NO: 29836

SEQ ID NO: 32749 - DNA, 1332 bp, Homo Sapiens
gctgcagccctcagaagtaagcaaggtttcctgccgggagaaaaggatttgaagcattccagccaaaatgacggacagaagccccttcgaaaccgacatgctcaccctgacccgctacgttatggaaaaggggcgtcaggccaaagggactggggagctcacccagctgctgaactcaatgctgacggccatcaaagccatctcctcggctgtgcgcaaggccggtctggcccacctgtatggaatcgcaggaagcgttaacgtgacgggagatgaggtgaagaaactggatgtgctatccaattccctggtgatcaacatgctccaatcctcctatagtacctgcgtcctggtctcagaagagaataaggacgccatcatcaccgccaaggagaagcgggggaaatacgtggtctgctttgacccactggatggatcttccaatattgactgcctggcctccatcggaaccatctttgccatctatagaaagacctcagaggatgagccttctgaaaaggatgccctgcagtgtggccgcaatattgtggccgcaggttatgcgctgtacggtagtgcaaccctggtggctctctccacagggcaaggcgtggacctcttcatgcttgacccggctcttggtgaatttgtcctggtggaaaaagatgtcaagattaagaagaaaggaaagatttacagcctgaatgagggctatgccaagtattttgatgcggccaccactgaatatgtgcagaaaaagaaattccctgaggatggcagtgctccctatggggccaggtatgtgggctccatggtggctgacgtgcaccgcaccctggtctatggaggaatcttcctgtacccagccaaccagaagagccctaagggcaagctccggctcctgtatgaatgcaatcccgtggcctacatcattgagcaggcaggaggcttggcgaccacggggacccagcctgtactggacgtgaagcccgaggcaattcaccagcgagtccccctcattctggggtcaccagaggatgtgcaggaatatctcacctgtgtgcagaaaaatcaggcaggcagctagcgagtttgaccccacatgccctcttctgtttgtcttgcaccttgtctaaggaccctaaatgaacgataaacagagatggtagctatgagtatgcaaaaggtaaatccacttaatcacatacagaagagcaacaacaaactgcttacgacaggtttggaagccacaggcgattctatggtcaatgtgaaggactagaaataaaaacccacatgtggaaaaaaaaaaaaaaaaaaaaaaaaaaaaaa

SEQ ID NO: 32750 - DNA, 5307 bp, Homo Sapiens; identical to SEQ ID NO: 29535

SEQ ID NO: 32751 - DNA, 7654 bp, Homo Sapiens
actcactatagggctcgagcggccgcccgggcaggtaagaatcagaagacatttgtgctttggggagcagaggccctcagggtatagagaaggaagaagagagaggttcactgtagtcctgaagcagaaataagacctgtggctgaaggaagccttagcaattcactccttcctcttcctgagaactctctgtaggaagtctcacctagcagaggcttcacagtatttcagagaagccaaagattgtttgcctctttggaaactgttatccttccatcatgactgtgtcactcctgccactgttccaccatagagatggcgtcctttgcagcaaaccgtaagttataaggatgagggaagaagagtagagggccaaaaggattccattttgaggaaaaactacagtttgccttgccaggtagaagaatcaggcgcccagacaccatgtcacaaccctccagaactgacgttggcaggaagtagagactttgttgcctgtgtcccccatcctcaccatgtcttcgactcaggacaatggggaacactggaagtccctggagtctgtgggcatcagccgcaaagaactagcgatggccgaagccctgcagatggagtatgatgccctgtcccggctccggcatgacaaggaggagaacagagccaagcagaacgcagacccctctctcatcagctgggatgagcctggggtagacttttacagcaagccagcaggaaggcggaccgacctcaagctgttacgcggtctctctggctctgatcctacccttaactacaactcactatccccacaggaagggccgcccaaccactctacctcccaagggccacagcctggctcagatccctggcccaaaggctccctgtctggagactatctctacatttttgatggttcagatgggggagtctcttcgtccccaggaccaggggacatagagggctcttgcaagaaactatccccacctcctctgcctccccgagcttctatctgggatacccctcccctgcctcccagaaaggggtccccctcatcctccaagatctcccagcccagtgacatcaacactttctctttggtcgaacaattgccaggcaaactgctagagcatcggatcctagaagaggaagaggtgctgggaggtgggggtcaggggcgcctactggggtctgtggactatgatggtatcaatgatgcaattactaggctcaacttgaaatcgacctatgatgtggagatgttgcgggatgccaccaggggctggaaggagggccgagggccgctggacttcagcaaagacacctctggaaaacccgtggccaggagcaagactatgccccctcaggtgcccccccgcacctatgcctcccgctatggcaaccgaaagaatgcgacgcctggcaagaaccgccggatttctgcagccccggtgggctcccggccccacactgttgccaatggccatgagttgtttgaggtctcagaagagagagatgaggaggttgctgcattttgccacatgctggatatccttcgatctggctctgacatccaagactacttcctcactggctatgtctggagtgctgtcacccctagcccagagcacctcggggatgaggtcaacctgaaggtgactgtgttgtgtgacaggcttcaagaggcactcactttcacctgcaactgttcctccactgtagacttgcttatctaccagaccctgtgctacacccatgatgacctgaggaatgtggacgtgggtgactttgtgctaaagccctgcgggctggaggagttcctgcagaacaagcatgccttgggcagtcatgagtacatccaatactgccgcaagtttgacattgacattcggctacagctgatggagcagaaggttgtgcgcagtgacctggcccggacggtgaatgatgaccagagcccctccaccttgaactacctcgtccatctccaagagaggcctgtcaagcagaccatcagcaggcaggccctgagtcttctgttcgacacttaccacaatgaggtggatgccttcctgctggctgatggagacttcccactgaaggctgacagggtggtccagtccgtcaaggccatctgcaacgccctggccgccgtggaaacccctgagatcaccagtgctctcaaccagctgcccccctgcccctcccgcatgcagcctaaaattcagaaggatcccagtgtcttggctgtgagggaaaaccgagagaaggtcgtggaagccctgaccgctgccatcttggacctggtggagctgtactgcaacacattcaacgcagacttccagacggcagtgcccgggagccgcaagcatgacctggtccaggaggcctgccatttcgccaggtccctggccttcactgtctatgccacccaccgcatccccatcatctgggctaccagctatgaagatttctacctctcctgctccctcagccatggcggcaaggacatgtgcagccccctgcagacccgaagagctcacttctccaagtacctcttccacctcatcgtctgggaccagcagatctgcttcccagtgcaggtgaaccggctgcctcgggagacactgctgtgtgccactctctatgctctgcccatccccccaccggggagctcctcagaggccaataagcagcggcgggtgcctgaagccctgggctgggtcactaccccactcttcaacttcaggcaggtcctgacctgtggccggaagcttctgggtttgtggccagcaacacaggaaaatcccagcgcccgttggagtgcacctaatttccaccagccagacagtgtcatcctgcagattgacttccccacctcggcctttgacatcaagttcaccagcccccctggagacaagttcagcccccgctatgagtttggcagcctccgggaagaagaccagcgcaagcttaaagacatcatgcagaaagagtccttgtactggctcactgatgctgacaagaagcgcctgtgggagaagcgatattactgccactcggaggtgagctcgctccccctggtgctcgccagcgcccccagctgggagtgggcttgcctgcctgacatctatgttctcctgaagcagtggacccacatgaaccaccaggatgccctggggctcctgcatgccaccttcccggaccaggaggtgcgtcgtatggctgtgcagtggattggctcactctcagatgctgagctgctagactacctgccccagctggtacaggccctgaagtatgaatgctacctggacagcccgttggtgcgcttcctcctgaaacgagctgtgtctgacttgagagtgactcactacttcttctggttactgaaggacggcctcaaggactctcagttcagcatccgctaccagtatctgctggcagccttactgtgctgctgtggcaaggggctgagagaagagtttaaccgccagtgctggcttgtcaatgccctggccaaactggcccagcaggtccgggaggcagccccatctgcaaggcagggaatcctccgcacgggcctggaggaggtgaagcagttctttgccctcaatggctcgtgccgcttgccactcagccccagtctgctggttaagggaattgtgcccagggactgttcctacttcaactccaatgctgtccccctcaaactctccttccaaaatgtggatcccctgggtgagaacatccgtgtcatcttcaagtgtggggacgaccttcgccaggacatgctaacgctgcagatgattcgcatcatgagcaagatctgggtccaggaggggctggacatgcgcatggtcatcttccgctgcttctccaccggccggggcagagggatggtggagatgatccctaatgctgagaccctgcgtaagatccaggtggagcatggggtgaccggctcgttcaaggaccggcccctggcagactggctgcagaaacacaaccctggggaggacgagtatgagaaggctgtggagaactttatctactcctgcgctggctgctgcgtggccacgtacgtcttgggcatctgtgaccgacataatgacaacatcatgctgaagaccactggtcacatgttccacattgattttggccgcttcctgggccatgcccagatgtttggcaacatcaagcgggaccgtgccccctttgtcttcacctcggacatggcgtatgtcatcaacgggggtgacaagccttccagccgcttccatgattttgttgacctttgctgccaagcctacaacctcattcgcaagcacacccacctcttcctcaaccttctgggcctgatgttgtcctgtgggatccctgaactctcagacctggaggacctcaagtatgtgtacgatgccctgaggcctcaggatacagaggccaatgccactacctacttcactaggttgattgagtccagcctgggcagtgtagccacaaagctcaattttttcatccataatctggctcagatgaagttcacgggctcagatgaccggctgaccctctcctttgcctcccgaacacacactctcaagagctctggccgaatcagtgatgttttcctctgccgccatgagaagatcttccaccccaacaaaggctatatatatgtggtaaaggtgatgcgagagaacactcacgaggccacctacatccagcggacctttgaggagttccaggaattacacaataagttgcggctgctcttcccttcttcccacttgcccagcttccctagtcgcttcgtgatcggccgctcccggggagaggcggtggccgagcggcggagggaggagctaaacggttacatctggcacttgatccacgcaccccctgaggtggccgagtgtgatttggtgtacaccttcttccacccactgccccgggatgagaaggctatgggcaccagcccagctcctaagtcctcagatggcacatgggcccggcccgtcggaaaggtgggaggggaggtgaagctgtccatctcctacaaaaacaataaactcttcatcatggtgatgcatattcggggcttgcaactgctccaggatggaaatgaccctgacccctatgtgaaaatttacctccttcctgaccctcagaaaaccactaagaggaaaaccaaagtggcccggaaaacctgcaatcctacctacaatgagatgttggtatatgatgggatccccaagggtgacctgcagcagcgggagctccagctgagcgtgctgagtgagcagggattctgggagaacgtcctcctcggtgaggtgaacatccgcctgcgagagctggacctggctcaggagaagaccggctggttcgccctgggatctcgaagtcatggcaccttgtgagcccagcagagccaccacccagcatcccaggctggtggcaggagctgggggagaggactctcccctgtgagactcctccttgtgaagggccagggccctgggcaggcctccagctcggtccaggtgattctggcctctgtggtaggaggcagggagagtaagacatgctctgctgtctcttcctctggagactgaacttgggttggttgtgatgagcagccccttggaggctgtgaggttgcagcaaagttttaagtttaccttgtgtcaagggagcaatgcttggtttggggaatgtgtggggtgggctgtatgaagtaccattttgggggtgggtgggtggatatcttaatttttatttttaaaaaatgaaatagtgatgttgtcctaactgggacaggaagccttgcgagaagggacgtacctatgccccacaaggcaagagaggaacactatttggactttttgtatgattaaggttcttattggacttttccctaggttttttttttttgttattgttgttgttgttccgttttctagctataggaactatctggggaggggcccagtgggtcctcggccagagccctctctaaggacaggttggggagggttggggagggctgcctgtgctggactgaggcttgtgccactgggcctttctgattttgcctccaaaggagagcgctgtgatacctacatgtgtaaggaagggccttccgtattggggttctgccaaggacccgtattcagggacccatgctcttttggggggacttttcctcttgtcttccctactttattaggacttgccctgaataccattttctaccccttgcccctccattctcctggcccttctgggggtcagctggtctctatgaatatgctgggggtgcttccccataggtctctcccttcatttgtctctggtgggacaaaatactgactcagtccttagatgtagtttcacccaagagcatcttggccctgggaagaggtccctaggctgcagatgctactgactgcttgctaggtagcctctggaaagcattccccatccatcactccccacttctttctgctgtgctgcttccctcccaaactccatttctgtcaccctttttataagacttttcctcattctgtggggccataaacctatttagtctggagccaaagggatgccctatctgaaggaaaggggcatggggtgggggattccatcaaaactgttgttttttgccccatgatttttctttggtcagtaggaggctggattggagtggtgattattcccctggagctaagctcaggagcccgaagggagagactgagactgactcccttatctcttcatattctttattccctaccagatggatttttttttttttttttggagacggagtctcgccctgtcgccaggctggagtgtagtggcatgatctcgactcactgcaaaatctgcctcccgggttcaagcgattctcctacctcagcctcccgagtagctgggattacaggcatgtgccaccacgccaagctaatttttgtatttttagtagagacggggtttcaccatgttggccaggatggtctcgatctcttgacctcgtgatctgcctgccttggcctcccaaagtgctgggattacaggcgtgagccaccatgccccgccccagatggattttacatttgctcttttgtgtttcgctccaaagggttgtcttcctcgccaaaaggagggagggactttgaatttgatatgaatctttaaaaccagaattggctggatatttcccatgattgggaaaagagtgaaatgaggacattctgtaaactgtccctccctaattccaaggatcagaaactccccgttttgctgactcattccataactggagaaagaagctccattgaccgaagccacagggcagcatggaagtttaaattttctctaaaattaaaatgccaaggataaagctggctgcttccaggagggggaagaggagtggggagtgggcggtgaaacttttccagatgaacggaccataaatgtgttactggctttgtgcctgtagctcattttattatgacctatatgctcctgatttaaagagatctgtgtactgtttacttcccacttcccagaatcccttgtatctcctttctcgggaattgtattttctaataaatgacatttgagaaaaaaaaaaaaaaaaaaaaaa

SEQ ID NO: 32752 - DNA, 3252 bp, Homo Sapiens
atggcggcgggctcggatctgctggacgaggtcttcttcaacagcgaggtggacgagaaagtggtgagcgacctggtgggctcgctggagtcgcagctggcggccagcgcggcccaccaccaccacctcgcgccgcgcacgcccgaggtgcgggccgcggccgccggcgcgctcgggaaccatgttgtgagcggcagcccggccggagccgcgggcgcagggccggccgcccccgccgagggcgcgcccggagcggcgccggagccgccccccgcaggtagagcgcggccggggggcggggggccgcagcgcccgggccccccctcaccgcgccgcccccttgtccccgcagggcccgcgccgcccgccgcgaagctgaggccgccgcccgagggcagcgcgggggcctgcgccccggtgcccgccgccgccgccgtcgccgcggggcccgagcccgcccccgccggccccgccaagcccgccggccccgccgcgctggccgcccgcgccggccccggccccgggcccggccccggccccggccccggccctggcaagcccgccggccccggcgccgcgcaaactttgaatgggagcgccgcgctgctgaactcgcaccacgccgccgcacctgctgtcagcctggtcaacaacgggcccgccgcgctgctgccgctgcccaagcccgccgcccccggcactgtcatccagacgccccccttcgtgggcgccgccgcgccccccgcgcccgccgcgccctcgccccccgccgcccccgcgcccgccgcccccgccgccgccccgcccccgccaccccccgcgcccgccaccctggcccggccgcccggccaccccgccggacccccgaccgccgcgcccgccgtgccgccccccgccgccgcccagaacgggggcagcgccggggcagcccccgcccccgccccggccgccgggggccccgctggggtcagcggccagcccgggcccggcgcggcggctgcggcgccggcgccgggggtcaaggccgagtcgcccaagagggtggtgcaggcggcgcccccggcggcgcagaccctggcggccagcggcccggccagcacggcggccagcatggtcatcgggccaactatgcaaggggcgctgcccagcccggccgccgtcccgccgcccgcccccgggacccccaccgggctgcccaaaggcgcggccggcgcagtgacccagagcctgtcccggacgcccacggccaccaccagcgggattcgggccaccctgacgcccaccgtgctggccccccgcttgccgcagccgcctcagaacccgaccaacatccagaacttccagctgcccccaggaatggtcctcgtccgaagtgagaatgggcagttgttaatgattcctcagcaggccttggcccagatgcaggcgcaggcccatgcccagcctcagaccaccatggcgcctcgccctgccacccccacaagtgcccctcccgtccagatctccaccgtacaggcacctggaacacctatcattgcacggcaggtgaccccaactaccataattaagcaagtgtctcaggcccagacaacggtgcagcccagtgcaaccctgcagcgctcgcccggcgtccagcctcagctcgttctgggtggcgctgcccagacggcttcacttgggacggcgacggctgttcagacggggactcctcagcgcacggtaccaggggcgaccaccacttcctcagctgccacggaaactatggaaaacgtgaagaaatgtaaaaatttcctatctacgttaataaaactggcttcatctggcaagcagtctacagagacagcagctaatgtgaaagagctcgtgcagaatttactggatggaaaaatagaagcagaagatttcacaagcaggttataccgagaacttaattcttcacctcaaccttaccttgtgcctttcctgaagaggagcttacccgccttgagacagctgacccccgactccgcggccttcatccagcagagccagcagcagccgccaccgcccacctcgcaggccaccactgcgctcacggccgtggtgctgagtagctcggtccagcgcacggccgggaagacggcggccaccgtgaccagtgccctccagccccctgtgctcagcctcacgcagcccacgcaggtcggcgtcggcaagcaggggcaacccacaccgctggtcatccagcagcctccgaagccaggagccctgatccggcccccgcaggtgacgttgacgcagacacccatggtcgccctgcggcagcctcacaaccggatcatgctcaccacgcctcagcagatccagctgaacccactgcagccagtccctgtggtgaaacccgccgtgttacctggaaccaaagccctttctgctgtctcggcacaagcagctgctgcacagaaaaataaactcaaggagcctgggggaggttcgtttcgggacgatgatgacattaatgatgttgcatcgatggctggagtaaacttgtcagaagaaagtgcaagaatattagccacgaactctgaattggtgggcacgctaacgcggtcctgtaaagatgaaaccttcctcctccaagcgcctttgcagagaagaatattagaaataggtaaaaaacatggtataacggaattacatccagatgtagtaagttatgtatcacatgccacgcaacaaaggctacagaatcttgtagagaaaatatcagaaacagctcagcagaagaacttttcttacaaggatgacgacagatatgagcaggcgagtgacgtccgggcacagctcaagttttttgaacagcttgatcaaatcgaaaagcagaggaaggatgagcaggagcgggagatcctgatgagggcagcaaagtctcggtcaagacaagaagatccagaacagttaaggctgaaacagaaggcaaaggagatgcagcaacaggaactggcacaaatgagacagcgggacgccaacctcacagcactagcagcgatcgggcccaggaaaaagaggaaagtggactgtccggggccgggctcaggagcagaggggtcgggccccggctcagtggtcccaggcagctcgggtgtcggaacccccagacagttcacgcgacaaagaatcacgcgggtcaacctcagggacctcatattttgtttagaaaatgaacgtgagacaagccattcactgctgctctacaaagcattccttaagtga

SEQ ID NO: 32753 - DNA, 2415 bp, Homo Sapiens
cggatcctttcctgcttttggtttccctggcaggggttgaactgtggagtgtgtgggctcttatcacgcgatggcatccactgtggaaggaggcgacacagctctgctcccagaattccccagggggcccctcgatgcctaccgagcaagagcgtccttcagctggaaggacgtggcgctgttcacggaaggggagggcaatgtccgctttaagaaaaccatcttctcagctcttgagaatgaccctcttttcgctcgttcccctggagccgacctgtccttggagaagtatcgcgagctgaacttccttcgatgcaagcggatcttcgagtatgacttcctcagtgtcgaagcaatgttcaagagccctctgaaggtccccgccttgattcagtgcctgggcatgtatgactcttctctggctgccaagtacctcctccatagcttggtttttggatcagcagtttacagttctggttctgaaagacatctcacatatattcaaaagatcttcaggatggagatttttggatgttttgctctgaccgaattaagccacggcagtaataccaaggccattcgcacaactgcccactacgatcctgccactgaggaattcatcatacattcccctgatttcgaagctgccaagttttgggttggcaacatgggcaagacagccactcacgcggtggtgtttgctaagctgtgtgtgccaggggaccagtgccatgggctgcatccctttatcgtgcagatccgggacccgaagacccttcttcccatgcctggagtgatggttggcgacataggaaaaaaactcgggcagaacggtctagataatggtttcgccatgttccacaaggtcagagttcctcgccagagccttctgaaccggatgggagacgtcacccccgagggcacctatgtcagcccctttaaggacgtcaggcagcgctttggagcgtccctggggagcctgtcctcgggccgggtctccatcgtgagcctggccatccttaacctaaagctggccgtggccatcgctcttcgcttctcagccactcggcgtcagtttggacccacagaggaggaggaaataccagtgcttgagtatccaatgcagcaatggcgcttgcttccatatctggcagctgtctacggcttagaccatttctccaagtcgctcttcctggacctggtggagctccagcgaggacttgcatcgggagaccgcagcgccagacaggcagagcttggacgtgagatccacgccctggcatcggccagcaagcccctggcctcgtggaccacccagcaaggaattcaggaatgccgggaggcgtgtggaggacacggctatctggccatgaaccggttgggtgtccttagagatgacaacgatcccaactgcacatacgaaggtgacaacaacatcctgctgcagcagacaagcaactatttgctgggtctcctggcacaccaggtccacgatggagcttgcttccgcagtccgctgaagtcagtggactttctggacgcctatcccggcatccttgaccagaagtttgaggtctccagtgttgccgactgcttggactctgcagtcgccctggcagcatacaagtggctggtttgctacctgctccgagagacttatcaaaaattaaaccaagagaaaagatcaggaagcagtgactttgaagcaaggaacaaatgccaggtgtcccacggccgtccgttggcgctggccttcgtggagctcacggtggtccagaggttccacgagcacgtgcaccagccttccgtgccgccctcgctgcgggccgtgctggggcggctcagtgctctgtacgccctgtggtccctgaagcgccacgcggccctgctctaccgaggaggatacttctccggtgagcaggcgggagaagtgttggagagcgccgtcctggctttgtgttcccagctgaaagacgatgcagttgccctggtagacgtgatcgctcctcctgactttgttctggactcaccgattggcagagccgacggcgagctctacaaaaacctctggggcgctgtcctgcaggaaagcaaggtgttggagcgggcatcctggtggccagagttttctgtgaacaaacctgtcataggaagtctgaaatcgaagctctagtgggactggcacattcagccaagtctaatgaaacgaagggaactaatcagacgtggacctcaacttctgattccagaacacgccggagattgctgctgctttctgagcccgcacctgtgcgcctaaactgctgattggcctcaacttgcccaggcggacgggagggaggcacccggccggctggacctaatctgggatcgcggtgatttgcaccgtggaaaagaaattgcagattgatcatg

SEQ ID NO: 32754 - DNA, 6452 bp, Homo Sapiens
cgagcgagtgtcatggcggccggcgtcgagttggcaggagtaacccacggaactgaggaaagtcattagagctgagaaagaagtggcccaatctggacggtgggaattcgtgggaatgagcagaaggccctccgtagtgactgtgtcactagaggcgggcccctggtaaaattccaggccaggcctctgcgtttctaggcagaacctggagtcggccttgcctgagaacccagctttgtgttatcgtatcctgtctcgcgaaggcaggcgttcaaggatatttggtcggatcgcccggcggcgctaaacgttttcttttttccgagcggaccgggtcgttctctaaactcgccgcgatgtcgtcctggcttgggggcctcggctccggattgggccagtctctgggtcaagtcgggggcagcctggcttccctcactggccagatatcaaactttacaaaggatatgctgatggagggcacggaggaagtggaagcagaattacctgattctaggacaaaggaaattgaagccattcatgcaatcttgagatcagagaatgaaaggcttaagaaactttgtactgatctagaagagaaacatgaagcatcagagattcaaataaagcagcaatctacaagttaccgaaatcaacttcaacaaaaagaggtagaaatcagccatcttaaagccagacagattgcactccaggatcagttgctgaaactgcagtcagctgctcagtcagtaccttcaggagctggtgtaccagcaaccactgcatcatcttcattcgcttatgggattagtcatcatccttcagctttccatgacgatgacatggactttggtgatataatttcatcccaacaagaaataaaccgactctcaaatgaagtttcaagacttgagtctgaagttggccattggaggcatattgctcagacttccaaagcacaaggaacagataactctgatcaaagtgaaatatgtaaactacaaaatatcattaaggaactaaaacagaaccgaagtcaggaaattgatgaccatcaacatgaaatgtcagtactgcagaatgcacaccaacagaaattgacagaaataagtcgacgacatcgagaagaattaagtgactatgaagaacgaattgaagaacttgaaaatctgttacaacaaggtggctctggagttatagaaactgatctctctaaaatctatgagatgcaaaaaactattcaagttctacaaatagaaaaagtggagtctaccaaaaaaatggaacaacttgaggataaaataaaagatataaataaaaaattatcttctgcagaaaatgacagagatattttgaggagggaacaagaacagctaaatgtggaaaagagacaaataatggaagaatgtgaaaacttgaaattggaatgtagtaaattgcagccttctgctgtgaagcaaagtgatactatgacagaaaaggaaagaattcttgcccagagtgcatcagtggaagaagtgttcagactacaacaagcactgtctgatgccgaaaatgaaataatgagattgagtagtttaaaccaggataacagtcttgctgaagacaatctgaaacttaaaatgcgtatcgaagttttagaaaaagagaagtcattactgagtcaagaaaaggaagaacttcagatgtcacttttaaaattgaacaatgaatatgaagtaattaaaagtacagctacaagagacataagtttggattcagaattacatgacttaagacttaatttggaggcaaaggaacaagaactcaatcagagtattagtgaaaaggaaacactgatagctgagatagaagaattggacagacagaatcaagaagctacaaagcacatgattttgataaaagatcagctatcaaaacaacaaaatgaaggagatagcatcatcagtaaactgaaacaagatctaaatgatgaaaaaaagagagttcatcaacttgaagatgataaaatggacattactaaagagttagatgtacagaaagaaaagctaattcaaagtgaagtggccctaaatgatttacatttaaccaagcagaaacttgaggacaaagtagaaaatttagtagatcagctaaataaatcacaagaaagtaatgtaagcatccagaaggagaatttagaacttaaggagcatattagacaaaatgaggaggagctttctagaataaggaatgagttaatgcagtctctaaatcaagactctaatagtaattttaaggataccttacttaaagaaagagaagctgaagttagaaacttaaagcaaaatctttcagaattagaacagctcaatgaaaatttaaagaaagttgcttttgatgtcaaaatggaaaatgaaaagttagttttagcatgtgaagatgtgaggcatcagttagaagaatgtcttgctggtaacaatcagctttctctggaaaaaaacactattgtggagactctaaaaatggaaaaaggagagatagaggcagaattgtgttgggctaaaaagaggctgttggaagaagcaaacaagtatgagaaaaccattgaagaactgtcaaatgcacgtaatttgaatacctctgccttacagctggaacatgagcatttaattaaactcaatcaaaagaaagacatggaaatagcagaactcaaaaagaatattgaacaaatggatactgaccataaagaaactaaggacgttttgtcatctagtttagaagagcagaagcagttgacacaacttataaacaagaaagaaatttttattgaaaagcttaaagaaagaagttcaaagctgcaggaggaattggataaatattctcaggccttaagaaaaaatgaaattttaagacagaccatagaggaaaaagaccgaagtcttggatccatgaaagaggaaaataatcatctgcaagaagaattggaacgactcagggaagagcagagtcgaaccgcacctgtggctgaccctaaaacccttgatagtgttactgaactagcatctgaggtatctcaactgaacacgatcaaggaacatcttgaagaggaaattaaacatcatcaaaagataattgaagatcaaaaccagagtaagatgcaactacttcagtctttacaagagcaaaagaaggaaatggatgagtttagataccagcatgagcaaatgaacgccacacacacccagctctttttagagaaggatgaggaaattaagagtttgcaaaaaacaattgaacaaatcaaaacccagttgcatgaagaaagacaggacattcaaacagataactctgatatttttcaagaaacaaaagttcagagccttaatatagaaaatggaagtgaaaagcatgatttatctaaagctgaaacggaaagattagtgaaaggaataaaagagcgagaactggagattaaacttctaaatgaaaagaatatatctttaactaaacagattgatcagttgtccaaagatgaagttggtaaactaactcagattattcagcagaaagatttggagatacaagctcttcatgctagaatttcttcaacttcccatactcaagatgttgtttaccttcaacagcaactgcaggcttatgctatggaaagagaaaaggtatttgctgttttgaatgagaagactagggaaaatagccatctaaaaacagaatatcacaaaatgatggatattgttgctgccaaggaagcagctcttatcaaactgcaagatgaaaataaaaaattgtccactagatttgaaagtagtggccaagatatgtttagagaaactattcagaatttatcacgtatcattcgagaaaaagacatcgaaatagatgcactaagtcagaaatgtcagactttattggcagttttacaaacatccagcactggtaatgaggctggaggtgttaatagtcatcaatttgaggagcttctacaggaacgtgacaagttaaaacagcaagtaaagaaaatggaagagtggaagcagcaggtgatgaccacagtacaaaatatgcaacacgagtcagcccagcttcaggaagagcttcaccaacttcaagcacaggttttggttgacagtgataataattctaaattacaagtggactatactggcctgatccaaagttatgagcagaatgaaaccaaactcaaaaattttgggcaggaattagcacaagttcagcacagcattgggcagctttgcaataccaaggatcttcttttaggaaaacttgatattatttcaccccagctgtcttctgcatcattgcttactccccagtctgcagagtgtcttagagcaagtaagtctgaagtattgagtgaatcttctgaattgcttcagcaagagttagaagagctaagaaaatcactacaggaaaaagatgcaacaattagaactctccaggaaaataaccacagattgtctgattcgattgctgccacctcagagctagaaagaaaagaacacgaacaaaccgattcagaaatcaagcagctaaaggagaaacaagatgttttgcaaaagttacttaaggaaaaagacctcttaatcaaagccaaaagtgatcaactactttcttccaatgaaaatttcactaacaaagtaaatgaaaacgaacttttgaggcaggcagtaacaaacctgaaggagagaatattaattctagagatggacattggcaaactaaaaggagaaaatgaaaaaatagtggaaacatacaggggaaaggaaacagaatatcaagcgttacaagagactaacatgaagttttctatgatgctgcgagaaaaagagtttgagtgccactcaatgaaggagaaggctcttgcttttgaacagctattgaaagagaaagaacagggcaagactggagagttaaatcagcttttaaatgcagttaaatcaatgcaggagaagacagttgtgtttcaacaggagagagaccaagtcatgttggccctgaaacaaaaacaaatggaaaatactgccctacagaatgaggttcaacgtttacgtgacaaagaatttcgttcaaaccaagagctagagagattgcgtaatcatcttttagaatcagaagattcttatacccgtgaagctttggctgcagaagatagagaggctaaactaagaaagaaagtcacagtattggaggaaaagctagtttcatcctctaatgcaatggaaaatgcaagccatcaagccagtgtgcaggtagagtcattgcaagaacagttgaatgtagtttccaagcaaagggatgaaactgcgctgcagctttctgtctctcaggaacaagtaaagcagtatgctctgtcactggccaacctgcagatggtactagagcatttccaacaagaggaaaaagctatgtattctgctgaactcgaaaagcaaaaacagcttatagctgaatggaagaaaaacgcagaaaatctggaaggaaaagtgatatcattacaggaatgtttggatgaagcaaatgctgcattggattcagcatcaagacttacagaacagttagatgtaaaagaagaacaaattgaagaacttaaaagacaaaatgagctccgacaagaaatgctggatgatgtacaaaagaaattgatgagcttagcaaacagctcagaaggaaaagtagacaaagtcctaatgagaaacctcttcattggtcatttccacacaccgaaaaatcagcgtcatgaagtgttacggttaatggggagcatcctgggcgtcagaagggaggagatggagcagttgtttcatgacgatcagggcagtgttaccaggtggatgactgggtggcttggaggaggatcaaaaagtgttcccaacacacctttgagaccaaatcagcaatctgtggttaatagttctttttcagaactttttgttaaatttctagaaacagaatctcatccatccattccaccaccaaagctttctgttcatgatatgaaacctctggattcaccaggaagaagaaaaagagatacaaatgcaccagaaagttttaaagatacagcagaatccaggtctggtagaagaacagatgtaaatccgtttttggctcctcgctcggcagctgtacctcttattaacccagctggacttggacctggtgggcccgggcatcttcttctgaaacccatctcagatgttttgcccacatttacacctttgccagcgttacctgacaacagtgctggggttgtgctgaaagaccttttaaagcaatagatgattctcaagccagagacaatctagcactttaaagaaaccatgaacactatatgtatgtactttatcacaaagtggcctttggggagaaagtcatgtatttgttcgcaattatgctttctctgaatttaataaaaatattcctaatgcttttag

SEQ ID NO: 32755 - DNA, 3615 bp, Homo Sapiens
ggactgtgtgtgtctggctgtagcagacgcgaggcggcgacgaggcgccggggacccgcgcgaggggcggccgggaggcggcggcggcggccgccagaagtagcagcaggaccggcggcggcgacggcagccctgaaatgcattttcctctccagcggccatgttaaccaggaaaccttcggccgccgctcccgccgcctacccgaccggccgaggtggggacagcgccgttcgtcagcttcaggcttccccggggctcggtgcagggcccacccggagcggagtggggactggcccgccctcccccatcgccctgccgcctctccgggccagcaacgctgccgccgcagcccacacgattggcggcagtaagcacacaatgaatgatcacctgcatgtcggcagccacgctcacggacagatccaggttcaacagttgtttgaggataacagtaacaagcggacagtgctcacgacacaaccaaatgggcttacaacagtgggcaaaacgggcttgccagtggtgccagagcggcagctggacagcattcatagacggcaggggagctccacctctctaaagtccatggaaggcatggggaaggtgaaagccacccccatgacacctgaacaagcaatgaagcaatacatgcaaaaactcacagccttcgaacaccatgagattttcagctaccctgaaatatatttcttgggtctaaatgctaagaagcgccagggcatgacaggtgggcccaacaatggtggctatgatgatgaccagggatcatatgtgcaggtgccccacgatcacgtggcttacaggtatgaggtcctcaaggtcattgggaaggggagctttgggcaggtggtcaaggcctacgatcacaaagtccaccagcacgtggccctaaagatggtgcggaatgagaagcgcttccaccggcaagcagcggaggagatccgaatcctggaacacctgcggaagcaggacaaggataacacaatgaatgtcatccatatgctggagaatttcaccttccgcaaccacatctgcatgacgtttgagctgctgagcatgaacctctatgagctcatcaagaagaataaattccagggcttcagtctgcctttggttcgcaagtttgcccactcgattctgcagtgcttggatgctttgcacaaaaacagaataattcactgtgaccttaagcccgagaacattttgttaaagcagcagggtagaagcggtattaaagtaattgattttggctccagttgttacgagcatcagcgtgtctacacgtacatccagtcgcgtttttaccgggctccagaagtgatccttggggccaggtatggcatgcccattgatatgtggagcctgggctgcattttagcagagctcctgacgggttaccccctcttgcctggggaagatgaaggggaccagctggcctgtatgattgaactgttgggcatgccctcacagaaactgctggatgcatccaaacgagccaaaaattttgtgagctccaagggttatccccgttactgcactgtcacgactctctcagatggctctgtggtcctaaacggaggccgttcccggagggggaaactgaggggcccaccggagagcagagagtgggggaacgcgctgaaggggtgtgatgatccccttttccttgacttcttaaaacagtgtttagagtgggatcctgcagtgcgcatgaccccaggccaggctttgcggcacccctggctgaggaggcggttgccaaagcctcccaccggggagaaaacgtcagtgaaaaggataactgagagcaccggtgctatcacatctatatccaagttacctccaccttctagctcagcttccaaactgaggactaatttggcgcagatgacagatgccaatgggaatattcagcagaggacagtgttgccaaaacttgttagctgagctcacgtcccctgatgctggtaacctgaaagatacgacattgctgagccttactgggttgaaaaggagtagctcagacctgtttttatttgctcaataactctactcatttgtatcttttcagcacttaattttaatgtaagaaagttgttcattttgtttttataaaatacatgaggacaatgctttaagtttttatactttcagaaactttttgtgttctaaaagtacaatgagccttactgtatttagtgtggcagaataataacatcagtggcaggccactgattacttcatgactgccacgcatttacagattggtgtcaaagacattcactatgtttttatggttcatgttatatcctccccagggtgacagccccttaaggccctccttttccctccatgctccaggtccatgcacaggtgtagcatgtcctgcttccgtttttcataaattaatctgggtgttgggggtagtgggaggagaacggtcagaatcaaagtgacattctaagaaaaactgtaccttagagattttcctctagtgctcaaacaaatacaaaataagatccccaaggtttaaactgcccagttagcattctgacattctaaaagccggcaaagcagcttttagtggataaatgggaatggaaacgtgtgtgttcctccaaattttctagtatgatcggtgagctgttttgtaaagaagcctcatattacagagttgcttttgcacctaaatttagaattgtattccatgaactgttcctcccttttctctgcttttctcctctctgttcctcttttaataccacacgtctgttgcttgcatttagtttgtcttcttccttcagctgtgtatcccagactgttaatacagaaaagagacatttcagctgtgattatgaccattgtttcatattccaattaaaaaaagaacagcagcctagctacttaaggtggggatttcatagttccaaagaagatttagcagattagagtgagttcacacttttcaggtgccactgtaaggttctctcagcctgggaaactatcaactctttctttaaaaagaaagagggttgaaaatcctctggacgaacagaagtcactttggctgttcagtaaggccaatgttaacaacacgtttagaggaggaaaagttcaacctcaagttaaatggtttgacttattcttcgtatcattagaagaaccccagagatagcattcctctattttattttactttcttttggattgcactgattgtttttgtgggaatgacactttatctggcaaagtaactgagagtttggtaaaagaatattttcttctctgaataataattattttcacagtgaaaatttcagtattttatcactaatgtatgagcaatgatctatatcaatttcaaggcacgtgaaaaaaattttttagtatgtgcaatttaatatagaaagatttctgcctgtttggacaataggttttgggtagtacagattaggataagtaagcttatatatgcacagagattattgtattacctgtaaattgatttacaagtacttaaaagcgtggtccccagtgaggccaagaaagtttccggttaagttctttaataataatcctacagtttatcttaagaa

SEQ ID NO: 32756 - DNA, 1586 bp, Homo Sapiens
acaccggtcccccaggcaccttcacctaaccagagcggggatttccaccgcccctcatgccgccctttggaggaaagtgaaagtgaaaggaggaagaggaggcttcatggctgaggaggtcgcagcgccatgaagtccctgtctctgctcctcgctgtggctttgggcctggcgaccgccgtctcagcaggacccgcggtgatcgagtgttggttcgtggaggatgcgagcggaaagggcctggccaagagacccggtgcactgctgttgcgccagggaccgggggaaccgccgccccggccggacctcgaccctgagctctatctcagtgtacacgaccccgcgggcgccctccaggctgccttcaggcggtatccccggggcgcccccgcaccacactgcgagatgagccgcttcgtgcctctccccgcctctgcgaaatgggccagcggcctgacccccgcgcagaactgcccgcgggccctggatggggcttggctgatggtcagcatatccagcccagtcctcagcctctccagcctcttgcgaccacagccagagcctcagcaggagcctgttctcatcaccatggcaacagtggtactgactgttctcacccacacccctgcccctcgagtgagactgggacaagatgctctgctggacttgagctttgcctacatgccccccacctccgaggccgcctcatctctggctccgggtccccctccctttgggctagagtggcgacgccagcacctgggtaagggacatctgctcctggctgcaactcctgggctgaatggccagatgccagcagcccaagaaggggccgtggcatttgctgcttgggatgatgatgagccatggggcccatggaccggaaatgggaccttctggctgcctagagttcaaccctttcaggagggcacctatctggccaccatacacctgccatacctgcaaggacaggtcaccctggagcttgctgtgtacaaaccccccaaagtgtccctgatgccagcaacccttgcacgggccgccccaggggaggcacccccggaattgctctgccttgtgtcccacttctacccttctgggggcctggaggtggagtgggaactccggggtggcccagggggccgctctcagaaggccgaggggcagaggtggctctcggccctgcgccaccattccgatggctctgtcagcctctctgggcacttgcagccgcccccagtcaccactgagcagcatggggcacgctatgcctgtcgaattcaccatcccagcctgcctgcctcggggcgcagcgctgaggtcaccctggaggtagcaggtctttcagggccctcccttgagaacagcgtaggccttttcctgtctgcctttcttctgcttgggctcttcaaggcactgggctgggctgctgtctacctgtccacctgcaaggattcaaagaagaaagcagagtgagggcactcactgccatcctgtggaagccaccatcatctctggcccaagcttctgtagtagctccctaaaataataccctatcatctgctcctaaaaaaaaaaaaaaaaaa

SEQ ID NO: 32757 - DNA, 6267 bp, Homo Sapiens; identical to SEQ ID NO: 29491

SEQ ID NO: 32758 - DNA, 6488 bp, Homo Sapiens
gggaaatccagtggccgggcagtgggcaggtatggctgagggcgtgtgagcgccgagcgctaagggccgccgccaccatgccagggagcgcaggcgccgcccggctctgcttgctggcgtttgccctgcagcccctccggccgcgggcggcgcgggagcctggatggacaagaggaagtgaggaaggcagccccaagctgcagcatgaacttatcatacctcagtggaagacttcagaaagccccgtgagagaaaagcatccactcaaagctgagctcagggtaatggctgaggggcgagaactgatcctggacctggagaagaatgagcaactttttgctccttcctacacagaaacccattatacttcaagtggtaaccctcaaaccaccacacggaaattggaggatcactgcttttaccacggcacggtgagggagacagaactgtccagcgtcacgctcagcacttgccgaggaattagaggactgattacggtgagcagcaacctcagctacgtcatcgagcccctccctgacagcaagggccaacaccttatttacagatctgaacatctcaagccgcccccgggaaactgtgggttcgagcactccaagcccaccaccagggactgggctcttcagtttacacaacagaccaagaagcgacctcgcaggatgaaaagggaagatttaaactccatgaagtatgtggagctttacctcgtggctgattatttagagtttcagaagaatcgacgagaccaggacgccaccaaacacaagctcatagagatcgccaactatgttgataagttttaccgatccttgaacatccggattgctctcgtgggcttggaagtgtggacccacgggaacatgtgtgaagtttcagagaatccatattctaccctctggtcctttctcagttggaggcgcaagctgcttgcccagaagtaccatgacaacgcccaattaatcacgggcatgtccttccacggcaccaccatcggcctggcccccctcatggccatgtgctctgtgtaccagtctggaggagtcaacatggaccactccgagaatgccattggcgtggctgccaccatggcccacgagatgggccacaactttggcatgacccatgattctgcagattgctgctcggccagtgcggctgatggtgggtgcatcatggcagctgccactgggcacccctttcccaaagtgttcaatggatgcaacaggagggagctggacaggtatctgcagtcaggtggtggaatgtgtctctccaacatgccagacaccaggatgttgtatggaggccggaggtgtgggaacgggtatctggaagatggggaagagtgtgactgtggagaagaagaggaatgtaacaacccctgctgcaatgcctctaattgtaccctgaggccgggggcggagtgtgctcacggctcctgctgccaccagtgtaagctgttggctcctgggaccctgtgccgcgagcaggccaggcagtgtgacctcccggagttctgtacgggcaagtctccccactgccctaccaacttctaccagatggatggtaccccctgtgagggcggccaggcctactgctacaacggcatgtgcctcacctaccaggagcagtgccagcagctgtggggacccggagcccgacctgcccctgacctctgcttcgagaaggtgaatgtggcaggagacacctttggaaactgtggaaaggacatgaatggtgaacacaggaagtgcaacatgagagatgcgaagtgtgggaagatccagtgtcagagctctgaggcccggcccctggagtccaacgcggtgcccattgacaccactatcatcatgaatgggaggcagatccagtgccggggcacccacgtctaccgaggtcctgaggaggagggtgacatgctggacccagggctggtgatgactggaaccaagtgtggctacaaccatatttgctttgaggggcagtgcaggaacacctccttctttgaaactgaaggctgtgggaagaagtgcaatggccatggggtctgtaacaacaaccagaactgccactgcctgccgggctgggccccgcccttctgcaacacaccgggccacgggggcagtatcgacagtgggcctatgccccctgagagtgtgggtcctgtggtagctggagtgttggtggccatcttggtgctggcggtcctcatgctgatgtactactgctgcagacagaacaacaaactaggccaactcaagccctcagctctcccttccaagctgaggcaacagttcagttgtcccttcagggtttctcagaacagcgggactggtcatgccaacccaactttcaagctgcagacgccccagggcaagcgaaaggtgatcaacactccggaaatcctgcggaagccctcccagcctcctccccggccccctccagattatctgcgtggtgggtccccacctgcaccactgccagctcacctgagcagggctgctaggaactccccagggcccgggtctcaaatagagaggacggagtcgtccaggaggcctcctccaagccggccaattccccccgcaccaaattgcatcgtttcccaggacttctccaggcctcggccgccccagaaggcactcccggcaaacccagtgccaggccgcaggagcctccccaggccaggaggtgcatccccactgcggccccctggtgctggccctcagcagtcccggcctctggcagcacttgccccaaagtttccagaatacagatcacagagggctggagggatgattagctcgaaaatctagacctgtccaaggggcttctccctttccttgagctctctggacactgcagaggacccatgaccatggaaccctgaagaagcatgtctggccgcctctgagctcctcccaccctcctccaggaacctccacatctccaaaaatctccctgttgactcagtgcctcctcggcttccttggaagcccagagggactatgatctgatggcctctaggtgttgttttgtgcaatatacagccccaggtagggaggggagagtatgaggagggtgactggcagcttctcctccagactcctagccccgaggtgctgatggagatgctcaaggccagcaagcccctcaggccagcacttcgcttgcagaagccatccattcactcctggggtgcagggcacgcaagagagcttcccattgcttctgctctcctcagaggtcccgggctggatggaggtggtacttacccaccccttttagcttttagggattaaggaagggtcaagccagccactgctgtggccctgcccagggcttggttgagggaacggcttctggctgtatggctgcatgtgacaagccacgtcccctcccacctctccccaaacccctgcatccctgtattcacacgggtcactctgactcagacaggtactattcgtaggcagtgtagacagcaggaggagcaccgggcttgggcttcctctgagccgtgatgccaaaggttgcgactcctgactctggataatttttagttgctctttgttttctctgccgcactttcctggtgccccacgcttttctctcttccttcccctctcattctccctctaatgtgtggtgctttggtgagcaaaccctcagcagtcctgaccttcgggtgaccaggtgcttgtgacctacaagtcagagtccactctcacagtcggccactggatttccctcactggctctcaggagtgtgaccagagtagactcggggcatggccattggggtcatatgtttatttttcattgtgttttgtgacctcagcagggtgggggtcttcctccttactctaagctaaatctaggtgaggtttccccttagggagcccagctatttacaaagtacacacgagggagcaggctggtcattgacttcgggctggaccgttgccctctgagcagagaacagacccattttctgggagctgcccgagatcactggagaaggcagccagcagcagctgcactggaacagtcagagcagggagcctcttcctcaacccagctttttgtcattcacttccttttgttctctctctggtcactgcccttacctgaccctcacagaaagagagctctgagcaggtgagggggtctgcggtggctcctgtcttccctgcagcagggaaggagggccgtgtggtgctttgctagataggacggtttttgcaaagcacctggagatgtttgctgggagatagactcccactccacaaaggtgctgggtggctctccggacaggagctggcctgactctcactcctctgaggctttcctggggcctcctcccatcctgccatgagcaattgtttgctcttgaaaacctcactgcaaggctgaagctgacttctgattcaccaccccagggcctccttatagttctctgcacacaataggtgcttcttggatgttcttgggtttggaaataagtggaaaatacgggatgtacccctgggggaaaagcctgggttgggtttagaaagatctcaggaaaatgagtttctcttccctcagggtggctgtgatacaggttccccatgtccttgccgtgggtcatccttgctgtgggtcatccttgctgtggagatccattccccacctttcctgtggcccaaccttttatttaaatgtgctaccctctgcctcaaggcttggttcctggaaagtaaaggtgaaaacatcccctttcacccctctgcaaaacaaacaagcaacatcctcaaaacccaaccccatgcctcacagagcttcctgtggcttctccagcctttctccctcacatcaggaggtagatagctctgaaatgacagcgccacagccatagtgactgcatgagccatctgaacctgcagtccaccctccctggaaccacaccagaaagagacctgggttgtcgttttcttgctttttgttttgttttgttttattattttcatatcacctccatcccataaagttgtactgtgaactggaagatggtggaatgttttggaatttgatagactttcggcaaccagttctactaatgcttcactcctggctctgttcagggaagctgcccaggaagaagactggccattatgcatccccttttctttccagtgcccagtatgctgtttttgaggtgtcaaatacaaataaatctgggcttagggaaggagagaccttattccaaagcatgattgcagaaggggaaagggaatattgcaaaagggagaggaaggggccttatgggaatagtgaaaaggctcagaccgaccgatggcaagatctgcaagcgtctcaaagcccaggcagaaaaggacttttcttttattggaagaagtaaacatggctagaaagaaccacgttcagggaatgacgttgtgcccagggtttttttttttttttttttttgtctccaggggaggggctgtttgctggctcaggctgaggatggcccaaagtccagggtctggtggggaggagggaagcttaactcaagtttgggttagtgagttagcaagctctttgtgcagatggggatgtaggtaaatctttttaaaagtgaaattaacctcctgccaattttacaacccaagaatttttttttaagggccttggagccatctctaaaacaaacctcaagggatttagtgccctgtctccctgtctctagaagccttagcctgggcacctggctcaatcttgtaactgcctgctagccatagattcctttcagccttgctgacttctccctataagagtaaagcctttttctgccccagctctgagacacttgcagatcttaaggtctgagacttgctgattttctggttggagtgtttttttgtattgccatagtcccttccccctgaagcaatagcccctccccacctcctgcaatacgcctttccaatctttattggaagtctctccctgcctacttcctaatttattcttatttgacagagggtatggaagacttgcaatttgaaaactggggaccagttccaaagtcagtaattgtgttaaccacgtgtataacagctctgctggacacccaagaaagccatgggaacaccaactggaaaggtccccttccccaggggagcctgcgaaggagaggttctgtagaatccaagcccacatttccaaagtcacccccaacgcgtcctctcacaccgtccactgtgcgtttgtatgtgtctgggatccagggcaatgtgaattttctttttatttgggagattgttcacggaaaacagatcttcttctctcttgtccacctattaattgtttacaatatttgtacatctatgcaaaatacttgaatgggccatggtgccttttttccttgttagtatttaattaaaaatgaattgtttgtcatttgcaatgttaaaaaaaaaaaa

SEQ ID NO: 32759 - DNA, 5111 bp, Homo Sapiens
cgattttgctctaaactgctgcatctgtctatgccaaactaatcaataccgattgcaccaccaaactccattgcaaattcagctgtgaggagattccctttcagacaactttgctgaaagcagcttggaaattcggtgtcgaagggtctgccacgttttcatgcttgcattttgggctccaaattggcactgggaaggggttactgagagcacaaggctgataccaggccctacttttaaacgttcatctacttacaatcctagtatttctctaaaaaccaaaacctctttgaattaacagtttcatgctgtgaatttctagtgggagatcttttccttgatattgacgacacaattttccatgtacttttaaagcagggagtggggaaaagtattttgaggggacattttcatcatcagttcagctttttttttttggttgttgctcttttttgggggggttgggtttgttggtttcactgaaacatttaactacctgtaaaatctaaacatggctgttagtgtcacaccaattcgggacacaaaatggctaacactggaagtatgtagagagttccagagggggacttgctcacggccagacacggaatgtaaatttgcacatccttcgaaaagctgccaagttgaaaatggacgagtaatcgcctgctttgattcattgaaaggccgttgctccagggagaactgcaaatatcttcatccacccccacatttaaaaacgcagttggagataaatggacgcaataacttgattcagcagaagaacatggccatgttggcccagcaaatgcaactagccaatgccatgatgcctggtgccccattacaacccgtgccaatgttttcagttgcaccaagcttagccaccaatgcatcagcagccgcctttaatccctatctgggacctgtttctccaagcctggtcccggcagagatcttgccgactgcaccaatgttggttacagggaatccgggtgtccctgtacctgcagctgctgcagctgctgcacagaaattaatgcgaacagacagacttgaggtatgtcgagagtaccaacgtggcaattgcaaccgaggagaaaatgattgtcggtttgctcatcctgctgacagcacaatgattgacaccaatgacaacacagtcactgtgtgtatggattacatcaaagggagatgctctcgggaaaagtgcaaatactttcatccccctgcacatttgcaagccaagatcaaggctgcccaataccaggtcaaccaggctgcagctgcacaggctgcagccaccgcagctgccatgactcagtcggctgtcaaatcactgaagcgacccctcgaggcaacctttgacctgggaattcctcaagctgtacttcccccattaccaaagaggcctgctcttgaaaaaaccaacggtgccaccgcagtctttaacactggtattttccaataccaacaggctctagccaacatgcagttacaacagcatacagcatttctcccaccagttcccatggtgcacggtgctacgccagccactgtgtccgcagcaacaacatctgccacaagtgttcccttcgctgcaacagccacagccaaccagatacccataatatctgccgaacatctgactagccacaagtatgttacccagatgtagaattttcatcactaaacaatcatgctaaagaggaaaggacagtgtgcttggttagagtaaaggacgaggtcattagccatattgtatatatcgtcaagcaacacacacaaaagttcctcagccacaagacatccacatattgcatgttaaccagaagaaaagacaacattttccggaaatccactgcacactgttgcctatacactttgtacatttaattgatatttgtgctgaggtgatattcctgtctaaaagaacaacattgtctttcttttctagcacagagttatgcattcaaagatgcatacctagttagtttcctatatattcatgccatcttgaaaagacagactatggtgtaaccatgattctattatgtattggtacgtctgtagaccaagatataattttttaaaaataagtttatttctttcaaggtttacaaataacaaaggtgcaccttgtatttaaaattgccattatagatgagagcgtgcatgcacagtcatttttgtttaagagtaatatttttaatgtaatagattgtaagacgtggtgagggagggatctgacagagatgaatgtgccaagcaaaaccacaactgtgtatattttaaagcacatcatggctttaagtaccatgttgttaaggattctcatgaagtgccatagactgtacatcaaattagagtattatttcttcagtgttattgttttcagagccacattttgttgcatatttgctagtactaatcagtcaaagggcaccattcttttttttttttttgaaaccaaagctgtctcagaaatggccaatttaactttacagtaacaatagacagcacaacacaaactctctcaatacagataaactcacacatactggagatatatatataatagatatatataaaattattttaatgcattgtagtgtaatatttatgcatactatactgtataacatgttattcaaaagggattgccatttctgagacacagtaacaaaaaaatgaggaaattattttgcttctatttatagcctctgtcaaaagtcaaaagactataaatgctttgcaaaaatggtttcacgtttgcttaaatgcttcatcacagtcacattcaaaatagtgactctaaacaaagaagaaagcagcactgtcatcagatgcatgataaaccaaaatatgaaaatgggaaatgtttaattaacctagtaattgggtgggttaagtacatgggtgaattttatatgtgatttttgttttgttttgttttgttcagattaactgcttatagccttagaaagccttttacaaaattaaaaaaaaaatagatgtgcattcagtttttaagaatggaatcatccaaaggaattcctttttttgaggtttggatgttgcagctagtaaaggatatttttgctctgttcagcagttctaaaaattgctgaagtaggggccaggtcactggtagttatagtatggaatgggagaagtgaaagttcagttatagaactttccatacttccaagtttactgcaagtttttatgcttgagagagatgctttctaatataagactgatgtgttgattttactgattgtactgtacatctattaaagccttagattattacattacgggttggaacccataccaatgtaatttcaatcgtgttaagaaagtaatggtgacttcacatgttattgtagttagttacattatagaatattacttatttttcttgttaaaatgtagtttttcatttcctacatttattagattttcattttctattaacaattgaataccatttcagtttatagacttgttttattagattttaccaatgaatttttcaaaatacaaaaaaaagtagtttttccttcataacatactcagttttgaattacatgtagtgtcacatgaatattcgtattgttaactaaatgatttatattttactgatttaatattacagtgtaagaatgtcagtcattgttagttcttgtctagttttcattaaaagaacaaagatcttttatatggatatcttataaatatataatcattgctaagtaagaagttaagttgttgctatcgcaacaatcctggcagacaattgagtaatattttgatgatttattttgtttgtaattagttattataagaagatctagatcctagatattagaataaaatttattttctactgtatccatttcaaatgttaaaatattgtttaatatttttgaaatccctgagtatcaggccttgttataaataagctgcataatcaataaatagaacaagggactttttgttgataatccaaatactcaaagtttacgtaatgaaaattatagcgtgtgtgcaaactcttgagggttgattatgctgcaatttagcatgttggaacgtctagggagaaggttgactttttgcacttctgtatatagtcaaaagagagaaacctgtataatagtaagatcttattttgaataaaaacgtctataattacaaggagttttgttaaggctaatacaatgacagactgagcaaaattgcttgcaaaagtggcacagagttagcactccataccccttcaaacatgttgctttgctttcttgtggacagcttgtagtttgccaggattttttcagctggaaagatacgccatcctttcaaaccctcatgactgacaaaaactccatggggccaaatctgcctgaagatcattaccaaaaatagcaggtacttctaccattaaggtgaaatcatggatcagatattccttacatttttcaaaactactgcatgtttaaaacttcaacaaaaaaagagagaaagaactatactaagaacatatattattcagatcagtttctgccaatttcagtggtttattgttcacaaaaaaatcttcaaaacaagtattgactttcacaaaatttaaatcataaacaggcaaaccaaacagcacactgtagctatagttgttatgtgattgttttttaattgctgtaggatcctgttctttcagcaggtgaaaaataaaacgcagttcaaatttcatggttttaattttcaactcagaagcactcaaaaatgcaaaatgtgataatgggcacttgtttaaaagaattagtgtatccagccttcactccagctggttaaaaatgttgcacttatcagcaaccctaccactttcatctgctgaaaggacaaatgtgcttggttttactattatgtaatcacaacttactttctgcttgtagttgcttaaaattatgtattttgtcttgggctgcaatttgttttatgcttattttattattactgcagtagttgaccttgctgtatggaaaaataaagtgaaattgccctaataaaacttctctttcttaagtaaaaaaaaaaaaaaaaaaaaa

SEQ ID NO: 32760 - DNA, 1718 bp, Homo Sapiens
ccaaaagatcgcagtggactgtgtgattgacctgacaagagctgagggagaaaatagacctattgccactcttgacttaactttagaacctgtcactccttcccagagggagccaaccagtcttcagacatgtgccagcctctctggcaaagcggtgatggaagggcaggtggacagaagctgtcagcctacagcacggagactcattaacagtgatcctgtagatttggacctagtggaagaaaacacctttgtaggtcccccacccgctacatccatcagtggaggctctgtttatccaacagagcctaattgtagctcagccacattcacaggtaacctcagcttcttggcaagtctacagctgtcttcagatgttagatccctctccccaacaagcaataatagtagcagcagcagcagcaatcaaaaagtacccttgccatgcccacagcaagatgtgtctcgcccaccacaagccttgccttgcccactgagagcctcaccttgtccaccacgagccttgtcatgcccatcacaaaccatgcagtgcaaactaccagctctaactcacccacctcaagaagtgccatgccctcggcagaatatcccaagcccacctcaagactcgttatggcatcctcaacactcaccaagcccacctcaagactctctgggcctacctcaagatgtgccaggcccgcctcaaagcatattacatccacaagatgtggcatacctgcaagacatgccacagtcaccaggagatgtgccacggtcaccaggaaccatgccaccatcaccagatgtgccacagtcaacaggagacatgctagggtcaccaggagatgtgccacagtcaccaagttatgtttcaccgtcaccagatgcaccacagtcaccagggggcatgccacacttaccgggagatgtgttacattcacctggagacatgccacactcatcaggggacgtgacacactcacctagagacatccctcacttaccaggagacaggcctgactttacccagaatgatgtacagaaccgtgacatgcctatggatatctcagctgcgtcccctccaagctgctctcccagcccacagtctgaaactcccttagagaaagttccttggctctctgtcatggaaaccccagccagaaaagaaatatcactgtcagagcctgccaaacctgggtctgcccacgtacaatcacgaacaccacaaggtgggttgtacaacagaccatgcctgcatagactgaagtacttcttacgacctccggttcatcatctgttctttcagacgctaataccggataaagacacgagagaacaagggtcaaaaattagaacccatccctcatcgaagactaagaatggtaacaaataccattgaagagaattttcccctggggactgtgcagtttttgatggactttgtgtcaccccagcattacccaccaagagaaatcgtggctcacatcatccagaaaatcttgctcagtggctctgagactgtggatgtcctaaaggaggcctacatgcttctcatgaaaattcaacggctacatccagccaatgccaagacagtggagtgggactggaaactgctcacctatgtcatggaggaagaggtaacaacaattataagattatatcttctgtaggggaagttttaactataaagaaaagtgataccaggtgccatggcg

SEQ ID NO: 32761 - DNA, 3054 bp, Homo Sapiens
cggcaaaaagacaacatacttagaaataaagttaaataaggaggtaaaagactcgtacactgaaaactataaaacattggtgaaagaaattaaagaaatgaataagtgaaagatggcccatgttcatggattagaagaactaatattgttaaagtgtccatactacccaaaatgatctacaaattagatgcaatccctatcaaaactccaatggcatatttacagggttagaaaaaacaattataaaattcacatgaacccacaaaagagctcaaatggccaaatcaattgtgagaaaaaaagaacaaagctggaggcatcacagttcttaatttcaaaatatattagaaagctatggcaatgagaacagtatgctactggcataaaaatagacatgtggaccgatggatcagaagagagaccccagtaggaaatttgcacatatacagtgatctgatctgcaacaagggtgccaagaataaacagtgctacaagcagaacgggcaactacagctcttttgtttaacgaaagagagaaaatgaaagaaagggaaaatttcagaagactaggacccatatgaacaaggagggtaactcgaagacaagcagacagatggacactttggatactgtgaaaagcaatcgcaggaggcagactgttgggggatgtgcgcatgttcgatagcatcttttttgctgaagtgatggcgtgccaaaagtattttcagtgggcataatcctcttcacataaatggcctgaccaaggaagaatgactacaagagagacaatgtgactgaattagaaaatgattgccaaagaatagtattaaggagaagaaaacatttttggtcaccaatctctcatataccactactggatatttacaacatgcttcagtggaggagaagacactgctgctttgcaaagatgacctggaatgccaaaaggtctctgttccgcactcatcttattggagtactttctctagtgtttctttttgctatgtttttgtttttcaatcatcatgactggctgccaggcagagctggattcaaagaaaaccctgtgacatacactttccgaggatttcggtcaacaaaaagtgagacaaaccacagctcccttcggaacatttggaaagaaacagtccctcaaaccctgaggcctcaaacagcaactaactctaataacacagacctgtcaccacaaggagttacaggcctggagaatacacttagtgccaatggaagtatttacaatgaaaaaggtactggacatccaaattcttaccatttcaaatatattattaatgagcctgaaaaatgccaagagaaaagtccttttttaatactactaatagctgcagagcctggacaaatagaagctagaagagctattcggcaaacttggggcaatgaaagtctagcacctggtattcaaatcacaagaatatttttgttgggcttaagtattaagctaaatggctaccttcaacgtgcaatactggaagaaagcagacaatatcatgatataattcaacaggaatacttagatacgtactataatttgaccattaaaacactaatgggcatgaactgggttgcaacatactgtccacatattccatatgttatgaaaactgacagtgacatgtttgtcaacactgaatatttaatcaataagttactgaagccagatctgcctcccagacataactatttcactggttacctaatgcgaggatatgcacccaatcgaaacaaagatagcaagtggtacatgccaccagacctctacccaagtgagcgttatcctgtcttctgttctggaactggttatgttttttctggagatctggcagaaaagatttttaaagtttctttaggtatccgccgtttgcacttggaagatgtatatgtagggatctgtcttgccaagttgagaattgatcctgtaccccctcccaatgagtttgtgttcaatcactggcgagtctcttattcgagctgtaaatacagccacctaattacctctcatcagttccagcctagtgaactgataaaatactggaaccatttacaacaaaataagcacaatgcctgtgccaacgcagcaaaagaaaaggcaggcaggtatcgccaccgtaaactacattagaaaagacaattttttttcaaatgtgcaatttgtaaatattgctaaaagcatgtatagttagaactgattacatccgtaggacaagttttagttaaaactcatcacataaagaaattcaagaagtatttttttaatttctgaagaagttaattcttaaaactataacattatataacaaaaaggtttcccaaaacaatctatttaaaaaactgtataaggagattctgtgtattaacatgcaataacaagcatgcataaatcaatggttcaagtcttctgttaggggccaataaaatgtatctgcatatgttttccacataaattttaattcaagaaatgacagtcaaaagatccttcattttagattaagcttttcattttaatatataatttaatgtaaataaaacatcactatcaattttaaggaaaccttttaattgtgcaaaggataaattttttgacctattttagggttctaaatgcaataagatttagttgagttattccacaaacacattataaagttcagatgtttcatcaatgcagttctcacgaaagtatttactttttaaaaataactgagatattattttaaatttcttttattaatactttcttttattaatatatgggggaaaattattttgacatgacgtggtaaaatgtgaaaaactaatgtgtctcaggctcaagtttttatagttattaaatgtttcaaaatagacaagttttgtttcctcattgatgttaagaaccaaactcctatttcaatgagttattggattagaccaattactgcactcttaaacagcaccaccatttaatttcatgtatatctaacttcgaatatatctgtaaagataatcgaagcaaaagtaatcacttaaaggcacccg

SEQ ID NO: 32762 - DNA, 2643 bp, Homo Sapiens
ccgcacttccagctctctgcgcagcccgccgcgcagcccgccgccccagccatggcgaagcccctgacggaccaggagaagcggcggcagatcagcatccgcggcatcgtgggcgtggagaacgtggcagagctgaagaagagtttcaaccggcacctgcacttcacgctggtcaaggaccgcaacgtggccaccacccgcgactactacttcgcgctggcgcacacggtgcgcgaccacctggtggggcgctggatccgcacgcagcagcactactacgacaagtgccccaagagggtatattacctctctctggaattttacatgggccgaacattacagaacaccatgatcaacctcggtctgcaaaatgcctgtgatgaggccatttaccagcttggattggatatagaagagttagaagaaattgaagaagatgctggacttggcaatggtggtcttgggagacttgctgcctgcttcttggattccatggcaaccctgggacttgcagcctatggatacggcattcggtatgaatatgggattttcaatcagaagatccgagatggatggcaggtagaagaagcagatgattggctcagatatggaaacccttgggagaagtcccgcccagaattcatgctgcctgtgcacttctatggaaaagtagaacacaccaacaccgggaccaagtggattgacactcaagtggtcctggctctgccatatgacacccccgtgcccggctacatgaataacactgtcaacaccatgcgcctctggtctgctcgggcaccaaatgactttaacctcagagactttaatgttggagactacattcaggctgtgctggaccgaaacctggccgagaacatctcccgggtcctctatcccaatgacaatttttttgaagggaaggagctaagattgaagcaggaatactttgtggtggctgcaaccttgcaagatatcatccgccgtttcaaagcctccaagtttggctccacccgtggtgcaggaactgtgtttgatgccttcccggatcaggtggccatccagctgaatgatactcaccctgcactcgcgatccctgagctgatgaggatttttgtggatattgaaaaactgccctggtccaaggcatgggagctcacccagaagaccttcgcctacaccaaccacacagtgctcccggaagccctggagcgctggcccgtggacctggtggagaagctgctccctcgacatttggaaatcatttatgagataaatcagaagcatttagatagaattgtggccttgtttcctaaagatgtggaccgtctgagaaggatgtctctgatagaagaggaaggaagcaaaaggatcaacatggcccatctctgcattgtcggttcccatgctgtgaatggcgtggctaaaatccactcagacatcgtgaagactaaagtattcaaggacttcagtgagctagaacctgacaagtttcagaataaaaccaatgggatcactccaaggcgctggctcctactctgcaacccaggacttgcagagctcatagcagagaaaattggagaagactatgtgaaagacctgagccagctgacgaagctccacagcttcctgggtgatgatgtcttcctccgggaactcgccaaggtgaagcaggagaataagctgaagttttctcagttcctggagacggagtacaaagtgaagatcaacccatcctccatgtttgatgtccaggtgaagaggatacatgagtacaagcgacagctcttgaactgtctgcatgtgatcacgatgtacaaccgcattaagaaagaccctaagaagttattcgtgccaaggacagttatcattggtggtaaagctgccccaggatatcacatggccaaaatgatcataaagctgatcacttcagtggcagatgtggtgaacaatgaccctatggttggaagcaagttgaaagtcatcttcttggagaactacagagtatctcttgctgaaaaagtcattccagccacagatctgtcagagcagatttccactgcaggcaccgaagcctcggggacaggcaatatgaagttcatgctaaatggggccctaactatcgggaccatggatggggccaatgtggaaatggcagaagaagctggggaagagaacctgttcatctttggcatgaggatagatgatgtggctgctttggacaagaaagggtacgaggcaaaagaatactatgaggcacttccagagctgaagctggtcattgatcaaattgacaatggctttttttctcccaagcagcctgacctcttcaaagatatcatcaacatgctattttatcatgacaggtttaaagtctttgcagactacgaagcctatgtcaagtgtcaagataaagtgagtcagctgtacatgaatccaaaggcctggaacacaatggtactcaaaaacatagctgcctcggggaaattctccagtgaccgaacaattaaagaatatgcccaaaacatctggaacgtggaaccttcagatctaaagatttctctatccaatgaatctaacaaagtcaatggaaattgaactctacaatgtctctagaaaacatagcttcttactgaacttgaacat

SEQ ID NO: 32763 - DNA, 3015 bp, Homo Sapiens
cccttatggcgattgggcggctgcagagaccaggactcagttcccctgccctagtctgagcctagtgggtgggactcagctcagagtcagttttccagaagcaggtttcagtgcagagttttcctacacttttcctgcgctagagcagcgagcagcctggaacagacccaggcggaggacacctgtgggggagggagcgcctggaggagcttagagaccccagccgggcgtgatctcaccatgtgcggatttgcgaggcgcgccctggagctgctagagatccggaagcacagccccgaggtgtgcgaagccaccaagactgcggctcttggagaaagcgtgagcagggggccaccgcggtctccgcgcctgtctgcaccctgtcgcctgagctgcctgacagtgacaatgacatcccagttaccagtgtccttgaattgatagtggcttctgtttgtcagtctcatataagaactacagctcatcaggaggagatcgcagcagggtaagagacaccaacaccatgttctgcacgaagctcaaggatctcaagatcacaggagagtgtcctttctccttactggcaccaggtcaagttcctaacgagtcttcagaggaggcagcaggaagctcagagagctgcaaagcaaccgtgcccatctgtcaagacattcctgagaagaacatacaagaaagtcttcctcaaagaaaaaccagtcggagccgagtctatcttcacactttggcagagagtatttgcaaactgattttcccagagtttgaacggctgaatgttgcacttcagagaacattggcaaagcacaaaataaaagaaagcaggaaatctttggaaagagaagactttgaaaaaacaattgcagagcaagcagttgcagcaggagttccagtggaggttatcaaagaatctcttggtgaagaggtttttaaaatatgttacgaggaagatgaaaacatccttggggtggttggaggcacccttaaagattttttaaacagcttcagtacccttctgaaacagagcagccattgccaagaagcaggaaaaaggggcaggcttgaggacgcctccattctatgcctggataaggaggatgattttctacatgtttactacttcttccctaagagaaccacctccctgattcttcccggcatcataaaggcagctgctcacgtattatatgaaacggaagtggaagtgtcgttaatgcctccctgcttccataatgattgcagcgagtttgtgaatcagccctacttgttgtactccgttcacatgaaaagcaccaagccatccctgtcccccagcaaaccccagtcctcgctggtgattcccacatcgctattctgcaagacatttccattccatttcatgtttgacaaagatatgacaattctgcaatttggcaatggcatcagaaggctgatgaacaggagagactttcaaggaaagcctaattttgaagaatactttgaaattctgactccaaaaatcaaccagacgtttagcgggatcatgactatgttgaatatgcagtttgttgtacgagtgaggagatgggacaactctgtgaagaaatcttcaagggttatggacctcaaaggccaaatgatctacattgttgaatccagtgcaatcttgtttttggggtcaccctgtgtggacagattagaagattttacaggacgagggctctacctctcagacatcccaattcacaatgcactgagggatgtggtcttaataggggaacaagcccgagctcaagatggcctgaagaagaggctggggaagctgaaggctacccttgagcaagcccaccaagccctggaggaggagaagaaaaagacagtagaccttctgtgctccatatttccctgtgaggttgctcagcagctgtggcaagggcaagttgtgcaagccaagaagttcagtaatgtcaccatgctcttctcagacatcgttgggttcactgccatctgctcccagtgctcaccgctgcaggtcatcaccatgctcaatgcactgtacactcgcttcgaccagcagtgtggagagctggatgtctacaaggtggagaccattggcgatgcctattgtgtagctgggggattacacaaagagagtgatactcatgctgttcagatagcgctgatggccctgaagatgatggagctctctgatgaagttatgtctccccatggagaacctatcaagatgcgaattggactgcactctggatcagtttttgctggcgtcgttggagttaaaatgccccgttactgtctttttggaaacaatgtcactctggctaacaaatttgagtcctgcagtgtaccacgaaaaatcaatgtcagcccaacaacttacagattactcaaagactgtcctggtttcgtgtttacccctcgatcaagggaggaacttccaccaaacttccctagtgaaatccccggaatctgccattttctggatgcttaccaacaaggaacaaactcaaaaccatgcttccaaaagaaagatgtggaagatggcaatgccaattttttaggcaaagcatcaggaatagattagcaacctatatacctatttataagtctttggggtttgactcattgaagatgtgtagagcctctgaaagcactttagggattgtagatggctaacaagcagtattaaaatttcaggagccaagtcacaatctttctcctgtttaacatgacaaaatgtactcacttcagtacttcagctcttcaagaaaaaaaaaaaaaccttaaaaagctacttttgtgggagtatttctattatataaccagcacttactacctgtactcaaaattcagcaccttgtacatatatcagataattgtagtcaattgtacaaactgatggagtcacctgcaatctcatatcctggtggaatgccatggttattaaagtgtgtttgtgatagtgtcgtcaaaaaaaaaaaaaaaaaaaaaaaaaaaaaaaaa

SEQ ID NO: 32764 - DNA, 3739 bp, Homo Sapiens
gaattccgcggctgcactggcggcagctggaggtgtaatagtgcgggtagtgggtttggagaagttccgaggcggcggtggcgccggtcaggacaaggatagcggaaccgggccctgggcttgtcgctcaccatgccgacagtagaggagctttaccgcaattatggcatcctggccgatgccacggagcaagtgggccagcataaagatgcctatcaagtgatattggatggtgtgaaaggtggtactaaggaaaagcgattagcagctcaatttattccgaaattctttaagcattttccagaattggctgattctgctatcaatgcacagttagacctctgtgaggatgaagatgtatctattcgacgtcaagcaattaaagaactgcctcaatttgccactggagaaaatcttcctcgagtggcagatatactaacgcaacttttgcagacagatgactctgcagaatttaacctagtgaacaatgccctattaagtatatttaaaatggatgcaaaagggactttaggtgggttgttcagccaaatacttcaaggagaggacattgttagagaacgagcaattaaattcctttctacaaaacttaagactttaccagatgaagtcttaacaaaggaagtggaagagcttatactaactgaatccaaaaaggtcctagaagatgtgactggtgaagaatttgttctatttatgaagatactgtctgggttaaaaagcttacagacagtgagtggaagacagcaacttgtagagttggtggctgaacaggccgacctagaacagaccttcaatccctcggatcctgactgtgtggacaggctcttacagtgcactcggcaggcagtacccctcttctctaaaaatgtccattccacaaggtttgtgacatatttctgtgagcaggttctccctaacctcggtaccttgactaccccagtggaaggtcttgatatacagttggaggtattgaaattgttggcggagatgagttcattttgtggtgacatggaaaaactagaaacaaatttaaggaaactatttgataagttattggaatacatgcccctccctccagaagaggcagaaaatggagagaatgctggtaatgaagaacccaagctacagttcagttatgtggaatgtttgttgtacagttttcaccagttgggccgaaaacttccagatttcttaacagccaaactgaatgcagaaaagctcaaagatttcaaaatcaggctgcagtactttgcacggggcctgcaagtttatatcagacaacttcgcttagctctccagggtaaaacgggtgaggccttaaaaacagaagagaacaagattaaagtcgttgcattgaaaataacaaacaatatcaatgttttaatcaaggatctcttccacattcctccttcttataagagcacagtaacactatcctggaaacctgtacaaaaggttgagattgggcaaaagagagccagtgaagatacaacttcaggttcaccacccaagaaatcttcagcaggaccaaaaagagatgccaggcagatttataaccctcccagtgggaaatatagcagcaatttgggcaactttaattatgagaggagccttcaggggaagtagaggtggccgaggttggggcacacgaggaaatcgtagtcggggaagactctactgaataagacatcagcattcttcagcattgtcatgagcttaatatacttaaattctactactcattggattgccggggatgtccctttaaacagactgctgccttcagctaaaaacttaatgttctttatacctttgtatgtatgacctacttttgtaacagaccatggttgtgtccaaggtaaaaccacagtgatatttttggatgctttgtctgcaatcttgacttgtttttgcagtatcattattcagacttcaaattgtgaatcttttaaacatcttgataatttgttgttgagagctgttcattctaaaatgtaatgaaattcagtctagttctgctgataaagatcatcagttttgaaaggttactgattttcctcttccctcttagttttttacccaatatatggagaagagtaatggtcaatcttaacattttgttttaattgtttaataaagctgctgggcagtggtgcagcattcctacctagtgtcataaaagcaaaatacttacatagctttcttaaaatataggaatgacattacatttttaggagaaagtaagttgctttgcaccgcctacttaattcttttccatatattgtgatacaaacttttgaatatggaatcttactatttgaatagaaatgtgtatgtataatatacatacatacataagcatatatgtgtgtgtgtgtgtgtatatatatatatatgcatgctgtgaaacttgactacacaacataaatcactttttaaattccaggaacgggtagtctgacacggtgattatccttttgaggctgaatccgttattaacttgttatttaggtttttactcccagtagcaagggattctaagttagttgcacttacatgattattgttatttaaaactaagaataaaggctgcattttcaaagataaattggaattgctgttggtgaaataacaaccaaaatactgaatctgatgtacatacaggtttctacaggaagagatggtataatttacaatttggagatttaataaccagggctacccagaaaaagtgacttgataacatggtaccaataagtaagggatgctctctcggtttgcttttgccactttcaagattttaacttctcaggttattaatcaaaattattgtataagttagccaatagaatttttaggttaaaacaacagatggggggtttgtggagtgtttaatgtcatgggcatttttagtagcatagaccctttgttctgcatttgaatgtttcgtatatttttgtttcacagttaatcttccctccccaagtttgctattcaaatcaactgcctgaatgacatttctagtagtctgatgtatttttctgaggaatagtttgtgattccaatgcaggtgtcttcattaccattacctctacactgcagaagaagcaaaactcctttattagaattactgcacatgtgtatggggaaaatagttctgaaaggctagaatgatacaagtgagcaaaagttggtcagcttggctatggagtggtggcaataatctctaaacattccaaaagaccatgagctgaacctaaactcccttggaatctgaacaaaggaatataaaattgccatttgaaaactgaccagctaatctggacctcagagatagatcagccagtggcccaaagccatttcaagtacagaaattatagagactacagctaaataaatttgaacattaaatataattttaccactttttgtctttataagcatatttgtaaactcagaactgagcagaagtgactttactttctcaagtttgatactgagttgactgttcccttatccctcacccttccccttccctttcctaaggcaatagtgcacaacttaggttatttttgcttccgaatttgaatgaaaaacttaatgccatggatttttttcttttgcaagacacctgtttatcatcttgtttaaatgtaaatgtccccttatgcttttgaaataaatttccttttgtaattttaaaaaaaaaaaaaaaaaa

SEQ ID NO: 32765 - DNA, 3753 bp, Homo Sapiens
gcggggcactttgaagaatcacgtgtgttgaggccctcttaaagagataggcacctacttttccctccaccctaaacaccgccctgagggcggcggcgaccgtggtaattgcaactgctcaggggcagggcttgccccagcgccgagtagtggcaacggcgtggttgcgtcgggggtgcctgggagcctggagtcccgggggcctgaaatcggcagcttcccgggcagacactctctccctcaggaagaggtgccgccgagtcagcgcggggcagtgtgagcgccccgaggtgctttctcagttgaggagaggtggggttacagggcacaggtgacagggccggagaaagatggagcagcccggggcggcggcgtcgggagcgggaggcggcagcgaggaacccggtgggggccggagcaacaagcggagcgcggggaaccgggccgccaatgaagaggaaacgaaaaacaaacccaaattgaacattcaaataaaaactttggcagatgatgtgcgtgaccgaattacaagttttagaaaatctactgtcaaaaaagaaaaacctcttattcaacatcctattgattctcaagtcgcgatgagtgagtttcctgcagctcagccattatatgatgaacgatctttgaatttgtcagaaaaggaagtattggatctctttgaaaaaatgatggaggacatgaaccttaacgaagagaaaaaagctcctttacgaaacaaagactttaccaccaaacgtgagatggttgtccagtatatttctgccactgccaaatctggtgggctgaaaaacagcaaacatgaatgcaccctgtcttcacaagaatatgttcatgaattacgatcgggtatatcagatgagaaacttcttaattgcctagaatccctcagggtttctttaaccagcaatccggtcagctgggttaacaactttggccatgaaggtcttggactcttattggatgagctggaaaagcttctggacaaaaaacagcaagaaaatattgacaagaagaatcagtataaacttattcaatgcctcaaagcatttatgaataataagtttggattacaaaggattctaggagatgaaagaagtcttttactattggcaagagcaattgaccccaaacaacccaacatgatgactgaaatagtaaaaatactttctgctatttgcattgttggagaagagaacattctagataaacttttaggggctataacaacagcagcagaaagaaataacagggaacgattttcaccaattgtggaaggtttagaaaatcaggaagccttgcaattacaggtggcctgcatgcagtttataaatgcccttgtcacttctccttatgagcttgattttcgaatacatttaaggaatgaattcctccgttcaggactaaaaacaatgttaccagatctaaaagaaaaagagaatgatgagcttgatattcagttgaaagtatttgatgaaaacaaagaagatgacctaactgaattatcacaccgtctcaatgacattcgagcagaaatggatgatatgaatgaagtctaccatcttctatataatatgctgaaggacactgctgctgaaaattacttcttatctattctacaacattttttgcttatcagaaatgattattatatcaggccacaatattataaaataattgaggaatgtgtttcacagatagtgctacactgcagtggtatggatccagacttcaaatacaggcaaagattagacatcgatttaactcatctgatagattcttgtgtgaacaaggcgaaagttgaagaaagtgaacaaaaagctgcagagttttcaaagaagttcgatgaagaattcacagctcgacaggaagctcaagcagagcttcaaaaaagagatgagaaaatcaaagaacttgaagcagaaatccagcaacttcgaacccaggcacaagtactctcaagttcatcaggaattccaggtcctcctgcagcacctccattgccaggtgtagggccgcctccaccaccacccgcgccacctctacccggaggagctcctcttcctcctccaccacctcctttacctggaatgatggggataccaccaccacccccaccaccacttttatttgggggacctcctccaccaccaccccttggaggagttcctcctcccccaggaatatcacttaatctaccttatggaatgaagcagaaaaaaatgtataaacctgaagtgtccatgaagagaatcaattggtcaaagattgaacccacagaattatctgagaactgtttctggttaagagtcaaagaagacaagtttgagaatccagatctctttgccaaattggcattgaattttgctactcagataaaagttcaaaagaacgcagaagcattagaagaaaagaagactgggcctacaaagaagaaagtgaaagaactgagaattttggatcccaaaacagctcagaatctgtccatctttctgggatcatatcgcatgccatatgaagacataagaaacgttattctggaggttaatgaagacatgctgagtgaggctttaattcagaaccttgtgaaacatcttcctgagcagaagatactcaacgaattagcagagcttaagaatgaatatgatgacctctgtgagcctgaacaatttggagttgtgatgagctctgtgaaaatgttacagcctcgtctcagtagtatcctgttcaagctcacatttgaagaacacataaacaacatcaaaccaagcatcatagcagtaactcttgcctgtgaagaactgaagaaaagtgaaagctttaacagacttttagagttagttcttcttgttggaaactacatgaactcaggctcaagaaatgcccagtctttgggatttaagatcaacttcctttgtaagatcagagatactaaatcagcggatcaaaaaacaacccttttgcattttattgccgacatttgtgaggaaaaatatcgagatatcctaaaatttcctgaagaactggaacacgtagaaagtgcaagcaaagtttcagctcaaattctcaagagcaaccttgcatcaatggaacaacaaattgttcatctggaacgtgacatcaagaaattcccccaagcagaaaatcaacacgataagtttgtggaaaagatgaccagctttacaaagactgcccgagaacagtatgaaaaactctccaccatgcacaacaacatgatgaagctctatgagaatcttggagaatacttcatttttgactcaaagacagtgagcatagaagagttctttggtgatctcaacaacttccgaactttgtttttggaagcagtgagagaaaacaataagagaagagaaatggaagagaagaccaggagggcaaaacttgcaaaagagaaagctgaacaagaaaagttagaacgccagaagaaaaagaaacaactcattgatataaacaaagagggtgatgagactggtgtgatggataatcttctagaagccctacaatcaggtgcagcattcagagaccgtcgaaagcggattccaaggaatccagtggtaaatcatccctgtgcaacaagggctaatccaagatcagctacataaacggcctgagtgctgttttaaacaggattgggttgatggtacaacatgactttttaagataatcaagttagttaaaagtttcctagttggaaaactttgaaaaaaaaaaaaa

SEQ ID NO: 32766 - DNA, 9347 bp, Homo Sapiens
  misc_feature (5068)..(5068): n is a, c, g, or t
  misc_feature (5594)..(5594): n is a, c, g, or t
  misc_feature (5710)..(5710): n is a, c, g, or t
  misc_feature (6215)..(6215): n is a, c, g, or t
  misc_feature (6256)..(6256): n is a, c, g, or t
  misc_feature (6428)..(6428): n is a, c, g, or t
  misc_feature (6434)..(6434): n is a, c, g, or t
  misc_feature (6653)..(6653): n is a, c, g, or t
  misc_feature (6677)..(6677): n is a, c, g, or t
  misc_feature (7235)..(7235): n is a, c, g, or t
  misc_feature (7536)..(7536): n is a, c, g, or t
  misc_feature (7935)..(7935): n is a, c, g, or t
  misc_feature (8387)..(8387): n is a, c, g, or t
  misc_feature (8861)..(8861): n is a, c, g, or t
gcggggcactttgaagaatcacgtgtgttgaggccctcttaaagagataggcacctacttttccctccaccctaaacaccgccctgagggcggcggcgaccgtggtaattgcaactgctcaggggcagggcttgccccagcgccgagtagtggcaacggcgtggttgcgtcgggggtgcctgggagcctggagtcccgggggcctgaaatcggcagcttcccgggcagacactctctccctcaggaagaggtgccgccgagtcagcgcggggcagtgtgagcgccccgaggtgctttctcagttgaggagaggtggggttacagggcacaggtgacagggccggagaaagatggagcagcccggggcggcggcgtcgggagcgggaggcggcagcgaggaacccggtgggggccggagcaacaagcggagcgcggggaaccgggccgccaatgaagaggaaacgaaaaacaaacccaaattgaacattcaaataaaaactttggcagatgatgtgcgtgaccgaattacaagttttagaaaatctactgtcaaaaaagaaaaacctcttattcaacatcctattgattctcaagtcgcgatgagtgagtttcctgcagctcagccattatatgatgaacgatctttgaatttgtcagaaaaggaagtattggatctctttgaaaaaatgatggaggacatgaaccttaacgaagagaaaaaagctcctttacgaaacaaagactttaccaccaaacgtgagatggttgtccagtatatttctgccactgccaaatctggtgggctgaaaaacagcaaacatgaatgcaccctgtcttcacaagaatatgttcatgaattacgatcgggtatatcagatgagaaacttcttaattgcctagaatccctcagggtttctttaaccagcaatccggtcagctgggttaacaactttggccatgaaggtcttggactcttattggatgagctggaaaagcttctggacaaaaaacagcaagaaaatattgacaagaagaatcagtataaacttattcaatgcctcaaagcatttatgaataataagtttggattacaaaggattctaggagatgaaagaagtcttttactattggcaagagcaattgaccccaaacaacccaacatgatgactgaaatagtaaaaatactttctgctatttgcattgttggagaagagaacattctagataaacttttaggggctataacaacagcagcagaaagaaataacagggaacgattttcaccaattgtggaaggtttagaaaatcaggaagccttgcaattacaggtggcctgcatgcagtttataaatgcccttgtcacttctccttatgagcttgattttcgaatacatttaaggaatgaattcctccgttcaggactaaaaacaatgttaccagatctaaaagaaaaagagaatgatgagcttgatattcagttgaaagtatttgatgaaaacaaagaagatgacctaactgaattatcacaccgtctcaatgacattcgagcagaaatggatgatatgaatgaagtctaccatcttctatataatatgctgaaggacactgctgctgaaaattacttcttatctattctacaacattttttgcttatcagaaatgattattatatcaggccacaatattataaaataattgaggaatgtgtttcacagatagtgctacactgcagtggtatggatccagacttcaaatacaggcaaagattagacatcgatttaactcatctgatagattcttgtgtgaacaaggcgaaagttgaagaaagtgaacaaaaagctgcagagttttcaaagaagttcgatgaagaattcacagctcgacaggaagctcaagcagagcttcaaaaaagagatgagaaaatcaaagaacttgaagcagaaatccagcaacttcgaacccaggcacaagtactctcaagttcatcaggaattccaggtcctcctgcagcacctccattgccaggtgtagggccgcctccaccaccacccgcgccacctctacccggaggagctcctcttcctcctccaccacctcctttacctggaatgatggggataccaccaccacccccaccaccacttttatttgggggacctcctccaccaccaccccttggaggagttcctcctcccccaggaatatcacttaatctaccttatggaatgaagcagaaaaaaatgtataaacctgaagtgtccatgaagagaatcaattggtcaaagattgaacccacagaattatctgagaactgtttctggttaagagtcaaagaagacaagtttgagaatccagatctctttgccaaattggcattgaattttgctactcagataaaagttcaaaagaacgcagaagcattagaagaaaagaagactgggcctacaaagaagaaagtgaaagaactgagaattttggatcccaaaacagctcagaatctgtccatctttctgggatcatatcgcatgccatatgaagacataagaaacgttattctggaggttaatgaagacatgctgagtgaggctttaattcagaaccttgtgaaacatcttcctgagcagaagatactcaacgaattagcagagcttaagaatgaatatgatgacctctgtgagcctgaacaatttggagttgtgatgagctctgtgaaaatgttacagcctcgtctcagtagtatcctgttcaagctcacatttgaagaacacataaacaacatcaaaccaagcatcatagcagtaactcttgcctgtgaagaactgaagaaaagtgaaagctttaacagacttttagagttagttcttcttgttggaaactacatgaactcaggctcaagaaatgcccagtctttgggatttaagatcaacttcctttgtaagatcagagatactaaatcagcggatcaaaaaacaacccttttgcattttattgccgacatttgtgaggaaaaatatcgagatatcctaaaatttcctgaagaactggaacacgtagaaagtgcaagcaaagtttcagctcaaattctcaagagcaaccttgcatcaatggaacaacaaattgttcatctggaacgtgacatcaagaaattcccccaagcagaaaatcaacacgataagtttgtggaaaagatgaccagctttacaaagactgcccgagaacagtatgaaaaactctccaccatgcacaacaacatgatgaagctctatgagaatcttggagaatacttcatttttgactcaaagacagtgagcatagaagagttctttggtgatctcaacaacttccgaactttgtttttggaagcagtgagagaaaacaataagagaagagaaatggaagagaagaccaggagggcaaaacttgcaaaagagaaagctgaacaagaaaagttagaacgccagaagaaaaagaaacaactcattgatataaacaaagagggtgatgagactggtgtgatggataatcttctagaagccctacaatcaggtgcagcattcagagaccgtcgaaagcggattccaaggaatccagataacagacgagtacctttggaaaggtcacgctctcgccacaatggagctatctcatctaagtgattcctgatgccaaagaatatgaaaatatttaagtaaaaacaaaatgatgcattttgagaagaacaaagtgtgcactcagcggctggaaaggaaataagtgcatttctgcaaagatcaagataagctggatgaagtagtgtgcatttgtaatactattgcaagactcctcccacaattattctaatctgaacacagttatcaggattacaaaatgtgttccattttagtgtaaagatgtgtatcatttgtaattgtgtgtgacctgactgtgatgatggaagtgtaagaaattgaagagttctaaggctttcaaaaacactcagtccaaaaatttaaaatcttaaatgtgtaagtcaccccccccaaaaacaaaagagaagaaaaagaatagaaagaattatccagtgtcagcttccaatccctagtacatatataatagaaaagggccaagaaaaatatgcatcttgatttggagagaggctaatattatgcacactgtaagagaagccattttggaaattcacgaaagtactgctccaccccagttgagttatttaggaattttatctcaagtgaaagctgatggattcatctgctttggctgaaattaaacttatcattagtctagctagcatttcagcatgatattgcaagcacttctcattgctaaaaataaataaaccaaagtttaaccgaatcagttagggaaagtgatttaaactttatttaaagaggtattttctaattatgcacagatatctactttatacaaatactttatatggctatttttgagaaaaccctcacattttaatgtttatgctagggatgaacctggaaaattctattacgtttatttagatttcaaaggcaaatattgattcctatgctctgtggtttatttcttttttctattgcttctttctcccttgagtcccttgaaggcagggaaatagacttctagaaaacctgagaggaaaaagaattctttttacaggaggcagcagaaaactgtctgaaaggtcaattgttttatctccctttccactctctttccaatttcactttggtggtctgaagaagaaaaagaaattttatgtatgtatgtgtaaatatgtgtatatatttctatctcttgctacaataattccaactaagtgaacttcttctcaattatcatcatacttacttaccttatattaacaaattaagatgatgctgccaaaacaagtctagcagggaaaacaggttctacatttttcttaaataaattagggagtaaaagttatacttaacttgtctgtctattattttaaaatatgcattgaaataatgtggtataacttctctggagtgcaattttaagtctaattcatgcagatgattgattgtgattattgtaagaaatttcntacatgtatatttcttatgttagaaaatactgtttctactcattcaaagcacattgtagatattcagagagaagaacaaatggctggcttggcaaatccccatctgagataaagtaaacaagtgaccagcagcccacagataattcctttatatagatgtataatgattcaaactgctgcctttgcctccagtgcatccttacttaggtattatacttctttaaaaagctctgaagctgctacaatagaaaaatcaaaaagggtaacagtatctgaaatttcacagtcctatccgatctgaaaacacacatacacaaatgcacacacatgcacacacacatttcagggacatagcagtaacactgttttttaacaacaacaaaagtttaggttctaatttatgtaaatacctagtatgtgtatttttgactttacaaagtctttcttttctgaaatcttcgtggtatggcttttttaattcttttgacagcttatcagtctgtaggagaatgatcttgaaatgttnaccctgactaaaatttgggagcatatgccttgctatattatcaagctggtcaaggtagaaatactgatatgtatcatcaccttttccagatacaaacttgccttattttctagttngtgaacaagaacgaatgaagtactattattgataacttacttatatatttttatttagagcaatcccacatgcttttcacaaacattaaaaaaaaaaacctttcagggtctttcatgaagttccaatagttgagtgagttaaaaggtttgtttcccagatttgtaatggtcctgctctagccatttgcagttttgttttagatgattggaaagtatatcaccaaaaaaagtatatagtgacatttttagtatgaaaccaaattacactaaggtcttttgttggccatattactgccacacatgagaagcaccatttatgcagattttcttcagaatatttttaaaaggtacagaatccttaaaatattaacaactaattgcatccattatctcctttggctgctgtaacaaattaccaccaataatatgatggcttaacacaacagaaacttatttgcttacatttttgaagggcagcaaagccatggctccctccagaggctcnagaggagaatctttccttgccacgtccaccttttggtggcnattggcattttttggcttatggccacatttctctttctgctgtgtcttcacatcaccctcctctgtatacctaatctgcctctgcctctgtttaataaggatccttatgatgacttttagggactacccagattactccaggataatctcctcacctcatgagtcttaactnaattanatctgcaaggcccccttctccaaataagataaattcatggttttggggattaggatgtggctatgtcttttaggaagccactcttagcccaccagagtctgccctttggcccaaaatttatgtctgtctcatgtgtaaaagacattcatcccatcctaacattaccaaaagtctcaacccattatatcaatcctaagtccaaaatttcattcaaatatnatcggttcaaaagttccaaagctnatcatttagatcatctaaatcaggtatgagtgaaactctgggtatggtctttcctgaggccaaatcctcttcctctgagaaccagtgaaacagaaaagttaatctgctttcaaattacaatggtgggaacaggcataggataacagttacagacatttctgtctcaaaaaggagagaatggaaattggaatggagtctcctgtcccaatcattttcaaaatctagccaggcaaatttctgttctatttcaaggcctggcagtaatcctctttctcagggctccaccctttgggcctgtagctcttctttcttggactatggattgggcctctgcctctgtgcctatgggttgcacttcttcctctgttcccacacttgggcctctgcctctgtacctgcagctctgctctcgggatggtgcttcctttatcttgaagggtggcacatgtttgcagctgagaagttttatcaacgggtttcctacctgtagaattctggcagtctcacaatcttctttcatttttttctgtctctgtcccttttaggcccagttggaantgtttctgatggtagaacattctcaaaaatcttgtgggtcttctacgtatgtcacattgattcacacattcagaaaagagggtcctcacagatttttcctgaacaaccccatctctattcttggcttctgttgaaacagtcaaataaatccacaagttaatgcctaacctcttcagcactagccaaaggttgtcaagacacacccttgggcttatctacagagcacacttttctaacagtgaatctcctaattttagcatctttttttttttttttacaatcattccagattgtgaattcnaggctcagaattacccagtcatcagatactgattccttttgtccacttatatagttattttctctttaaaaaaaaattttttttaatgtattagagatgaggtctcactctgtcacccaggctgcagtgtagtggtgcaaacatagctccctgtaacctcaaactcccaggctcaagggatcctcctgcatcagccttccaagtagctgggtctacaggtgcataccaccatgcctggctaattttttgcatttttttgtagagacttgatcttgctatgttgtccaggctgctctcgaactcctagcctcaagcaatccacccatcttggcctcctaaagtgccggattacaggtgtaagccaccatgcccagcctgttttgtcaatgtatctgtttnctgtcttattttactataagcactaagaagaaactaagctatatctctaacactagacttgaaaatttcctcagctaaacatccaagttcatcatttattcaacttttcacactactgtagtagacaatttagatagataaactttttgccactatatgacaaggattccctttcttccattttccaataaaatcttcatttccttctaaaccatcactagaaatgcctttaacattcatactactaccatctggtaaaggcaatctagttttttctatcacatccaccaaaattcttctagtctctacccattatccaattccaaagcctttttcacattttaagacatttgttacagaagtacccaatccgtcccagttccacaatctgcattagattcccatggctgctgtaacaaattaccctctagcccagtggcttaaaacaatanaaatttattatcttgttgttttggaggccaaaagtccaaaattgaggggttggcagggctgaacgtcttctggagactctaagggaaacactcttcccgtgtcttccagtttcttgtggctgccatcattccttggtttgtgactgcatctccctctcctctgtcttcacatcacttcccctctgtatatataatctacctctgcctctctcttataaggacacttgtgacgggacttagggcccatccagattacccatgatcattcccttattccaagattcttaattatatctgaaaggaccttttttccaaataaggtactatcacaggttccagggagttaggatattgaatatctttattggggagggggcaccatgcagctcactacactattcattgcacacaaatgaatttttcactttttaagatgcattcttggtgctcaaaccagatcgaagtttgtctctnaaagctattgtctgcacaggctgctgcatgctctgttgttaaatggatggacaggctattctaaattttggttgatacttttgctactatgggcaattaacttgaaaaaaataatcgatcccaactctgtgctctgatgtacctcttctgccccttttatgacacctttgaccaaatgccttctatggttcacagtgcaggcacaaaactacctctgatacagaaggttctttacaagcttattttacataccgtgaatccctcacctaaagggagaggtgaaagcaaagactgctttgaatgggtattgagggagattgtgtccataccaagccaccctgaagaagtatttcacttgcagtagaactgtggatttgtgctgtcatttcaccttggaataaacacctatctctaagcaggaccaagaatgacttgcaatctatatgtaatggctacttacttattcaataaagttaagatatacgt

SEQ ID NO: 32767 - DNA, 1638 bp, Homo Sapiens
cgggtacagggggcccaagagctgggctggctgtctcctgctcatccagccatgcggtggctgtggcccctggctgtctctcttgctgtgattttggctgtggggctaagcagggtctctgggggtgcccccctgcacctgggcaggcacagagccgagacccaggagcagcagagccgatccaagaggggcaccgaggatgaggaggccaagggcgtgcagcagtatgtgcctgaggagtgggcggagtacccccggcccattcaccctgctggcctgcagccaaccaagcccttggtggccaccagccctaaccccgacaaggatgggggcaccccagacagtgggcaggaactgaggggcaatctgacaggggcaccagggcagaggctacagatccagaaccccctgtatccggtgaccgagagctcctacagtgcctatgccatcatgcttctggcgctggtggtgtttgcggtgggcattgtgggcaacctgtcggtcatgtgcatcgtgtggcacagctactacctgaagagcgcctggaactccatccttgccagcctggccctctgggattttctggtcctctttttctgcctccctattgtcatcttcaacgagatcaccaagcagaggctactgggtgacgtttcttgtcgtgccgtgcccttcatggaggtctcctctctgggagtcacgactttcagcctctgtgccctgggcattgaccgcttccacgtggccaccagcaccctgcccaaggtgaggcccatcgagcggtgccaatccatcctggccaagttggctgtcatctgggtgggctccatgacgctggctgtgcctgagctcctgctgtggcagctggcacaggagcctgcccccaccatgggcaccctggactcatgcatcatgaaaccctcagccagcctgcccgagtccctgtattcactggtgatgacctaccagaacgcccgcatgtggtggtactttggctgctacttctgcctgcccatcctcttcacagtcacctgccagctggtgacatggcgggtgcgaggccctccagggaggaagtcagagtgcagggccagcaagcacgagcagtgtgagagccagctcaacagcaccgtggtgggcctgaccgtggtctacgccttctgcaccctcccagagaacgtctgcaacatcgtggtggcctacctctccaccgagctgacccgccagaccctggacctcctgggcctcatcaaccagttctccaccttcttcaagggcgccatcaccccagtgctgctcctttgcatctgcaggccgctgggccaggccttcctggactgctgctgctgctgctgctgtgaggagtgcggcggggcttcggaggcctctgctgccaatgggtcggacaacaagctcaagaccgaggtgtcctcttccatctacttccacaagcccagggagtcacccccactcctgcccctgggcacaccttgctgaggccccagtaggggtggggagggagggagaggccgccacccccgccggtgtctgctgttctttccccataggtcttgctttgttgcctgtcttgctgtctagggatggacttggttcctcttgtcaaggtttgggaatccg

SEQ ID NO: 32768 - DNA, 1368 bp, Homo Sapiens
atccattgtgctctaaagtgatggagagcaccagcaaagccttagggcccatccctggcctcctgttacccacagaggggtaggcccttggctctcttccactatgacgtcagcttccattcttcctttcttatagacaattttccatttcaaggaaatcagagcccttaatagttcagtgaggtcactttgctgagcacaatcccatacccttcagcctctgctccacagagcctaagcaaaagatagaaactcacaacttccttgttttgttatctggaaattatcccaggatctggtgcttactcagcatattcaaggaaggtcttacttcattcttccttgattgtgaccatgcccaggctctctgctccctataaaaggcaggcagagccaccgaggagcagagaggttgagaacaacccagaaaccttcacctctcatgctgaagctcacacccttgccctccaagatgaaggtttctgcagcgcttctgtgcctgctgctcatggcagccactttcagccctcagggacttgctcagccagattcagtttccattccaatcacctgctgctttaacgtgatcaataggaaaattcctatccagaggctggagagctacacaagaatcaccaacatccaatgtcccaaggaagctgtgatcttcaagaccaaacggggcaaggaggtctgtgctgaccccaaggagagatgggtcagggattccatgaagcatctggaccaaatatttcaaaatctgaagccatgagccttcatacatggactgagagtcagagcttgaagaaaagcttatttattttccccaacctcccccaggtgcagtgtgacattattttattataacatccacaaagagattatttttaaataatttaaagcataatatttcttaaaaagtatttaattatatttaagttgttgatgttttaactctatctgtcatacatcctagtgaatgtaaaatgcaaaatcctggtgatgtgttttttgtttttgttttcctgtgagctcaactaagttcacggcaaaatgtcattgttctccctcctacctgtctgtagtgttgtggggtcctcccatggatcatcaaggtgaaacactttggtattctttggcaatcagtgctcctgtaagtcaaatgtgtgctttgtactgctgttgttgaaattgatgttactgtatataactatggaattttgaaaaaaaatttcaaaaagaaaaaaatatatataatttaaaactaaaaaaaaaaaaaaaaaaaaaaaaaaaaaaaaaaaaaaaaaaaaaaaaaaaaaaaaaaaaaaaaaaaaaaaaaaaaaaaaaaaaaaaaaaaaaaaaaaaaaa

SEQ ID NO: 32769 - DNA, 4667 bp, Homo Sapiens
ccctagtttcagacccaagctctgccagtcacttcctgttcaccctgagcaagctattaaaccattcggagccccagtttccacactggtaaaaatgaagataaaatcagccacctcctagggttgttacgaggtgtaaatgaaataacaatgagcctggtacatcacaggtgctccctgaattttagttcctttgctcccttttaccatcccagtagcccaggcaggggtgagcagctatgaggcgtggcagcagtggatggaagtgacaagggacagatgaggatccccaggggaagggaggtggagaaagcaggaaccaaatgtcattcgtgcagccactcccgatttatgggatctggtgcagagactctttgaagaggcaataaaactcatattctgctaggaaatgacaacagtggagagtcctgacttagcaaaccaaattcaacgatttcattttttttttttttttacaaggcatggggttccggatgggtagcaaaaatcacattctaatattagctatctggggtaggaacaggctttcccaagagcaagagatgtgtaccatgccaacacccaatggtgagtgtacataaatgctccatagaggccttgagagtccagaacctgagctccttgctaagctgcaaccttcctctgctagcaccatggccacccagacctgcacccctaccttctccactgggtctatcaagggcctctgtggcacagcaggcggcatctctcgggtgtcctccatccgttctgtgggctcctgcagggtccccagtctcgccggtgctgcagggtacatctcttctgctaggtcgggcctctctggccttgggagctgcttgcctggctcctacctgtcttctgagtgccacacctctggctttgtggggagcgggggctggttctgcgagggctccttcaacggcagcgagaaggagactatgcagttcctgaacgaccgcctggccaactacctggagaaggtgcgtcagctggagcgggagaacgcggagctggagagccgcatccaggagtggtacgagtttcagatcccatacatctgcccagactaccagtcctacttcaagaccatcgaagatttccagcagaaggtgagggagacctggcccctttccagctgagcagcccaactcttaggaggcgtctgtctcattccagggcctttccagatgggacggtagcttttagggaattctcctggtagggcaaacttttctctctagggctttggtttcctgggggacccaggcttctctgctggtctcttgcttgtaccttgttgccagccgttcctcacccccctccccttgctgtaggaagggaaggaacatgtaccaagcccctaccggatacagcactgtgcctgacactttcctattccctggcttatttattcttcatcttggagagattggtattactggacccatctgacagatgtggaagttgaattttgaggggttcagcaacttgctcaagagcacacaggctcagtgttagatgcagaacctgaactcaggtctgcctcaccctggtgtatcttgctgtgccactctgaaggctacaggcgccaggactgatggtcactgacatcctcgggatgcccctgtggggtggatgctcccccacacctggggtgtggctcagggctggaaatggtgaaggggctggtggtacacagtggcatggcctctgtgagctgagctatccccctacctgcccccacactgctgggcctcctgtagcttatgggaagcctcttgttccccagatcctgctgactaagtctgagaatgccaggctggtcctgcagattgataatgccaagctggctgctgacgacttccggaccaagtgagtgggcctgatcagggaaggtttgccatgccactcccttgcctctgtcccctgcctttgggagctggtgatgtgggaataaggctggatgggaaaatgtggcatgagccctggacctcaggggaaaggagtgtcatgctcctgatcccgtcagccactgcagctggacagtagggcaggggtccctgctggtgtgtggtttcctttgctgcagacttggcagggttctgtgtgtgcaggtatgagacagagctgtctctgcggcagctagtggaggccgacatcaacggcctgcgtaggatcctggatgagctgaccctgtgcaaggctgacctggaggctcaggtggagtccctgaaggaggagctgatgtgcctcaagaagaatcacgaggaggtgaggctggtgccatgtgacttcccagtgtttcccatccagcttaggaagccactgctgggctttcagttttctgtgcggcaggaactatacaaaggccttgcatttcattctcgtttcatttcatccttacaataatcccaagaattataaactgttacaagctccattttacagatgagaaaacttaggcacaaagaggttaagttgcttgcctaaggtcatagagggtctacacttttgcccataacactacatgtctatttgggctctagtgtcctgataacagcaatttaatttgcctagggtttgtatcatctcacaaatatcccatagaaggaggtaggtatatacggagaaggagaccaaggctcagagatatttaagtatcctgtctaatgctatgcagctggtgactgagggaagagggtttgaattcaggtcattgaaacctgcaatccagcatctttttcacaacctcatgccgtcttgcctcctctctgcaggaagtcagtgtactccgttgccaacttggggaccgactgaatgtggaggtggacgctgctcccccagtggatctcaacaagatcctggaggatatgagatgccagtacgaggccctggtggagaataaccgcagagatgtggaggcctggttcaacacccaggtggggctggggtgccctgggaccacaggctcctgggctggggttacccttggaagtagcttggtttgaccatgctctgggccctggcatgtgtttcagactgaggagctgaaccagcaggtggtgtccagctcggagcagctgcagtgctgccagacggagatcatcgagctgagacgtacggtcaacgcgctagagattgagctgcaggctcagcacagcatggtgagtggcccctgcctgcgtcgctggccacggcctgtggcaggtccccgacgcaccagcctcagcgtgcaggctctcatggggtgtgatcacaggtcgtaggcagatgcccagggctgtgggtttctggggtcaggggattcctccccaataggcagctcttcctctttcccattgcagcggaattccttggaatccaccctggccgaaaccgaggcccgctacagctcccagctggcccagatgcagtgcctgatcagcaacgtggaggcccagctgtctgagatccgctgcgacctggagcggcagaaccaggagtaccaggtgttactggacgtcaaggcccggctggagggcgagatcgctacctaccgccacctgctggagggagaggactgcaagtgagtggcccttgggctggggtagggcttgactgaaccctcagtgccatgtggagggcgtcaagcccagaagtggttgtcgcccagatgaagggaactaaaccaaagccccttgagattctccatttagtcccaggctttggtaatgcacagcgggagaatccaacccaacacacgccgcgtgttttccgccatcttttctgattggcagtttctgctcttcattcctgtagctcagtcctctcacccttggggaattcagaggcactgagatgatccggggccaccggtctcgcttgatcctctagatctgtttaacacgaatctcagcccagtgctccgatgccaaatgcaccctgcatgattttgtttcctcaggcttcctccccaaccttgtgccacggcatgcaagcctgttattagagttccttctgtccccccggtgccctgtgtcccctctgtgccctgcaccccggctccccaggttggcactcagatccgcaccatcaccgaggagatcagagatgggaaagtcatctcctccagggagcacgtgcagtcccgcccgctgtgacagcccacttggtccaccagggcagggccctgaccacaggaaggaggacacccctgtggctcctggaggcttaacgaccctgcccttctctagaggggtccccctacgcttagcaggtttttctaccaaaacactccccgtattgtgtttccggacttaactgtgcttttacgccatgcaaaaccaggtttcctggaaatttacccaataaagtgtgttctcctggcatagcaaactcaaccctggctgactctgttgatgctcatgtgctcgtgtggttcatgggggtgtctgacaggggctgcagtatagttgtggggtttccatttaggtctatcttctcgggctctgagtgggaggcggtggcagggtgatttgaagtatttaataacaaagatgcctcagaggctggccaatgagaacagacactgacccagtctggatgggtgcggccatagctctcagcttggccctgcctgtgagtagacaccttagggcggcccc

SEQ ID NO: 32770 - DNA, 3007 bp, Homo Sapiens
atggctgtgtactgctatgcgctcaatagcctggtgatcatgaatagcgccaacgagatgaagagcggcggcggcccggggcccagtggcagcgagacgcccccgcccccgaggagggcagtgctgagccccggcagcgttttcagccccgggagaggcgcctctttcctcttccccccagccgagtcgctgtcccccgaggagccccggagccccgggggctggcggagcggccggcgcaggctgaatagtagcagcggcagtggcagcggcagcagcggcagtagcgtgagcagcccaagttgggctggtcgcctgcgaggggaccggcagcaggtggtggcagccggtaccctctccccgccagggccggaggaggccaagaggaagctgcggatcttgcagcgcgagttgcagaacgtgcaggtgaaccagaaagtgggcatgtttgaggcgcacatccaggcacagagctccgccattcaagcgccccgcagcccgcgtttgggcagggctcgctcgccctccccgtgccccttccgcagcagcagtcagccccctggaagggtcctggttcagggcgcccggagcgaggaacggaggacaaagtcctggggggagcaatgtccagagacttcaggaaccgactccgggaggaaaggagggcccagcctatgctcctcgcaggtgaagaaaggaatgccacctcttcccggccgggctgcccctacaggatcagaggctcagggtccatccgcttttgtaaggatggagaagggtatccctgccagtccccgctgtggctcacccacagctatggaaattgacaaaaggggctctcctaccccgggaactcggagctgcctagctccctcattggggctgttcggagctagcttaacgatggccacggaagtggcagcgagagttacatccactgggccacaccgtccacaggatcttgccctcactgagccgtctgggagagcccgtgagcttgaggacctgcagcccccagaggccctggtggagaggcaggggcagtttctgggcagtgagacaagcccagccccagaaaggggcgggccccgcgatggagaaccccctgggaagatggggaaaggatatctgccctgtggcatgccgggctctggggagcctgaagtgggcaaaaggccagaggagacgactgtgagcgtgcaaagcgcagagtcctctgatgccctgagctggtccaggctgcccagggccctggcctccgtaggccctgaggaggcccgaagtggggcccccgtgggcggggggcgttggcagctctccgacagagtggagggagggtccccaacgctgggcttgcttgggggcagcccctcagcacagccggggaccgggaatgtggaggcgggaattccttctggcagaatgctggagcctttgccctgttgggacgctgcgaaagatctgaaagaacctcagtgccctcctggggacagggtgggtgtgcagcctgggaactccagggtttggcagggcaccatggagaaagccggtttggcttggacgcgtggcacaggggtgcaatcagaggggacttgggaaagccagcggcaggacagtgatgccctcccaagtccggagctgctaccccaagatcaggacaagcctttcctgaggaaggcctgcagccccagcaacatacctgctgtcatcattacagacatgggcacccaggaggatggggccttggaggagacgcagggaagccctcggggcaacctgcccctgaggaaactgtcctcttcctcggcctcctccacgggcttctcctcatcctacgaagactcagaggaggacatctccagtgaccctgagcgcaccctggaccccaactcagctttcctgcataccctggaccagcagaaacctagagtgagcaaatcatggaggaagataaaaaacatggtgcactggtctcccttcgtcatgtccttcaagaagaagtacccctggatccagctggcaggacacgcagggagtttcaaggcagctgccaatggcaggatcctgaagaagcactgtgagtcagagcagcgctgcctggaccggctgatggtggatgtgctgaggcccttcgtacctgcctaccatggggatgtggtgaaggacggggagcgctacaaccagatggacgacctgctggccgacttcgactcgccctgtgtgatggactgcaagatgggaatcaggacctacctggaggaggagctcacgaaggcccggaagaagcccagcctgcggaaggacatgtaccagaagatgatcgaggtggaccccgaggcccccaccgaggaggaaaaagcacagcgggctgtgaccaagccacggtacatgcagtggcgggagaccatcagctccacggccaccctggggttcaggatcgagggaatcaaaaaagaagacggcaccgtgaaccgggacttcaagaagaccaaaacgagggagcaggtcaccgaggccttcagagagttcactaaaggaaaccataacatcctgatcgcctatcgggaccggctgaaggccattcgaaccactctagaagtttctcccttcttcaagtgccacgaggtcattggcagctccctcctcttcatccacgacaagaaggaacaggccaaagtgtggatgatcgactttgggaaaaccacgcccctgcctgagggccagaccctgcagcatgacgtcccctggcaggaggggaaccgggaggatggctacctctcggggctcaataacctcgtcgacatcctgaccgagatgtcccaggatgccccactcgcctgagctgcccacgccctccctggcccccgcctgggcctcctttcctcctcctgtgcttcctttctcgttcctaacttttccttcacttacacctgactgaccctcctgaactgcactacaagacactttgtagaagaggagatgagagtttctagtcattttggaattc

SEQ ID NO: 32771 - DNA, 2939 bp, Homo Sapiens
ccagggcccggcaccggggagatgcccaggaagtgtctgctgaactgcggggaatgtgggttggagtcacgccacctgctgtgtttctgtaagcattttggggaagcacatttcttgggtaccttcgccaggctcaggaatggagacaaggccaatgtatccctgccctcctggactgcaggtgttgctgttagaacctgcccagctgctagaaagttcctaccagggtcagaggccctgggattttgggtgcgcatgtttttctggtttgtgaggagggtaggggcaagcatgaagaaagaagggcccgagcctcaaatttgcaagggcatcctcttttctagtcacaaagatcaacaggatccaaaaaggatgggatttgcgcttcactttaaacatgctgcccgttctagccaacccttctgtggtgcactatgagtttatagcttttgcgagcctggtcattgtcttcggaatattactatgcattagcttgagcagtaagtgacaagttgttcatgtaaatgtctaagatatacggacttttaaacaactctcattttggtgttccttgtttcttaatatagtaggagtctcacctcacaccaccccttcccttaaattatggagcagtgcagacctccctcaacccggggagggccttgctctgagagtgtacttctttccagaacctgtacacatagggcatggagacaggactcaaggccagggtgggagttggatgggctgacttttgtgcccttcataaggtttgatcctgagctgcagacacaggtaggtgggagattagtttccatttgggctggaggccgatggggggaccctgttccgtctcttctctttgaccccacaaagcaggcagagctctatttatgaatgtggccttcctctctgtgcttccaccatccagagggaacgtggcttccctaaaaccctattctctgataatctatgtccctttccaaaatatttgtatgaaggtccagacttggaaattttatcattaaggacaatcagtaaacagagtaataactaacatgtattctatgccacgccacgttcaaagtggttcccatgctttatctcagttaattttgtgaccataacccaacactgttcaattagtgttccccaaaacagtcagaaaaagttaatgacttggccaggcatggaggcttatgcttgtaatcccaccacattgggaggccaaggcaggtagatcacctgagatcaggagtccaagatcagcctggcaacatggtgaaaccccatctctactaaaaatacaaaaattagctgggtgtggcatgtgtgcctgtaatcccagctacttggaaggctgaggcaggagaatcgcttgaacccgggaggcagggttgcagtgagccgagatcgtgccattgcactccaacctaggcgacagagtgagactgcgtctcaaaaaaacaaaaacagaaaaggttaatgacttgcccgaagtcatctagcttgtaagtacacagccagaatttaagcctgggtggttaacttgaaaaccgttatggagcaacccagagatttagcatcagtgattcaaatctcagttctacaattacttgccatgtgacctcatacaagtcacttaccccttctgagactcagtttccctcactgcacaatgggcttaagcatgatgcaaggactttacaatgatcaaaagtaacagttgatgtgaaagggcttcagcagcatgcagccagtccacagagttgttatgaagttttcctctttcatcctttgttaaagcatgctgacaaactcaaaaggatgacaaaaagtagcagcagaaagtaccttctcctcatgcctttggttgtacagacacacaactcctgtactccaaattcctggcacacagagttgatggtgagggcccctgagtggagatactttctgggccacctgaaatgctgcttggtttctcacacaaaccctgctgtggctgcttaccatcctcagcaagggtgcggaggaatggaaacttttgccaccaacagcatttgctagcaacttccctctctgtggtttttctgtcattcccttgataaaagaacttgagctgcgcaaaagtaaccaatcttcaccaatctcatcttcacatataaacagccgcctttcaagaagcaagctgccagaaaaatgatgcacgatgctctctaaactgggtcattctccacttggagggctcagggcacggttgactttccccgtctgtctcctataccacaggctctgggcatcaccagcggccccagggaaaaagaaagaaatgggaaacagcatgaaatccacccctgcgcctgccgagaggcccctgcccaacccggagggtaagtctggcttctctggtgagatgcttgagtctgtgctacaagagcctgtggtaaagactgggcggtggtggatgccggtaactacttaaatggggcaatgggtaccgaagggctcattatatctgtctctctagttttgtttgtggttcaaatacttcataattaaaagacaaaaagaattgggtgctcggcgcacctgaagggtgtcaaatctttggcattttgagatggatctccaagatcagctggtttaatcactttattttccagatagggagactgagcctcacaaagggaatgggatccacatcactgggcatttgctgttaaatttccaatccaggcccatccaattctgaaacctagactcctgtttaccaaactctggcagcccataatataatatcatccttatacttagccccgcaagagctggatctgtgttacttttctaagctaggcaccatcctgtgacatcttcctgaaaacaaaggaaaccttatgtcccattggtgggattgcaaggtgacaagcattctcggggga

SEQ ID NO: 32772 - DNA, 2186 bp, Homo Sapiens
cttcccctctcccctgactcagctggtagcccctcctccccgcacctgcccaaaggtcactggacaggcatttgtctggccttcccttttactgctggctgggaaggaggagcatcagaccacagatcctggaaggcacttctctccctgactgccgctcacactgccgtgagaacctgcttatatccaggaccaaggaggcaatgccaggaagctggtgaagggtttcctctcctccaccatggttgacagcactgagtatgaagtggcctcccagcctgaggtggaaacctcccctttgggtgatggggccagcccagggccggagcaggtgaagctgaagaaggagatctcactgcttaacggcgtgtgcctgattgtggggaacatgatcggctcaggcatctttgtttcccccaagggtgtgctcatatacagtgcctcctttggtctctctctggtcatctgggctgtcgggggcctcttctccgtctttggggccctttgttatgcggaactgggcaccaccattaagaaatctggggccagctatgcctatatcctggaggcctttggaggattccttgctttcatcagactctggacctccctgctcatcattgagcccaccagccaggccatcattgccatcacctttgccaactacatggtacagcctctcttcccgagctgcttcgccccttatgctgccagccgcctgctggctgctgcctgcatctgtctcttaaccttcattaactgtgcctatgtcaaatggggaaccctggtacaagatattttcacctatgctaaagtattggcactgatcgcggtcatcgttgcaggcattgttagacttggccagggagcctctactcattttgagaattcctttgagggttcatcatttgcagtgggtgacattgccctggcactgtactcagctctgttctcctactcaggctgggacaccctcaactatgtcactgaagagatcaagaatcctgagaggaacctgcccctctccattggcatctccatgcccattgtcaccatcatctatatcttgaccaatgtggcctattatactgtgctagacatgagagacatcttggccagtgatgctgttgctgtgacttttgcagatcagatatttggaatatttaactggataattccactgtcagttgcattatcctgttttggtggcctcaatgcctccattgtggctgcttctaggcttttctttgtgggctcaagagaaggccatctccctgatgccatctgcatgatccatgttgagcggttcacaccagtgccttctctgctcttcaatggtatcatggcattgatctacttgtgcgtggaagacatcttccagctcattaactactacagcttcagctactggttctttgtggggctttctattgtgggtcagctttatctgcgctggaaggagcctgatcgacctcgtcccctcaagctcagcgttttcttcccgattgtcttctgcctctgcaccatcttcctggtggctgttccactttacagtgatactatcaactccctcatcggcattgccattgccctctcaggcctgcccttttacttcctcatcatcagagtgccagaacataagcgaccgctttacctccgaaggatcgtggggtctgccacaaggtacctccaggtcctgtgtatgtcagttgctgcagaaatggatttggaagatggaggagagatgcccaagcaacgggatcccaagtctaactaaacaccatctggaatcctgatgtggaaagcaggggtttctggtctactggctagagctaaggaagttgaaaaggaaagctcacttctttggaggcacctgtccagaagcctggcctaggcagcttcaacctttgaacttactttttgaaatgaaaagtaatttatttgttttgctacatactgttccagacttttaaaggggacaatgaaggtgactgtggggaggagcatgtcaggtttgggcttggttgttttagaagcacctgggtgtgcctacctactcctcttttcttttaaaagggcccacaatgctccaatttcctgtctcctttagagagacatgaaactatcacaggtgctggatgacaataaaagtttatgttcctaaaaaaaaaaaaaaaaaaaaaaaa

SEQ ID NO: 32773 - DNA, 4058 bp, Homo Sapiens; identical to SEQ ID NO: 29961

SEQ ID NO: 32774 - DNA, 7154 bp, Homo Sapiens
acgaagaggtacgattccggagaatcgcgaggcagagcgggagcgcgcagccaggtggaaactaattctaagccagactgctggagatcaccctgttctagtgtgtggaggcttccaccaggaggcgcattggagtgactgtctggcatcaccaagatgacactccacgccacccggggggctgcactcctctcttgggtgaacagtctacacgtggctgaccctgtggaggctgtgctgcagctccaggactgcagcatcttcatcaagatcattgacagaatccatggcactgaagagggacagcaaatcttgaagcagccggtgtcagagagactggactttgtgtgcagttttctgcagaaaaatcgaaaacatccctcttccccagaatgcctggtatctgcacagaaggtgctagagggatcagagctggaactggcgaagatgaccatgctgctcttataccactctaccatgagctccaaaagtcccagggactgggaacagtttgaatataaaattcaggctgagttggctgtcattcttaaatttgtgctggaccatgaggacgggctaaaccttaatgaggacctagagaacttcctacagaaagctcctgtgccttctacctgttctagcacattccctgaagagctctccccacctagccaccaggccaagagggagattcgcttcctagagctacagaaggttgcctcctcttccagtgggaacaactttctctcaggttctccagcttctcccatgggtgatatcctgcagaccccacagttccagatgagacggctgaagaagcagcttgctgatgagagaagtaatagggatgagctggagctggagctagctgagaaccgcaagctcctcaccgagaaggatgcacagatagccatgatgcagcagcgcattgaccgcctagccctgctgaatgagaagcaggcggccagcccactggagcccaaggagcttgaggagctgcgtgacaagaatgagagccttaccatgcggctgcatgaaaccctgaagcagtgccaggacctgaagacagagaagagccagatggatcgcaaaatcaaccagctttcggaggagaatggagacctttcctttaagctgcgggagtttgccagtcatctgcagcagctacaggatgccctcaatgagctgacggaggagcacagcaaggccactcaggagtggctagagaagcaggcccagctggagaaggagctcagcgcagccctgcaggacaagaaatgccttgaagagaagaacgaaatccttcagggaaaactttcacagctggaagaacacttgtcccagctgcaggataacccaccccaggagaagggcgaggtgctgggtgatgtcttgcagctggaaaccttgaagcaagaggcagccactcttgctgcaaacaacacacagctccaagccagggtagagatgctggagactgagcgaggccagcaggaagccaagctgcttgctgagcggggccacttcgaagaagaaaagcagcagctgtctagcctgatcactgacctgcagagctccatctccaacctcagccaggccaaggaagagctggagcaggcctcccaggctcatggggcccggttgactgcccaggtggcctctctgacctctgagctcaccacactcaatgccaccatccagcaacaggatcaagaactggctggcctgaagcagcaggccaaagagaagcaggcccagctagcacagaccctccaacagcaagaacaggcctcccagggcctccgccaccaggtggagcagctaagcagtagcctgaagcagaaggagcagcagttgaaggaggtagcggagaagcaggaggcaactaggcaggaccatgcccagcaactggccactgctgcagaggagcgagaggcctccttaagggagcgggatgcggctctcaagcagctggaggcactggagaaggagaaggctgccaagctggagattctgcagcagcaacttcaggtggctaatgaagcccgggacagtgcccagacctcagtgacacaggcccagcgggagaaggcagagctgagccggaaggtggaggaactccaggcctgtgttgagacagcccgccaggaacagcatgaggcccaggcccaggttgcagagctagagttgcagctgcggtctgagcagcaaaaagcaactgagaaagaaagggtggcccaggagaaggaccagctccaggagcagctccaggccctcaaagagtccttgaaggtcaccaagggcagccttgaagaggagaagcgcagggctgcagatgccctggaagagcagcagcgttgtatctctgagctgaaggcagagacccgaagcctggtggagcagcataagcgggaacgaaaggagctggaagaagagagggctgggcgcaaggggctggaggctcgattacagcagcttggggaggcccatcaggctgagactgaagtcctgcggcgggagctggcagaggccatggctgcccagcacacagctgagagtgagtgtgagcagctcgtcaaagaagtagctgcctggcgtgagcggtatgaggatagccagcaagaggaggcacagtatggcgccatgttccaggaacagctgatgactttgaaggaggaatgtgagaaggcccgccaggagctgcaggaggcaaaggagaaggtggcaggcatagaatcccacagcgagctccagataagccggcagcagaacgaactagctgagctccatgccaacctggccagagcactccagcaggtccaagagaaggaagtcagggcccagaagcttgcagatgacctctccactctgcaggaaaagatggctgccaccagcaaagaggtggcccgcttggagaccttggtgcgcaaggcaggtgagcagcaggaaacagcctcccgggagttagtcaaggagcctgcgagggcaggagacagacagcccgagtggctggaagagcaacagggacgccagttctgcagcacacaggcagcgctgcaggctatggagcgggaggcagagcagatgggcaatgagctggaacggctgcgggccgcgctgatggagagccaggggcagcagcaggaggagcgtgggcagcaggaaagggaggtggcgcggctgacccaggagcggggccgtgcccaggctgaccttgccctggagaaggcggccagagcagagcttgagatgcggctgcagaacgccctcaacgagcagcgtgtggagttcgctaccctgcaagaggcactggctcatgccctgacggaaaaggaaggcaaggaccaggagttggccaagcttcgtggtctggaggcagcccagataaaagagctggaggaacttcggcaaaccgtgaagcaactgaaggaacagctggctaagaaagaaaaggagcacgcatctggctcaggagcccaatctgaggctgctggcaggacagagccaacaggccccaagctggaggcactgcgggcagaggtgagcaagctggaacagcaatgccagaagcagcaggagcaggctgacagcctggaacgcagcctcgaggctgagcgggcctcccgggctgagcgggacagtgctctggagactctgcagggccagttagaggagaaggcccaggagctagggcacagtcagagtgccttagcctcggcccaacgggagttggctgccttccgcaccaaggtacaagaccacagcaaggctgaagatgagtggaaggcccaggtggcccggggccggcaagaggctgagaggaaaaatagcctcatcagcagcttggaggaggaggtgtccatcctgaatcgccaggtcctggagaaggagggggagagcaaggagttgaagcggctggtgatggccgagtcagagaagagccagaagctggaggagaggctgcgcctgctgcaggcagagacagccagcaacagtgccagagctgcagaacgcagctctgctctgcgggaggaggtgcagagcctccgggaggaggctgagaaacagcgggtggcttcagagaacctgcggcaggagctgacctcacaggctgagcgtgcggaggagctgggccaagaattgaaggcgtggcaggagaagttcttccagaaagagcaggccctctccaccctgcagctcgagcacaccagcacacaggccctggtgagtgagctgctgccagctaagcacctctgccagcagctgcaggccgagcaggccgctgccgagaaacgccaccgtgaggagctggagcagagcaagcaggccgctgggggactgcgggcagagctgctgcgggcccagcgggagcttggggagctgattcctctgcggcagaaggtggcagagcaggagcgaacagctcagcagctgcgggcagagaaggccagctatgcagagcagctgagcatgctgaagaaggcgcatggcctgctggcagaggagaaccgggggctgggtgagcgggccaaccttggccggcagtttctggaagtggagttggaccaggcccgggagaagtatgtccaagagttggcagccgtacgtgctgatgctgagacccgtctggctgaggtgcagcgagaagcacagagcactgcccgggagctggaggtgatgactgccaagtatgagggtgccaaggtcaaggtcctggaggagaggcagcggttccaggaagagaggcagaaactcactgcccaggtggagcagctagaggtatttcagagagagcaaactaagcaggtggaagaactgagtaagaaactggctgactctgaccaagccagcaaggtgcagcagcagaagctgaaggctgtccaggctcagggaggcgagagccagcaggaggcccagcgcctccaggcccagctgaatgaactgcaagcccagttgagccagaaggagcaggcagctgagcactataagctgcagatggagaaagccaaaacacattatgatgccaagaagcagcagaaccaagagctgcaggagcagctgcggagcctggagcagctgcagaaggaaaacaaagagctgcgagctgaagctgaacggctgggccatgagctacagcaggctgggctgaagaccaaggaggctgaacagacctgccgccaccttactgcccaggtgcgcagcctggaggcacaggttgcccatgcagaccagcagcttcgagacctgggcaaattccaggtggcaactgatgctttaaagagccgtgagccccaggctaagccccagctggacttgagtattgacagcctggatctgagctgcgaggaggggaccccactcagtatcaccagcaagctgcctcgtacccagccagacggcaccagcgtccctggagaaccagcctcacctatctcccagcgcctgccccccaaggtagaatccctggagagtctctacttcactcccatccctgctcggagtcaggcccccctggagagcagcctggactccctgggagacgtcttccaggactcgggtcgtaagacccgctccgctcgtcggcgcaccacgcagatcatcaacatcaccatgaccaagaagctagatgtggaagagccagacagcgccaactcatcgttctacagcacgcggtctgctcctgcttcccaggctagcctgcgagccacctcctctactcagtctctagctcgcctgggttctcccgattatggcaactcagccctgctcagcttgcctggctaccgccccaccactcgcagttctgctcgtcgttcccaggccggggtgtccagtggggcccctccaggaaggaacagcttctacatgggcacttgccaggatgagcctgagcagctggatgactggaaccgcattgcagagctgcagcagcgcaatcgagtgtgccccccacatctgaagacctgctatcccctggagtccaggccttccctgagcctgggcaccatcacagatgaggagatgaaaactggagacccccaagagaccctgcgccgagccagcatgcagccaatccagatagccgagggcactggcatcaccacccggcagcagcgtaaacgggtctccctagagccccaccagggccctggaactcctgagtctaagaaggccaccagctgtttcccacgccccatgactccccgagaccgacatgaagggcgcaaacagagcactactgaggcccagaagaaagcagctccagcttctactaaacaggctgaccggcgccagtcgatggccttcagcatcctcaacacacccaagaagctagggaacagccttctgcggcggggagcctcaaagaaggccctgtccaaggcttcccccaacactcgcagtggaacccgccgttctccgcgcattgccaccaccacagccagcgccgccactgctgccgccattggtgccacccctcgagccaagggcaaggcaaagcactaaagggccagtaccagtgagtggccccacctgtgtccccgatgctgccgtcacctggtcctccgcctactgtccctctcagtgccttctctcagctcccaggccaacagtagccaaacccctagagacagtgatgcctgcccgcaccctggcctggtccctggtccttcactggcgccttctcggagctggcccagggggcctggagcatggacagtgtgggcgctctccctaccttgcctccttttttcttaaagcaaagtcacttctccatcacaaccagatttgaggctggttttgatggctgggtccttgggcctggccagtcttcctcttagcctctggatctagaagggaccataagaggagtaggccctggttcctgctgtcctggtggctgggcccagcaggggccctcactcttgaagtccaggactgggtctgacctggtgggagcacctgccagaggatgctctttcccaggacggatgggccctgtgtctcaggagtggggttgggggacagccttcagcagcagctcacaccctaccttccccagacttgcactggggtgggatttggagtgatgggaaggtttttaagggccggggatggatcttttctaaatgttattacttgtaaatcccgaattc

SEQ ID NO: 32775 - DNA, 8257 bp, Homo Sapiens
taaatttaaaggcggggcggcctgtgagccctgaagtgccggccgcggagggtcctggccattttggtgggaccagttcagcctgataggatggcggaggaaggagccgtggccgtctgcgtgcgagtgcggccgctgaacagcagagaagaatcacttggagaaactgcccaagtttactggaaaactgacaataatgtcatttatcaagttgatggaagtaaatccttcaattttgatcgtgtctttcatggtaatgaaactaccaaaaatgtgtatgaagaaatagcagcaccaatcatcgattctgccatacaaggctacaatggtactatatttgcctatggacagactgcttcaggaaaaacatataccatgatgggttcagaagatcatttgggagttatacccagggcaattcatgacattttccaaaaaattaagaagtttcctgatagggaatttctcttacgtgtatcttacatggaaatatacaatgaaaccattacagatttactctgtggcactcaaaaaatgaaacctttaattattcgagaagatgtcaataggaatgtgtatgttgctgatctcacagaagaagttgtatatacatcagaaatggctttgaaatggattacaaagggagaaaagagcaggcattatggagaaacaaaaatgaatcaaagaagcagtcgttctcataccatctttaggatgattttggaaagcagagagaagggtgaaccttctaattgtgaaggatctgttaaggtatcccatttgaatttggttgatcttgcaggcagtgaaagagctgctcaaacaggcgctgcaggtgtgcggctcaaggaaggctgtaatataaatcgaagcttatttattttgggacaagtgatcaagaaacttagtgatggacaagttggtggtttcataaattatcgagatagcaagttaacacgaattcttcagaattccttgggaggaaatccaaagacacgtattatctgcacaattactccagtatcttttgatgaaactcttactgctctccagtttgccagtactgctaaatatatgaagaatactccttatgttaatgaggtatcaactgatgaagctctcctgaaaaggtatagaaaagaaataatggatcttaaaaaacaattagaggaggtttctttagagacgcgggctcaggcaatggaaaaagaccaattggcccaacttttggaagaaaaagatttgcttcagaaagtacagaatgagaaaattgaaaacttaacacggatgctggtgacctcttcttccctcacgttgcaacaggaattaaaggctaaaagaaaacgaagagttacttggtgccttggcaaaattaacaaaatgaagaactcaaactatgcagatcaatttaatataccaacaaatataacaacaaaaacacataagctttctataaatttattacgagaaattgatgaatctgtctgttcagagtctgatgttttcagtaacactcttgatacattaagtgagatagaatggaatccagcaacaaagctactaaatcaggagaatatagaaagtgagttgaactcacttcgtgctgactatgataatctggtattagactatgaacaactacgaacagaaaaagaagaaatggaattgaaattaaaagaaaagaatgatttggatgaatttgaggctctagaaagaaaaactaaaaaagatcaagagatgcaactaattcatgaaatttcgaacttaaagaatttagttaagcatcgagaagtatataatcaagatcttgagaatgaactcagttcaaaagtagagctgcttagagaaaaggaagaccagattaagaagctacaggaatacatagactctcaaaagctagaaaatataaaaatggacttgtcatactcattggaaagcattgaagacccaaaacaaatgaagcagactctgtttgatgctgaaactgtagcccttgatgccaagagagaatcagcctttcttagaagtgaaaatctggagttgaaggagaaaatgaaagaacttgcaactacatacaagcaaatggaaaatgatattcagttatatcaaagccaattggaggcaaaaaagaaaatgcaagttgatctggagaaagaattacaatctgcttttaatgagataacaaaactcacctcccttatagatggcaaagttccaaaagatttgctctgtaatttggaattggaaggaaagattactgatcttcagaaagaactaaataaagaagttgaagaaaatgaagctttgcgggaagaagtcattttgctttcagaattgaaatctttaccttctgaagtagaaaggctgaggaaagagatacaagacaaatctgaagagctccatataataacatcagaaaaagataaattgttttctgaagtagttcataaggagagtagagttcaaggtttacttgaagaaattgggaaaacaaaagatgacctagcaactacacagtcgaattataaaagcactgatcaagaattccaaaatttcaaaacccttcatatggactttgagcaaaagtataagatggtccttgaggagaatgagagaatgaatcaggaaatagttaatctctctaaagaagcccaaaaatttgattcgagtttgggtgctttgaagaccgagctttcttacaagacccaagaacttcaggagaaaacacgtgaggttcaagaaagactaaatgagatggaacagctgaaggaacaattagaaaatagagattctccgctgcaaactgtagaaagggagaaaacactgattactgagaaactgcagcaaactttagaagaagtaaaaactttaactcaagaaaaagatgatctaaaacaactccaagaaagcttgcaaattgagagggaccaactcaaaagtgatattcacgatactgttaacatgaatatagatactcaagaacaattacgaaatgctcttgagtctctgaaacaacatcaagaaacaattaatacactaaaatcgaaaatttctgaggaagtttccaggaatttgcatatggaggaaaatacaggagaaactaaagatgaatttcagcaaaagatggttggcatagataaaaaacaggatttggaagctaaaaatacccaaacactaactgcagatgttaaggataatgagataattgagcaacaaaggaagatattttctttaatacaggagaaaaatgaactccaacaaatgttagagagtgttatagcagaaaaggaacaattgaagactgacctaaaggaaaatattgaaatgaccattgaaaaccaggaagaattaagacttcttggggatgaacttaaaaagcaacaagagatagttgcacaagaaaagaaccatgccataaagaaagaaggagagctttctaggacctgtgacagactggcagaagttgaagaaaaactaaaggaaaagagccagcaactccaagaaaaacagcaacaacttcttaatgtacaagaagagatgagtgagatgcagaaaaagattaatgaaatagagaatttaaagaatgaattaaagaacaaagaattgacattggaacatatggaaacagagaggcttgagttggctcagaaacttaatgaaaattatgaggaagtgaaatctataaccaaagaaagaaaagttctaaaggaattacagaagtcatttgaaacagagagagaccaccttagaggatatataagagaaattgaagctacaggcctacaaaccaaagaagaactaaaaattgctcatattcacctaaaagaacaccaagaaactattgatgaactaagaagaagcgtatctgagaagacagctcaaataataaatactcaggacttagaaaaatcccataccaaattacaagaagagatcccagtgcttcatgaggaacaagagttactgcctaatgtgaaaaaagtcagtgagactcaggaaacaatgaatgaactggagttattaacagaacagtccacaaccaaggactcaacaacactggcaagaatagaaatggaaaggctcaggttgaatgaaaaatttcaagaaagtcaggaagagataaaatctctaaccaaggaaagagacaaccttaaaacgataaaagaagcccttgaagttaaacatgaccagctgaaagaacatattagagaaactttggctaaaatccaggagtctcaaagcaaacaagaacagtccttaaatatgaaagaaaaagacaatgaaactaccaaaatcgtgagtgagatggagcaattcaaacccaaagattcagcactactaaggatagaaatagaaatgctcggattgtccaaaagacttcaagaaagtcatgatgaaatgaaatctgtagctaaggagaaagatgacctacagaggctgcaagaagttcttcaatctgaaagtgaccagctcaaagaaaacataaaagaaattgtagctaaacacctggaaactgaagaggaacttaaagttgctcattgttgcctgaaagaacaagaggaaactattaatgagttaagagtgaatctttcagagaaggaaactgaaatatcaaccattcaaaagcagttagaagcaatcaatgataaattacagaacaagatccaagagatttatgagaaagaggaacaacttaatataaaacaaattagtgaggttcaggaaaacgtgaatgaactgaaacaattcaaggagcatcgcaaagccaaggattcagcactacaaagtatagaaagtaagatgctcgagttgaccaacagacttcaagaaagtcaagaagaaatacaaattatgattaaggaaaaagaggaaatgaaaagagtacaggaggcccttcagatagagagagaccaactgaaagaaaacactaaagaaattgtagctaaaatgaaagaatctcaagaaaaagaatatcagtttcttaagatgacagctgtcaatgagactcaggagaaaatgtgtgaaatagaacacttgaaggagcaatttgagacccagaagttaaacctggaaaacatagaaacggagaatataaggttgactcagatactacatgaaaaccttgaagaaatgagatctgtaacaaaagaaagagatgaccttaggagtgtggaggagactctcaaagtagagagagaccagctcaaggaaaaccttagagaaactataactagagacctagaaaaacaagaggagctaaaaattgttcacatgcatctgaaggagcaccaagaaactattgataaactaagagggattgtttcagagaaaacaaatgaaatatcaaatatgcaaaaggacttagaacactcaaatgatgccttaaaagcacaggatctgaaaatacaagaggaactaagaattgctcacatgcatctgaaagagcagcaggaaactattgacaaactcagaggaattgtttctgagaagacagataaactatcaaatatgcaaaaagatttagaaaattcaaatgctaaattacaagaaaagattcaagaacttaaggcaaatgaacatcaacttattacgttaaaaaaagatgtcaatgagacacagaaaaaagtgtctgaaatggagcaactaaagaaacaaataaaagaccaaagcttaactctgagtaaattagaaatagagaatttaaatttggctcaagaacttcatgaaaaccttgaagaaatgaaatctgtaatgaaagaaagagataatctaagaagagtagaggagacactcaaactggagagagaccaactcaaggaaagcctgcaagaaaccaaagctagagatctggaaatacaacaggaactaaaaactgctcgtatgctatcaaaagaacacaaagaaactgttgataaacttagagaaaaaatttcagaaaagacaattcaaatttcagacattcaaaaggatttagataaatcaaaagatgaattacagaaaaagatccaagaacttcagaaaaaagaacttcaactgcttagagtgaaagaagatgtcaatatgagtcataaaaaaattaatgaaatggaacagttgaagaagcaatttgagccaaactatctatgcaagtgtgagatggataacttccagttgactaagaaacttcatgaaagccttgaagaaataagaattgtagctaaagaaagagatgagctaaggaggataaaagaatctctcaaaatggaaagggaccaattcatagcaaccttaagggaaatgatagctagagaccgacagaaccaccaagtaaaacctgaaaaaaggttactaagtgatggacaacagcaccttatggaaagcctgagagaaaagtgctctagaataaaagagcttttgaagagatactcagagatggatgatcattatgagtgcttgaatagattgtctcttgacttggagaaggaaattgaattccacagaatcatgaagaaactgaagtatgtgttaagctatgttacaaaaataaaagaagaacaacatgaatgcatcaataaatttgaaatggattttattgatgaagtggaaaagcaaaaggaattgctaattaaaatacagcaccttcaacaagattgtgatgtaccatccagagaattaagggatctcaaattgaaccagaatatggatctacatattgaggaaattctcaaagatttctcagaaagtgagttccctagcataaagactgaatttcaacaagtactaagtaataggaaagaaatgacacagtttttggaagagtggttaaatactcgttttgatatagaaaagcttaaaaatggcatccagaaagaaaatgataggatttgtcaagtgaataacttctttaataacagaataattgccataatgaatgaatcaacagagtttgaggaaagaagtgctaccatatccaaagagtgggaacaggacctgaaatcactgaaagagaaaaatgaaaaactatttaaaaactaccaaacattgaagacttccttggcatctggtgcccaggttaatcctaccacacaagacaataagaatcctcatgttacatcaagagctacacagttaaccacagagaaaattcgagagctggaaaattcactgcatgaagctaaagaaagtgctatgcataaggaaagcaagattataaagatgcagaaagaacttgaggtgactaatgacataatagcaaaacttcaagccaaagttcatgaatcaaataaatgccttgaaaaaacaaaagagacaattcaagtacttcaggacaaagttgctttaggagctaagccatataaagaagaaattgaagatctcaaaatgaagcttgtgaaaatagacctagagaaaatgaaaaatgccaaagaatttgaaaaggaaatcagtgctacaaaagccactgtagaatatcaaaaggaagttataaggctattgagagaaaatctcagaagaagtcaacaggcccaagatacctcagtgatatcagaacatactgatcctcagccttcaaataaacccttaacttgtggaggtggcagcggcattgtacaaaacacaaaagctcttattttgaaaagtgaacatataaggctagaaaaagaaatttctaagttaaagcagcaaaatgaacagctaataaaacaaaagaatgaattgttaagcaataatcagcatctttccaatgaggtcaaaacttggaaggaaagaacccttaaaagagaggctcacaaacaagtaacttgtgagaattctccaaagtctcctaaagtgactggaacagcttctaaaaagaaacaaattacaccctctcaatgcaaggaacggaatttacaagatcctgtgccaaaggaatcaccaaaatcttgtttttttgatagccgatcaaagtctttaccatcacctcatccagttcgctattttgataactcaagtttaggcctttgtccagaggtgcaaaatgcaggagcagagagtgtggattctcagccaggtccttggcacgcctcctcaggcaaggatgtgcctgagtgcaaaactcagtagactcctctttgtcacttctctggagatccagcattccttatttggaaatgactttgtttatgtgtctatccctggtaatgatgttgtagtgcagcttaatttcaattcagtctttactttgccactagagttgaaagataagggaacaggaaatgaatgcattgtggtaatttag

SEQ ID NO: 32776 - DNA, 5200 bp, Homo Sapiens
gaccacctgatcgaaggaaaaggaaggcacagcggagcgcagagtgagaaccaccaaccgaggcgccgggcagcgacccctgcagcggagacagagactgagcggcccggcaccgccatgcctgcgctctggctgggctgctgcctctgcttctcgctcctcctgcccgcagcccgggccacctccaggagggaagtctgtgattgcaatgggaagtccaggcagtgtatctttgatcgggaacttcacagacaaactggtaatggattccgctgcctcaactgcaatgacaacactgatggcattcactgcgagaagtgcaagaatggcttttaccggcacagagaaagggaccgctgtttgccctgcaattgtaactccaaaggttctcttagtgctcgatgtgacaactctggacggtgcagctgtaaaccaggtgtgacaggagccagatgcgaccgatgtctgccaggcttccacatgctcacggatgcggggtgcacccaagaccagagactgctagactccaagtgtgactgtgacccagctggcatcgcagggccctgtgacgcgggccgctgtgtctgcaagccagctgttactggagaacgctgtgataggtgtcgatcaggttactataatctggatggggggaaccctgagggctgtacccagtgtttctgctatgggcattcagccagctgccgcagctctgcagaatacagtgtccataagatcacctctacctttcatcaagatgttgatggctggaaggctgtccaacgaaatgggtctcctgcaaagctccaatggtcacagcgccatcaagatgtgtttagctcagcccaacgactagatcctgtctattttgtggctcctgccaaatttcttgggaatcaacaggtgagctatgggcaaagcctgtcctttgactaccgtgtggacagaggaggcagacacccatctgcccatgatgtgatcctggaaggtgctggtctacggatcacagctcccttgatgccacttggcaagacactgccttgtgggctcaccaagacttacacattcaggttaaatgagcatccaagcaataattggagcccccagctgagttactttgagtatcgaaggttactgcggaatctcacagccctccgcatccgagctacatatggagaatacagtactgggtacattgacaatgtgaccctgatttcagcccgccctgtctctggagccccagcaccctgggttgaacagtgtatatgtcctgttgggtacaaggggcaattctgccaggattgtgcttctggctacaagagagattcagcgagactggggccttttggcacctgtattccttgtaactgtcaagggggaggggcctgtgatccagacacaggagattgttattcaggggatgagaatcctgacattgagtgtgctgactgcccaattggtttctacaacgatccgcacgacccccgcagctgcaagccatgtccctgtcataacgggttcagctgctcagtgattccggagacggaggaggtggtgtgcaataactgccctcccggggtcaccggtgcccgctgtgagctctgtgctgatggctactttggggacccctttggtgaacatggcccagtgaggccttgtcagccctgtcaatgcaacagcaatgtggaccccagtgcctctgggaattgtgaccggctgacaggcaggtgtttgaagtgtatccacaacacagccggcatctactgcgaccagtgcaaagcaggctacttcggggacccattggctcccaacccagcagacaagtgtcgagcttgcaactgtaaccccatgggctcagagcctgtaggatgtcgaagtgatggcacctgtgtttgcaagccaggatttggtggccccaactgtgagcatggagcattcagctgtccagcttgctataatcaagtgaagattcagatggatcagtttatgcagcagcttcagagaatggaggccctgatttcaaaggctcagggtggtgatggagtagtacctgatacagagctggaaggcaggatgcagcaggctgagcaggcccttcaggacattctgagagatgcccagatttcagaaggtgctagcagatcccttggtctccagttggccaaggtgaggagccaagagaacagctaccagagccgcctggatgacctcaagatgactgtggaaagagttcgggctctgggaagtcagtaccagaaccgagttcgggatactcacaggctcatcactcagatgcagctgagcctggcagaaagtgaagcttccttgggaaacactaacattcctgcctcagaccactacgtggggccaaatggctttaaaagtctggctcaggaggccacaagattagcagaaagccacgttgagtcagccagtaacatggagcaactgacaagggaaactgaggactattccaaacaagccctctcactggtgcgcaaggccctgcatgaaggagtcggaagcggaagcggtagcccggacggtgctgtggtgcaagggcttgtggaaaaattggagaaaaccaagtccctggcccagcagttgacaagggaggccactcaagcggaaattgaagcagataggtcttatcagcacagtctccgcctcctggattcagtgtctccgcttcagggagtcagtgatcagtcctttcaggtggaagaagcaaagaggatcaaacaaaaagcggattcactctcaagcctggtaaccaggcatatggatgagttcaagcgtacacaaaagaatctgggaaactggaaagaagaagcacagcagctcttacagaatggaaaaagtgggagagagaaatcagatcagctgctttcccgtgccaatcttgctaaaagcagagcacaagaagcactgagtatgggcaatgccactttttatgaagttgagagcatccttaaaaacctcagagagtttgacctgcaggtggacaacagaaaagcagaagctgaagaagccatgaagagactctcctacatcagccagaaggtttcagatgccagtgacaagacccagcaagcagaaagagccctggggagcgctgctgctgatgcacagagggcaaagaatggggccggggaggccctggaaatctccagtgagattgaacaggagattgggagtctgaacttggaagccaatgtgacagcagatggagccttggccatggaaaagggactggcctctctgaagagtgagatgagggaagtggaaggagagctggaaaggaaggagctggagtttgacacgaatatggatgcagtacagatggtgattacagaagcccagaaggttgataccagagccaagaacgctggggttacaatccaagacacactcaacacattagacggcctcctgcatctgatggaccagcctctcagtgtagatgaagaggggctggtcttactggagcagaagctttcccgagccaagacccagatcaacagccaactgcggcccatgatgtcagagctggaagagagggcacgtcagcagaggggccacctccatttgctggagacaagcatagatgggattctggctgatgtgaagaacttggagaacattagggacaacctgcccccaggctgctacaatacccaggctcttgagcaacagtgaagctgccataaatatttctcaactgaggttcttgggatacagatctcagggctcgggagccatgtcatgtgagtgggtgggatggggacatttgaacatgtttaatgggtatgctcaggtcaactgacctgaccccattcctgatcccatggccaggtggttgtcttattgcaccatactccttgcttcctgatgctgggcatgaggcagataggcactggtgtgagaatgatcaaggatctggaccccaaagatagactggatggaaagacaaactgcacaggcagatgtttgcctcataatagtcgtaagtggagtcctggaatttggacaagtgctgttgggatatagtcaacttattctttgagtaatgtgactaaaggaaaaaactttgactttgcccaggcatgaaattcttcctaatgtcagaacagagtgcaacccagtcacactgtggccagtaaaatactattgcctcatattgtcctctgcaagcttcttgctgatcagagttcctcctacttacaacccagggtgtgaacatgttctccattttcaagctggaagaagtgagcagtgttggagtgaggacctgtaaggcaggcccattcagagctatggtgcttgctggtgcctgccaccttcaagttctggacctgggcatgacatcctttcttttaatgatgccatggcaacttagagattgcatttttattaaagcatttcctaccagcaaagcaaatgttgggaaagtatttactttttcggtttcaaagtgatagaaaagtgtggcttgggcattgaaagaggtaaaattctctagatttattagtcctaattcaatcctacttttcgaacaccaaaaatgatgcgcatcaatgtattttatcttattttctcaatctcctctctctttcctccacccataataagagaatgttcctactcacacttcagctgggtcacatccatccctccattcatccttccatccatctttccatccattacctccatccatccttccaacatatatttattgagtacctactgtgtgccaggggctggtgggacagtggtgacatagtctctgccctcatagagttgattgtctagtgaggaagacaagcatttttaaaaaataaatttaaacttacaaactttgtttgtcacaagtggtgtttattgcaataaccgcttggtttgcaacctctttgctcaacagaacatatgttgcaagaccctcccatgggcactgagtttggcaaggatgacagagctctgggttgtgcacatttctttgcattccagcgtcactctgtgccttctacaactgattgcaacagactgttgagttatgataacaccagtgggaattgctggaggaaccagaggcacttccaccttggctgggaagactatggtgctgccttgcttctgtatttccttggattttcctgaaagtgtttttaaataaagaacaattgttagatgccaaaaa

SEQ ID NO: 32777 - DNA, 5200 bp, Homo Sapiens; identical to SEQ ID NO: 32776

SEQ ID NO: 32778 - DNA, 4316 bp, Homo Sapiens
gaccacctgatcgaaggaaaaggaaggcacagcggagcgcagagtgagaaccaccaaccgaggcgccgggcagcgacccctgcagcggagacagagactgagcggcccggcaccgccatgcctgcgctctggctgggctgctgcctctgcttctcgctcctcctgcccgcagcccgggccacctccaggagggaagtctgtgattgcaatgggaagtccaggcagtgtatctttgatcgggaacttcacagacaaactggtaatggattccgctgcctcaactgcaatgacaacactgatggcattcactgcgagaagtgcaagaatggcttttaccggcacagagaaagggaccgctgtttgccctgcaattgtaactccaaaggttctcttagtgctcgatgtgacaactctggacggtgcagctgtaaaccaggtgtgacaggagccagatgcgaccgatgtctgccaggcttccacatgctcacggatgcggggtgcacccaagaccagagactgctagactccaagtgtgactgtgacccagctggcatcgcagggccctgtgacgcgggccgctgtgtctgcaagccagctgttactggagaacgctgtgataggtgtcgatcaggttactataatctggatggggggaaccctgagggctgtacccagtgtttctgctatgggcattcagccagctgccgcagctctgcagaatacagtgtccataagatcacctctacctttcatcaagatgttgatggctggaaggctgtccaacgaaatgggtctcctgcaaagctccaatggtcacagcgccatcaagatgtgtttagctcagcccaacgactagatcctgtctattttgtggctcctgccaaatttcttgggaatcaacaggtgagctatgggcaaagcctgtcctttgactaccgtgtggacagaggaggcagacacccatctgcccatgatgtgatcctggaaggtgctggtctacggatcacagctcccttgatgccacttggcaagacactgccttgtgggctcaccaagacttacacattcaggttaaatgagcatccaagcaataattggagcccccagctgagttactttgagtatcgaaggttactgcggaatctcacagccctccgcatccgagctacatatggagaatacagtactgggtacattgacaatgtgaccctgatttcagcccgccctgtctctggagccccagcaccctgggttgaacagtgtatatgtcctgttgggtacaaggggcaattctgccaggattgtgcttctggctacaagagagattcagcgagactggggccttttggcacctgtattccttgtaactgtcaagggggaggggcctgtgatccagacacaggagattgttattcaggggatgagaatcctgacattgagtgtgctgactgcccaattggtttctacaacgatccgcacgacccccgcagctgcaagccatgtccctgtcataacgggttcagctgctcagtgattccggagacggaggaggtggtgtgcaataactgccctcccggggtcaccggtgcccgctgtgagctctgtgctgatggctactttggggacccctttggtgaacatggcccagtgaggccttgtcagccctgtcaatgcaacagcaatgtggaccccagtgcctctgggaattgtgaccggctgacaggcaggtgtttgaagtgtatccacaacacagccggcatctactgcgaccagtgcaaagcaggctacttcggggacccattggctcccaacccagcagacaagtgtcgagcttgcaactgtaaccccatgggctcagagcctgtaggatgtcgaagtgatggcacctgtgtttgcaagccaggatttggtggccccaactgtgagcatggagcattcagctgtccagcttgctataatcaagtgaagattcagatggatcagtttatgcagcagcttcagagaatggaggccctgatttcaaaggctcagggtggtgatggagtagtacctgatacagagctggaaggcaggatgcagcaggctgagcaggcccttcaggacattctgagagatgcccagatttcagaaggtgctagcagatcccttggtctccagttggccaaggtgaggagccaagagaacagctaccagagccgcctggatgacctcaagatgactgtggaaagagttcgggctctgggaagtcagtaccagaaccgagttcgggatactcacaggctcatcactcagatgcagctgagcctggcagaaagtgaagcttccttgggaaacactaacattcctgcctcagaccactacgtggggccaaatggctttaaaagtctggctcaggaggccacaagattagcagaaagccacgttgagtcagccagtaacatggagcaactgacaagggaaactgaggactattccaaacaagccctctcactggtgcgcaaggccctgcatgaaggagtcggaagcggaagcggtagcccggacggtgctgtggtgcaagggcttgtggaaaaattggagaaaaccaagtccctggcccagcagttgacaagggaggccactcaagcggaaattgaagcagataggtcttatcagcacagtctccgcctcctggattcagtgtctccgcttcagggagtcagtgatcagtcctttcaggtggaagaagcaaagaggatcaaacaaaaagcggattcactctcaagcctggtaaccaggcatatggatgagttcaagcgtacacaaaagaatctgggaaactggaaagaagaagcacagcagctcttacagaatggaaaaagtgggagagagaaatcagatcagctgctttcccgtgccaatcttgctaaaagcagagcacaagaagcactgagtatgggcaatgccactttttatgaagttgagagcatccttaaaaacctcagagagtttgacctgcaggtggacaacagaaaagcagaagctgaagaagccatgaagagactctcctacatcagccagaaggtttcagatgccagtgacaagacccagcaagcagaaagagccctggggagcgctgctgctgatgcacagagggcaaagaatggggccggggaggccctggaaatctccagtgagattgaacaggagattgggagtctgaacttggaagccaatgtgacagcagatggagccttggccatggaaaagggactggcctctctgaagagtgagatgagggaagtggaaggagagctggaaaggaaggagctggagtttgacacgaatatggatgcagtacagatggtgattacagaagcccagaaggttgataccagagccaagaacgctggggttacaatccaagacacactcaacacattagacggcctcctgcatctgatgggtatgtgaacccacaacccacaaccttccagctccatgctccagggctttgctccagaacactcactatacctagccccagcaaaggggagtctcagctttccttaaggatatcagtaaatgtgctttgtttccaggcccagataactttcggcaggttcccttacatttactggaccctgttttaccgttgctaagatgggtcactgaacacctattgcacttgggggtaaaggtctgtgggccaaagaacaggtgtatataagcaacttcacagaacacgagacagcttgggaatcctgctaaagagtctggcctggaccctgagaagccagtggacagttttaagcagaggaataacatcaccactgtatatttcagaaagatcactagggcagccgagtggaggaaagcttgaagagggggttagagagaaggcaggttgagactacttaagatattgttgaaataattgaagagagaaatgacaggagcctgctctaaggcagtagaatggtggctgggaagatgtgaaggaagattttcccagtctgtgaagtcaagaatcacttgccggccgggtgtggtggctcacgcctgtaattctagcactttgggagactgaagcgggtggatcacccgaggtcaggagttgaagaccagcctggccaacatggtgaaaccctgtctctactaaaagtacaaaaattagctggatgatggtggtgggcgcctgtaattccagctactcaggagtctgaggcaggagaatcgcttgaacccaggaggcgaggttacagtgagccaagattgcaccactgctcttccagcctgggaacagagagactgcctaaaaaaaaaaaaaaaaaaaa

SEQ ID NO: 32779 - DNA, 3493 bp, Homo Sapiens
ccgctcaactaaaaaactgaatgggatgggagatgatggcagccccccagcgaaaaaaatgataacggacattcatgcaaatggaaaaacgataaacaaggtgccaacagttaagaaggaacacttggatgactatggagaagcaccagtggaaactgatggagagcatgttaagcgaacctgtacttctgttcctgaaactttgcatttaaatcccagtttgaaacacacattggcacaattccatttaagtagtcagagctcgctgggtggaccagcagcattttctgctcggcattcccaagaaagcatgtcgcctactgtatttctgcctcttccatcacctcaggttcttcctggcccattgctcatcccttcagatagctccacagaactcactcagactgtgttggaaggggaatctatttcttgttttcaagttggaggagaaaagagactctgtttgccccaagtcttaaattctgttctccgagaatttacactccagcaaataaatacagtgtgtgatgaactgtacatatattgttcaaggtgtacttcagaccagcttcatatcttaaaggtactgggcatacttccattcaatgccccatcctgtgggctgattacattaactgatgcacaaagattatgtaatgctttattgcggccacgaacttttcctcaaaatggtagcgtacttcctgctaaaagctcattggcccagttaaaggaaactggcagtgcctttgaagtggagcatgaatgcctaggcaaatgtcagggtttatttgcaccccagttttatgttcagcctgatgctccgtgtattcaatgtctggagtgttgtggaatgtttgcaccccagacgtttgtgatgcattctcacagatcacctgacaaaagaacttgccactggggctttgaatcagctaaatggcattgctatcttcatgtgaaccaaaaatacttaggaacacctgaagaaaagaaactgaagataattttagaagaaatgaaggagaagtttagcatgagaagtggaaagagaaatcaatccaagacagatgcaccatcaggaatggaattacagtcatggtatcctgttataaagcaggaaggtgaccatgtttctcagacacattcatttttacaccctagctaatttattttaaaataagtatagctctctgaagtaatttcatacatagtatcttataagagaacatgaaaaacatttattatcccataaaatccatggggtaataatgtcaattaatgatagtttcaggaaactccctttaaaaacagatctaagaattttacctaatatattttgagccaagaattaacaaatatgaaatttgccattagagaatgacagacttttctgtgcaaaaaaagtgcagaagatgttgtccctcctgaaactatggaattcctttatcttctaaaacttatctaaaaatcttttagtagcaggtaactaaactgtcctatatgcacctatcatgtactatcagttgactgtaaattcctgattttgatattaagtagtaaatgaaaatggtccattcgtgcaaattttggtaagacaacatttaaacatacagaagtccaaaataaccttcaaggtgtttaacattttacaacttaaaggaaaacaagtccattatataaattttagtaagactcataactacatgtaaaaactgtacaggaggattatggattgtatagaaactgatacacaacagtggtatcagtttttctcaagaacgttaatattttcacaccactattaacatcacaaacaaaagttcagaaattatcacattttatttttgaaaagttgctgcttaaaaaaaaatctaactataaccacatttaaactgaaaaacaaattacaactgctgcttctgtttagcagcagcacataacaacacattcttcttccccactgtgctcatggggtatgctataacctcagtaaaattcctcctagggtacacattaaaaagaagagaactggtggaaattcattccacaatctgaacaaagtaaaagtaaatttggtgtatgttaatgagtacaccatatcaacttagaaaaattgtgttaatgagaaaaggggagattcaactccttgagtagctctatatacttaaaatataaagccaccattgtatctaaaattgagtctgaaatatggataacaaaattgaccacagctattttccaacacatattgcagcttttaaaagtacacaattgttaagtttgcattagaaatataagcagattacctactaggttgaaaccatatagtattgttactaagctgatttttttaaaaaagtacaaagaaacatacattttcattcatttggaaaatgtaaaaatttaagtactaatatataatctcttcactttctctgatctacaaatggatagaatgcctagttatcgtcatgcagatagattcttcagaattccgtgtgtgataaagtggttgccccaaatgtgtcacttacttctgctgtatcccagtctaaagagctcacaaagacagaggcaagtaagtccatatcaagacagtcagagaaggctcacagtagtggtaaacttcaaaaaacagtgtcttatccagatgtctcacttgaggaacaggagaaaatggatttaaaaacaagtagagaattatgtagccgtttagatgcatcaatctcaaaaaattctacaagtaaaaggaaatctgagtctgccacttgcaacttagtcagagacataaacaaagtgggaattggccttgttgctgccgcttcatctccgcttcttgtgaaagatgtcatttgtgaggatgataagggaaaaatcatggaagaagtaatgagaacttatttaaaacaacaggaaaaactaaacttgattttgcaaaagaagcaacaacttcagatggaagtaaaaatgttgagtagttcaaaatctatgaaggaactcactgaagaacagcagaatttacagaaagagcttgaatctttgcagaatgaacatgctcaaagaatggaagaattttatgttgaacagaaagacttagagaaaaaattggagcagataatgaagcaaaaatgtacctgtgactcaaatttagaaaaagacaaagaggctgaatatgcaggacagttggcagaactgaggcagagattggaccatgctgaggccgataggcaagaactccaagatgaactcagacaggaacgggaagcaagacagaagttagagatgatgataaaagagctaaagctgcaaattctgaaatcatcaaagactgctaaagaatagaaactgttaaagagattcatctgtgtattactgacaaggttttttttgtttgttgcttgctttggtaattgaatttgaatcatggtccatagctgtttcctgtgtgaattgttatcgctcacattcacacacatacgagcgagctaagtgt

SEQ ID NO: 32780 - DNA, 1970 bp, Homo Sapiens
aggaaacggtttattaggagggagtggtggagctgggccaggcaggaagacgctggaataagaaacatttttgctccagcccccatcccagtcccgggaggctgccgcgccagctgcgccgagcgagcccctccccggctccagcccggtccggggccgcgccggaccccagcccgccgtccagcgctggcggtgcaactgcggccgcgcggtggaggggaggtggccccggtccgccgaaggctagcgccccgccacccgcagagcgggcccagagggaccatgaccttgggctcccccaggaaaggccttctgatgctgctgatggccttggtgacccagggagaccctgtgaagccgtctcggggcccgctggtgacctgcacgtgtgagagcccacattgcaaggggcctacctgccggggggcctggtgcacagtagtgctggtgcgggaggaggggaggcacccccaggaacatcggggctgcgggaacttgcacagggagctctgcagggggcgccccaccgagttcgtcaaccactactgctgcgacagccacctctgcaaccacaacgtgtccctggtgctggaggccacccaacctccttcggagcagccgggaacagatggccagctggccctgatcctgggccccgtgctggccttgctggccctggtggccctgggtgtcctgggcctgtggcatgtccgacggaggcaggagaagcagcgtggcctgcacagcgagctgggagagtccagtctcatcctgaaagcatctgagcagggcgacacgatgttgggggacctcctggacagtgactgcaccacagggagtggctcagggctccccttcctggtgcagaggacagtggcacggcaggttgccttggtggagtgtgtgggaaaaggccgctatggcgaagtgtggcggggcttgtggcacggtgagagtgtggccgtcaagatcttctcctcgagggatgaacagtcctggttccgggagactgagatctataacacagtattgctcagacacgacaacatcctaggcttcatcgcctcagacatgacctcccgcaactcgagcacgcagctgtggctcatcacgcactaccacgagcacggctccctctacgactttctgcagagacagacgctggagccccatctggctctgaggctagctgtgtccgcggcatgcggcctggcgcacctgcacgtggagatcttcggtacacagggcaaaccagccattgcccaccgcgacttcaagagccgcaatgtgctggtcaagagcaacctgcagtgttgcatcgccgacctgggcctggctgtgatgcactcacagggcagcgattacctggacatcggcaacaacccgagagtgggcaccaagcggtacatggcacccgaggtgctggacgagcagatccgcacggactgctttgagtcctacaagtggactgacatctgggcctttggcctggtgctgtgggagattgcccgccggaccatcgtgaatggcatcgtggaggactatagaccacccttctatgatgtggtgcccaatgaccccagctttgaggacatgaagaaggtggtgtgtgtggatcagcagacccccaccatccctaaccggctggctgcagacccggtcctctcaggcctagctcagatgatgcgggagtgctggtacccaaacccctctgcccgactcaccgcgctgcggatcaagaagacactacaaaaaattagcaacagtccagagaagcctaaagtgattcaatagcccaggagcacctgattcctttctgcctgcagggggctgggggggtggggggcagtggatggtgccctatctgggtagaggtagtgtgagtgtggtgtgtgctggggatgggcagctgcgcctgcctgctcggcccccagcccacccagccaaaaatacagctgggctgaaacctg

SEQ ID NO: 32781 - DNA, 2932 bp, Homo Sapiens
gctccgcgccgagggctggaggatgcgttccctggggtccggacttatgaaaatatgcatcagtttaatactgtcttggaattcatgagatggaagcataggtcaaagctgtttggagaaaatcagaagtacagttttatctagccacatcttggaggagtcgtaagaaagcagtgggagttgaagtcattgtcaagtgcttgcgatcttttacaagaaaatctcactgaatgatagtcatttaaattggtgaagtagcaagaccaattattaaaggtgacagtacacaggaaacattacaattgaacaatgactcagctatacatttacatcagattattgggagcctatttgttcatcatttctcgtgttcaaggacagaatctggatagtatgcttcatggcactgggatgaaatcagactccgaccagaaaaagtcagaaaatggagtaaccttagcaccagaggataccttgccttttttaaagtgctattgctcagggcactgtccagatgatgctattaataacacatgcataactaatggacattgctttgccatcatagaagaagatgaccagggagaaaccacattagcttcagggtgtatgaaatatgaaggatctgattttcagtgcaaagattctccaaaagcccagctacgccggacaatagaatgttgtcggaccaatttatgtaaccagtatttgcaacccacactgccccctgttgtcataggtccgttttttgatggcagcattcgatggctggttttgctcatttctatggctgtctgcataattgctatgatcatcttctccagctgcttttgttacaaacattattgcaagagcatctcaagcagacgtcgttacaatcgtgatttggaacaggatgaagcatttattccagttggagaatcactaaaagaccttattgaccagtcacaaagttctggtagtgggtctggactacctttattggttcagcgaactattgccaaacagattcagatggtccggcaagttggtaaaggccgatatggagaagtatggatgggcaaatggcgtggcgaaaaagtggcggtgaaagtattctttaccactgaagaagccagctggtttcgagaaacagaaatctaccaaactgtgctaatgcgccatgaaaacatacttggtttcatagcggcagacattaaaggtacaggttcctggactcagctctatttgattactgattaccatgaaaatggatctctctatgacttcctgaaatgtgctacactggacaccagagccctgcttaaattggcttattcagctgcctgtggtctgtgccacctgcacacagaaatttatggcacccaaggaaagcccgcaattgctcatcgagacctaaagagcaaaaacatcctcatcaagaaaaatgggagttgctgcattgctgacctgggccttgctgttaaattcaacagtgacacaaatgaagttgatgtgcccttgaataccagggtgggcaccaaacgctacatggctcccgaagtgctggacgaaagcctgaacaaaaaccacttccagccctacatcatggctgacatctacagcttcggcctaatcatttgggagatggctcgtcgttgtatcacaggagggatcgtggaagaataccaattgccatattacaacatggtaccgagtgatccgtcatacgaagatatgcgtgaggttgtgtgtgtcaaacgtttgcggccaattgtgtctaatcggtggaacagtgatgaatgtctacgagcagttttgaagctaatgtcagaatgctgggcccacaatccagcctccagactcacagcattgagaattaagaagacgcttgccaagatggttgaatcccaagatgtaaaaatctgatggttaaaccatcggaggagaaactctagactgcaagaactgtttttacccatggcatgggtggaattagagtggaataaggatgttaacttggttctcagactctttcttcactacgtgttcacaggctgctaatattaaacctttcagtactcttattaggatacaagctgggaacttctaaacacttcattctttatatatggacagctttattttaaatgtggtttttgatgcctttttttaagtgggtttttatgaactgcatcaagacttcaatcctgattagtgtctccagtcaagctctgggtactgaattgcctgttcataaaacggtgctttctgtgaaagccttaagaagataaatgagcgcagcagagatggagaaatagactttgccttttacctgagacattcagttcgtttgtattctacctttgtaaaacagcctatagatgatgatgtgtttgggatactgcttattttatgatagtttgtcctgtgtccttagtgatgtgtgtgtgtctccatgcacatgcacgccgggattcctctgctgccatttgaattagaagaaaataatttatatgcatgcacaggaagatattggtggccggtggttttgtgctttaaaaatgcaatatctgaccaagattcgccaatctcatacaagccatttactttgcaagtgagatagcttccccaccagctttattttttaacatgaaagctgatgccaaggccaaaagaagtttaaagcatctgtaaatttggactgttttccttcaaccaccattttttttgtggttattatttttgtcacggaaagcatcctctccaaagttggagcttctattgccatgaaccatgcttacaaagaaagcacttcttattgaagtgaattcctgcatttgatagcaatgtaagtgcctataaccatgttctatattctttattctcagtaacttttaaaagggaagttatttatattttgtgtataatgtgctttatttgcaaatcaccc

SEQ ID NO: 32782 - DNA, 2142 bp, Homo Sapiens
cgcctttacaatggccctgaccctgtttgatacagatgaatatagacctcctgtttggaaatcttacttatatcagctacaacaggaagcccctcatcctcgaagaattacctgtacttgcgaggtggaaaacagaccaaagtattatggaagagagtttcatggcatgatctccagagaagcagccgaccagctcttgattgtggctgaggggagctacctcatccgggagagccagcggcagccagggacctacactttggctttaagatttggaagtcaaaccagaaacttcaggctctactacgatggcaagcactttgttggggagaaacgctttgagtccatccacgatctggtgactgatggcttgattactctctatattgaaaccaaggcagcagaatacattgccaagatgacgataaacccaatttatgagcacgtaggatacacaaccttaaacagagagccagcatacaaaaaacatatgccagtcctgaaagagacacatgatgagagagattctacaggccaggatggggtgtcagagaaaaggttgacatcacttgttagaagagcaactctgaaagaaaacgagcaaattccaaaatatgaaaagattcacaatttcaaggtgcatacattcagagggccacactggtgtgaatactgtgccaactttatgtggggtctcattgctcagggagtgaaatgtgcagattgtggtttgaatgttcataagcagtgttccaagatggtcccaaatgactgtaagccagacttgaagcatgtcaaaaaggtgtacagctgtgaccttacgacgctcgtgaaagcacataccactaagcggccaatggtggtagacatgtgcatcagggagattgagtctagaggtcttaattctgaaggactataccgagtatcaggatttagtgacctaattgaagatgtcaagatggctttcgacagagatggtgagaaggcagatatttctgtgaacatgtatgaagatatcaacattatcactggtgcacttaaactgtacttcagggatttgccaattccactcattacatatgatgcctaccctaagtttatagaatctgccaaaattatggatccggatgagcaattggaaacccttcatgaagcactgaaactactgccacctgctcactgcgaaaccctccggtacctcatggcacatctaaagagagtgaccctccacgaaaaggagaatcttatgaatgcagagaaccttggaatcgtctttggacccacccttatgagatctccagaactagacgccatggctgcattgaatgatatacggtatcagagactggtggtggagctgcttatcaaaaacgaagacattttattttaaatttttaatttgaggggaaaagaaatgttttacagatgaaggaatgttttatagtaatttaatttgctcctgtagctgcattatttcttgattagaggtttgggcatataaccagattaaagtgaaggaactttctgttgtttttgtagcaccgctcagctgtcttgtaaaacagtgaacacacgctttctggttctagtaatcctgggtgtttatcacgttcagagaaactcaagctattgcatgattagccccctatctggcaaggaaaccccatacagaagaaacaacaaacctgcgcctgcaccgcctctgcgtcctgggtagtctgtgcttgtaatccagcatgtttcacagagtaagcctgttgtgactttgcttttggggtctatgtcattggtttctgatgcttgtacaaacacgcacacacaaatggataaaacagcacctctggctgttacattaccataaaccatatcacatgcctacattttacaaatgatttctggtttctcttagttcttctctaacatagtactttctttccagcaaaagcaaaatgtgttttcagatttgttactttaataaaggttatccataccaataaaaagtgtacaacacagcattttctgttaaattattattggttttcagttgtaatttggtattttttctggcatgcgtttattaatttattaaattggcttttagaaataaaaaatattgatagcttacttttttctcataagaat

SEQ ID NO: 32783 - DNA, 5487 bp, Homo Sapiens
atggcctcaggagccggaggagtcggagggggcggtggcggcaagatccggacgcggcgttgccaccaggggccaattaagccttaccagcaggggcgacaacagcatcagggcattcttagcagggttacagaatctgttaagaatattgtgccagggtggttacaaagatacttcaacaagaatgaagatgtatgcagctgttcaacagacacaagcgaggttccacgctggccagaaaataaagaggaccatctggtatatgccgatgaggagagctctaatattactgatgggagaatcacacctgagccagcagtcagtaatacagaagaaccttcaacaactagtactgcttcaaattatccagatgtgttaacaaggccttctcttcatcggagccatctgaatttttccatgttggaatcccctgcattacactgtcagccatctacatcctcggcattcccaattggcagttcgggattttcccttgtaaaggaaattaaagattctacctctcagcatgatgatgataacatctcaactaccagtggtttttcttcaagagcttctgataaagatataactgtttcaaagaacacttcattgccacctctgtggtccccagaagctgaacgttctcactcactctcacagcacactgccaccagctcaaaaaaaccagcattcaacttgtctgcctttggaacactttccccttcacttgggaattcttcaatccttaaaaccagtcagcttggagattctcctttttatcctggaaaaacaacatacggtggggcagcagctgctgtaagacagtctaaactacgaaatacaccttatcaggcaccagttagaagacaaatgaaagctaagcaactcagtgcacaatcttacggtgtgaccagttcaacagctcggcgaatattgcagtctttagagaagatgtcaagccctttagcggatgcaaaaagaattccatccattgtttcttctcctctgaattctcctcttgataggagtgggatagatatcacagattttcaggccaaaagagaaaaggtggattctcaatatcctcctgttcagagacttatgaccccaaagccagtttccatagcaacaaatcgaagtgtttattttaaaccatctctgactccttctggtgaattcaggaagactaatcaaagaatagataacaagtgcagtactggatatgaaaaaaatatgacacccggacaaaatagagaacaacgagaaagtggcttttcatatccaaatttcagtttgcctgcagccaatggtttatcttctggagtaggtggtggaggtggcaagatgagacgagaaagacacgcctttgttgcttctaaacctctggaggaggaggaaatggaagttccagtattaccgaaaatctctctaccgatcaccagttcttcactgcctacctttaattttagttcccctgagatcacaacttcctctccatcacccatcaattcgtctcaagcattaacaaacaaggtacaaatgacctctccgagcagcactggcagtcccatgtttaaattttcatctccaatcgtaaaatctactgaggcaaatgtactacctccatcatctattggatttacatttagtgtgcctgttgcaaaaacagcagaactttctggttctagtagtactttagaaccaattataagtagttcagctcatcatgtcactacagtgaacagtacaaattgtaagaagacaccacctgaagattgtgagggtccttttagacctgcagaaatcctgaaagaaggaagtgttctagatattctgaaaagccctggtttcgcatcgccgaagatagattctgttgctgctcagcccaccgcaacaagcccagtagtttatacaagaccagcaataagtagcttttcttctagtggaattgggtttggggagagtttaaaagctgggtcatcatggcagtgtgatacatgtctactccagaacaaagttacagacaacaaatgcatagcctgtcaagcagcaaaattgtcacccagagatactgctaaacagactggaattgaaacaccaaataaaagtggcaaaacaactctttctgcatcagggacaggctttggagacaaatttaaaccagtgataggcacttgggattgtgatacctgtttagtgcaaaataaacctgaagcaataaaatgtgtagcctgtgaaacaccgaaacctggaacttgtgtgaagcgagcccttacattgacagtggtttcggaaagtgctgagactatgactgcttcatcttccagctgcactgtaaccactggtaccttaggatttggagataaattcaaaaggcccattggatcttgggagtgttcagtatgctgtgtttctaataatgcagaagacaataagtgtgtgtcctgtatgtctgagaaaccaggaagttcagtacctgcttcaagtagcagcactgtacctgtctctctgccttctggaggctctctaggattggaaaagttcaagaaacccgagggaagctgggactgtgaattgtgcctagtgcagaataaggcagactctaccaaatgtttggcatgtgaaagtgcaaagccaggcacaaaatctgggtttaaaggctttgacacatcttcctcatcttcgaactcagcagcctcctcatccttcaaatttggtgtctcatcatcctcttctgggccttctcagactttaacaagcactggaaattttaaatttggagatcagggaggattcaaaataggtgtgtcatctgattctgggtctataaaccccatgagtgaaggctttaaattttctaaaccaataggagattttaaatttggagtttcatctgaatctaagcccgaagaagttaaaaaagatagtaagaatgataattttaagtttggactttcttctggtttaagcaacccagtttctttaactccatttcaatttggggtatctaatcttggacaggaagaaaagaaagaggaactgcccaaatcttcctctgcaggttttagctttggtacaggtgttattaactccacccctgctcctgctaacaccatagtgacctctgagaacaagagcagcttcaaccttggaaccatagaaaccaagagtgcttcagtggctcctttcacatgtaagacatcagaagctaaaaaagaagaaatgcctgccaccaaaggaggattctcttttggcaacgtggagcctgcctctctgccatctgcctcagtgtttgttttgggaaggacagaagagaaacagcaagagcctgtcacttctacttccctagtttttgggaagaaagctgacaatgaagagccaaagtgtcaaccagtgttttcctttgggaattcagagcaaaccaaagatgagaattcttcaaagtccacatttagttttagtatgacaaaaccatctgagaaggaatctgaacagccagcaaaagccacttttgcctttggagctcaaactagtactacagctgatcaaggtgcagcaaagccagtttttagtttcttgaacaacagttcctctagttcaagtacaccagccacttctgctggtggtggcatatttggtagttccacctcttcctccaatccacctgtggctacctttgtgtttggacagtccagcaatcctgtgagcagctctgcctttggtaacactgctgaatccagcacctctcagtctttgctattttctcaagatagcaaactagcaaccacatccagcacaggtacagctgtcaccccatttgtctttggtccaggagccagcagtaataatactaccacctctggtttcggctttggagccacaaccacatctagctctgcaggatcctcctttgtatttggaactggaccctcagcaccatctgccagtccagcatttggtgctaaccagaccccaacatttggacaaagtcaaggtgccagccagcccaatcccccaggctttggatctatatcatcttccacagcattatttcccactggttctcagcctgcaccacctacttttgggacagtgtcaagcagtagccagccccctgtgtttggacagcaacctagtcagtctgcatttggctctggaacaactcctaattctagttcggctttccagtttggcagcagcactacaaatttcaacttcacaaacaacagtccatcaggagtgttcacatttggtgcaaattctagcacacctgcagcctcagcccagccttcaggctcggggggctttccatttaaccagtctccagcagcatttacagtggggtcaaatgggaaaaatgtgttctcttcttctggaacttcattctctggtcgcaagataaagactgctgttagacgcaggaaataaaggtcacattggtgttgtactcaattttaacaacagctggtgccctgctttcagatactggattgtactttgtgctggggttatctgaagtcagatctgcctaaggacttctttaattttggaattttcctcctttctctttcgttacagaagccccaccctgcctcacccacccttttttaaataaataaatagctagactggtgactgattcttcagcaaaaatattttatgatccagcagattattcactgatttgacatagtctggctgtacccaggaatggagcctgcacggtgaatggctttgtatagaacctctttgtctacaccattatgtgcgctgataacgttcatggaacgcgttgaaattgtaattatatctgaggaattctgtatagattagaattctgtatagattagagagtgttgaaacggatgatttctatgctgagtttgtgctggtgtatgtgtgaagtgagtgagttgggtgtattgtgcgctaaacttttctgatagaggaagcctgattaaagaatggtccgtgctaaggacttgttagatctagttcactctccatttaataattatatgctatttctatattttcattctcctatcacctgtcttgcctttttcattattttattatgaaacttgtgtaaatacaattttgtttctgtactttttggcataacataaatctgtgaacttgaaatttgaattttgtgttagagatttttttgttgtttgtttagtcttgtctcagattttattatgtaaatcccattattcaaagttgcctaaatccatttggaaatctttaaaaaaaaaattggggattcttaaagttgaatttattggcttttctgatccagttttgtttggaccaaaaaccagtattgtacaaagtattaagcatatatttttatatttactaaaatggtctgtggtgacttttggataataaggaaaagtttaatattaaagccatgtttattacagtataattaacatgttaaaccatgggataaatgccatcaataaaaaattatgacat

SEQ ID NO: 32784 - DNA, 12518 bp, Homo Sapiens
atgatgaacgaagatgcagctcagaaaagcgacagtggagagaagttcaacggcagtagtcagaggagaaaaagacccaagaagtctgacagcaatgcaagcttcctccgtgctgccagagcaggcaacctggacaaagttgtggaatatctgaaggggggcatagacatcaatacctgcaatcagaatggactcaacgctctccatctggctgccaaggaaggccacgtggggctggtgcaggagctgctgggaagagggtcctctgtggattctgccactaagaagggaaataccgctcttcacattgcatctttggctggacaagcagaagttgtcaaagttcttgttaaggaaggagccaatattaatgcacagtctcagaatggctttactcctttatacatggctgcccaagagaatcacattgatgttgtaaaatatttgctggaaaatggagctaatcagagcactgctacagaggatggctttactcctctagctgtggcactccagcaaggacacaaccaggcggtggccatcctcttggagaatgacaccaaagggaaagtgaggctgccagctctgcatattgccgctaggaaagacgacaccaaatctgccgcacttctgcttcagaatgaccacaatgctgacgtacaatccaagatgatggtgaataggacaactgagagtggttttacccctttgcacatagctgcacattacggaaatgtcaacgtggcaactcttcttctaaaccggggagctgctgtggacttcacagccaggaatggaatcactcctctgcatgtggcttccaaaagaggaaatacaaacatggtgaagctcttactggatcgaggcggtcagatcgatgccaaaactagggatgggttgacaccacttcactgtgctgcacgaagtgggcatgaccaagtggtggaacttctgttggaacggggtgcccccttgctggcaaggactaagaatgggctgtctccactacacatggctgcccagggagaccacgtggaatgtgtgaagcacctgttacagcacaaggcacctgttgatgatgtcaccctagactacctgacagccctccacgttgctgcgcactgtggccactaccgtgtaaccaaactccttttagacaagagagccaatccgaacgccagagccctgaatggttttactccactgcacattgcctgcaagaaaaaccgcatcaaagtcatggaactgctggtgaaatatggggcttcaatccaagctataacagagtctggcctcacaccaatacatgtggctgccttcatgggccacttgaacattgtcctccttctgctgcagaacggagcctctccagatgtcactaacattcgtggtgagacggcactacacatggcagcccgagccgggcaggtggaagtggtccgatgcctcctgagaaatggtgcccttgttgatgccagagccagggaggaacagacacctttacatattgcctcccgcctgggtaagacagaaattgtccagctgcttctacaacatatggctcatccagatgcggccactacaaatgggtacacaccactgcacatctctgcccgggagggccaggtggatgtggcatcagtcctattggaagcaggagcagcccactccttagctaccaagaagggttttactcccctgcatgtagcagccaagtatggaagcctggatgtggcaaaacttctcttgcaacgccgtgctgccgcagattctgcagggaagaacggccttaccccgctccatgttgctgctcattatgacaaccagaaggtggcgctgctgttactggagaagggtgcttcccctcatgccactgccaagaatggctatactccgttacatattgctgccaagaagaatcaaatgcagatagcttccacactcctgaactatggagcagagacaaacattgtgacaaagcaaggagtaactccactccatctggcctcgcaggaggggcacacagatatggttaccttgcttctggataagggagccaatatccacatgtcaactaagagtggactcacatccttacaccttgcagcccaggaagataaagtgaatgttgctgatattctcaccaagcatggagctgatcaggatgctcatacaaagcttggttacacacctttaattgtggcctgtcactatggaaatgtgaaaatggtcaactttcttctgaagcagggagcaaatgttaacgcaaaaaccaagaacggctacacgcctttgcaccaggccgctcagcagggtcacacgcacatcatcaacgtcctgctccagcatggggccaagcccaacgccaccactgcgaatggcaacactgccttggcgattgctaagcgtctgggctacatctccgtggtcgacaccctgaaggttgtgactgaggaggtcaccaccaccaccacaactattacagaaaaacacaaactaaatgtacctgagacgatgactgaggttcttgatgtttctgatgaagagggtgatgacacaatgactggtgatgggggagaataccttaggcctgaggacctaaaagaactgggtgatgactcactacccagcagtcagttcctggatggtatgaattacctgcgatacagcttggagggaggacgatctgacagccttcgatccttcagttccgacaggtctcacactctgagccatgcctcctacctgagggacagtgccgtgatggatgactcagttgtgattcccagtcaccaggtgtcaactctagccaaggaggcagaaaggaattcttatcgcctaagctggggcactgagaacttagacaacgtggctctttcttctagtcctattcattcaggtttcctggttagttttatggtggatgcccgaggtggtgctatgcgaggatgcagacacaatgggctccgaatcattattccacctcggaaatgtactgctccaacgcgagtcacctgccgactggtcaagcgccacagactggcaacaatgcctccaatggtggaaggagaaggcctggccagtcgcctgatcgaagttggaccttctggtgctcagttccttggtaaacttcacctgccaacggctcctcccccacttaatgagggagaaagtttggtcagccgcattcttcagctggggcctcctggaaccaaattccttgggcctgtgatcgtggagatccctcactttgcggcccttcgaggaaaggaaagggaactggtggtcctgcgcagtgagaatggggacagctggaaagagcatttctgtgactacactgaagatgaattgaatgaaattcttaacggcatggatgaagtactggatagcccagaagacctagaaaagaaacgaatctgccgcatcatcacccgagacttcccacagtactttgcagtggtgtctcgtatcaaacaggacagcaatctgattggcccagaaggaggtgtactgagcagcacagtggtgccccaggtgcaggccgtcttcccagagggggcactcaccaagcggatccgtgtaggcctgcaggctcaacctatgcacagtgagctggttaagaagatcctaggcaacaaagctaccttcagccctatagtcactttggaacctagaagaagaaaattccacaaaccaattaccatgaccattcctgtccccaaagcttcaagtgatgtcatgttgaatggttttgggggagatgcaccaaccttaagattactatgcagcataacaggtggaaccacccctgcccagtgggaagatattacaggaactacgccattaacatttgtcaatgaatgtgtttcctttacaacaaacgtgtctgccaggttctggctgatagattgtcgacagatccaggaatccgttacttttgcatcacaagtatacagagaaattatctgcgtaccttatatggccaaatttgtagtgtttgccaaatcacatgaccccattgaagccaggttgaggtgtttctgcatgactgatgataaagtggataagacccttgaacaacaagaaaattttgctgaggtggccagaagcagggatgtggaggtgttagaaggaaaacccatctacgttgattgtttcggcaacttggtaccattaactaaaagtggccagcatcatatattcagtttttttgccttcaaagaaaatagacttcctctatttgtcaaggtacgcgatacgactcaggaaccttgcggacgactatcatttatgaaggagccaaaatccacgagaggcctggtgcatcaagctatttgcaacttaaacatcactttgccgatttatacaaaggaatcagagtcagatcaagaacaggaggaagagatcgatatgacatcagaaaaaaatgatgagacagaatctacagaaacatctgtcctgaaaagtcacctggttaatgaagttcctgtcctagcaagtccggacttgctctctgaagtttctgagatgaaacaagatttgatcaaaatgaccgccatcttgaccacagatgtgtctgataaggcaggttctattaaagtgaaggagctggtgaaggctgctgaggaagagccaggagagccttttgaaatcgttgaaagagttaaagaggacttagagaaagtgaatgaaatcctgagaagtggaacctgcacaagagatgaaagcagtgtgcagagctctcggtctgagagaggattagttgaagaggaatgggttattgtcagtgatgaggaaatagaagaggctaggcaaaaagcacctttagaaatcactgaatatccatgtgtagaagttagaatagataaagagatcaaaggaaaagtagagaaagactcaactgggctagtgaactaccttactgatgatctgaatacctgtgtgcctcttcccaaagagcagctgcagacagttcaagataaggcagggaagaaatgtgaggctctggctgttggcaggagctctgaaaaggaagggaaagacatacccccagatgagacacagagtacacagaaacagcacaaaccaagcttgggaataaagaagccagtaagaaggaaattaaaagaaaagcagaaacaaaaagaggaaggtttacaagctagtgcagagaaagctgaacttaaaaaaggtagttcagaagagtcattaggtgaagacccaggtttagcccctgaaccccttcccactgtcaaggccacatctcctttgatagaagaaactcccattggttccataaaggacaaagtaaaggcccttcagaagcgagtggaagatgaacagaaaggtcgaagcaagttgcccatcagagtcaaaggcaaggaggacgtgccaaaaaagaccacccacaggccacatccagctgcgtcaccctctctgaagtcagagagacatgcgccagggtctccctcccctaaaacagaaagacactctactctttcctcttccgcaaaaactgaaaggcaccctccagtatcaccatcaagtaaaactgagaaacactcacctgtgtcaccctctgcaaaaacggaaagacattcacctgcgtcatcatcgagtaaaactgagaaacactcacctgtatcaccctcgacaaaaactgaaaggcactctcctgtgtcatctacaaaaacagaaagacacccacctgtttcgccttcaggcaaaacagacaaacgtccacctgtatcgccctccgggaggacagaaaaacacccgccagtatcgcctgggagaacagaaaaacgcttgcctgtttcaccctccggaagaacggacaagcaccaacctgtatcaacagctgggaaaactgagaagcacctgcctgtgtcaccttctggcaaaacagaaaagcaaccacctgtatcccccacttcaaaaacagagaggattgaggaaaccatgtctgttcgggagctgatgaaggctttccagtcaggtcaggacccttctaaacataaaactggactctttgagcacaaatcagcaaaacaaaagcagccacaagagaaaggtaaagttcgggtagaaaaagaaaaggggccgatactaacccagagagaagctcagaaaacagagaatcagacaatcaaacgaggccagagactcccggtaacgggcacagcagaatccaaaagaggagttcgtgtttcctccataggagttaagaaagaagatgcagctggaggaaaggagaaagttctcagccacaaaatacctgaacctgttcagtcagtgcctgaagaagaaagccacagagagagcgaagtgcccaaagaaaagatggctgatgagcagggagacatggatctacagatcagcccagataggaaaacctccactgacttctctgaggtcattaagcaagagttggaagacaatgacaaataccaacaattccgcctgagtgaggagacagaaaaggcacagcttcacttagaccaagtactcactagtcctttcaacacaacatttccactcgactacatgaaagatgagttccttccagctctgtctttacaaagcggtgctttagatggcagttctgaaagcctaaagaatgagggggtagccggctctccgtgtggcagcctgatggaggggacccctcagattagttcagaagaaagctataagcatgaaggcctagcagagacccctgagacgagcccagaaagcctttctttctcaccaaagaaaagtgaggagcaaactggggaaacaaaggaaagcaccaagacagaaaccaccacagaaattcgttcagaaaaagagcatcccacgaccaaagacattactggtggctctgaagagcgaggtgccacagtcactgaggactcagagacctctactgagagttttcagaaagaggccactctaggctctcccaaagacacaagccctaaaagacaagatgattgcacaggcagctgtagtgtagcattagctaaagagacacctacaggactgactgaggaggcagcctgtgatgaaggtcaacgtacctttggtagttcagcccacaagacacaaactgatagtgaggctcaggaatccacagccacctcagacgagacaaaggccttgccgctgcctgaggcttctgtaaagacagatacaggaactgaatcaaaacctcagggagtcattagaagtccccaagggttagaacttgcactccctagccgagatagcgaagtcctcagcgctgtggctgatgactcattagcagtgagccacaaagactctctggaagccagccctgtgctagaagataactcttcacacaaaacccctgattctctggagccaagtcctctgaaagaatccccttgccgtgactctctggaaagcagccctgttgaaccaaagatgaaggctggaatttttccaagtcactttcctcttcctgcagctgttgccaaaacagaactcttgacggaagtggcctctgtgcggtcccggctactccgagaccctgatggcagtgctgaggatgacagtcttgagcagacatcgctcatggagagctcagggaagagccccctttctcctgacacccccagctctgaagaagtcagctatgaggttacacccaaaaccacagatgtaagtacaccaaaaccagctgtgattcatgaatgtgcagaggaggatgattcagaaaacggggagaaaaagaggttcacacctgaagaggagatgtttaaaatggtaaccaaaatcaaaatgtttgatgaacttgaacaagaagcaaagcagaaaagggactacaaaaaagaacccaaacaagaagaatcttcttcatcttctgacccagatgctgactgttcagtagatgtggatgaaccaaaacatacaggcagtggggaggatgaaagtggtgtccctgtgttagtaacttcggagagcaggaaggtgtcttcctcctcagaaagtgaacctgagttggcacagcttaaaaaaggtgctgactcaggccttttaccagaaccagtgattcgagtacaacctccttctccacttccatcaagcatggactccaattccagtccagaagaagtacaattccagcctgtcgtttccaaacaatatactttcaagatgaatgaagatactcaggaagagccaggcaaatcagaagaagaaaaagattctgaatcccatttagctgaagaccgtcatgctgtttccactgaggctgaagacaggtcttatgataagctaaacagagacactgatcagccaaaaatctgtgatggccatggatgtgaggccatgagtcctagcagctcagctcgtcctgtctcttcaggtctacagagtccgactggtgatgatgttgatgaacagccagtcatctataaagaatcattagctctccaaggcactcatgaaaaagacacagagggagaagagcttgatgtttctagagcagaatctccacaagcagattgccccagtgaaagcttttcatcttcatcctctttgcctcattgtttggtatctgaaggaaaagaattagatgaagacatatctgccacatcttctattcaaaaaacagaggtcacaaaaactgatgaaacatttgagaacttaccaaaggactgcccctctcaagactcatccattactactcaaacagatagattttccatggatgttcccgtgtctgacctagctgagaatgatgaaatctatgatccacaaatcactagcccttatgaaaatgtcccttcccaatcttttttctctagtgaagaaagcaaaacccaaacagatgcaaatcacaccacaagttttcactcttctgaagtgtattctgttaccatcacatcccctgttgaagacgttgtagtggcaagctcctctagtggaactgttttaagcaaagaatctaattttgagggccaggacataaaaatggaatcccaactggaaagtaccttgtgggaaatgcaatcagacagtgtctcttcatctttcgagcctactatgtccgctacaacaacagttgttggtgaacaaataagcaaagtcatcatcacaaaaactgatgtggattctgattcttggagtgaaattcgggaagacgatgaagcctttgaggctcgtgtgaaagaggaagaacaaaagatatttggtttgatggtagacagacaatcacagggtaccacccctgacaccactcctgctaggaccccaactgaagaggggaccccaacaagtgagcaaaacccatttctgtttcaggaaggaaaattgtttgaaatgacccgaagtggtgccattgatatgaccaaaaggtcctatgcagatgaaagttttcactttttccaaattggtcaagaatccagggaagagactctctctgaagatgtgaaagaaggggctactggggctgatcccctaccgctggagacatcagctgaatcactagcactttcagaatcaaaagaaacagtggatgatgaggcagacttacttccagatagcgtgagtgaggaagtagaggaaatacctgcttcggatgctcaacttaactcccaaatggggatttcagcctccactgaaacacctacaaaagaggctgttagtgtagggaccaaggacctccccaccgtgcaaacgggtgatatacctcctctctctggtgtaaagcagatatcctgccccgactcttctgaaccagctgtacaagtccagttagatttttccacactcaccaggtctgtttattcagataggggtgatgattctcccgattcttccccagaagaacagaaatcagtaatcgagattcctactgcacccatggagaatgtgccttttactgaaagcaaatccaaaattcctgtaaggactatgcccacttccaccccagcacctccatctgcagagtatgagagttcagtttctgaagattttctatccagtgtagatgaggaaaataaggcggatgaagcaaaaccaaagtccaaactccctgtcaaagtacccctccaaagagttgaacagcagctctcagatctagacacctctgtccagaagacagtggctcctcagggacaggacatggcaagcatcgcaccagataatagaagcaaatctgaatctgatgctagttctttggattcaaagaccaaatgcccagtaaaaacccgaagttacactgagacagaaacagagagcagagagagggccgaggaacttgagttagaatcagaagaaggggccacaagaccaaagatacttacatcccgattgccagttaagagcagaagcactacatcttcctgcagggggggcacgagccccacaaaagaaagtaaggagcatttctttgacctttacagaaattccatagaattctttgaggagattagtgatgaggcttccaaattagtggataggctgacacagtcagagagggagcaggaaatagtttcagacgatgaaagtagtagtgccctggaagtatcagtaattgaaaatctgccacctgttgagaccgagcactcagttcctgaggacatctttgacacaaggcccatttgggatgagtctattgagactctgattgaacgcatccctgatgaaaatggccatgaccatgctgaagacccacaggatgagcaggaacggatcgaggaaaggctggcttatattgctgatcaccttggcttcagctggacagaattagcaagagaactggatttcactgaggagcaaattcatcaaattcgaattgaaaatcccaactctcttcaagaccagagtcatgcactgttgaagtactggctagagagggatgggaaacatgctacagataccaacctcgttgaatgtctcaccaagatcaaccgaatggatattgttcatctcatggagaccaacacagaacctctccaggagcgcatcagtcatagttatgcagaaattgaacagaccattacactggatcatagtgaagggttctcggtacttcaagaggagttatgcactgcacagcacaagcagaaagaggagcaagctgtttctaaagaaagtgagacctgcgatcaccctcctatcgtctcagaggaagacatttctgttggttattccacttttcaggatggcgtccccaaaactgagggggacagctcatcaacagcactctttccccaaactcacaaggagcaagttcaacaggatttctcagggaaaatgcaagacctgcctgaagagtcatctctggaatatcagcaggaatattttgtgacaactccaggaacagaaacatcagagactcagaaggctatgatagtacccagctctcccagcaagacacctgaggaagttagcacccctgcagaggaggagaagctgtacctccagaccccaacatccagcgagcggggaggctctcccatcatacaagaacccgaagagccctcagagcacagagaggagagctctccgcggaaaaccagcctcgtaatagtggagtctgccgataaccagcctgagacctgtgaaagactcgatgaagatgcagcttttgaaaagggagacgatatgcctgaaatacccccagaaacagtcacagaagaagaatacattgatgagcatggacacaccgtggtaaagaaggttactaggaaaatcattaggcggtatgtatcctctgaaggcacagagaaagaagagattatggtgcagggaatgccacaggaacctgtcaacatcgaggaaggggatggctattccaaagttataaagcgtgttgtattgaagagtgacaccgagcagtcagaggacaacaatgagtaaagccatcacacagaagagggctgtggtgaaggaccagcatggaaaacgcattgacttggagcacctggaggatgtaccagaagcactagaccaggacgacctccagcgcgatctccagcagctccttcggcatttctgcaaggaggacttgaagcaagaggccaagtgagggactgcccagttctcacaccagaaaccacacattcactcaatatgcagcttcctgtttcagtaggggagtgacctaactggcctaattaatgggataccccgacatttccactgttagcaaatatacggcattttgctttagttttcccccatcctctttaactataaagctaatttgtgaccaaagatggcatccttcatactggatgctgtatccaatactttgttgtgtctgtgctaacctgggaactggccacctccattgttctttgcttctgcacaagatccatgaaaatccattgatcagaagaacttcacctgcagacctcttcaagtgacactatgtaggaatccttccaaggaatatctatgtacaatgtatatagctgaaatgctcagatgaacaacatattaaaattaaaaccactgcctattgtaactacactgggcatcagaataaaaggcctctaaaa

SEQ ID NO: 32785 - DNA, 5096 bp, Homo Sapiens
ctcgggcaacggccgccgccgccacagccacacagccgccgccactgcgtccgtccccggtgagcgccgctgacgcgcggagatgaaattcccggcctcggtgctggcgtccgtgttcctgttcgtggccgagacaacggcggcgctcagcctgagcagcacctaccgctcgggcggggaccgcatgtggcaggcgctgacgttgcttttctcgctactgccttgcgcgctcgtgcagctcacgcttctcttcgtacaccgcgacctcagccgcgaccgcccgctcgtactgctgctgcacctgctgcaacttgggccccttttcaggtgttttgaagtcttctgcatctactttcagtcaggcaacaatgaagagccttatgtcagtatcaccaagaagaggcaaatgccaaaaaatggcctctcagaggagattgagaaggaggtgggccaggcagaaggcaaactaatcacccaccgatcagcgttcagccgggcgtcggtgatccaggctttcttgggctcagccccccagctgaccctacagctgtacataagtgtcatgcagcaggacgtcactgttggaagaagtctcctcatgaccatatccctgttgtccattgtgtatggagccttgcgctgcaacatcctagccatcaaaatcaagtacgatgagtatgaagtcaaagtgaagcctctggcctatgtctgtatcttcctgtggaggagctttgagattgccactcgagttgtagtcctggtcctctttacctccgtcctgaagacctgggtggtggttataatactcatcaacttcttcagtttcttcttgtacccctggatcctcttctggtgcagtggttccccattccctgagaacatagagaaggccctcagtagagtgggcaccaccattgtactatgctttctaactttactctatactggtatcaacatgttctgctggtctgctgtacagctgaaaattgacagccctgacctcatcagcaagtcccataattggtaccagctactggtgtattacatgataagattcatcgagaatgccatcctcctcctcctgtggtatcttttcaagactgacatctatatgtatgtgtgcgcacctctgttggtcctgcagctgctcattgggtactgcacagccattctcttcatgcttgtattctatcagttcttccacccttgcaaaaagctcttttcttccagtgtttctgaaggctttcagaggtggctcaggtgtttttgctgggcctgcaggcagcaaaaaccctgtgagccgataggaaaggaagatctacagtcatccagagatagagatgagacaccttctagcagtaaaacaagtcctgagcctggtcagttcttgaatgctgaagatctctgctctgcttaatgggacccaaggtctcagagcacaggcatattattttctgggtttgatactcgttattcatacaaataatgagccctacacagggaacaaggcaggaagttagctgttaactccttgtgagctgcttctctttatagagctcttgggtatgtagaactgtatgggaagaagccaggaaaacctctgagtgttgaaggggcaacccaaggcatcacagttcacaggtaaccatgttgtgttcttctaggcattactggccttttcactgacaagttacccctgaaatctgagttgtactggttagattcattaggttgaatgaggagaggggcttacctgttctctagttttccagactgctggtttgggtaacctgaagttttatgatccctgaacatagttttcacccaagagctgtcctggtgaccaaaaaagattactagggttttgccatcagcaacatcattcctgtcagagctttcagggagggctgttcaagtttggtttttgaatagacagaggtttcattttcatctcattagggcttttttgtacatagccaactgtagccaccctggcatgctgtctctaattgattcaagggcctagatttggagactttgttccttagcatccatggatgcagaaatgagtgataaatttggccatgaaagccctggaattttaggaaagttgtgattctttgatatgttgatgaaattctggatcaggaggggtgttaaaacatcaaaatgatggcgacttgtataagtagaattcttaccatcttactcctgcctccccattccttgcctgtcaggaccattttagaagagttaccttggttaacttaagggttttttagaaaaccccacagaaatctctcacccagttcaggtgtatagggaattttcattttcattatttcaaggaatagagttttcctcactaccacttgtaattagagattgacttcagaaactttttctaaattataaagacggaatgaccagaaaatttttgtctttcatggaatgcaatttgacttggcataattgtgagttaatttgataaagatctccagttgtatcctctgacaccctttaatgttctatataatttttcctttaatcggagaccctatttgtttcattaaagaggattgggtagcatatcctcaattatcttggaaaaatgcgtagatctagtgccattatttctaccattaaaatcttgaaagcgaaatacttgaaaagaggtgaccataaagatcacaccaatttagaatgaatattaaagtctgagaaatttacaaaagggactctatggactcgattttaccatatggaatagggatccacttctctgttaacctacaaaacgtatttatctggccattgcacttcggataattttcatttttaattcctcttggtgtcaaatttttaagtaatttcatgcacacaggagaaaatgcaatttgataatcagtttccactacattcggaggtcaagaaagcagtatatattctttcacaaggcatccatactgtttaatatttatagagttcatagaaatacatcaataagctcctaaattatagagcctcaattttggtttttctcatttgaaatgtttttgatttatcaatatttgtggtttaactttgtgggggtgtccaggcagtagatcattttttgtctatttttaaccaaataagaataacactcaagactatgttctccatcccaacacatcacttaccacttgcactattcttaataggcctaaaatagtgagcatatataatcaaaataatacttcatacaacatatacttccatgcactcttcatgtaatcacatatgtgcatagatacacaatcgtattacataaaacacccttgaaaatatatgactttgaataaaataaagctaccatgttaatacatcattttttgtttcttcctaattaacaaaagggctctataatgattaggagagctgtaaggccattctttagtcattccaagtgtatatttgtatcacaccagttacttgtgttcattgacaccaaatattttcaagctttttgtgagaaagagattcttgccttgaggctctgcagtggcaaatggtaggggcaatagcgctcccttttcacctgaaatgccttcagctcaggccttgggagtgaggtgtgggagtagccaccagcctcccactgactaggcatgttaggaattagacaaggatggagagactggttttttccagccttggtttggaagcttgtctcaaaaaccattacaaaatcttaaccttcaaatacattctaaatcactttaatttagaagataggtgagcaacttgagtgatcccaaaccaaactaacagtgctggtttgtccgacacccaaagcccacttcacacatttataaggacagagatttggtaactcatttgggtattttgtcagttttaacccttaatatacaggtatcccagctttgggcacatgtatgtccattcactttcaggaaggggtgtcagtactttctttctgtgtggtgaaaacataagccatggtgaactgataatttttgtttttaaattatttatattactgaattggcaaaattacagttcacactgcagagctaggttgtcctattggcataaaacaaaccagcaacttttctcatgtgtttggagtttggagttaaaatgtgtttttcagttataatttcaatttttaaatttcttggtgctttgtctaattaattacatcccataacttgtcaggatagttgctccaactgaattgctatcatttggctggatgggggtgaagtatgtcttcaaaatatattgaagtaagttcatcaaacatgtttagacttcctctcattgctggagacagcccagtgtagagattggcacttccctgtccagcactacaacttaattgctctatgcctcagtttccccataatacccttttccaacctacctcacaaggttatcagaaagatcaaattaaataatagatgtgaaaatgctttgaaaatgtttttaagtgctatgcatatttatagagttattatagttattcaaatccataagcaggttatttttatttttttactgtttgaaaagaaataagtagtgtcattcatatgagttcctgagtggatatgcgaatctttggtcttctcgacaggtgccctttctcttaccactagttgcttacaaaaatagcacccaaacacatggcacttggaagaaaaagacccactgaatctgagaaagtactttctggtggcaaatgaatttatcattttagtatagttttcgataaaggatatagcaacatcttttgataattgtgctttacaacttgaatgctgattcaaggcattatttggatgtgagtttaatcttttcagccttgtaaatgggaaaatatatattaaaattgattgtcaaatacagcatttctttggaaaccaccttaaaacattagtgctatggttatgagtgtatgtgccagtacttaccagtcaatgcattgtggatatgagctttcgttgactgcttctctgcagtcgttgatgctaataaatattgtcctgtttcttcatataataaattaatttttcaatttctccttgtaaaaa

SEQ ID NO: 32786 - DNA, 2904 bp, Homo Sapiens
ggaaactggcggtggccgcggccgccgagtcggtctgcgcatcctcctgcgttttctcgcttggatcttggcactgagaggcggtggccggcgggatggagaaaagtaggatgaacctgcccaaggggccggacacgctctgcttcgacaaggacgagttcatgaaggaagatttcgatgtcgatcattttgtgtctgactgtaggaagcgggtccagctggaagaactgagagatgacctggagctctactataaacttcttaaaacagccatggtcgaactcatcaacaaggattatgcagattttgtcaatctttcaacaaacttggttggcatggacaaagccctcaaccagctttctgtgcctttgggacaattacgagaagaggttctgagccttagatcgtctgtcagtgaaggaattcgggcagttgatgaacgaatgtctaaacaagaggacattaggaaaaaaaagatgtgtgtattgaggcttatacaagttattcggtcagttgagaaaattgaaaaaatcttaaactctcaaagttctaaagaaacctctgcactagaagcaagcagcccccttttgactggacaaattttggagagaattgccacagaatttaatcagttacagtttcatgctgttcaaagcaaaggcatgcctcttttggacaaagtaagaccgcgtatagctggcattacagccatgttacagcagtcactggaaggtctcctattagaaggccttcagacgtctgacgtcgatataatacggcactgcttgcggacttacgccacgattgacaagacacgggacgcggaggccttagttggccaagtactagtgaaaccatacatagacgaggtgattatagagcagtttgttgaatctcatcccaatggccttcaggtcatgtataataaactcctggagtttgttcctcaccattgccgccttcttcgagaagtcacaggaggtgccatctccagtgaaaaaggcaatactgttcctggatatgactttttggtgaattctgtttggccacaaatagtacaaggattagaagaaaagttaccctcgctttttaatcctgggaatcccgatgcatttcatgagaaatataccataagtatggattttgtcagaagattggaacggcagtgtggatcacaggctagtgtaaagagattaagagcccatcctgcctatcacagcttcaataagaagtggaacttgcctgtttattttcaaataagatttagagaaatagcgggatccttagaagcagcacttacagatgtcctggaagatgccccagctgaaagtccgtattgccttttggcttctcatagaacttggagcagccttaggaggtgttggtcagatgagatgttcttgccattactggtgcatcgcctgtggagactcactctgcagattttggcacgatactctgtgtttgtcaatgagctttcactcaggcccatttctaatgaaagtcccaaggagatcaagaaacctttggtaactggtagcaaagaaccttccatcacccaaggaaacactgaagaccaaggaagtggtccttcggaaacaaagcctgtggtttccatttcccgcactcagctcgtgtatgtggttgcagacctggacaagcttcaggagcagcttccagaactcttggaaataatcaagccaaaacttgaaatgattggctttaagaatttttcttctatctcagcagccctggaggactcccagagctctttttcagcctgtgtgccctccttgagtagcaagatcatccaggatttaagtgactcttgcttcggtttcctaaaaagcgccctggaggttcccaggctttaccgaagaaccaataaggaggtcccaaccacagcttcctcctatgtggacagtgctctgaagcccttattccagcttcagagcggacacaaggataagctcaaacaagcaataattcagcagtggctagaaggcactctcagtgaaagcactcataagtactatgaaaccgtgtcagatgtattaaactctgtgaagaagatggaagagagcctgaaaaggctgaaacaagccagaaaaaccactcccgccaaccccgtcggtcccagtggtggcatgagcgacgacgacaaaatcaggctgcagttggccctagatgttgagtacttgggagagcagatacaaaagttgggactacaagcaagtgacataaaaagcttctcagctctcgcagagcttgttgctgctgccaaggaccaggcaacagcagagcagccttaagcatcttggaagatcccgaggttagattcttaagcaagagaagagttggacttccaggctgaaggggagaaagtgactctgttctcttagcaaccgtctgtagcaaagaagtgcttccagcatcactccagcaacacgcccatgcgtcttctctcagcgtatttgggtcttctttgcccaaaagaacacaaaagcctttttccattgtatggaagatagtttttaagacatttgaaactttctactatagtttacagaacaaattattttatttttattgtaaatcttagtgtggaagagctgatttctaaaatatgattaaagtaaatatatacctatgaatatcaagagtcgtctccctgagcctgtagttggaagtgacgactgtaatggaatgatgtcttgtatagaaatgcccttctctgaaataaagagaactcctgggctttctaaagaggctgcgggaagccatcctccactcccactgtgtgtgagagcagtgcttctgatcctgctgtcaccccgacctctggcaggagccggcgccagtaggaaagacctccttcctaaataaaagaagtgtctcccaaaa

SEQ ID NO: 32787 - DNA, 3018 bp, Homo Sapiens
gaattccgggccaggcatggtagcgcatcgctgtaatcccagctactcgggaaactgaggtgggagaatcgattgaacctggaagtggaggttgcggtgagccaagatcatcctgtcgcactccagcctgggcaacaagagcgaaactccatctcaaaaagaaaaaaaaagatatatatgtgtgacttacaggtacaggtaaagttgcttctggttttctggttgttgcatggtatttcctatgcagccacaggtctttattttcttacttaagtgcctccaacttcccataacacaaattaaggcatgatgaacatcctctctgtgctgaacatcctgtgtatgtcacttcagaagcctgtgtgacggtttctttagtctttatacctaggggtgggatttctgggtcataggacagtaatttatatttatttcactaagtattctctttctctggcttttgttacatattacctgtttgtcctccagaaaacttgcaccaatttacattcctaccaatagggtaggagagtgcacaatgggtggattctaactccaaatctaacacctcttcttttctttgtttctagcagccatggcaatgacaggctcaacaccttgctcatccatgagtaaccacacaaaggaaagggtgacaatgaccaaagtgacactggagaatttttatagcaaccttatcgctcaacatgaagaacgagaaatgagacaaaagaagttagaaaaggtgatggaagaagaaggcctaaaagatgaggagaaacgactccggagatcagcacatgctcggaaggaaacagagtttcttcgtttgaagagaacaagacttggattggaagattttgagtccttaaaagtaataggcagaggagcatttggtgaggtacggcttgttcagaagaaagatacgggacatgtgtatgcaatgaaaatactccgtaaagcagatatgcttgaaaaagagcaggttggccacattcgtgcggagcgtgacattctagtggaggcagacagtttgtgggttgtgaaaatgttctatagttttcaggataagctaaacctctacctaatcatggagttcctgcctggaggggacatgatgaccttgttgatgaaaaaagacactctgacagaagaggagactcagttttatatagcagaaacagtattagccatagactctattcaccaacttggattcatccacagagacatcaaaccagacaaccttcttttggacagcaagggccatgtgaaactttctgactttggtctttgcacaggactgaaaaaagcacataggacagaattttataggaatctgaaccacagcctccccagtgatttcactttccagaacatgaattccaaaaggaaagcagaaacctggaaaagaaatagacgtcagctagccttctccacagtaggcactcctgactacattgctcctgaggtgttcatgcagaccgggtacaacaagctctgtgattggtggtcgcttggggtgatcatgtatgagatgctcatcggctacccacctttctgttctgagacccctcaagagacatataagaaggtgatgaactggaaagaaactttgacttttcctccagaagttcccatctctgagaaagccaaggatctaattttgaggttctgctgtgaatgggaacatagaattggagctcctggagttgaggaaataaaaagtaactctttttttgaaggcgttgactgggaacatatcagagagagacctgctgcaatatctattgaaatcaaaagcattgatgatacctcaaacttcgatgagtttccagaatctgatattcttaagccaacagtggccacaagtaatcatcctgagactgactacaagaacaaagactgggtcttcatcaattacacgtacaagcgctttgagggcctgactgcaaggggggcaataccttcctacatgaaagcagcaaaatagtactcttgccacggaatcctatgtggagcagagttctttgtataacatcatgcttttcctctcacactcttgaagagcttccaagaagttgatggaacccaccaatatgtcatagtaaagtctcctgaaatgtggtagtaagaggattttcttccataatgcatctgaaaaactgtaaacaaagacaaccatttctactacgtcggccataaacagctatcctgctttggaagagaagcatcatgagccaatttgataggtgttttaaaaataacttgagttttcctaagttcatcagaatgaaggggaaaaacagccatcatccaacattattgagattgtcgtgtatagtcatcgaatatcagccagttcctgtaattttgtgacacgctctctgccaagcccaccaagtatttcctttatagctaaaagttccatagtactaaggaaataaagcaataaagacagtctcagcagccaggattctggctgaaggaaatgatccgccaccctgagggtggtgatggtagtttctacccatacctcagcctcaggcgagtggcttatagcctccattcatggtgcactttatttatggtactaagataaagactgtcaatccattgatttatctcctcctgtcccccatctaaaatacccatgctgcttttctgagtgttgatgggggttaccagcttgatccactgttgctcttagaaggcccagaaagtctttgggcattgcaagaaatcccgaattatgtggaaaaccctcactttctcttcacggctgtaccagaaaatccctaagacagatcttgccgtggactagcaatacctgcaagtgctgccaatgggaactcaatttattcctgggaacctaacgaggagagcccaggcctaggcaggaggcctggaaccctcttggctaaggtgctgttcctgttcctgcaaggtctccagaacccctttggaaatggtgaaggaaccagcccaatagaagtacagagccagctgacggaattc

SEQ ID NO: 32788 - DNA, 4238 bp, Homo Sapiens
gcgctctcaggcgggctccggcggcagcgacgcgagcgcggcgatggggagcggcggcgtggtccactgtaggtgtgccaagtgtttctgttatcctacaaagcgaagaataaggaggaggccccgaaacctgaccatcttgagtctccccgaagatgtgctctttcacatcctgaaatggctttctgtagaggacatcctggccgtccgagctgtacactcccagctgaaggacctggtggacaaccacgccagtgtgtgggcatgtgccagcttccaggagctgtggccgtctccagggaacctgaagctctttgaaagggctgctgaaaaggggaatttcgaagctgctgtgaagctgggcatagcctacctctacaatgaaggcctgtctgtgtctgatgaggcccgcgcagaagtgaatggcctgaaggcctctcgcttcttcagtctcgctgagcggctgaatgtgggtgccgcacctttcatctggctcttcatccgccctccgtggtcggtgagcggaagctgctgcaaggccgtggttcacgagagcctcagggcagagtgccagctgcagaggactcacaaagcatccatattgcactgcttgggcagagtgctgagtctgttcgaggatgaggagaagcagcagcaggcccatgacctgtttgaggaggctgctcatcagggatgtctgaccagctcctacctcctctgggaaagcgacaggaggacagatgtgtcagatcctgggcgatgcctccacagcttccgaaaactcagggactacgctcgcaaaggctgctgggaagcgcagctgtctttagccaaagcctgtgcaaatgcaaaccagcttggactggaggtgagagcttccagtgagatcgtctgccagctatttcaggcttcccaggctgtcagtaaacaacaagtcttctccgtgcagaagggactcaatgacacaatgaggtacattctgatcgactggctggtggaagttgccaccatgaatgacttcacaagcctgtgcctgcacctgaccgtggagtgtgtggaccggtacctgcggaggaggctggtgccgcggtacaggctccagctgctgggcatcgcctgcatggtcatctgcacccggtttatcagtaaagagatcctgaccatccgggaggccgtatggctcacggacaacacttacaagtacgaggacctggtgagaatgatgggcgagatcgtctccgccttggaagggaagattcgagtccccactgtggtggattacaaggaggtcctgctgacgctagtccctgtggagctgagaacccagcacctgtgcagcttcctctgcgagctctccctgctgcacaccagcctgtccgcctacgccccagcccgcctggctgccgcagccctgctcctggccagactgacgcacgggcagacacagccctggaccactcagctgtgggacctcaccggattctcctatgaagacctcattccctgcgtcttgagcctccataagaagtgcttccatgatgacgcccccaaggactacaggcaagtctctctgaccgccgtgaagcagcggtttgaggacaagcgctatggagaaatcagccaggaagaggtgctgagctacagccagttgtgtgctgcattaggagtgacacaagacagccccgaccccccgactttcctcagcacaggggagatccacgccttcctcagctctccctcggggcggagaaccaaacggaagcgggagaacagcctccaggaagacagaggcagcttcgttaccacccccactgcggagctgtccagccaggaggagaccgtgctgggcagcttcctcgactggagcctggactgctgctctggctatgaaggcgaccaggagagtgagggcgagaaggagggcgacgtgacagctcccagcggcatcctcgatgtcaccgtggtctacctgaacccagaacagcattgctgccaggaatccagtgatgaggaggcttgtccagaggcaaagggaccccaggacccacaggcactggcgctggacacccagatccctgcaacccctggacccaaacccctggtccgcaccagccgggagccagggaaggacgtcacgacctcagggtactcctccgtcagcaccgcaagtcccacaagctccgtggacggtggcttgggggccctgccccaacctacctcagtgctgtccctgcacagtgactcgcacacacagccctgccaccatcaggccaggaagtcatgtttacagtgtcgtcccccaagtcccccggagagcagtgttccccagcaacaggtgaagcggataaacctatgcatacacagtgaggaggaggacatgaacctgggccttgtgaggctgtaagtgtgtcagcacatttgccgcagtggatgtgtactgagggggctggaggcgaagggtgggagcatagcataggaacgctgcatagaccatggaggcctttgcgcagagagcagagaggatgacttgcggccaccaagtttctgtctccgcgggagtcccgtgcaagccatcagaatgttgaaatgagggtgaagagctcagatccctctctttggaaagtttagcctggaagcagttggccacactgtgtggagggcacctctctgtcccttccgtgtctcactgtctctggaagcttcagcccatgtgtgtcctggtgttcccagccccaccagagccccgtgccgggagctgacagctttcacgcttaaggcacgtgtgacctgggtagtcagacaccacttgagcccctgcccacatctgctggtttggggcttcagtggggagctgacagctgtgagcacaccactgtcccctcatccacctcggcctgcatggggcacccacttccttctgggtggggcttccatggtaagggggcctgcgtccctgcacactgcgaggactgccttgccacaggcccactccctacgacacgtgactcgttttagagctctgtcccagaggcgttcgtatgtgacccacagatggcgtcaatgtgaacacctctctttgtgctgaatttctgggccattcttttcctgtcttatttctaaatttccttcttccaagatgaaaacaaaagaaaaacttaaaacagaaggtattaaaaaaacaagagattcccaccattatttaggttcacctgcaaaacaaaaatcttactccagcccctcaatgccatcctgacacactttatgcaaaaagaattttcccagataggctagccagaaaaaacttcaagtcctctgtaacatctgaggtgaccaagaggcagaagagcagagcagtcgggggccgtgtcctggctgatcccaactgcagctctgctgtgggggcccgtgggagggaggcagacccctgggctttcctgctggccacggagactctgctcctgcatggaaagggagcctgggagccagcagcccacgcctggggagcctgcctggggccatgtgaccatggcctctccctgggaacgggctgaccacaacacaccctgctgccatccacttctgtttactctgcaaatgtaagaaagaaccacttggccagaagtgtcccccagatgcttttttttttttttttttggagacagttttgctcttgtctccccggctggagtgcagtggcatgatctcaactctcaactcactgtaacctccgcctcccggatactcctgcctcagcctcctgggtagctgggattacaagcacccaaccacgcccagctaatttttgtattttcggtagagacgggatttcaccatgttggccaggctagtctcgaactcatgacctcaagtgatccgcccacttcggtctcccaaagtgctgggattacaggcatgagccacggcgcctggcccccaaatgctcttgaaccggaaacccagggatgggagatgctcactgagctgctgcttttatgtgtgctggtgctatgtgtgttcatgtccgcggcagctgtctttttgctactataagggaattctggccaccctgggtggggtgtggtcggggtgagaacccaagcgttggaactgtagacccgtcctgtcgactgtgtgcccctgggcatgtgtgagcctcagtttcctcatctgtaaggggggcaatgatacctacctcacagggggttgtgaggattaaatgtgaggaggatagtggcaac

SEQ ID NO: 32789 - DNA, 2300 bp, Homo Sapiens
cagcacgtctcttgctcctcagggccactgccaggcttgccgagtcctgggactgctctcgctccggctgccactctcccgcgctctcctagctccctgcgaagcaggatggccgggaccgtgcgcaccgcgtgcttggtggtggcgatgctgctcagcttggacttcccgggacaggcgcagcccccgccgccgccgccggacgccacctgtcaccaagtccgctccttcttccagagactgcagcccggactcaagtgggtgccagaaactcccgtgccaggatcagatttgcaagtatgtctccctaagggcccaacatgctgctcaagaaagatggaagaaaaataccaactaacagcacgattgaacatggaacagctgcttcagtctgcaagtatggagctcaagttcttaattattcagaatgctgcggttttccaagaggcctttgaaattgttgttcgccatgccaagaactacaccaatgccatgttcaagaacaactacccaagcctgactccacaagcttttgagtttgtgggtgaatttttcacagatgtgtctctctacatcttgggttctgacatcaatgtagatgacatggtcaatgaattgtttgacagcctgtttccagtcatctatacccagctaatgaacccaggcctgcctgattcagccttggacatcaatgagtgcctccgaggagcaagacgtgacctgaaagtatttgggaatttccccaagcttattatgacccaggtttccaagtcactgcaagtcactaggatcttccttcaggctctgaatcttggaattgaagtgatcaacacaactgatcacctgaagttcagtaaggactgtggccgaatgctcaccagaatgtggtactgctcttactgccagggactgatgatggttaaaccctgtggcggttactgcaatgtggtcatgcaaggctgtatggcaggtgtggtggagattgacaagtactggagagaatacattctgtcccttgaagaacttgtgaatggcatgtacagaatctatgacatggagaacgtactgcttggtctcttttcaacaatccatgattctatccagtatgtccagaagaatgcaggaaagctgaccaccactattggcaagttatgtgcccattctcaacaacgccaatatagatctgcttattatcctgaagatctctttattgacaagaaagtattaaaagttgctcatgtagaacatgaagaaaccttatccagccgaagaagggaactaattcagaagttgaagtctttcatcagcttctatagtgctttgcctggctacatctgcagccatagccctgtggcggaaaacgacaccctttgctggaatggacaagaactcgtggagagatacagccaaaaggcagcaaggaatggaatgaaaaaccagttcaatctccatgagctgaaaatgaagggccctgagccagtggtcagtcaaattattgacaaactgaagcacattaaccagctcctgagaaccatgtctatgcccaaaggtagagttctggataaaaacctggatgaggaagggtttgaaagtggagactgcggtgatgatgaagatgagtgcattggaggctctggtgatggaatgataaaagtgaagaatcagctccgcttccttgcagaactggcctatgatctggatgtggatgatgcgcctggaaacagtcagcaggcaactccgaaggacaacgagataagcacctttcacaacctcgggaacgttcattccccgctgaagcttctcaccagcatggccatctcggtggtgtgcttcttcttcctggtgcactgactgcctggtgcccagcacatgtgctgccctacagcaccctgtggtcttcctcgataaagggaaccactttcttatttttttctatttttttttttttgttatcctgtatacctcctccagccatgaagtagaggactaaccatgtgttatgttttcgaaaatcaaatggtatcttttggaggaagatacattttagtggtagcatatagattgtccttttgcaaagaaagaaaaaaaaccatcaagttgtgccaaattattctcctatgtttggctgctagaacatggttaccatgtctttctctctcactccctccctttctatcgttctctctttgcatggatttctttgaaaaaaaataaattgctcaaataaaaaaaaaaaaaaaaaaaaaaaaaaaaaaaaaaaaaaaaaaaaaaaaaaaaaaaaaaaaaaaaaaaaaaaaaaa

SEQ ID NO: 32790 - DNA, 2207 bp, Homo Sapiens
ccccttcctgtggggttcattggggcatcccctttctgctgcaggaacctctcatcagaccgcctgagggaagcggcgcccggagacccgccccggcccggtccacattctccccaggaagccggactctatggggcgggaccctgggggagcctgagccgagcccggagccagccccgaacccctgaacctccagccaggggcgccccgggagcagccagcccgtgggcgagccgcccgcccgccgagcagccatgagcgagacggtcatctgttccagccgggccactgtgatgctttatgatgatggcaacaagcgatggctccctgctggcacgggtccccaggccttcagccgcgtccagatctaccacaaccccacggccaattcctttcgcgtcgtgggccggaagatgcagcccgaccagcaggtggtcatcaactgtgccatcgtccggggtgtcaagtataaccaggccacccccaacttccatcagtggcgcgacgctcgccaggtctggggcctcaacttcggcagcaaggaggatgcggcccagtttgccgccggcatggccagtgccctagaggcgttggaaggaggtgggccccctccacccccagcacttcccacctggtcggtcccgaacggcccctccccggaggaggtggagcagcagaaaaggcagcagcccggcccgtcggagcacatagagcgccgggtctccaatgcaggaggcccacctgctccccccgctgggggtccacccccaccaccaggacctccccctcctccaggtccccccccacccccaggtttgcccccttcgggggtcccagctgcagcgcacggagcagggggaggaccaccccctgcaccccctctcccggcagcacagggccctggtggtgggggagctggggccccaggcctggccgcagctattgctggagccaaactcaggaaagtcagcaagcaggaggaggcctcaggggggcccacagcccccaaagctgagagtggtcgaagcggaggtgggggactcatggaagagatgaacgccatgctggcccggagaaggaaagccacgcaagttggggagaaaacccccaaggatgaatctgccaatcaggaggagccagaggccagagtcccggcccagagtgaatctgtgcggagaccctgggagaagaacagcacaaccttgccaaggatgaagtcgtcttcttcggtgaccacttccgagacccaaccctgcacgcccagctccagtgattactcggacctacagagggtgaaacaggagcttctggaagaggtgaagaaggaattgcagaaagtgaaagaggaaatcattgaagccttcgtccaggagctgaggaagcggggttctccctgaccacagggacccagaagacccgcttctcctttccgcacacccggcctgtcaccctgctttccctgcctctacttgacttggaattggctgaagacacaggaatgcatcgttcccactccccatcccacttggaaaactccaagggggtgtggcttccctgctcacacccacactggctgctgattggctggggaggcccccgcccttttctccctttggtccttcccctctgccatccccttggggccggtccctctgctggggatgcaccaatgaaccccacaggaagggggaaggaaggagggaatttcacattcccttgttctagattcactttaacgcttaatgccttcaaagttttggtttttttaagaaaaaaaaatatatatatatttgggttttgggggaaaagggaaatttttttttctctttggttttgataaaatgggatgtgggagtttttaaatgctatagccctgggcttgccccatttggggcagctatttaaggggaggggatgtctcaccgggctgggggtgagatatccccccaccccagggactccccttccctctggctccttccccttttctatgaggaaataagatgctgtaactttttggaacctcagttttttgattttttatttgggtaggttttggggtccaggccattttttttaccccttggaggaaataagatgagggagaaaggagaaggggaggaaacttctcccctcccaccttcacctttagcttcttgaaaatgggcccctgcagaataaatctgccagtttttataaaaaaaaaa

SEQ ID NO: 32791 - DNA, 2326 bp, Homo Sapiens
ccagatcgcagctgaaggatctgttgagcgcttcaggaaaggcggacaggcgacactaacaggtgaagatctcgggagaccatgactaagaaaagaattgctgtgattgggggaggagtgagcgggctctcttccatcaagtgctgcgtagaagaaggcttggaacctgtctgctttgaaaggactgatgacatcggagggctctggaggttccaggaaaatcctgaagaaggaagggccagtatttacaaatcagtgatcatcaatacttctaaagagatgatgtgcttcagtgactatccaatcccagatcattatcccaacttcatgcataatgcccaggtcctggagtatttcaggatgtatgccaaagaatttgaccttctaaagtatattcgatttaagaccactgtgtgcagtgtgaagaagcagcctgattttgccacttcaggccaatgggaagtggtcactgaatctgaagggaaaaaggagatgaatgtctttgatggagtcatggtttgcactggccatcacaccaatgctcatctacctctggaaagcttccctggaattgagaagttcaaagggcagtacttccacagtcgagactataagaacccagagggattcactggaaagagagtcattataattggcattgggaattctggaggggatctggctgtagagattagccaaacagccaagcaggttttcctcagcaccaggagaggggcttggatcctgaatcgtgtaggggactacggatatcctgctgatgtgttgttctcttctcgacttacacattttatatggaagatctgtggccaatcattagcaaacaaatatttggaaaaaaagataaaccaaaggtttgaccatgaaatgtttggcctgaagcctaaacacagagctctgagtcagcatccaaccttaaatgatgacctgccaaatcgtatcatttctggcttggtgaaagtgaaaggaaatgtgaaggaattcacggagacagctgccatatttgaggatggctccagggaggatgacattgatgctgttatctttgccacaggctatagctttgactttccatttctggaagattccgtcaaagtggtcaaaaacaagatacccctgtataaaaaggtcttccctcctaacctggaaaggccaactcttgcaatcataggcttgattcagcccttaggagccattatgcccatttcagagctccaaggacgctgggccactcaggtatttaaaggtctaaagacattgccctcacagagtgaaatgatggcagaaatatctaaagctcaagaggaaattgacaaaaggtatgtggagagccaacgccataccattcagggagactacatagataccatggaagagcttgctgatttggtgggggtcaggcccaatctgctgtctctggccttcactgaccccaagctggcattacacttattactgggaccctgcactccaatccactatcgtgtacagggccctggaaagtgggatggggctcgaaaagctatcctcaccacagatgatcgcatcaggaagcctctgatgacaagagtagttgaaaggagtagttctatgacttcaacaatgacaataggcaagtttatgctagctcttgccttctttgctataattatagcttacttctagttgtcctattgtcactgccctgtttttcattgggaagcttatctacagatgccttcagaatctgacgagattgactctcagtttcatattgcccagaaatctactttaatgtctctttcgaaagcattaattcactttcctttttcctacaatgaaacctgttttccatttgtattaactcatctcccttccactcatgatccgtcactcttccttgtggtaatccctagactgggagctcaggtactcttttagtcatctttgtatgtctttagcagagttcttgacatgtggtaggtgcttaataaatgtttgttgtttatcaaattttatggtagggagagtaagtcagcatcggtataaaatcgcttactccacgtaactcttcttctgatagggtttgattttctattagaagctcaattttagttttttttcatattataactaaatatgtttcctgagagataagagaaataatgttcctacaatagttgtatgtatctaagataagacatatagatgcttaagacattttgtttcacttgctattcactagtgtacttgaaacatggtcatttttagcccttttccttaggaaccatgtctttattttctcaataaagaaattactttcaactca

SEQ ID NO: 32792 - DNA, 3161 bp, Homo Sapiens
gccccctcttctcccctcccccaagccagcacctggtcgcccggcgggtcgtgcggcgcggcgctccgcgagagctggcggtcaccatggcaatgcgggagctggtggaggccgaatgcgggggtgccaacccgctcatgaagctcgccgggcacttcacccaggacaaggcccttcggcaggagggattgaggcctggcccctggccccccggagccccggcctctgaggcagcctccaagcctttgggagtagcttctgaagatgagttggtggctgaattcctgcaggaccagaatgcaccccttgtgtcccgtgcccctcagaccttcaagatggatgacctcctggctgagatgcagcagattgagcagtcaaacttccgccaggctccccagagagcccctggtgtggcagacttggccttgtctgagaactgggcccaggagtttcttgcagctggagatgctgtggatgtaactcaggattataatgagactgactggtcccaagaattcatctctgaagttacagaccccttgtctgtgtcccctgcccgctgggctgaggaatatttggagcaatcagaggagaagctgtggctgggagaacctgagggaacagccaccgatcgctggtatgatgaatatcatcctgaggaggatctgcagcacacggccagtgactttgtggccaaagtggatgaccccaaattggctaattctgagggtacatcagatgcctgggttgaccagttcacaagaccagtaaacacatctgcccttgatatggagtttgaacgagccaagtcagctatagagtctgatgtcgatttctgggacaagttgcaggcagagttggaggagatggcaaaacgggatgctgaggcccacccctggctttctgactatgatgaccttacgtcagctacctatgataaggggtaccagtttgaggaggagaaccccttgcgtgatcaccctcagccttttgaagaagggctgcggcgccttcaggagggggacctgccaaatgctgtgctgctttttgaggcagctgtgcagcaggatcctaagcacatggaagcttggcagtatctgggtaccacccaggcagagaatgaacaagaactattagccatcagtgcattgcggaggtgtctggagctaaagccagataaccagacagcactgatggcgctggctgtgagcttcaccaacgagtccctgcagcgacaggcctgtgaaaccctacgagactggctgcggtacacaccagcctatgcccatctggtgacacctgctgaagaaggggctggtggggcaggactgggccccagcaagcgtatcctgggatctctcttgtctgactccctgtttcttgaagtgaaagagctcttcctggcagctgtgcggctggaccctacctccattgaccctgatgtgcagtgtggcttgggagtccttttcaacctgagtggggagtatgacaaggccgtggactgcttcacagctgccctcagcgttcgtcccaatgactatttgctgtggaataagctaggcgccaccctggccaatggaaaccagagtgaagaagcagtagctgcgtaccgccgggccctcgagctccagcctggctatatccggtcccgctataacctgggcatcagctgcatcaacctcggggctcaccgggaggctgtggagcactttctggaggccctgaacatgcagaggaaaagccggggcccccggggtgaaggaggtgccatgtcggagaacatctggagcaccctgcgtttggcattgtctatgttaggccagagcgatgcctatggggcagccgacgcgcgggatctgtccaccctcctaactatgtttggcctgccccagtgacagtgggacgggctgccctgtgagtgtccacctggagggatccccgctttggatgtgattccctctccccaaatgggcctaccaagggggcgggctgatgaccataagcggtacggcctttcaggagctgcctcaacgtaggggtgggtagtctgtgttctagttcctacataattgtaggaaaatgagctgtgtcatctctgagtcccttggtaattcaagggctgtacatccagctacagatctctctgctcatcatgccctttcttggtgctgctttttgggtaggaccccacgatttagggtaactgttatcatcagctgccatttctgatagggtctaccacatctgtaatgtctgtcctttcccccacttttactgggaattgatagtccagcttccttgggcagtgtaagtaggaggttcatctgctgtgcgcctctaatgtctgtctggatgggatgtgttaggagttggcctgttgggttgaattgttgatttggctgagcagagctgagttttggtaggagtgctcatggttctgtcattcttggacctctcctggctgagctctgattccctgtgagcacgatgctgatgcaatagtcctgtgtcatcactgcagcggtcctcaggagctgccagggccaattgctacagagtgtctgggtgtgtggcataggaggaaggtttgcttgtgaaatgaggctgggtgggagcggggagggactagatcagaagagatcaagggctgtattcaggaacgttggtgggaggacagagcaagtgggaagggggtatggtgagtgcggcaatccctcatcctcttagaagcacctgtgaatgggaattgagccaactgttatagaaaattggttcagaaagtgcaatcttgccagatttctagcaaataggttcagtgttaccataagcctttgctgtacttcttgaaatgtttctaggggagagcattggaaaatccccttcccccatctagatcgaaggaagatgagggagcagcttggattcttctcagttgtcccctgcatggggagatacactaacccccagaaatgactgctaagcctcttgccttgtctttagtagctaatgatcagagagatttttttttttaaactaccatggtcccaggattccatcctgaaatttatttttctttgtatgaatatgtgtaaatgatttaaaaataaaactgtaaaatatttgtacgaagaataaatggaactgatgtgggaaaaaaaaaa

SEQ ID NO: 32793 - DNA, 3437 bp, Homo Sapiens
aagttcagtgcctaccgaagacaaaggcgccccgagggagtggcggtgcgaccccagggcgtgggcccggccgcggagcccacactgcccggctgacccggtggtctcggaccatgtctcccgccccaagacccccccgttgtctcctgctccccctgctcacgctcggcaccgcgctcgcctccctcggctcggcccaaagcagcagcttcagccccgaagcctggctacagcaatatggctacctgcctcccggggacctacgtacccacacacagcgctcaccccagtcactctcagcggccatcgctgccatgcagaagttttacggcttgcaagtaacaggcaaagctgatgcagacaccatgaaggccatgaggcgcccccgatgtggtgttccagacaagtttggggctgagatcaaggccaatgttcgaaggaagcgctacgccatccagggtctcaaatggcaacataatgaaatcactttctgcatccagaattacacccccaaggtgggcgagtatgccacatacgaggccattcgcaaggcgttccgcgtgtgggagagtgccacaccactgcgcttccgcgaggtgccctatgcctacatccgtgagggccatgagaagcaggccgacatcatgatcttctttgccgagggcttccatggcgacagcacgcccttcgatggtgagggcggcttcctggcccatgcctacttcccaggccccaacattggaggagacacccactttgactctgccgagccttggactgtcaggaatgaggatctgaatggaaatgacatcttcctggtggctgtgcacgagctgggccatgccctggggctcgagcattccagtgacccctcggccatcatggcacccttttaccagtggatggacacggagaattttgtgctgcccgatgatgaccgccggggcatccagcaactttatgggggtgagtcagggttccccaccaagatgccccctcaacccaggactacctcccggccttctgttcctgataaacccaaaaaccccacctatgggcccaacatctgtgacgggaactttgacaccgtggccatgctccgaggggagatgtttgtcttcaaggagcgctggttctggcgggtgaggaataaccaagtgatggatggatacccaatgcccattggccagttctggcggggcctgcctgcgtccatcaacactgcctacgagaggaaggatggcaaattcgtcttcttcaaaggagacaagcattgggtgtttgatgaggcgtccctggaacctggctaccccaagcacattaaggagctgggccgagggctgcctaccgacaagattgatgctgctctcttctggatgcccaatggaaagacctacttcttccgtggaaacaagtactaccgtttcaacgaagagctcagggcagtggatagcgagtaccccaagaacatcaaagtctgggaagggatccctgagtctcccagagggtcattcatgggcagcgatgaagtcttcacttacttctacaaggggaacaaatactggaaattcaacaaccagaagctgaaggtagaaccgggctaccccaagtcagccctgagggactggatgggctgcccatcgggaggccggccggatgaggggactgaggaggagacggaggtgatcatcattgaggtggacgaggagggcggcggggcggtgagcgcggctgccgtggtgctgcccgtgctgctgctgctcctggtgctggcggtgggccttgcagtcttcttcttcagacgccatgggacccccaggcgactgctctactgccagcgttccctgctggacaaggtctgacgcccaccgccggcccgcccactcctaccacaaggactttgcctctgaaggccagtggcagcaggtggtggtgggtgggctgctcccatcgtcccgagccccctccccgcagcctccttgcttctctctgtcccctggctggcctccttcaccctgaccgcctccctccctcctgccccggcattgcatcttccctagataggtcccctgagggctgagtgggagggcggccctttccagcctctgcccctcaggggaaccctgtagctttgtgtctgtccagccccatctgaatgtgttgggggctctgcacttgaaggcaggaccctcagacctcgctggtaaaggtcaaatggggtcatctgctccttttccatcccctgacataccttaacctctgaactctgacctcaggaggctctgggcactccagccctgaaagccccaggtgtacccaattggcagcctctcactactctttctggctaaaaggaatctaatcttgttgagggtagagaccctgagacagtgtgagggggtggggactgccaagccaccctaagaccttgggaggaaaactcagagagggtcttcgttgctcagtcagtcaagttcctcggagatctgcctctgcctcacctaccccagggaacttccaaggaaggagcctgagccactggggactaagtgggcagaagaaacccttggcagccctgtgcctctcgaatgttagccttggatggggctttcacagttagaagagctgaaaccaggggtgcagctgtcaggtagggtggggccggtgggagaggcccgggtcagagccctgggggtgagcctgaaggccacagagaaagaaccttgcccaaactcaggcagctggggctgaggcccaaaggcagaacagccagagggggcaggaggggaccaaaaaggaaaatgaggacgtgcagcagcattggaaggctggggccgggcaggccaggccaagccaagcagggggccacagggtgggctgtggagctctcaggaagggccctgaggaaggcacacttgctcctgttggtccctgtccttgctgcccaggcagcgtggaggggaagggtagggcagccagagaaaggagcagagaaggcacacaaacgaggaatgaggggcttcacgagaggccacagggcctggctggccacgctgtcccggcctgctcaccatctcagtgaggggcaggagctggggctcgcttaggctgggtccacgcttccctggtgccagcacccctcaagcctgtctcaccagtggcctgccctctcgctcccccacccagcccacccattgaagtctccttgggccaccaaaggtggtggccatggtaccggggacttgggagagtgagacccagtggagggagcaagaggagagggatgtcgggggggtggggcacggggtaggggaaatggggtgaacggtgctggcagttcggctagatttctgtcttgtttgtttttttgttttgtttaatgtatatttttattataattattatatatgaattccaaaaaaaaaaaaaaaaaaaaa

SEQ ID NO: 32794 - DNA, 3871 bp, Homo Sapiens
ggcctccgcaccctggatatgttttctcccagacctggatatttttttgatatcgtgaaactacgagggaaataatttgggggatttcttcttggctccctgctttccccacagacataccttccgtttggagggccgcggcaccccgtccgaggcgaaggaacccccccatccgcgagggagagaaatgaagggaatttctgcagcggcatgaaagctctgcagctaggtcctctcatcagccatttgtcctttcaaactgtattgtgatacgggcaggatcagtccacgggagagaagacgagcctcccggctgtttctccgccggtctacttcccatatttcttttctttgccctcctgattcttggctggcccagggatgacttcctcgctgcagcggccctggcgggtgccctggctaccatggaccatcctgctggtcagcactgcggctgcttcgcagaatcaagaacggctatgtgcgtttaaagatccgtatcagcaagaccttgggataggtgagagtagaatctctcatgaaaatgggacaatattatgctcgaaaggtagcacctgctatggcctttgggagaaatcaaaaggggacataaatcttgtaaaacaaggatgttggtctcacattggagatccccaagagtgtcactatgaagaatgtgtagtaactaccactcctccctcaattcagaatggaacataccgtttctgctgttgtagcacagatttatgtaatgtcaactttactgagaattttccacctcctgacacaacaccactcagtccacctcattcatttaaccgagatgagacaataatcattgctttggcatcagtctctgtattagctgttttgatagttgccttatgctttggatacagaatgttgacaggagaccgtaaacaaggtcttcacagtatgaacatgatggaggcagcagcatccgaaccctctcttgatctagataatctgaaactgttggagctgattggccgaggtcgatatggagcagtatataaaggctccttggatgagcgtccagttgctgtaaaagtgttttcctttgcaaaccgtcagaattttatcaacgaaaagaacatttacagagtgcctttgatggaacatgacaacattgcccgctttatagttggagatgagagagtcactgcagatggacgcatggaatatttgcttgtgatggagtactatcccaatggatctttatgcaagtatttaagtctccacacaagtgactgggtaagctcttgccgtcttgctcattctgttactagaggactggcttatcttcacacagaattaccacgaggagatcattataaacctgcaatttcccatcgagatttaaacagcagaaatgtcctagtgaaaaatgatggaacctgtgttattagtgactttggactgtccatgaggctgactggaaatagactggtgcgcccaggggaggaagataatgcagccataagcgaggttggcactatcagatatatggcaccagaagtgctagaaggagctgtgaacttgagggactgtgaatcagctttgaaacaagtagacatgtatgctcttggactaatctattgggagatatttatgagatgtacagacctcttcccaggggaatccgtaccagagtaccagatggcttttcagacagaggttggaaaccatcccacttttgaggatatgcaggttctcgtgtctagggaaaaacagagacccaagttcccagaagcctggaaagaaaatagcctggcagtgaggtcactcaaggagacaatcgaagactgttgggaccaggatgcagaggctcggcttactgcacagtgtgctgaggaaaggatggctgaacttatgatgatttgggaaagaaacaaatctgtgagcccaacagtcaatccaatgtctactgctatgcagaatgaacgcaacctgtcacataataggcgtgtgccaaaaattggtccttatccagattattcttcctcctcatacattgaagactctatccatcatactgacagcatcgtgaagaatatttcctctgagcattctatgtccagcacacctttgactataggggaaaaaaaccgaaattcaattaactatgaacgacagcaagcacaagctcgaatccccagccctgaaacaagtgtcaccagcctctccaccaacacaacaaccacaaacaccacaggactcacgccaagtactggcatgactactatatctgagatgccatacccagatgaaacaaatctgcataccacaaatgttgcacagtcaattgggccaacccctgtctgcttacagctgacagaagaagacttggaaaccaacaagctagacccaaaagaagttgataagaacctcaaggaaagctctgatgagaatctcatggagcactctcttaaacagttcagtggcccagacccactgagcagtactagttctagcttgctttacccactcataaaacttgcagtagaagcaactggacagcaggacttcacacagactgcaaatggccaagcatgtttgattcctgatgttctgcctactcagatctatcctctccccaagcagcagaaccttcccaagagacctactagtttgcctttgaacaccaaaaattcaacaaaagagccccggctaaaatttggcagcaagcacaaatcaaacttgaaacaagtcgaaactggagttgccaagatgaatacaatcaatgcagcagaacctcatgtggtgacagtcaccatgaatggtgtggcaggtagaaaccacagtgttaactcccatgctgccacaacccaatatgccaataggacagtactatctggccaaacaaccaacatagtgacacatagggcccaagaaatgttgcagaatcagtttattggtgaggacacccggctgaatattaattccagtcctgatgagcatgagcctttactgagacgagagcaacaagctggccatgatgaaggtgttctggatcgtcttgtggacaggagggaacggccactagaaggtggccgaactaattccaataacaacaacagcaatccatgttcagaacaagatgttcttgcacagggtgttccaagcacagcagcagatcctgggccatcaaagcccagaagagcacagaggcctaattctctggatctttcagccacaaatgtcctggatggcagcagtatacagataggtgagtcaacacaagatggcaaatcaggatcaggtgaaaagatcaagaaacgtgtgaaaactccctattctcttaagcggtggcgcccctccacctgggtcatctccactgaatcgctggactgtgaagtcaacaataatggcagtaacagggcagttcattccaaatccagcactgctgtttaccttgcagaaggaggcactgctacaaccatggtgtctaaagatataggaatgaactgtctgtgaaatgttttcaagcctatggagtgaaattattttttgcatcatttaaacatgcagaagatgtttaccgggcggggtgacaggagagagcgtcagcggcaagctgtggaggatggggctcagaatgcagacctgggctggccgcatggcctctccctgagccctgatttgtggtagggaagcagtatgggtgcagtcccctcctaggcctccctctggggtcccccgatcctatcccacctcttcagggtgagccagcctcacctcttcctagtcctgagggtgagggcaggctgaggcaacgagtgggaggttcaaacaagagtgggctggagccaagggaaaatagagatgatgtaatttctttccggaattc

SEQ ID NO: 32795 - DNA, 3314 bp, Homo Sapiens
gaattccggcaggcgcccatggcgggctgagtcctgcccatgccctggtggcctggaagcctgcatgggcgccgtgcaaagatcaacgttttccagaggagcttttgggctcatcactggcctggggagggcttgacacggggttcccacagcttgccccacaccaccttcacacccacacacagcaggtccccgcggggccggtgcaggctgtggctgcccgcgctgcgctgttgctctgtcccggctggctggctccgagtgtggggcgctctgggccggggccgctggggcgcgcacagtggggtgacaggcggcctggctgcagaaacgttgcaccggtgcctgaggtgggaggatgtgatgacgcggcccacgcagcgggaacccaggcctttaaaaagcccaggaaacagcctcagctcaagcggtggctccactggaggaaaacacaccccggtctcacattaaagaagccaaactgtcggcttcaaagagaaaaggcaacatcctgtcacaggccatgctctggcaaaaacccacagctccggagcaagccccagccccggcccggccataccagggcgtccgtgtgaaggagccagtgaaggaactgctgaggaggaagcgaggccacgccagcagtggggcagcacctgcacctacggcggtggtgctgccccatcagcccctggcgacctacaccacagtgggtccttcctgcctggacatggaaggttctgtgtctgcagtgacagaggaggctgccctgtgtgccggctggctctcccagcccaccccggccaccctgcagcccctggccccatggacaccttacaccgagtatgtgccccatgaagctgtcagctgcccctactcagctgacatgtatgtgcagcccgtgtgccccagctacacggtggtggggccctcctcagtgttggcctatgcctctccgccactcatcaccaatgtcacgacaagaagctccgccacgcccgcagtggggcccccgctggagggcccagagcaccaggcacccctcacctatttcccgtggcctcagcccctttccacactacccacctccaccctgcagtaccggcctccggccccagccctacctgggccccagtttgtccagctccccatctctatcccagagccagtccttcaggacatggaagaccccagaagagccgccagctcgttgaccatcgacaagctgcttttggaggaagaggatagcgacgcctatgcgcttaaccacactctctctgtggaaggcttttaggcgtggctcccacctgagtcctgttccctgaaactgggattttaaaatgagcctggaattgagccccaggttcatgcttgtttggagtagtcatttcatgactactctttctacgcacagctagaattgtagacctgtaaaccttccttcccttcttccttcccctccctccctcacttcctccctctcccccatccttccattcttcccctccctcccttcttcctttccaaccccttccttccttttcctccctcccttccttccctccttcccttctccctttccaaccccttccttccttttcctccctcccttccttccctccttcccttctccctttccttctttacctccctccctccctcgcttcttctctctttcttacttcttttttcaattctgttccattttgggaggtaattatagggattttagcaataacattttatgtcaaatgttgccaagtctgtggtccatgggctttcatttctgtcacatttcatttcttggaaaaggcctccttcctccagtgcctgctgaaccatcttagggtcactcacaccctctgtaattttaagatgtatgtggtggccggcgggaagaccagccccgacagcacctcctgagaaagtcagccaagggcctaccctgatgccagagtccttgagctgtcagttcccacagttgctcctttgtttgctcttctcagcctcggccagatttacagtccaggcagcaaaatctcaaggcctggggctcagagtagtaaggggtgggaagtgggtggcagggagaaaagaacatcagggtgggtggggacaggccagtgacgaagagagggacagaggagggatgggaacaggctgtgcatcttagttggagagaggggtgtgggaggaagcttgagtttgatgcagggaggaggaaggctgaggaatgacttggctccagattacttggttattaagaagaacaataaactaaaggaaagcattgcttgaagagatggttttgctgctctccttgaggatacgtgcaagggaagttgggctgttgtaaacagggtgaagggtgtgtttggtcggccatttctctctcacctctaggccctctgctggtgctgtggaggccaagaccccattaagcctaaaggtgatgggtcctcgcctaggcttagtgctaccatgtgggttttgtttctttccttccttccttccttccttccttccttccttccttccttccttccttccttccttccttccttctttccttccttccttccttccttccttcctctctctttctttcttttttttggttttttttgggacggagtctcactccattgcccaggctggagtacaatggtgcgatcttggctcactgcacctctgtctcccaagttcaagtgattctcctgcctgagcctcccgagtagctgggattacaggtgcatgccaccatgcctggctaatttttgtatttttagtagagacggggtttcaccatgttggccaggctggtctcgaactcctgaccttgtgatccgcgcgcctcagcctctcagagtgctgggatcacaggcgtgagccaccgcacccagccttttaccatgtgggtttctttagtgtcttaaaagcgtccataagccaccattctgtggaaccaaggccccctccacgcaaacaccctccctcctggggacctctggagcctcagccagaagtaccattaggtttaattttaatttgttttgctggagaaacatcaggtttgtaggagactgagttgttagcaggtgtgcttagctcttgatagtgaacgtgtaccttgggaactggctcacccacctgctaatagcaccatcgtcactattaagcagacatttcagttggtagaatccatgtagaagtcatggacttttctgggaaatgacttttctgggaaatgacagtttctttgacatattttctttgcccactttaaataaaaactctggagaaaaaaaaaaaaa

SEQ ID NO: 32796 - DNA, 1412 bp, Homo Sapiens; identical to SEQ ID NO: 29839

SEQ ID NO: 32797 - DNA, 260 bp, Homo Sapiens
  misc_feature (70)..(70): n is a, c, g, or t
  misc_feature (122)..(122): n is a, c, g, or t
taagacccacccagggctcttccttgtcagaacctgtcccctaggtcctgccagggctacgaggcaaggngagttttccagcgatgcctgctctttggaaggaatattgagaacgggtcaancgggcctcaaccgagaggaaaagggaagccacgctagctttttcctatcagaacaaatgaagaatccctgaactggggaaggctatcaaaattattaggaaggccgggcgcggtggctcacatccgtaatcctaacac

SEQ ID NO: 32798 - DNA, 4651 bp, Homo Sapiens
atggatacgactgcggcggcggcgctgcctgcttttgtggcgctcttgctcctctctccttggcctctcctgggatcggcccaaggccagttctccgcaggtggctgtacttttgatgatggtccaggggcctgtgattaccaccaggatctgtatgatgactttgaatgggtgcatgttagtgctcaagagcctcattatctaccacccgagatgccccaaggttcctatatgatagtggactcttcagatcacgaccctggagaaaaagccagacttcagctgcctacaatgaaggagaacgacactcactgcattgatttcagttacctattatatagccagaaaggactgaatcctggcactttgaacatattagttagggtgaataaaggacctcttgccaatccaatttggaatgtgactggattcacgggtagagattggcttcgggctgagctagcagtgagctccttttggcccaatgaatatcaggtaatatttgaagctgaagtctcaggagggagaagtggttatattgccattgatgacatccaagtactgagttatccttgtgataaatctcctcatttcctccgtctaggggatgtagaggtgaatgcagggcaaaacgctacatttcagtgcattgccacagggagagatgctgtgcataacaagttatggctccagagacgaaatggagaagatataccagtagcccagactaagaacatcaatcatagaaggtttgccgcttccttcagattgcaagaagtgacaaaaactgaccaggatttgtatcgctgtgtaactcagtcagaacgaggttccggtgtgtccaattttgctcaacttattgtgagagaaccgccaagacccattgctcctcctcagcttcttggtgttgggcctacatatttgctgatccaactaaatgccaactcgatcattggcgatggtcctatcatcctgaaagaagtagagtaccgaatgacatcaggatcctggacagaaacccatgcagtcaatgctccaacttacaaattatggcatttagatccagataccgaatatgagatccgagttctacttacaagacctggtgaaggtggaacggggctcccaggacctccactaatcaccagaacaaaatgtgcagaacctatgagaaccccaaagacattaaagattgctgaaatacaggcaagacggattgctgtggactgggaatccttgggttacaacattacgcgttgccacacttttaatgtcactatctgctaccattacttccgtggtcacaacgagagcaaggcagactgtttggacatggaccccaaagcccctcagcatgttgtgaaccatctgccaccttatacaaatgtcagcctcaagatgatcctaaccaatccagagggaaggaaggagagtgaagagacaattattcaaactgatgaagatgtgcctggtcccgtaccagtaaaatctcttcaaggaacatcctttgaaaataagatcttcttgaactggaaagaacctttggatccaaatggaatcatcactcaatatgagatcagctatagcagtataagatcatttgatcctgcagtcccagtggctggacctccccagactgtatcaaatttatggaacagtacacaccatgtctttatgcatctccaccctggaaccacgtaccagtttttcataagagccagcacggtcaaaggctttggtccagccacagccatcaatgtcaccaccaatatctcagctccaactttacctgactatgaaggagttgatgcctctctcaatgaaactgccaccacaataactgtattgttgagaccagcacaagccaaaggtgctcctatcagtgcttatcagattgttgtggaagaactgcacccacaccgaaccaagagagaagccggagccatggaatgctaccaggttcctgtcacataccaaaatgccatgagtgggggtgcaccgtattactttgctgcagaactacccccgggaaacctacctgagcctgccccgttcactgtgggtgacaatcggacctaccaaggcttttggaaccctcctttggctccgcgcaaaggatacaacatctatttccaggcgatgagcagtgtggagaaggaaactaaaacccagtgcgtacgcattgctacaaaagcagcaacagaagaaccagaagtgatcccagatcccgccaagcagacagacagagtggtgaaaatagcaggaattagtgctggaattttggtgttcatcctccttctcctagttgtcatattaattgtaaaaaagagcaaacttgctaaaaaacgcaaagatgccatggggaatacccggcaggagatgactcacatggtgaatgcaatggatcgaagttatgctgatcagagcactctgcatgcagaagatcctctttccatcaccttcatggaccaacataactttagtccaagatatgagaaccacagtgctacagcagagtccagtcgccttctagacgtacctcgctacctctgtgaggggacggaatccccttaccagacaggacagctgcatccagccatcagggtagctgatttactgcagcacattaatctcatgaagacatcagacagctatgggttcaaagaggaatatgagagcttttttgaaggacagtcagcatcttgggatgtagctaaaaaagatcaaaatagagcaaaaaaccgatatggaaacattatagcatatgatcactccagagtgattttgcaacccgtagaggatgatccttcctcagattatattaatgccaactatattgatggctaccagagaccaagtcattacattgcaacccaaggtcccgttcatgaaacagtgtatgatttctggaggatgatttggcaagaacaatctgcttgcattgtgatggttacaaatttagttgaggttggccgggttaaatgctataaatattggcctgatgatactgaagtttatggtgacttcaaagtaacgtgtgtagaaatggaaccacttgctgaatatgtagttaggacattcaccctggaaaggagggggtacaatgaaatccgtgaagttaaacagttccatttcacgggctggcctgaccatggagtgccctaccatgctacagggctgctttcctttatccggcgagtcaagttatcaaaccctcccagtgctggccccatcgttgtacattgcagtgctggtgctggacgaactggctgctacattgtgattgacatcatgctagacatggctgaaagagagggtgttgttgatatttacaattgtgtcaaagccttaagatctcggcgtattaatatggtccagacagaggaacagtacatttttattcatgatgccattttagaagcctgcttatgtggagaaactgccatacctgtctgtgaatttaaagctgcatattttgatatgattagaatagactcccagactaactcttcacatctcaaggatgaatttcagactctgaattcagtcacccctcgactacaagctgaagactgcagtatagcgtgcctgccaaggaaccatgacaagaaccgtttcatggacatgctgccacctgacagatgtctgccttttttaattacaattgatggggagagcagtaactacatcaatgctgctcttatggacagctacaggcaaccagctgctttcatcgtcacacaataccctctgccaaacactgtaaaagacttctggagattagtgtatgattatggctgtacctccattgtgatgttaaacgaagtcgacttgtcccagggctgccctcagtactggccagaggaagggatgctacgatatggccccatccaagtggaatgtatgtcttgttcaatggactgtgatgtgatcaaccggatttttaggatatgcaatctaacaagaccacaggaaggttatctgatggtgcaacagtttcagtacctaggatgggcttctcatcgagaagtgcctggatccaaaaggtcattcttgaaactgatacttcaggtggaaaagtggcaggaggaatgcgaggaaggggaaggccggacgattatccactgcctaaatggtggcgggcgaagtggcatgttctgtgctataggcatcgttgttgaaatggtgaaacggcaaaatgttgtcgatgttttccatgcagtaaagacactgaggaacagcaagccaaacatggtggaagccccggagcaataccgtttctgctatgatgtagctttggagtacctggaatcatcttagttgggtgagactctttaaagtgcatccatgaagaaacctgtccatctattgagccagcagctgttgtacctgttacacttgtgcagaaagattttaatgtggggggtgggagacttttacatttgagaggtaaaagtattttttttatgaagttgtgtatcttaataaaaagaactgaattagtttttattactatattaaagcatcaacatttcatgccacataaaattatatttaataagaaccagattgaaatgagaacgtattggtgtttgtacagtgaacatgccacctttttccatggtttcaggtagtgcagctaccacatgtt

SEQ ID NO: 32799 - DNA, 6728 bp, Homo Sapiens
agcagacgggagtttctcctcggggtcggagcaggaggcacgcggagtgtgaggccacgcatgagcggacgctaaccccctccccagccacaaagagtctacatgtctagggtctagacatgttcagctttgtggacctccggctcctgctcctcttagcggccaccgccctcctgacgcacggccaagaggaaggccaagtcgagggccaagacgaagacatcccaccaatcacctgcgtacagaacggcctcaggtaccatgaccgagacgtgtggaaacccgagccctgccggatctgcgtctgcgacaacggcaaggtgttgtgcgatgacgtgatctgtgacgagaccaagaactgccccggcgccgaagtccccgagggcgagtgctgtcccgtctgccccgacggctcagagtcacccaccgaccaagaaaccaccggcgtcgagggacccaagggagacactggcccccgaggcccaaggggacccgcaggcccccctggccgagatggcatccctggacagcctggacttcccggaccccccggaccccccggacctcccggaccccctggcctcggaggaaactttgctccccagctgtcttatggctatgatgagaaatcaaccggaggaatttccgtgcctggccccatgggtccctctggtcctcgtggtctccctggcccccctggtgcacctggtccccaaggcttccaaggtccccctggtgagcctggcgagcctggagcttcaggtcccatgggtccccgaggtcccccaggtccccctggaaagaatggagatgatggggaagctggaaaacctggtcgtcctggtgagcgtgggcctcctgggcctcagggtgctcgaggattgcccggaacagctggcctccctggaatgaagggacacagaggtttcagtggtttggatggtgccaagggagatgctggtcctgctggtcctaagggtgagcctggcagccctggtgaaaatggagctcctggtcagatgggcccccgtggcctgcctggtgagagaggtcgccctggagcccctggccctgctggtgctcgtggaaatgatggtgctactggtgctgccgggccccctggtcccaccggccccgctggtcctcctggcttccctggtgctgttggtgctaagggtgaagctggtccccaagggccccgaggctctgaaggtccccagggtgtgcgtggtgagcctggcccccctggccctgctggtgctgctggccctgctggaaaccctggtgctgatggacagcctggtgctaaaggtgccaatggtgctcctggtattgctggtgctcctggcttccctggtgcccgaggcccctctggaccccagggccccggcggccctcctggtcccaagggtaacagcggtgaacctggtgctcctggcagcaaaggagacactggtgctaagggagagcctggccctgttggtgttcaaggaccccctggccctgctggagaggaaggaaagcgaggagctcgaggtgaacccggacccactggcctgcccggaccccctggcgagcgtggtggacctggtagccgtggtttccctggcgcagatggtgttgctggtcccaagggtcccgctggtgaacgtggttctcctggccccgctggccccaaaggatctcctggtgaagctggtcgtcccggtgaagctggtctgcctggtgccaagggtctgactggaagccctggcagccctggtcctgatggcaaaactggcccccctggtcccgccggtcaagatggtcgccccggacccccaggcccacctggtgcccgtggtcaggctggtgtgatgggattccctggacctaaaggtgctgctggagagcccggcaaggctggagagcgaggtgttcccggaccccctggcgctgtcggtcctgctggcaaagatggagaggctggagctcagggaccccctggccctgctggtcccgctggcgagagaggtgaacaaggccctgctggctcccccggattccagggtctccctggtcctgctggtcctccaggtgaagcaggcaaacctggtgaacagggtgttcctggagaccttggcgcccctggcccctctggagcaagaggcgagagaggtttccctggcgagcgtggtgtgcaaggtccccctggtcctgctggaccccgaggggccaacggtgctcccggcaacgatggtgctaagggtgatgctggtgcccctggagctcccggtagccagggcgcccctggccttcagggaatgcctggtgaacgtggtgcagctggtcttccagggcctaagggtgacagaggtgatgctggtcccaaaggtgctgatggctctcctggcaaagatggcgtccgtggtctgaccggccccattggtcctcctggccctgctggtgcccctggtgacaagggtgaaagtggtcccagcggccctgctggtcccactggagctcgtggtgcccccggagaccgtggtgagcctggtccccccggccctgctggctttgctggcccccctggtgctgacggccaacctggtgctaaaggcgaacctggtgatgctggtgccaaaggcgatgctggtccccctgggcctgccggacccgctggaccccctggccccattggtaatgttggtgctcctggagccaaaggtgctcgcggcagcgctggtccccctggtgctactggtttccctggtgctgctggccgagtcggtcctcctggcccctctggaaatgctggaccccctggccctcctggtcctgctggcaaagaaggcggcaaaggtccccgtggtgagactggccctgctggacgtcctggtgaagttggtccccctggtccccctggccctgctggcgagaaaggatcccctggtgctgatggtcctgctggtgctcctggtactcccgggcctcaaggtattgctggacagcgtggtgtggtcggcctgcctggtcagagaggagagagaggcttccctggtcttcctggcccctctggtgaacctggcaaacaaggtccctctggagcaagtggtgaacgtggtccccccggtcccatgggcccccctggattggctggaccccctggtgaatctggacgtgagggggctcctgctgccgaaggttcccctggacgagacggttctcctggcgccaagggtgaccgtggtgagaccggccccgctggaccccctggtgctcctggtgctcctggtgcccctggccccgttggccctgctggcaagagtggtgatcgtggtgagactggtcctgctggtcccgccggtcccgtcggccccgtcggcgcccgtggccccgccggaccccaaggcccccgtggtgacaagggtgagacaggcgaacagggcgacagaggcataaagggtcaccgtggcttctctggcctccagggtccccctggccctcctggctctcctggtgaacaaggtccctctggagcctctggtcctgctggtccccgaggtccccctggctctgctggtgctcctggcaaagatggactcaacggtctccctggccccattgggccccctggtcctcgcggtcgcactggtgatgctggtcctgttggtccccccggccctcctggacctcctggtccccctggtcctcccagcgctggtttcgacttcagcttcctgccccagccacctcaagagaaggctcacgatggtggccgctactaccgggctgatgatgccaatgtggttcgtgaccgtgacctcgaggtggacaccaccctcaagagcctgagccagcagatcgagaacatccggagcccagagggaagccgcaagaaccccgcccgcacctgccgtgacctcaagatgtgccactctgactggaagagtggagagtactggattgaccccaaccaaggctgcaacctggatgccatcaaagtcttctgcaacatggagactggtgagacctgcgtgtaccccactcagcccagtgtggcccagaagaactggtacatcagcaagaaccccaaggacaagaggcatgtctggttcggcgagagcatgaccgatggattccagttcgagtatggcggccagggctccgaccctgccgatgtggccatccagctgaccttcctgcgcctgatgtccaccgaggcctcccagaacatcacctaccactgcaagaacagcgtggcctacatggaccagcagactggcaacctcaagaaggccctgctcctcaagggctccaacgagatcgagatccgcgccgagggcaacagccgcttcacctacagcgtcactgtcgatggctgcacgagtcacaccggagcctggggcaagacagtgattgaatacaaaaccaccaagtcctcccgcctgcccatcatcgatgtggcccccttggacgttggtgccccagaccaggaattcggcttcgacgttggccctgtctgcttcctgtaaactccctccatcccaacctggctccctcccacccaaccaactttccccccaacccggaaacagacaagcaacccaaactgaacccccccaaaagccaaaaaatgggagacaatttcacatggactttggaaaatatttttttcctttgcattcatctctcaaacttagtttttatctttgaccaaccgaacatgaccaaaaaccaaaagtgcattcaaccttaccaaaaaaaaaaaaaaaaaaaaaagaataaataaataagtttttaaaaaaggaagcttggtccacttgcttgaagacccatgcgggggtaagtccctttctgcccgttgggttatgaaaccccaatgctgccctttctgctcctttctccacaccccccttggcctcccctccactccttcccaaatctgtctccccagaagacacaggaaacaatgtattgtctgcccagcaatcaaaggcaatgctcaaacacccaagtggcccccaccctcagcccgctcctgcccgcccagcacccccaggccctggggacctggggttctcagactgccaaagaagccttgccatctggcgctcccatggctcttgcaacatctccccttcgtttttgagggggtcatgccgggggagccaccagcccctcactgggttcggaggagagtcaggaagggccacgacaaagcagaaacatcggatttggggaacgcgtgtcatcccttgtgccgcaggctgggcgggagagactgttctgttctgttccttgtgtaactgtgttgctgaaagactacctcgttcttgtcttgatgtgtcaccggggcaactgcctgggggcggggatgggggcagggtggaagcggctccccatttttataccaaaggtgctacatctatgtgatgggtggggtggggagggaatcactggtgctatagaaattgagatgcccccccaggccagcaaatgttcctttttgttcaaagtctatttttattccttgatattttttctttctttttttttttttttgtggatggggacttgtgaatttttctaaaggtgctatttaacatgggaggagagcgtgtgcgctccagcccagcccgctgctcactttccaccctctctccacctgcctctggcttctcaggcctctgctctccgacctctctcctctgaaaccctcctccacagctgcagcccatcctcccggctccctcctagtctgtcctgcgtcctctgtccccgggtttcagagacaacttcccaaagcacaaagcagtttttccctaggggtgggaggaagcaaaagactctgtacctattttgtatgtgtataataatttgagatgtttttaattattttgattgctggaataaagcatgtggaaatgacccaaacataatccgcagtggcctcctaatttccttctttggagttgggggaggggtagacatggggaaggggccttggggtgatgggcttgccttccattcctgccctttccctccccactattctcttctagatccctccataaccccactcccctttctctcacccttcttataccgcaaacctttctacttcctctttcattttctattcttgcaatttccttgcaccttttccaaatcctcttctcccctgcaataccatacaggcaatccacgtgcacaacacacacacacactcttcacatctggggttgtccaaacctcatacccactccccttcaagcccatccactctccaccccctggatgccctgcacttggtggcggtgggatgctcatggatactgggagggtgaggggagtggaacccgtgaggaggacctgggggcctctccttgaactgacatgaagggtcatctggcctctgctcccttctcacccacgctgacctcctgccgaaggagcaacgcaacaggagaggggtctgctgagcctggcgagggtctgggagggaccaggaggaaggcgtgctccctgctcgctgtcctggccctgggggagtgagggagacagacacctgggagagctgtggggaaggcactcgcaccgtgctcttgggaaggaaggagacctggccctgctcaccacggactgggtgcctcgacctcctgaatccccagaacacaacccccctgggctggggtggtctggggaaccatcgtgcccccgcctcccgcctactcctttttaagctt

SEQ ID NO: 32800 - DNA, 4170 bp, Homo Sapiens
tcaacatatgaaaaatcaatgtaatatttcatattaacagttggaagactcacaattcatagtttcagaatttacaacacaaacctacaggaataaagacaatgtagtattagaataaggtcagatatatagatcaatggacagaattgacagtccagaaatacacccatacgattacggtcacctgatttttgactaaggttccaaaacaattcactaggggaaagaatagtcttgtcaaaaaatggtgctcagacaagtggatagccataagcacagaatgagtttggacccctatctcaaatctcaaatacaaacattaactccgaattaatcaaatgcctaaatttaagagctaaaattttaaagctcttagaagaaaacataggtacacatctttgtgactttgaattaggtcacggtttccttgacatgacacttaaaagtacaagcaacaaaagaaaaaaatagataaaatgaacttcagcaaaattagaatgtttatgcttcagaaaacactgtgaagaaagtgatcagacaactcacagaatgggaaaaatatttgtgaatcatatctcttaataagggtccagcagaaaagggcaaaggtggaaatggaggaggaaaacctccttctggtccaaaccgaatgaatggtcatcaccaacagaatggagtggaaaacatgatgttgtttgaagttgttaaaatgggcaagagtgctatgcagtcggtggtagatgattggatagaatcatacaagcatgaccgagatatagcacttcttgaccttatcaacttttttattcagtgttcaggctgtaaaggagttgtcacagcagaaatgtttagacatatgcagaactctgagataattcgaaaaatgactgaagaattcgatgaggatagtggagattatccacttaccatggctggtcctcagtggaagaagttcaaatccagtttttgtgaattcattggcgtgttagtacggcaatgtcaatatagtatcatatatgatgagtatatgatggatacagtcatttcacttcttacaggattgtctgactcacaagtcagagcatttcgacatacaagcaccctggcagctatgaagttgatgacagctttggtgaatgtggcactaaatcttagcattaatatggataatacacaaagacaatatgaagcagaacgaaataaaatgattgggaaacgagccaatgagaggctagaactcctgctacaaaagcggaaagagcttcaggaaaatcaagatgaaatagaaaatatgatgaatgcaatatttaaaggagtgtttgtacatagataccgtgatgcgatacgtgaaattcgagctatttgcattgaagagattggcatttggatgaagatgtatagtgatgcctttcttaatgacagttatttaaaatatgttggttggactatgcatgataagcaaggtgaagtaagactcaaatgtcttactgctctacaagggctttattataacaaagagcttaattccaaactggaactttttaccagtcggttcaaggatagaattgtgtctatgacccttgacaaagaatatgatgttgcagtacaagcaataaaattactcactcttgttttacagagtagtgaagaagttctcactgcagaagattgtgaaaatgtctatcatctggtttattcagctcaccggccagtagcagtagcagctggagaatttctctacaaaaagctcttcagtcgtagagatccagaggaggatggaatgatgaaaagaagaggaagacaaggtccaaatgccaaccttgttaagacattggtttttttctttctagaaagtgagttacatgagcatgcagcataccttgtggatagcatgtgggactgtgctactgagctgctgaaagactgggaatgtatgaatagcttgttactggaagagccacttagtggagaggaagcactaacagataggcaagagagtgctctgattgaaataatgctttgtaccattagacaagcggctgaatgtcatcctcccgtgggaagagggacaggaaaaagggtgcttacagcaaaggagaagaagacacagttggatgataggacaaaaatcactgagctttttgccgtggcccttcctcagttattagcaaaatactctgtagatgcagaaaaggtgactaacttgttgcagttgcctcagtactttgatttggaaatatataccactggacgattagaaaacgatttggatgccttattgcgacagatccggaatattgtagagaagcacacagatacagatgttttggaagcatgttctaaaacttaccatgcactctgtaatgaagagttcacaatcttcaacagagtagatatttcaagaagtcaactgatagatgaattggcagataaatttaaccggcttcttgaagattttctgcaagagggtgaagaacctgatgaagatgatgcatatcaggtattgtcaacattgaagaggatcactgcttttcataatgcccatgacctttcaaagagggatttatttgcttgtaattacaaactcttgaaaactggaatcgaaaatggagacatgcctgagcagattgttattcacgcactgcagtgtactcactatgtaatcctttggcaacttgctaagataactgaaagcagctctacaaaggaggacttgctgcgtttaaagaaacaaatgagagtattttgtcagatatgtcaacattacctgaccaacgtgaatactactgttaaggaacaggccttcactattctgtgtgatattttgatgatcttcagccatcagattatgtcaggagggcgtgacatgttagagccattagtgtatacccctgattcttcattgcagtctgagttgctcagctttattttggatcatgtcttcattgaacaggatgatgataataatagtgcagatggtcagcaagaggatgaagccagtaaaattgaagctctgcacaagagaagaaatttacttgcagcattttgtaagctaattgtatatactgtggtggagatgaatacagctgcagatatcttcaaacagtatatgaagtattataatgactatggagatatcatcaaagaaacaatgagtaaaacaaggcagatagacaaaattcagtgtgctaagacccttattctcagtctgcaacagctttttaatgaaatgatacaagaaaatggctataattttgatagatcatcctctacatttagtggcataaaagaacttgctcgacgttttgctttaacttttggacttgatcagttgaaaacaagagaagccattgccatgctacacaaagatggcatagaatttgcttttaaagagcctaatccgcaaggggagagccatccacctttaaatttggcatttcttgatattctgagtgaattttcttctaaactacttcgacaagacaaaagaacagtgtatgtttacttggaaaagttcatgacctttcagatgtcactccgaagagaggatgtgtggcttccactgatgtcttaccgaaattctttgctagctggtggtgatgatgacaccatgtcagtcattagtggaatcagcagccgggggtcaacagtacggagtaaaaaatcaaaaccatctacaggaaaacggaaagtggttgagggcatgcagctttcactcactgaagaaagtagtagtagtgacagtatgtggttaacgagagaacaaacactgcacacccctgttatgatgcagacaccacaactcacctccactattatgagagagcccaaaagattacggcctgaggatagcttcatgagtgtttatcctaagcagactgaacatcatcaaacacctcttgattataatcggcgtggcacaagcctaatggaagatgatgaagagccaattgtggaagatgttatgatgtcctcagaagggaggattgaggatcttaatgagggaatggattttgacaccatggatatagatttgccaccatcaaagaacagacgagagagaacagaactgaagcctgatttctttgatccagcttcaattatggatgaatcagttcttggagtgtcaatgttttaataccagtacacaattaaatctgtggtgaagtc

SEQ ID NO: 32801 - DNA, 1255 bp, Homo Sapiens
ataatttgggttcactgtggctacttgaacactacactgcagctaactctatctttgtttcctttccaggaatcaatgaatttcagcgatgttttcgactccagtgaagattattttgtgtcagtcaatacttcatattactcagttgattctgagatgttactgtgctccttgcaggaggtcaggcagttctccaggctatttgtaccgattgcctactccttgatctgtgtctttggcctcctggggaatattctggtggtgatcacctttgctttttataagaaggccaggtctatgacagacgtctatctcttgaacatggccattgcagacatcctctttgttcttactctcccattctgggcagtgagtcatgccactggtgcgtgggttttcagcaatgccacgtgcaagttgctaaaaggcatctatgccatcaactttaactgcgggatgctgctcctgacttgcattagcatggaccggtacatcgccattgtacaggcgactaagtcattccggctccgatccagaacactaccgcgcagcaaaatcatctgccttgttgtgtgggggctgtcagtcatcatctccagctcaacttttgtcttcaaccaaaaatacaacacccaaggcagcgatgtctgtgaacccaagtaccagactgtctcggagcccatcaggtggaagctgctgatgttggggcttgagctactctttggtttctttatccctttgatgttcatgatattttgttacacgttcattgtcaaaaccttggtgcaagctcagaattctaaaaggcacaaagccatccgtgtaatcatagctgtggtgcttgtgtttctggcttgtcagattcctcataacatggtcctgcttgtgacggctgcaaatttgggtaaaatgaaccgatcctgccagagcgaaaagctaattggctatacgaaaactgtcacagaagtcctggctttcctgcactgctgcctgaaccctgtgctctacgcttttattgggcagaagttcagaaactactttctgaagatcttgaaggacctgtggtgtgtgagaaggaagtacaagtcctcaggcttctcctgtgccgggaggtactcagaaaacatttctcggcagaccagtgagaccgcagataacgacaatgcgtcgtccttcactatgtgatagaaagctgagtctccctaaggcatgtgtgaaacatactcatagatgttatgcaaaaaaaagtctatgg

SEQ ID NO: 32802 - DNA, 2787 bp, Homo Sapiens
  misc_feature (24)..(24): n is a, c, g, or t
  misc_feature (85)..(85): n is a, c, g, or t
  misc_feature (90)..(90): n is a, c, g, or t
  misc_feature (1241)..(1242): n is a, c, g, or t
  misc_feature (1245)..(1245): n is a, c, g, or t
gtccagaggcccagtattaccttntataggtaaaactgtcaccagttataagacttacaataagcaaagaggaaatgccctgttntgtgntgagggctgtaccctcctacccatgggagcaccaggtcggccattctcagggttggtctcctgcggtttacagagcaccacagacctgccaaaggctttccacgtttgtgcagcaatcctcgagtgtttagagaagaggaagatatcctggctggcactctttcagttgacagagagtggtaagaaacacgctgctgaggcacaaatgcggagggccgctcttttcagaggcatcttgcaaatggttaagaacgagccctccttgaggttccttgctaagtaagtttataagctccattttagttgggacagattaagcacaaacttgtttaaagcaataagataatttactggctcactggtcaaccccaggaccaatgggcctatcatggggactgcctctctctgcaccacacccaccctcctgcaagaggtcgacccccccatcctctcccagctgctgacaggtacctgggtatcctcagctcaggctgttcgccccacactatccccacagccaggcctcccagggtacacgtcccgacccccaggggtgtccccagcactgataataggcagagatgtccagagttgcctgagccacttcttggtgttgcagacctcaggctggggcggctcctcctccgtgtggccccggatcagcacaccaggctgctgcctttcgctttttacaggtacctccacccacagggctggtcagggctgggcagtgtttcccagacccccatctcagcacctctgggtcccgccagatgggaagggttgtctgtgcctctgctccacagatgagcagtatcccttggcatcacctgctacctttccagcagtctgtagccatttgtcactatgtctttacctctagtcttctctcctacttccatgaagacgcggccatcagggaagaggccttcctgcatgttgctgtggacatgtacttgaagctggtccagctcttcgtggctggggatacaagcacagtttcacctccagctggcaggagcctggagctcaagggtcaggcaggtgcaagggccagtcccacctccaggggagctccccccagccggaggctccttctgccaaagaatgttccggcacagcatgcagactatgggggacacaccagcccnngtntctgtatgtcttctaacctgtgagtttgcctgttttctctctagggcaaccccgtggaactgataacaaaagctcgtctttttctgctgcagttaatacctcggtgcccgaaaaagagcttctcacacgtggcagaggtaacgtcaagatgcccaccttgggccatgtgggggacatgagaattgacagctgcctgggccatgtgcctgcctggctggcaatacaactcgactatttctgccagagcccctcccctgtggtctgaggcctagtgggcggcatgggctgaggacctgctcctctctcacagctgctggctgatcgtggggactgcgacccagaggtgagcgccgccctccagagcagacagcaggctgcccctgacgctgacctgtcccaggagcctcatctcttctgacgggacctgccactgcacaccagcccagctcccgtgtaaataatttattacaagcataacatggagctcttgttgcactaaaaagtggattacaaatctcctcgactgctttagtggggaaaggaatcaattatttatgaactgtccggccccgagtcactcagcgtttgcgggaaaataaaccactggtcccagagcagaggaaggctacttgagccggacaccaagcccgcctccagcaccaagggcgggcagcaccctccgaccctcccatgcgggtgcacacgaagggtgaggctgacacagccactgcggagtccaggctgctagaggtgctcatcctcactgccgtcctcaggtgggttcgggcttcaccgcctggccctctgtggtcacagaggggctcggtggcccaggtggtggttccgcctccaggggcagggccttgtcctgggtctgtgtcagcgggtgcaccatggacatgtgtacattgaggttgtgggccttctcaaaccgccggccacactggtcacaggcaaagtccagctcagtctcagccttgtgtttggtcatgtggtacttgagggatgcccgctgcctgcactggaacccacagacctcacacctgggggacagaggcagataagaaggtgcgaggccacagccctgggagggggtcctgactcacacttactgcaaaggcttggctcccgaatgtcgcatttggtggacgagaaggtgcttccgctgcttgaaggtttgtccacattcgtcacagatatagttccgcacctctgagaggggagagtccagtgagtccaggcccctgatgctccaacctcccggggggacgacgatgacaatgtgaaaccatcacagctgggaagacatttctgcacatggttcaccatgcagtgggcccaagcaaggggcctatgagggcctcgtttattaagatctttaaactgctttatacactgtcacgtggcttcatcagctgtgtgcatttcaggatggtttttaaagaaacctcagaaagctatttccttaaccacagattcttgtctttttttttttttgagatggatttcgctcgttacccaggctgccagtgcggtgggcgt

SEQ ID NO: 32803 - DNA, 368 bp, Homo Sapiens
gggggatatgggcgtctccagtgtgagggagaagtatgagcttgctcacccaccagaggagtggaagtaagatacaaacctgctttggtgtgatgcacacttgatttcttttgctttttaaaaacatgcacaagataacaaatgtatatgtttaattttcacactgcttgtcattacaactctggtataaataaaattcgttagtaattattaacgaatgatctcttctagacctctagtctagcttttgggtattattaattatactttgagccatctgatttccgttttctgtgatggtcttttgctagctaatttctcatcagtgctactttgtttcaacctttgctcccaataaaactcaaatc

SEQ ID NO: 32804 - DNA, 362 bp, Homo Sapiens
gggtagtgaatcaaaactaactacagccattctttttaaagcccaagggatggagcaaaggtgtaaggatgttacctgtttgttttaatcagagagcaaaaagaagtcacaatagtttgggagaaaaagtagtatggtgagtaaggttatgcgtataatttcatactgaatttattactatttgggatgtacgtcaatgttctaacaaacactgccaacacgtcaattttttaaaaagcgtgggccacattgctaagaatttgttaaagcataactgtattttttgttttagggccttattgatgttttgccgttccaatgtatgcatttttttactcaataaacttgtcttaattttaaaa

SEQ ID NO: 32805 - DNA, 530 bp, Homo Sapiens
gggggcatctgttgttcccttctttgtgttcatgtgcattcaatgtttagctgccacttataggtgagaacatgtagtatttggttttctctttcgtttagctcatttaggatagtggcctccagctctatccacgttctgacaaaggatatgatctgagaggttggcatttcttccttggtccttgagataaaaggattctcaaccagaaaactaaaggataagcaagaaaagagatctttgggcatctgtgacaagattctttacccatctttggaaacttataaagaaaatattagaacaaagaagaatgaggaaggcacaaaacagttccagaacttctaagcaaccaaaagtaactgaaaagtcaactgaaaatagtagtagctattttttctcatattgtaagaatccagttagctcagaccaaaggaaactccttttaaatttagagcccacagttgaaacctgtgaggtcaaccaactgaaagtaaatacatgattaaataagaatttccacagttgtaaaa

SEQ ID NO: 32806 - DNA, 400 bp, Homo Sapiens
ggcggaataattcaagtagagttgtttggttgagaggaacatccccatctcaaggccgaacctgtgtgaacctcatgccaagcacagatatagggctggcgcaggtgcttcctaaagctcaccttcctggagatgacatgcataaaagagggttgggacttttactcactagagaactgtacacatgggaagtcactgaactgtctgttttgccagaaggagtagttgccttgggcatcatctgctatagcccagaatacagtgaatggcatagttttgggttaaatttattatgcaaagattcagattccaaaataatttcctaccccctttttttcccagaaatcctttatttaggaaaatggtttccaggtttaaataaaagcatttcccttttgcc

SEQ ID NO: 32807 - DNA, 766 bp, Homo Sapiens
gggagaaggggtgaaaagtagcctcgatgtgaaagtccttgtgtgtccctgaggggggaagtaagtcacagtcgggacactggttcctgtcactgggtgcagcacaaagaaggaccccaggacatgcggtgcagacgggagcacagagagggagaaaaccacacacgtggccattgatgcccttggttgacagagttgacgggattttctctggctctcaccttgagggcatcatcagcatcctgaagtcactagcgggcctctgtgcagatgtcctttcgaggggcttcaggctgtggaagtgaccagtgaacacaggacctgcctggactcccagcctcacagcacagcaccacagcctggactgccccctgcctgatacttgcttggtttggaactttactccatcaaaacatccaaataaaaatatgtagactccccaccctatcccatctgctatagggttctaattcccccacagacatcccctcacagtgctttctcccatgacgggggactcctgagctggactccatccctcccctaccagaaaagcacaggtgctgtggcatgagttcaaccgccctgaaattccctgatcttcagagtaataattctaaaatagggcaataatacccctgtcagggttcttggaagaacttctcattacctggaggcccccagaaatgcaaaccacttcctccgggttttccagcgtggctgtcaacccctgggaatcaggagccttcttcccgtgccgggggga

SEQ ID NO: 32808 - DNA, 371 bp, Homo Sapiens
ggtaaatagccctaggttttaaggtttactggcactatagtaaactattttttttaaatatttgattagttggatttttctgctttcaaccaggtggtttggtattatgtgagtagttcaattgtttattatttaaaaaaatactctgtaaaaccagagagaaccttggtaatattctgtatagaatccttcaaaggagtttctttaatgctcagaaaatgtatttgatgggacagttgatcctcaaactcagtgactgttttgtagagcttaaagtaaattgaattacttgagttagaattatgtaattggaaagaaatgatataatatggaaacatacaaaatcttggaatatcattaaattattttcc

SEQ ID NO: 32809 - DNA, 461 bp, Homo Sapiens
ggaccttacattgagggtgtgggagaaagggtgtcatagttctgaaaataggcagtagcatgaagcaccagacctgtctcattccttattagatgtctatctcaaataacagagtttgaaaaatattggttttatcatttgatatttccatgcctgactcgggaaaataacattttctgacttttttctattttcttgccctgcacagaccctacctggtacaattttctatttcttagctcaaagtgtctatacaatgggttgcctggtatgtcagctgccctcactcttgtgtaatagaaatatattgccaggctggggacgtggaggagacgaactggattcctccctcctcctgttgccaggcctctctgcattggcactttatcctttcagtgtttctggctgtgttgggttcatttgtgagactgatgtaacaataaagtgaaatcttcccctcc

SEQ ID NO: 32810 - DNA, 368 bp, Homo Sapiens
accagcagggccaaagggtttgccatggaagctgaaaattcaccgccccatgcaccttccagccttgggcgaaccgagtgggaaaaacttgtcatccttcccccatttccgcattgcacatcctacccctctcttttggttcggcccgctcttggccccttctaaaaccttttttagaaccctttcttttggacgcgcggggccccctaaaggtaactggaaccaggggccaaagactcggtttcccaaggagacacccgtggccctgaaacaaagggtttggggattccccccccaattaaaaaaacgtccccggggcgggaaacccgagacgggttctcggacacctattcctcgaatggcaggct

SEQ ID NO: 32811 - DNA, 539 bp, Homo Sapiens
caacaggagggaaaggggcatcagctcctcgtgttaccaaatggcctggcaatgcaggaacaagtacgggcctctggcccaggcagatgggcgacaccaagatggccccagggaagaaaggaaagaaaagaattggagttgatttgtgtataaggtgagagatgaggatccagtttaattctcctacatgtggcttgccaattatcccaacaccatttgttgaagagggttcctttccctactttatgttttcgtttgctttgttgaagttcagttggctcaataaaagcttcttaaaacaccattttggcatttttttctgaaagagagagtgaaggaaaatctacaaaccgcattgtgatctaaacaagaccgtcgggactagagaagcatggccaggagaagggacaggggagaaaatgtggaaggagaggaaggaaggataatcctgagactctcaaaagcaaataattggaaaaagtggaaaagagaactggcttgagtttacaaatgaataaataaaacccagatttttgtac

SEQ ID NO: 32812 - DNA, 427 bp, Homo Sapiens
gggtaggtgacaccttgcagtatatacagattttaactgtcattttacaaagccactttaataatgtgaaactttttggtgtttatgattcagtttaaaaatacaaagactttaaattttttaagatagctccttggttccatttcctaaataatgcagtagagattaggtgagctgtggtattattgtactattgtagcttatttgctggctcggttttattaatccagttttattatccagtttggatgggaatagatccaagtaaggatagggattggagtttgggaggatgggtttcaagagcttacgttttagatttgatcgtttacctagtttgtgtgattcctttgataacttagaaaaaaagttatctttatgtctttcatatttaggcaggaaaaactgctttgtgaggaaatagatt

SEQ ID NO: 32813 - DNA, 445 bp, Homo Sapiens
gggaaggtttgtgtttctttgggcaggagcctactgtgatcagagctgggggagccagtgtgagcagcaggtgcaatgaaaggatgtgggagtttgagacccatctctgctgtgtggccctggccatgtgcagtgggaaaagcattgcaatcccaagctcctgctgctgccgtacatctgcatcttattcatctttgaagctcctgcaatgcctccaacggggacacaactaaaggaagctctcagaacgcccagctatccccactgcagaaggctctccctgaaagggcacaggtggaggacgtttgcatttatctggagacagttcatggagaaacacaaagaggtgtcctgacaagacaacaggtccacagcagtcgtcatcatgagtgctcaccatatgccagggtttcatcttttaaaatccttaaccatagggcaatcg

SEQ ID NO: 32814 - DNA, 523 bp, Homo Sapiens
gggaaacatgagtgatcatggcccatgacacagccctcaggagatcctgagaatgtgtacccaaggcgaatggggtgcagcttagttttatacattttagggagacatgagacttcaatcaaatacatttaggaaatacactggttcagttcagaaaggcaagacaactggaagggggctgccaggttgcaggtagatttaaaaattttctggttgacaattggttgagtttatctaaagacctgggatgaatagaaaggaaatgtctgggttaagatgaaggattatggagaccaaagttctgatgtgcagaggaggccttcaggtagtgggcttgagagagaataggctgtaaaatgtttcttatcagactgaattctgtgttgatattaatgccggagaggtataacaaggcatgtctgaccacccccttccatcacggcccgaaccagtctttcaggttaaattttaaaagtgccctggccaggagaaagtccattcagatggttggggggccttagaa

SEQ ID NO: 32815 - DNA, 535 bp, Homo Sapiens
ggcgctgaagctgctctgtctcatgcgtcctcctcatttctggatccagagccagggctgccaggagtagccagagagctctgtgtggtgatgttcatattagtgaggtttaccttgaccacgagcagtgggaaactcaaaataatggtggcttatttctcatctaaaaacatcccggggtgggtggtctgggactgatctggtggacccaggctccgccttgttgcttgactgttggcagcacctgcttacttaccactcatggtgcaagatgacacttcagcctccgccaaaatgctcaccttccagccagcaggaagtcggaaggagaagaaaggggacagagccccatggcgtccatccttagaggatgctgccacctgaacctctgctttcatcctgttggtcagaacccagtcacatgaccacacccagtggcaacggaggctgggaaatatagtctttattttgggcacccatgtgtccagcaaaactgggggttccatcagtcggcaagaacgggagagtggccgat

SEQ ID NO: 32816 - DNA, 450 bp, Homo Sapiens
gggcatattctagaagcaccttcaattccatcgaggatttttgagcagctgaagaagaaagttctgaaaatatgagtgacaggactccagcacattttttttagttgtttcttacattatctttgttaacccatccgcttttgtgtataatattaagttattttccactactgcaatggctagtaatttacttaggctcagagttttactctgtatggacagagaaataggaggtaacaacagtgggagaacaaataggaacagttcactgggatgttggtccccagaaattggctttcattgaataattcctaaagggtgtcgtgtgctgaattgctttttcatagtgatgtgctgcttcttgttcatactcttatgactttaatttcacctttatctactcccagcctctgtatatgcctacgtttttaaaaattaaatcctcgtaaa

SEQ ID NO: 32817 - DNA, 554 bp, Homo Sapiens
ggggcagatgttttagtctctaggccaaactttgcggttactactaaatggacagatttttaaactatttagttcagagaggctgccttaaatttcccggttggtccaagttaatgtcctgcttttattttgccttaaatttcccgtttggtccaggttatgccctgacctgcgaaagaaggatttacagcttgtattgagtgtgtaaaggaaggaggtgtgtgcccttgcgcagagctgggcctgtctctccagtgttttcagcctgcctttgcccctcacccacaccctagccatctccacttagtcacgcatttggctcccaacctgggtgggaccaaacctcacactgtaggttcatgactgtggtcatttgtagtgtattctttgttgctgacggcttcctgggtatgcatcggacctgtattgcagcagttctcaaactttttggtctcagaacgcctttatattcttgtgtattacggaagattccaaagagctttttttaaaaaaagtgtgggttatacctattaataaatagttaatgagaactt

SEQ ID NO: 32818 - DNA, 547 bp, Homo Sapiens
ggggtaattttaggtttattgtatatagatttgcattgggcaagaacggaatgttagaaatctgtaatactgtatgctgatggtaaacttactgtaaggatctcatttgggtatctggaaggtgatagttctgtttctttgttatatacacagcatgttacagagatgtgatttttctccccattaaacagaactaaaagacagtatatttatttaaacgcaaagctttttccccttttatgtctcctcataaactccagagacagtctggaaggccctcttaaatttgtcaaagagcagtaaagtgtctcacgctcagtttttctagcagatcgtaatactctcagttgaccctgctgggatttgaacctgcagtttctattaagtttggtgtgtgaagtccaacaccttatcaactaggctttccctctgacatcttgaagcctccgtgtatatcctttggactctgcagcaaagtgcatcagttgttagtttactccgagcatggtattcttagattgaaaagaagtctctgaagatgtccaac

SEQ ID NO: 32819 - DNA, 483 bp, Homo Sapiens
gggattctcaggttcccagggtcttgggcaagctattccttggagctgggcatgcgatgggtgtgatggcagccttgggctctccaaagaaaggcagccccagcaggacagtggaattggtggggaagaaacacagccttgcaggccatgagtccccctagccacagacacctaccttcacagtgggtccagcagggagccagccactctctcagagcaccaggaccctaacctttcccagtgtccacctgctgctggggagtaggaagaagcaggatgttcttgaggagaggagacattcaggaagactaattacccaactgcctccgactgacaagattgagcatttacaggtatcttgcaatcaataagagttcaagagcaagataagctgaggtacaaaaaataatgatggtcaccttttgttttgttttgttttctcgtttggctcatattgtatagttttctagcttataatgtaaa

SEQ ID NO: 32820 - DNA, 611 bp, Homo Sapiens
gggctccttgggcaggtcttgctgtggctgctgtggggtatgggggtgatgttgcaaggtcaatagagtagtgtacctagcaggattatggctgcctctgctgagtcatgcaggttgtcagggaagcgggggaaagccagcagtcaccagcttcacccagctcccacgcaaaccgaagggccgatctcactctcaccgtgccccttctaacagcattgtttctctgctcagttacactactattggctgttctggaaatcagcaaaccagtcaaatatgttgtgttcaatagttccctggggttagcagacgtgggcacaccttaaaaacacagtcaaggttgtcttcagcaacctgtaccagtcctttctctcttctggtccatctgaagtaggtattttgtttacaaatatttccccagcatcacactcaggaaatctaagattaaataaaaactaaaaagatggtatttctgaaacatatttcctataacatgtccatcaaacagagaatgaagaaattggaaggatgaaaatggaaggagggatggggcatcagttgagacagaatggggggtggtacatgttatgaatcctcattcctaccaaaaa

SEQ ID NO: 32821 - DNA, 428 bp, Homo Sapiens
ggggccgccgggttgcgtccgcacttctgcgcgctggcccctcccttgctcctctccctagcagtctccagggttttaccgggaggacctaggcaacggcctgagactccgaggacatttttaaagattggaatgatctcgttcttgaaacctaggtgggatacgatcatttaccagactctatgttgaagatgcctggactaacctactgaagatacgtggttttaccaacagccagcaccaataggaagatatgaatgaagccatctgagaccagccatctggcagccaaactgccaactgactgcaaatgcatcaatgatcccactgacaccacgtagagcacaaatgagttgcctccactgagcccagcccaaattgttatcctataaaatcataaaaacataaacagttgttttaagtcaaaa

SEQ ID NO: 32822 - DNA, 656 bp, Homo Sapiens
gggagatttgggtgggggcacagcaaaactttatcagaaactgacctcatttaaaaaatagaagcctcaaacacaaagcaggtgttttaggcaaatgttcaccaacctgcctgaaattcagaatcctttataaaaatgcttagaccaaactttagcctctcactatgaaatgaccatttttatctctaataatgctccttgcatgattttaatacagcctatcagttataaactggtataacaccaattttcttaggcttagtatttgcatggtatatatttttcttcctattctttcaatctgttgtgtctctgtatatcttttaaacagcatagggatgggtcttgcttttttatacaatctgtcaattgctgccttttaaacaacatgtttagtttgtttatatttaatgtaattcttattttctacttattttttctgttctttcttcctgtattactgactttgctggggttaattaagctttttttagtttaacattctgtcttctctattggcttgttagctataactgcttttattatgtcttctgtttgcctactacattaaaatatgcatttttgtcatagtctgcctggaatagatattataccacttcattataatgaagaaacttacaaagtataaccaaaaa

SEQ ID NO: 32823 - DNA, 606 bp, Homo Sapiens
ggcatgaaaagattattgggatttgtcaggcatagtatttctctgaggaataaatgaaatataaatttcactttggaaactaatgagttaaaaccatttacagtttctgttaacgagttaaataatgtatagaatcatagttcgtaatggtagcaagttcatgctctgctgaacttactgtttgattatggtcaaattttctatgttattattatagtagaattaagagtgtgtcctggtaaattacattaccttcacagtttgagcattctgattttaacattttgtagtttcaaaacaaactgtactcatataatcagagcattaacagcagcatcatgtcagtggtaccaataattgtgaatcttctgcaacaaaatttctttaatgatgagtttaatgggctatattcaaacctaatttttattcaattcataagtgcccactaaatatgtattttatttctgctgttctgttcctttgattatctgcttttcagtgagcatctgcatagctaaaatagatatagcatgtgttgtaaatgctgttgaatttttttaaggctcaaaggtgctagtatataaataacagcacattgccacaaaa

SEQ ID NO: 32824 - DNA, 593 bp, Homo Sapiens
gggacagggtatagcgctttgtggttggtaagtagaagtatatagggccaacttttatcagtatctaaaattaagtacagtgagatcattttatttttaagctttcattaaaaggcaaacaaaatctaaagctgaaacatcatccatcatggttatggaagatgtgtctaggactacatgaattcgagtggttttaaatggctaaaaagacgagctaaagtccttgaggaaagtattttgtttgtttggtttttgatgaataggcttatagttacaatagaactttaggctataactatttgataattatttaacagtacattttttaccttttcattttgttcttatacggactttttcataataattctgttaccaaagaattttcagtagaaaataaaattttgattataattccccccaaattgaattaactagaagcatttatagatatgaaacttacacaagtagttactaacccaaaacaatagggtttatattgattgttgtagttaaatagattagtaatgttaactaccttattgttaccagagcatttaaaataagttgtaatactttctttaccagcagaa

SEQ ID NO: 32825 - DNA, 466 bp, Homo Sapiens
ggcatgagtattgtagatatttatattttgtgagatattaacttgtttaagaaaaatccgattggattactatggaaaaagcaacttgcctgttctgtttctttgcatactttgtgacctaacagttttaacagacattctattatatgaatacagtttttttgatactattagattaacttgaagtttaataccaaatattatgctaagagtagaaaagctttctgctgacccctgatttcttagaaatatcccacataatccagcttatcccttttctgtatatgtttattcaggtttacctgatgtctcaaaatgaaaccaaattaagcctttttaaaggctgatgtgccatttgtattaagttatctttgtcattttaaatacatgaattccccaagcctaattcctacttaaggaagagagacaatttagtccttactttagaaaataaatacttaagcat

SEQ ID NO: 32826 - DNA, 441 bp, Homo Sapiens
ggaaccaccaccaaatcctatcttctaccacaattaccccttcccccaatgccaagaccaaagcacaataatgaatatttttattgaagttcgatattcataaataagttgcaaaataagagttggatatatttttaattcacaatagaaaaagttgacaacatagaaaatgctgctttgcactgaaatacttaaaattatgaaagttttcaagtaaagaaattaaagccttttataaaatccaaccaacattcttgatttttcatttttatgaacttgatcagaaaaattcatcttttttaaccctgccctaatttttcttgaggaattaaatagagcaaactattttcaggttatgcttacaataaaatatacttaagaaaatgactgaagatgtatgtttttgaatgttttgattaaataaatgtacacatttagaac

SEQ ID NO: 32827 - DNA, 352 bp, Homo Sapiens
ggtaagcagaatatacagtggccacatagtaggtataataacttgatactgcttttttgtaagataataagataaaaaacaattacataatattaattattggactaaaatgacatctttttaatatacattcatcatatagacttttttcataggcaagggtattatgcattttatagcccactgattattccattagacacaaaataaaatctttgaaacatgcaaaatgaaatacttttgagactagagtatcgttgctctatcagtcgtttgtttttactaaatagaagcaaaaaaagactatctgattgctttcataaatgtgtgctctttttcttgtacattacag

SEQ ID NO: 32828 - DNA, 507 bp, Homo Sapiens
ggggtgcagatctattatgtattgaaacaatgaaatgtagtctatgctattgattcttaaagcaaaatggacttaggaggagaaactaaattgcctggagaaatagaacaagatatcatgaaggaagtagttattgaactaaactagttttggtgggaggagaggggaggatggatggaacattcatggagggtttatcatgcatggtctacaggcatttattagcaggaaagaaggtgaagatgcactttttcagcagcagaaaatacaatttgggatgtttctgaagtcttatttgaggattattaaagccatgtttttgcctataacatttttgaggttttcctagtagaaaagtgatgttacaacagcaggttttataagacattcttttaggatctacttcaagtgagctctgtcatttggaggctgtgtagtcaatttatcaattagtaactgaatttggttgataacagttgaaagggaaatgtagaataaggataaagc

SEQ ID NO: 32829 - DNA, 357 bp, Homo Sapiens
ggggacagagatgtaaagaaacaatttatggcttgcacaattatctaaaattcccgcaaacaagcagttccctaagtagtatgtcataattttcttatctatgagtagaagcacgtgcatttatttatatccctagattaacttcaagtctaattttactgccagtagtatccaggggtggatttctttgttctaattacaaatggaacttgagctagatcaaaggcatttttagaaggtcaaattttacttctctgaaaaataaagggtgttatcccatgtaattaattaatgcttagccatgccctttggcgcattatccggtggctgcagaaaaccagagccagccgttcccac

SEQ ID NO: 32830 - DNA, 577 bp, Homo Sapiens
gggggtggtagctcaggaagcagagcctggagcatctccactatggcctgggctccactacttctcaccctcctcgctcactgcacaggttcttgggccaattttatgctgactcagccccactctgtgtcggagtctccggggaagacggtaaccatctcctgcacccgcagcagtggcagcattgccagcaactatgtgcagtggtaccagcagcgcccgggcagttcccccaccactgtgatctatgaggataaccaaagaccctctggggtccctgatcggttctctggctccatcgacagctcctccaactctgcctccctcaccatctctggactgaagactgaggacgaggctgactactactgtcagtcttatgatagcagcaatcacacagtgctccagacccatggggaagtgagacagaaactccccagagcatctctacctgggccagtctcagcctgtctccaccagagagggtagctctcccatctctcctgtctaagtgcttgaggtgaactttgcttatgacttcctcttttccttttcaaataccaatctgtttttccaa

SEQ ID NO: 32831 - DNA, 492 bp, Homo Sapiens
gggtgagccagcggaatctgaatgcaaagtcctattgccttaaggacatgccccacggcacccagtgctgggaaaactgtgagccatggaaggaaaacaaggtttgaaatgcgtggagccagaacctcgtctgtggaaaattcttccaaatttcatagttcctatatgaaagaaggctgatgacagtttctcaaattttacaacaatccagaacatttgtatggcaccgtcaacaacagattaggaagtttaactttcctaaactaccaataattaaaacacaaatttcaaccatgttaggaggaagactgaagtatcttttctctgtatggaaaatatctcccccaaaaatcacaaaatccttgtcctctgtagaggccttcagagtaagaagccagaccatgtaggggaccaaggtattagaaatatgtcaggaagttgccacaagttatgttatttttctggatttagtattgtagtatttgtcaattt

SEQ ID NO: 32832 - DNA, 528 bp, Homo Sapiens
gggactttacacaggaaaggcaaaagctggtgagctacctcccaaaggggaggagaaggaaaacggaaggaggaggatggagaagactgtccctttcaaccttgtctgcattcctcccccatagtcctaaggtggatgggaagggaagagggttgtaagagctgagggcatagtcttgcctattgctgtaccatgaatgcattatagatactcatctctattgcttaaggcaggcaggtgggcctgtggctctagggcctggtgtctttccaatctcacctgggttgtcttagagggctgctgggggacagcagaatctaatgaagcaccctgtggtccccacaggtctgatggatggctctgctccacctcaagatgctaagtgaggctgaacaggttctcatgactgcatggtcatgaatagagggcctagcctgtgttagaggaaggagtttatgttttaggtattggagcagatggccatagtccaaggagcagtcagtggcagaggtggggcatggggtggta

SEQ ID NO: 32833 - DNA, 396 bp, Homo Sapiens
ggggtaggaagccaggctgctgtctctggtgacaatccaggaagctgaacaataacttctgtaacaatcagccagaaatggccaggacctgattaataacggacagcttccctaacttttgtcaccattttaaatttaggaacaaccagagaaagccaaatctgtacctacccctaaccaatcacacagtgtgccctgcttccagttagcccacctgcagcttccccaggccaacagcctcccatcagggcacacctcaagacttccctttttttccactctaaagctttcccagtgctttgcctgtgatggggtctctgacaaaatgcaagtgatggtggccaacttcattgctatagcaagctcagaataaatagcctttgctttttctcaaaa

SEQ ID NO: 32834 - DNA, 448 bp, Homo Sapiens
gggttatttttagcagggatgcagggaaggcacagttctccttgactttaactagggacaacccccacccctcagccaagactcactggaggaggccgggtacggaaacccccctcccagaaaggggaaatggtgtgttttctgttccttcaattcactagaatgggagttgcagtcaagcttggggttgaactgatgggaaattctaggttccaaagcctgtgggctctgccccatccctggtctctgtgtttccatgaatccgggaagcaagaggcacatggtgtctggagtcgaggtgccctgtctgtgggtgttggtgtccctgggaaactgcttggttatagccaggctctgtggactacacaggggcaccaggcattgtgggtggtgtttcacaggcgctggctaaataattcattaaactgagcatgtccgttccgtgtaa

SEQ ID NO: 32835 - DNA, 618 bp, Homo Sapiens
gggggaaattaataaactgaatgggaaagtgttacccccaatagttttttgcttttcctctactggcatttctcaaaccaattcaactccattgttgcattcctctgattaaacccacgctcttcactgtccgccgcatggagttttttctgtccctttcctgggctccccttaatagccccttttattaccttacttttttttattctttcccccctggtcaattgctttttgtggcccccagactcccacctttattccaacccttccttttacgccaccagtggcggacacgacttcccctccccttccaaaaaactcttttcccagcaacaattaaccttcagtccaccccacgctgcccacccttcgtaaaagacgacacagtccgcctcataaccccgctttatccttacgagcgccaccgatctgccacaagacgctagccggaatagaaaatttcctgaacccaatgacgatacaatgcgccccgcgctgtgccatctccgcgggccctaatacccgagaaataatgcttccctctcgataccattctccctcaccaacgttatattttaacctgattaatctacaacctggacccatacataaactctg

SEQ ID NO: 32836 - DNA, 352 bp, Homo Sapiens
gggaggttgatatttttacaaaatcatgcggtaataagtcttgatttcatgattcaaaagaatcaataaagcctaaaaataatagattactttaagctgctatgtaagatatatatggaataaattaaaaacctttgtgaattcaggtttattatttttaacctaaaacattctctttggttcattcatcccctcatgtcatgggggctcattggttttccttctttgtcatatttaagtatgatttttcaacaaaacttctagaagtcagcttattatgtcaccattcatgcaaagtgctcatgcctctgattggtccattcactgacgtgacaatttcaggtcctatgtt

SEQ ID NO: 32837 - DNA, 421 bp, Homo Sapiens
gggatactattctatgaaaccctgagctatagttgtcaaaagtaactatggattgtgattagtcctctgtgggtgcttccttccctcttttttctccctcactctctttctcagtctccactctggtaaatggaaaaggtgatgtcgaagaattgatgcttgcttggactcatgttgtatctgtgactatgctattagctgtctcctttttccttcctatatgggtagaattcttatgacttatgaagttcccttcttgataagtaggttaaatgcacaatgtggtactgttttatagtttctagatggttgtataaagcaaaaagttaatgtggttatgtgtttttaaagaaaataagtgattggtcactaaactctgtccttttttcattattacaatttctctctgttttccaacgaa

SEQ ID NO: 32838 - DNA, 666 bp, Homo Sapiens
gtttaacgtaagctgaacacgttaattttttaatagctgtattaaggtatgattaacataccataaattgcacatatttaaagtgcataatttgataagctttgatatgtatatacctatgattctatcacaatcaataaaaggaatatatctaccacctcaaacatttgtaatcccttctttcccatccccatcgcataggaactgctgatctgctttctgtcatgatagattagtttgtatcatatggccttatataaatggagtcatacagtatgtgcttggatttagtttggttttggtttgactgctttcactcagcataattattttgtgattcatctgtgttgtggcatgtatcaatcattcattccttgtcattgagtagtaatccattgtatccggatgccaccatttgttcattcctttactggttgatggacatctgtggtaatttccgttttttgctattaccaattaaccaactatggaacttgccctgtaccagtcttatgtataacatggaagggctttccctgccccaagggccacaaaacttaaggattagacttgggcttagggtcatggtaaaggggtactgtggcaaactttttttatcagacctgcccatacctttgaccaaaattctcatacttccccccctcc

SEQ ID NO: 32839 - DNA, 710 bp, Homo Sapiens
agtgctggaattacaggcgtaagccaccacgccctggccataatatttatttttttattgccatttataacttggcttacactgctactggctatttactaaaaatcagagcaaactttgccttattattatgtattgcatatatatttttgaagggtcactcttgcagctttactaaacaaacaaataaataaaagtttcagtgaattccggaagtttgggaattctcggtttacgctagccctgtcctgtgtttctgtttggctccgtcctccagccttgccaccatttcctctcggtgaaagaactcggcttcacattctgttcaacttcctgaacctgcctgtcacttcgacgcaccgttttggaatcttgcttccttaacctttgaactcctgaaaccagcttgacaggatttccctacctactagacaattattccgatcttccgacatatttttgacccgctttcccagctgtaaccaccaatggcctggcccccaacaacctatcacacccgacggtgaaactttccaccatcgcctcaatccacctcgccatccgaccatatacctccccttgtccggaccccctctgccacctcaaaaacccttttcccaaacatttttctcctggccttcccgagccccccctggttaaatcgaacccttggcccctatgtccgtttctctacggccacccctgtgtta

SEQ ID NO: 32840 - DNA, 529 bp, Homo Sapiens
gggcaagaagaagaaatgtcctgctaaaccagcttgacctcaagtcagtagaccacttcatcagtcggtactgggtggtgccaaaagactgggaattgtcaagcaaattgttatatgttggaatggctaccagccctcctattgctgcatctagaagaataaccggttacagagggtgggtaagttagtgagatacctcaaagaaattgtggcagccttaatgataattccatactatcttctgtacaaacccagcatcttgtggtttcaggagttctttcaccaggtgaagaacgatcagatgtccatcatcaccacacctcatatagcagtcaaaaaatacttatttgcttcctaactagggtgaggacaaccaacacagtgccattagactaggcccagtagttcatggaacagagaggaagtaacggttatggccaccaatgccaaccaatgacctagcaatgaccaccacttggcatgtgaaatccaatctccccaaccattccaaagagtaacagcagagagt

SEQ ID NO: 32841 - DNA, 387 bp, Homo Sapiens
gggggccaaattcttgcaatacaccctattcaattgaaagtacagtgtctaaggataagaatacttctttaaagaccaacaattgttttaatgcaatcttaattagtaaatggtttacattttttctattgttattggttttaaaatttgctaccctgaattctgaaatattataagagttaataccaaaaatacttttaatgtctgacatctcttacatttcacatggttctttttattcattgtaaataaaagtaaacttggataaatttgagaataaactttgaattgttgcaaactatgattatcaatttgtaaatttaccctttgacataataatgtacatttttaaatgtagccattaaattctctatatttaacccaggg

SEQ ID NO: 32842 - DNA, 610 bp, Homo Sapiens
ggaaatgcattctgttcactcactgtctgggccttccccaccctagtcttggtattccttcaagaatgtagttaccgtctgcttgggaagatgtcagtgcaaatgtgaagataatgggcatcggactaagctttggtttgccacaagtggcagctgcctgtatcaattacatttattaattttgcttttcatttttcccagttctcctcaccccccctttgttgaaatgttggacttgctgtcagaggcaactgtaatattgccttacggacttgtggagaaggggaattgctcagtgtagtgttttaactttcagaaccaagcaatctatttactcttacaaatatttaagaagtgtgttagtccaactttaagaaaaatccaaactcatcagcttttgatagcatcttggcttttgaaacaacttcaatctgtaattggcattcacaatgcccttggcatgcccgtctgtgatggcatttaagacctgtaaaacacttgagcccaactcgattaaccaaaaccgataaccaccacctttatcttctaaataaagtccgctttatttttattttctgggcatagctgtttcctagaaaaaaatcgtgtc

SEQ ID NO: 32843 - DNA, 801 bp, Homo Sapiens
gggagcctgaccctgccatctgcactaagatccccagctgttgtctggtgatccagatgagaggaccagcgtgatagtttctcacagcagcctctggcaggacctggagtggaaatcttccttagtctaaaacacatcccgaatgactgaacattataggagaatgtgtctttgttttacgaggccacttgaagtccacctccctcctcttctgggtgtggcccttgcctgtagctccgagtgtgaggatcttaagtgtgagggtgtgtgctcctgagccagcctttaccccaacaccaagttgccacaccgaactgcagacctggcagccctgtccagcaacttccttatcacagttacagtgcagcaaatgggagaggggccaaaacccccaaaattattctccttattacagctacagtacagcaaatgggagaggggggccaaaccccccaaattattctccttattacagttacagtacagcaaatgggagagggggccaaacccccaaaattattctccttattacagctacagtgcagcaaattgggagaggggggccaaaaaccccaaaattattcctccttattacagctgcagtgccatcaaatgggaagcgggggggcaacacccccccaaattactctcccttattaccggttgcagcgccacacaaaggggaagaaggggggcccaaaaacccctccaaattactttctccatctccccaaaaacaaatttttcccaaaatttcacaattccaccttggcgggcactggctctgaagttttttaaagg

SEQ ID NO: 32844 - DNA, 757 bp, Homo Sapiens
ggaactagagctggtagacacgagcttctcagatggcagtggccagatcctccatctgtgagaatccgccacttgaagtggtttcctgagagtgttcacttggcagttgctgcgtttctcaagcccacctggcaaggtctcgccggacccttccctccaagtgcacttacttcttcatccccatgtacatctctaactttgaaattgtttacctctcctacaaaaatcttaccttttgacctgagcagagtagcaaagccctgttcactctgagggagcagctggcgtgttgaaggggaaaggccaggcacagcactgtcctcagaccacaccatatttggagcagaattgtgatacatgtcatctgtgtctattctggaaggttctttgttcatcactgtactcgcatcagcaaattttcagggtcctacctgtcactccaggctactgagctgaaccctcagaagctgaggtctccgagcatgctaagtaaccttttagaaaagctggaggcaaactgtcgaatgctagcaggctttatgaaaggaaacataaggagtttgtgtagtcagaacttgcttaaatttgcttcggaattaggcaccataaactttagttggagaatgggacttaaattttcacatatatgtatacttaattttcagcaattatgacacaataaaaagatatgcaaatttattgttgttttcagaagggttttgcagggactggggaacgcttttagtggtcatcaaac

SEQ ID NO: 32845 - DNA, 716 bp, Homo Sapiens
ggcaggcacccgaggttgaagctgcctagtgctggtcaccaagactgatcggagcccccagtactgggattttatttttggcagcccgagtcccagagagtcagtgaatcagtgaatctgctattcctggactcctcgggatttaccttcattacccagttctaaccctctccgctgaaaaatgagtggctccagcccagtaactataaaagtggtgtaatctcttccaacgtacatacttatttgctttcttgttggattgttgtgtaataccaagccgttttgggtctgaaggttgaggaattgagcctgccctgtgaggggactttggcaaaagggtggaaggtatttgcagcttgccaacaacgtgttctgcttgccaaggacagatctcccttaatgtacacaattcacagaattcagaggccaaggataattttccttggaattagagggtctgaggcttgtgtacatggcagagaataatgaacgaaatttttgaaccacttaacttgaactatatacagtcattggtttccataggccctttcccataaacttacagtattgctggactatgacacctaccagatgcttacttaactctggtctgccttggaccagagtgctttgattcttttttaaaatatctgtgattcgttactttggggctaggagggcgtgtggttaagtactattgcaagaatctgttagct

SEQ ID NO: 32846 - DNA, 718 bp, Homo Sapiens
ggacttgattcattctaattgatttcttggcttccttgggtctaattaatttttactgtgtaccctaaaatggtgcaataggcttcctgaaagctgttagaaggcagctgtatcatagtttataaaaagctgaaacttggcttttatttgataggtaaatagaaattgattttgcttttgaggtccagacataaaagagaaaaattgactccagaactcaagagaagatcctggattactctgtcttggtttgggttcccccaggaggagattccgagacaaggactctgaatgcaagtagttttctggaaggtcgtgccaggaaacctgccaagaatgggaaagtgagacagggagaggaggaagccaaataggggatgcattgtcaaataagtcatattatgggcagctggtgttcaatctatggagttgtctaggagacagcacaggttcacacttaggttttattccaaccaggaacaagtcaccaatcacatcagtcctgggtttgagggctactttttcacattaactcccagcattctggacatagggcctggctgggttttggacagccagagaaaaactcttccattaaaagagatgaaaagccgcttgcacttggaaagctgtaaagggttggggtcctaacctggggaaataaataaaatggggcaaagggggatttttgaaccggagaaaacccccggggttcttg

SEQ ID NO: 32847 - DNA, 683 bp, Homo Sapiens
ggggaagcaggctcaatcccccactgaggacttgtgtctgcacccctatctggcaccccactttcctggcctaggcccaagggacacagcaggagaagcagtgtgataggagagaggctagggttaaattcatctttacacagcgccggatggatggaaatcttggctcacataaaagacagactcagggaggattttatgacaaaagtccctcctttgagggcaggattcccccaggaatcctggacactttagtgagaactggaccagcccttggcacgaaaccctgcctgccctgtcccccactcccaccccccagggaattctaggtgaaaatgtgaagctcagggcacagcaagcgcatgagacgggtgtattacattcggtccgagtgtgtccttagtttcccctgtgtgcaaaatggggctagtccgggctcttcccacctcactgggacaattgccaagggtcataggaaaggtgggtatgataggcggtcatatgaaggggtgagtatgaaaggtgggtgcctcccaaactcggggtaggaccctgacctgcatggcagatgaccaaagcacttggaaaccagcattagaagtggcatctttccccgggcattctctgctccgtggtaaaggtcctagccaacagacactggagggaaacggccctccttccct

SEQ ID NO: 32848 - DNA, 448 bp, Homo Sapiens
gggagcgccgcgaccgttgacttcattgctgatggaaacccacgcgcgtgtcacaaaagatcaataaatattaaaaggcgaatgttgtccagatctcacgaccgtccccgtactagtcccgggaggaggcacttaggcccactgcagcgctcctgaaggaggaagggacttggccaaggtcacagagctcttctgaagtcctgggacttagcacatctctttccagaggccgcgtggctacagctcgggcacctgccacgagggagatgtctcatagccgctcgggttgcagtgagattggccttccggaccaaggccccagatggagaggatttgaatgttgtgttctcagccactggcatgtatgtgtgccttcgaggtgtccagactctgctcaccttagtgaattgcaaaatgttacaagcaagcactgtaccagctgcgtcag

SEQ ID NO: 32849 - DNA, 568 bp, Homo Sapiens
gggagagaggatctaggaactggagctgctgcctctgtctgctaagatgtgaagtccaagactgaaagtaacatagcagaaggagaaccaaaagatatgttgagtcttgatgctatttgttgaaccagtcctgaatccagctgtgtcggagtcagcgcagcttttgaagctggagagcatcatattttagaaagatcaagcaatgtggatgaggacacattaaaaagagaagaccgagaggaggggacaccactcaggcttataacctccagctcacatttcagcaccaaaggaccaaagcctagacctgagatctggcacttgcaaaaagaaagatcacctggaagaacaaaatagaagactcctgcctcccaataggcttgggttcaggaaagaaggctgtttggccataaattgggggagtaggaaagatggaaaaaccaactccttaaaaagatcccccaccagcctgaaaacgcgggggccttggggcaatgggcctggccgggtggaaaaatccctggggggaaagggcaaaggtccctgggaaaggggccttttaatccca

SEQ ID NO: 32850 - DNA, 483 bp, Homo Sapiens
ggggggaaggctggcgcgaggcgtgaggtggcgtgaggcgaagctggaatctgcctctgtcacgggggctggtgcctcacgggtttgtgtcctagacaggcgagtggatccaagtgggcgagagacattttaatctggaagagtcttgtgatttgggagacagtgaagaagaagtaaaatattcacaagatgaagatttttccagaagggactttgagtcaaagatggctttttatatttgacaagtcttgtcatctgtaatgaagatcattgtgaaacagaagattgattaaagcccttgtaacattggacctagattagagatttagaaaagaaaagtcaaaattagtcactttagtggttagtgttccccctttcataaaaatttattccttttccttctaaaaaagatttagggggagtaaaaatttaaaattccagtgcctatacccaaaggggaataccaaaaaatttggtttgggc

SEQ ID NO: 32851 - DNA, 819 bp, Homo Sapiens
ggtgcttttttaccttatgtagagatcttattacaaagtgattttctacattaaaaagagactgaaataaattgtatagttacttaactaatgaagacatttcagaactctgggatgattttaatcttgaagtagtaggtggtatagtcataaaaccattcatccccttcttgattgtatcttaattttctggctttaaggtgacatctgagaggtaatgcattcttttttatattgaaatcataaactatcacccgctgcttctctgagttacttttaattttgccttgtggttatggtttggcgtttccttctgtttggttttcagagccccatgtctatatagtcctgagtgcaagtaattactatacttgtaaatgaagatcagtatttctgcctagatctgataaaaaaattttcttgtcttagttataaaaattcaaagaaatgtgttacaaagatacttagtatagctcctcagccataacctgagacttgggatgaaatttaaaccagatacgatttactttgcagatcataaggctttttatactcttgttatcaaaatggcttatttttcaggcactaaggattgttaagagaaaagcttttcaacgaaggattgcctttcttctcccacactggtcttgattttctctctctttcaggcctcaacaggcactgtattcattgcccatggtccaaattatcaaattcaagtgaatttatttgtgtggtcctttacttatataaaaaaagataactttaaggatgtgccagtacatttccaactgctagcacaaccagtattttgttatt

SEQ ID NO: 32852 - DNA, 629 bp, Homo Sapiens
ggatggaaaactatgctaatttattaacttaaaagggagattatatctaaatgagagtatatggtatatatgtggtctatatagacagtgattctcaacctttattctaacacttgcacttacatacttcttgtccttaataaaagaaaaatggttgagctttactgtttgtagtttgtaagagaataaacacattgtacatcctttgtgaaattacaaacaccctgattgagattctcatatattcctgtggtgtaaaggaaagtaccttggaatgagctttgggtgccaggcatatagaatgcagtagagatgagacagagaaagatactattgactggcaaggacctttactctgtgtgatctgaggattcactgaaggtggccaaatctctatttaaataagatgactatggccgcaggttgaaggatggattaaattggaggcagggaaagtgggccatagaagatatttaaacaaaaggtgagtaggcactgaattaggatagcagcaaaagtacagaaattaaaatggacttagaagaaaaaaaggttggacatggctggttgaaggtaggagttgtgagagaaggaagtcaaattcgtattgcctgacttaatttaaaaga

SEQ ID NO: 32853 - DNA, 827 bp, Homo Sapiens
gggggcaagacagcctgccacacatccaagggtacgaccagtgggaccctggcctgagtctgttctccgaggggcctccagcagcttctgttcctccctgcagctgtgtctttcttgtcctgggtttaggatgcaggtgggccaggcaggtgttgttaggggaggcacccacttcaaaaggagggccacagtggggacacagagtccagcacctgagccctccaccctccccattctggttggttccatcagccacacttagaatctcccaggatcccttggactccgtcccccaacttgtcacagcagcctgagcctacccaccccaggagacaagagctggcaggaacatctgcctatatggggggtggcgttggccccaaagaggcttcaccagcaaaggaactgtgtgtattttaatgccaggggacggaggatgtgtgagctgttcagcaaggtctgcccaaggcctaaaactcaatttccttattcttttgcttctgctcgtccttaacaactaacagctcaacccacacctctagacaacagtagtcgtgctttctgctaacggtgacattttcagctcttaaaaagaagcaaggagattttcaaatgctagagtatctctatcagaaggcataggacattgtgtccaaagtctcaagaacaaacaacactttccttctgacctggtcccaaagtcagcaaacagcaagcaggcagaggccctcataaagactttttctggtcctcctttgaaccaactgttttaacccagccctaaggttgacggggaagccgacccaagctggcatctttctcctacc

SEQ ID NO: 32854 - DNA, 774 bp, Homo Sapiens
gggggcgacctggataccatcttcgacacggggacaaatcccgggatggagtccagggtttcccgcggcttcggcgcttcctgacctggcgtgactgccgacttgtcggcaccacccagacctcaggctccctgtctgtagtggtgaatcgaccttcctcatggcagtccaggcttcccaagccccatgtcctgttgatccgggacaaactcttccttgaacgttcttcactacgagccgctgctgatctgtactgcctggaggagcatttccatagcgcccgcaaaaatacaataaagctcacccaaggaaataaccatggattctcacgcctgggtgccagtgtttggaatcgactgggcttttttatgttagtaggcaatttaaaacaattacttatttgaaatcagaagcgcaataggcataacttcaggtacgtgctccaccaccacgttttgtggatttttctttttaaacatcagttctgttctctacaactctccgccttcagggttatactttccaggaacaatagcttcccaattcggctttgtgcatccatttttcatacagcatcgttgtagtcttcaagtacaaatatgatcacggcaatctgctgaaaaatctttggtgggctttcccttgctcttggacaatccctgattgtccaagtttttcgggttcatctcgttcggcccaccatacactgaaactataaaactgtaaggggcttttttttccctcaggtccttcccaccagacttaagtaccaag

SEQ ID NO: 32855 - DNA, 829 bp, Homo Sapiens
ggctacagtgagatggttagatgctgagtttttcgttctcactcactcccttgccagttccttagatgttatgatccagctatgatccagctttacactttcttcacccagaagtgacctcaccttttcatgacagaggaaacagaagccatggacttcttaatgctatatgtcacaaacctgtatgcatgtaagaatcttttatttcctcgtattccagtgttttaaacatcctgtcacccatcagggacttgtccttcatatgtatttctcctacacctttcctactctgtcatgcattttgcactattactgtatctctttcttgtattttcatcttgtcaccctgtatttatttattttccacccacttttaaacttagttacatctttcatggtaaacaggttctagggagatggtttgattatgtatcttaaattccctcccctcaatctctgtttccatctgccaactaccctgtcttgaatagagcagctgctgtgagcctggagcctttgggcaaataagagtgtatacagtcccttgattttaccagaagatgggaaagagagcttgctttgattttcttcctgtaatccagatgaaggtttagagacggggcagctgtggagccttcagcaaaggtctgaaagggaaagaccttgcctttcaaagatacatggaattagaggaaaaagctgtgcagttcctatgtaatgggcactaaggaagattagctttcaaaagtacctgtttttggttgcctgcattggggggggcacaatttccaccatcttccctgtgaaggcttggggggaaggggtaata

SEQ ID NO: 32856 - DNA, 537 bp, Homo Sapiens
ggggaaacaaggcccatgtcgttatcacagagcaggaaaaaaagggtgaatttagagctgagaggccataaatggataactggcacatctacctacaaactaaattaaaggttttcttttctaagagacatttttccaaaatgcatcctactatatatatttaattcatgggaaaatgtcattttcctcagaagtaggtaaaaaatattatgtgaattagcatttaaagtacaacttttgtactttctcatttatttgtctaagtgtctctgttttcaatctagacagatagctgtactaccaggaaaacaacacttgctgttagtgtctaactgacaatgttgcataagtctatttacttaaaatgaactggaagtgatcctggaaaatctgtacatctctttttaattttaattttgagaataagaggcttggaaggctcatagtatccacagatgacagctatatggagagctatttggtcagcaaccacaggtttatctatcccaaattcatttttctcctcacttatattct

SEQ ID NO: 32857 - DNA, 755 bp, Homo Sapiens
ggggagaatgagggagggtgtttcacaatgaaagagccatatgtgagtcagcctggagccccagaggacagcctgtctttgaagagctgaaagtgctttaacacaattggagattatggtagacagaaggcagtgagttaccaggttcaaggctgagtggtgagggatcaggaagggcacagtaaactttttaaaagagtttggcctttagccagaggacactggaaaacaactggagggttttaatcactggggtgagctcattgtgaaatggcagcctggctggtgggtggaaagtagatttgagcaggacaaaatgcaagcagtgagaccaggagacagtgggaatcatccaggagggccagggttctttcctgggctagagtaatgccagcgggtttggagggagcccggtgtggtatgagatatttataaggtagacatactagggcttgatagaatgtggatgtttgaaatttggagaaataaggattgcacttacagaaatgatgcttttcattgagaaaggaaacacgaataacagagttatagaagaaagatcatgaatttggaacattctgaatttgaagtgtctgtggaacatccaccatggggatgtacaactagtgcatgttcgagtctgaaactcatgggcccattttctggaaatagagattattagagggggagaacctaccagaggccatttatgccaaagaagtaaatgaagctgcccaggggtaaactcaggtaaa

SEQ ID NO: 32858 - DNA, 773 bp, Homo Sapiens
ggggaaggctgattctgcaggtttgcaaaacgctgagcatatttttttgtggtctcagtattcagagctcaaagtacatcaggtgaagaacctggaatctacaagttcaagaggcatggggagcaccttgggtcttgttttatcacctaggctggaatgcagtggaacctgcttagctcactgtagccttgaactgctgggctcaagcagtcctcctgttttggcctctgaagcaactgggactacaggtattggcctggagtgattccaagctctcctggaacaggaggtgcccccactctgggcataaatatctctccctcatccctcgcagacaacgatctttgagtaccatccagtcataatatagacatggccaaggtaacggaggtaaacagaaaacaggaaaaatactaggctgtttgcactggaacatggtaaccatgaaatgagcaaacatttaattttgttcattgaggtcaacgtgaaagctgctgaatctcttataacaactttcaggacacttggtgcatgccattttttgaaacaccctcaaagctgagcctgttgttctgaaatgtcagaatgttccatttctggtaaacattcaaccttgtattgagtttttcccttttgtgcagaacccctgtgaaagtgcagctaaaaatgaataaaggggaaatgaaaagaggataaaaatgaaaaactgtggaaacccgttgagtcattagggcagggaaaaactatccgaagaaggctttcctgctttttgg

SEQ ID NO: 32859 - DNA, 767 bp, Homo Sapiens
ggaaatctatacattcttagaattgttagctcctaatgctacacaattttagaactttaggattttagaacaggggccagtcaactttttctgcaaaggaccaggtagtaaatattttcagttttgcaaaccatagagtctctgtctcaacctccgaagtctgtcattatagcatgaaagaagccgcagataatgcataaatgcctagttgtgctccaataaaacttgatttacgaaaacaggcaggaggccagatttgacctgagggttgtaaattgccacccctgttttggaacataaaactgaaagggtcccaccaagcacttggatttgcacaggaaactcatagacctctcctatggttccaaagggtcccattcaaatatggagccattttaagcacagttttgattggttcagtccactgtctgtcccagggcagtgtctggcctccagagagggaatgcgggggaagaaggagactttggaggctgtgaccaaagcgatccctgacactgtggagagtgtcaaagagccatgtccccgagttggagaaaaatggggggagactgttggaatcaatgcctggcttcccaagttctggaagaccttggtgagtcaagcccctcgatcaaaagcaaaaaatgatcctgagtgcctgggaaggcataactgatggacctggccaagaatcaatgggccccagcttccaaagggaatttgatgaggctggtcatccaagaggcgcggacaacctgggccataac

SEQ ID NO: 32860 - DNA, 811 bp, Homo Sapiens
ggactttttgaattttcacccaccgcattcccaaggagctctggtgtgcacggtgcattgagctctctgtcagaaagtgaacagttctgatttcctgcagccttttcgtactgtgcacacccccgactcaaaaacatacacacagagtcagtgcccaggcatggctgttagggtgaggtcaggctctggcccatctccagatgatggggatctgcttaccactgccctcaacattcaatcccgtttgagcccttctgttttgtagtcttggctgaattgttatttcttccacttgttggcctcagcattccccttgtggccaccaaaggcagaaacaatgctttagagatttttaggtacttatcatagctctcctgtgcagcctactctcctggctgaagaccccaggttccgctgacttgggaggttattgactggcttgggtcatgaactctaggccctacctccctgcttacggcggcactgtggtcaggtgttgggtcatgccagaaccccccctgatttggcatttggatccagcccctcctcttctaaccccggaactggggactttcctcccgatatcctctcccataaaatgagggggttaggccttctgcggaccagctgaactgggaatgtaccacttggccaccaacacactcccagggtaccggtgcctctgtatatccccacccccgtaccccggtgaagaaacaacaggcgaactccacggccgagacccattacttttaactttcaaagccagccaatgctgggatataactccaggggatagtctcaagcggaa

SEQ ID NO: 32861 - DNA, 731 bp, Homo Sapiens
ggggacctcctcagggagcatcttgcccacaaaatcacccatcccttttcccccactttcttcactttcccaacgtttccactcccacacccacaaataaacaaagaaactttgagcttattttacaaaagtctttgaaatggccttcctctctccgatgctcctgggccctggtttggccccatctgtgcagtctctccgatgagtgtgaaataagccaggtttggctcatgctctccctgtgagcttgctctccccgtgagcctgccctctccatctggcctcactttgtttgtgtccctgggtcctttgtctctgatcctgggatcctggtggtttcctcctccccgcccagcttgggtccttttccccagggttcttccctatctctacatcagaatttcctgctttctcccaaatatgcatttccctggcccaggcatccattgcttcctctcatcgtgaggtccctgcagcagactgccaatgggtgtggtggccatgcccttcctccacaaacccagggaaaagctaccagtggtggctgtccccattagggaaagggagtcatcccctggcacctttcaggggggggaatgtttcagggaaggaagggaaaagtaacccagggggtcatttcctcaaattttccggggaaactggttttatccattatttggaccaagaagggaaagaaaaggctttttgccgacatccttggagaaatggag

SEQ ID NO: 32862 - DNA, 813 bp, Homo Sapiens
ggggagggacggaggtaggggagatctgggaagcctggttagctagaagttcctgccttgtcacagcactaatcctgcaatttctccattggatttctggactgatgagcaattttgatgctgataaggcagaaacacaatcactctcctgggcccttgtattttgcagggtaacttggataatacaccccatctcggcacctctgcgagtgtaactcatttcctctgcccagaggagaaacaaggactccttggacaaaacggtgcttcctttcatagccaatgaattgggcatttctccaggttctgtgaagcttatttagtgacattccccaaaacctgtgccccgagaagttccttcttctctgactttaggtagagtccgagattcatttcagtgatttggctaacatgtaaagtgtctcacatgtgaaagagaatcaaaataacttgagcacaacaacagacaaacaaaagcaatacttgaccaagacctcttgtacctttttctgctctgggactctccagcactgttcacaaatgcagtgtatgtggaaatctatggtattgttatgatctgtcagtgatggtgcatattaaaacccagttttagttaatattccctcatagcctttgcctggtaatatttacccccttggctttaaagataaaagggctccgcccaggtgtggtgggctgaccccctgtaatccccgccactctggaaaggccgaagccaggcgggatcccaagggccggggaatccaggacccccctgggctaaacagggaaaacccccctttctactaaaaa

SEQ ID NO: 32863 - DNA, 841 bp, Homo Sapiens
ggatgtcagctggaggctatattatgattctaaattcttaaaggtttttttccctccataaatcaaaaattaccttatgtaaaccaaaaattagttggtatttatggtcatgatcttaattctcaagtttagcttaatcttgtatttcattgtttgtcttctaatatgacagcttaaattcagatttttaagtgactcagcaaaataggaggagtgtcccaatttattagtgttgtacatattgaagaaaacctttttgttccttcagatttagaaagaaacagtttaaccatttatttcttggtattctgctgctgtgaataggtttacttattcttttaacatatattgtgtgactacgcaagtataggtcctgttgtattgcattaatctttaccagtaactaaacatcacaaggttaatattggtttggctgaaagaattatgcagtaaagttatttataagggaacatgatgactttattcaatatttttcttctttgaaacatctcattactaacttttaagattatttcataatcccttatacctgaaccaatgaaatattttgaactctacttaagaagcatgaagcctatattataaacctaaacaacaaaagcaccttgtaaacttgttttaaataaattcccatggccttatttttccaattttttgacaaccggaaaaagggccattttttcctggtcgaactggtggaagccaaattctcccccttttttgcccttttaaatggaaaaataaggtgccatttaaaggtaacccccatttggcctggccggaaaatttattaaagacccaaaatttaggccctaaacac

SEQ ID NO: 32864 - DNA, 586 bp, Homo Sapiens
ggagctgtgcctgctaaaatggatcagtgagagaggttcctggacctgtgaactttgctgttatagataccatgttatagccattaaaatgaaacaaccttgccaggtctcattgttcatgaaggagctgcagtttacagagtgtttaagcgctggcgagctgtgaatttgcactgggatgtgttaaattatgacaaagccacagacatcgaagaaagcagccggggagagtcttccacaagtaggactttgtggttgccattgacagctctgcggaacagaaacttggtccacccaactcagttaacctcaccaaggtttcagtgtggctatgtgttattgcacctgttcaatcggatgaggccccatgaagacttatcagaagataacagctcgggggaggttgtgatgagagtgacttcagtgtgacaaaagcataagatgatgcagtgtggaccaccctgcacattttgcaatgtaattgcagtgaatggcaaaaccatagcacttctaaaaacacatctatgaactttttaaaatttatgctttttatatgaacatttgaattgcaaatacatttttctaa

SEQ ID NO: 32865 - DNA, 748 bp, Homo Sapiens
ggaactcgtcaaagtcttgtggctactaagcagcagggccagggtttgcatcgggtgctctcttgactccagcacccacaattttaaccactgtcgctattctacattttgctgtttctcaggtattaatgaaatcagcctcaacccagggtatccagcctcagttggcctagtttggattaggtggcagggtaggtgttgggcagaccaaaggtatcaaatgggatctttaaggattttcagcatttcaaaagctaatactataatacattttcataaaaatgatgttttaagggtaaaagaaaagaagtaagctattttcctagataaagctgcccagtctaacaagacataaaacatgtttttcggcctaggattttatcaatttagagtggtaatgctgggtcagatgttttgattaattaatctttgattaataagtataagaaagctaattattagaagagaaggttgttttataaacatcatctttcaaaattcgagatttatggggaataaattagggagaaggtggttaaaccctcttcaacataaattgctctttggggacattttatgcacagaactgtgcaccctcctcagaacagcaggtcctttaatggcccatggggatgaggaagggccccatcaaaggcagcagggaatgggccacttctcccacaaccccatggggccagggccactgccaacttcctgctgccctggaattccccaaggttttaagggc

SEQ ID NO: 32866 - DNA, 789 bp, Homo Sapiens
ggagaagaaagcttcaaaattatggaagataatcatgttttattaaacaagcctggttgcagcttatgccactcaaggtacagcactaaattctaaggaagacacagagtgagaaaagtaatggctctgcctgcccttgaggagcttagagtttaccagggaagataaggaacacaaatataaacaatgatagtagaggataaagatcagaaagttctatagaaaaagttcaggagaaaactgtgggagtggtgaggaaacaggctctactcaaagctgttcgcaatcagggaagattccttgtggcagtgagataagattagggctttaaaagataggtggaatttgagtatttagagatgagagaggaaggaattctaggaagaaaaaccaatgcaatcaataacttgaagaactatatagaaagacagtcaagttctgaaaacaagaaagttaagattgactggatttttattaatcagttcataattggatttgtttagagtgcctagcaagatgaatctagtttcaagaatatttttcacctattccacataccttggtgagagaaagctagtggttatggaaaagaccgtatggaaagaatgaaattagttagctacagagactcattgagaaacggagagttagcatttgcttgagtggagcatctcagggaaaccctatttgggagtgagcaagtttattatgtacgtggaaaatccattgcctaccatttgttggatatatttttttgggttctcagtttttaccggttactttcatttc

SEQ ID NO: 32867 - DNA, 717 bp, Homo Sapiens
ggtattattcaaatgtcactcattttctgatcgctaccctttattaggaaaagaaaatcccaaatcgtgagccacatttagttgtcaaatctctttagtcttctttaatctggaacagttcctcagtgttttcttgtctttcattaccttgatgaatacaagccagttattttgtagaatgtctttccatttgtttatctgatgtttgctcataattagagtcagagttttttgcaggcctaccccagaagtgacgttgtgttgttttcagtgtattatataggaggcatgttatgtttatgtaacccattactaatgatactaatttcttccaggaagttatgattttttttcctttaattagcttctgttaaggagatatttagggctatataaatatccttttactcattagatttttacttcctcacttgctctaatatcattgatgattcttgcttgaatcacgttttactctgctggttgccacgtgttgatttcctcatttcatcatctcttcatatggggactatgtgaagtgcctatgtccccatctttccttgagtactcccttactttctggttcaccaagttgttccaggttcatctggactgttcctgctccaaagtttgaattcagcagttttgccaggaagctctggctctttctaagtaggggatgggtttgtagacacccaaacatcttcagtggctaca

SEQ ID NO: 32868 - DNA, 708 bp, Homo Sapiens
gggtagagggataggttagtaagatgtattgttaaacaacaggttttagtttttgctttataattagccacaggttttcaaatgatcacatttcagaataggtttttagcctgtaattaggcctcatcccctttgacctaaatgtcttacatgttacttgttagcacatcaactgtatcactaatcaccatctgtttttgtgggatgtgctgcagcatttcccaaaaaaactttacgtgtatgttgcaaaatgaatgtactcagacattcttaatttttacttagggcagaccaactctttgagtctctcttggacttatatatacagatatcttaagagtgggaatgtaaagcataacctaattctctttcctatagagattctattttatttaaaatctatttttacactagttagaatcctgctgttttggccaagtacttgtcttgcatgtctgaccttgcagaagctggggtggatcatagcatactaatgaagagaattagaagtagtttacaaagctcgctcactcctcatttctctgtgatcccttctatccagtgggcccaccaccacctgggaaaacagatttttcagtacaggtgggataaatgctcctgaaaggctgtgcccagaaggaatgaaccaattaggcaagtggttttcccaaactaccttgggagttttacgaaaaaaatatggtcccc

SEQ ID NO: 32869 - DNA, 532 bp, Homo Sapiens
gggcaggagaggaaaataatctctctgtttcgcaaagttaactctcatggcaacagagcagagtagcggggggatgggggctgggagatgttgggaagctattgttaccactctggtgaagagtcatgggacctcaaaagctgggatagtcacggtgggaatggaaaggaagggcacaagctgagaggcatttgggaggagaatcaatagcactttattgactggatgtgtgagatgagtgaggacagcaatcagaagaggactttgaggtttctagcctgagtggctggaaggacaccatttcccctacctgaaataggtagcaaaaaggagagagaaagagagaagcagagggattttgcaaagggaataggagttcagtttttgacatgtggcatttgaattgcaagaagtacatccctgtggatgtaatacccagtagacagttgggaattaggatctggtgtcgagaagaaaagtagagatgagatccaaagggtttatagtggatcgggagagaaattgatgacct

SEQ ID NO: 32870 - DNA, 745 bp, Homo Sapiens
ggagttgaaagatgtgagacagtattccgaataatgaagataataataatgattattataataatgatgatgattccaaggaaaaaacctacagcgaatgttccatttctaccccgcacgcagacactctccctaacactgataacctgagcccccagcactggacggaagaatgctggcgtctccgtgtgtactggttcagggttctggccccagccttgtcaggaccccctggtgtccagggcccccacccctcccgcaacaagcagctgatgccccagtgattctctatacatttttcacctcggccaatatgtccaggaaaactgcttacttctcttttcttgcctggagcttcattgttcacccttacgttgcaatataggaattaatgctacaaaataaaagtaaagcttacctgaaaagtgcatagtttggggcaatggtatctacatctcccactgtgggaaaaccagcaaagcatcaaaactctcaattctcctgttaccgaatgcagatctgaattataagatgtttatgtttgaccattgtttcaaccatgggattttgttacgaattatccctttaactgaaaccctcagttttactgtttacattattaagaaaacagggatatcttttggatctaaaaatttgatgtacagcatgtggatttttggagttttacatggtaagtcccacgtatggggggaaattaacgtttggtcttattttttgagacgtt

SEQ ID NO: 32871 - DNA, 634 bp, Homo Sapiens
ggcattgctgtgacacaggtgatctgagcatcaagaaaaaggcatttcttgcttctcagtgatattagcaagcacctgctgcttgtattcactgtgctgagttctacccatttattctctcattcagtctttacatctccctgatgaggaggcataataatatcatgcccattttatagacttgagggaactgagcccaagccattcagccagagagtaaccgagctggagttccaccaggtctgtctgctctgatagcaggcatgcctgacctccgcacctacccacttccccacttctgcagtctcatgtgtcccagggaacgcacagctggggcccctctcctaatttgcacccttcctgagccagttcagaagtcccagactgtgtctttctggctggctgtgtcactgggcccaaggatggtgctacggggctaaagatcttctacactgaccctctccactaacgggaaatcagaaaagggaacttgaagagaacattggcaccaatggttggacctagggatttgtagccacctttctaagggagatagaggacagggctaagagtcacaacttttgttctctacccttgagcaatcgaatacttgcaaagccctgtttctaaggtt

SEQ ID NO: 32872 - DNA, 575 bp, Homo Sapiens
gggtttatggaaccctttgcataattccccagctgagagtataatggagctccatcttccatgagggttttggcaaaattacctttgaaaatctcttacactgctcgtatagcacagaggttgccattccatctctgatgaggccagcaccactctgttctggaggtagagaatcattattattccaactgaacatcaaattagtagctagtcttgcatgctctatgaaaaataaatgtcctcacatgagaatagcagcagggagatgcccagccccgatcttgctggcactgtcacgacaggctcatgaatgttgaacagaatcactatcttcttccaacttatcttttcttccccacatcttgcttggctttctttgccaagagtgaatagttcgaaatgactctaaatgtgagcatggtgaacccttcaccagcttaagggaagaattttctgatgactggagacgtgtgaaagctctggggcccagtgttccggaagttttttagggtaaggagaccggaaaatggatggtttcaggggggctgcaacttcttcagggagcccaatgggct

SEQ ID NO: 32873 - DNA, 837 bp, Homo Sapiens
ggtattgaggtgaaattgtcagatttacttagcctggtgacatgaattagctgattgtggaactctcagcagcatttcacgtattgttaacatgtatggcatttattagcatattgtatattatataagattgagggatgtcatattttcagctttcttttaaataaaaattgagtatattttcctattttatatcaggtaactaaattatgctagttatgtggaaaaaattgcaaagatgctttgacagatataatccctttggtgctccatctgatcaaagttgaaaagttgatgttttttaagagacaagctttatcattgtctctgatttcagtagaataatggtttattgttagacaatgatgtttctgcttggataaatcaaagataaattaccgttacatggttagatgcctcttttgtcatctatattggagtttctacctaactgtaaacctgaaagataagaatacgcttcggcctggatttttggttaaaaccgatgaggactttcctaatggtctaaaacaaggactaaaaagcatttccggggaaaaaatactggggccaaagaacctatgaattgaaacaatattcttaaacccgaaaacgctccttcggggaatccgcaaagttataacgcccaaagattttctctttcttcccatttaatccccctcccctttcaaaccaacccaaatttaccaactgggtaaaacccggccccccctctcccacagtctttgttttccagccaaccacaaaacttctcatctttcaccaaatccacaccccagagatctcgttctgaattaaaaccctccacggtcagcg

SEQ ID NO: 32874 - DNA, 640 bp, Homo Sapiens
caatgctccaactaagaacgataactggtctgttcctgaagccctgtagctgaaactaaatgaattttaagggacaagtctcatgcctgatgtatgggtcacaccaaaacttcactagaccacctaattccattactggaggtgttcagactccaaaccaggacgaggtataggcagttgactgttgtggatggcttttctcacagcgacagaacaaaactcccagcataatgagattcttacccctcttaattttcccttgcttgtgcctacctttttttgggcaagataatgctaagtacaatcctagcagactaatgctggcccagtgctttgagatgatagccaaggcctatggaatagacaaaaactgaacttgacaatggactccaggtcgacttagtcaagagccactccttccaaacctcccttgttgctcaaatgttgctaaaagaattttgacccggactcctagtcaccagtcacttctctccaacagaggatcagatcagcaacctgggacaggtccacactgacactgagggataaccaaaacttatcaagatgactgatcgctgatgctttcagagcaaaatcttgatcaaaagggggaaaatgtgaacgttgtcagaatcaaatg

SEQ ID NO: 32875 - DNA, 796 bp, Homo Sapiens
gggtttataatgttatatattaaaatttttccttgagccaaaatttatacttaaaagctaggaagcaatttatgtttgaatttattgacaggagattacctactaattgtatagcagtgtaacctgtatcccttataagagttaaaatactaatattacctcttaaaatgatactataaatgcaaataatactataaatgaccatgctacatctggataccaggaacaactgctaatgtaagaggtcaaaacatgcaatttgttgaagtgttcaaaatgataaaaagaaatatgtgattagtaaaataattaaaaaagactgatgtgggttgagaagaactgcaataggaataaagtggttcaggatgatacagatgggaatatttaaagataatatagctttctagatgataactataataacagccaacatttattgagctctttctgtatgctaagtgctttgtatatgttatttcatttaatcttcacaatcccctgcgtgaatactgttatccccatttcattgaccaaatcaatgcttagttacttggcctaaagtcatatttgctaaatcccaaggacttagaagatctagattttaagctttctatataatacctctcacattttaattataaggtttaagagttcattattttaacctcaaaaaataaggttttacttttcagccgtaacctattatctttaaaaagattaaaaatggccggaaacccgaagtcccaaaaggggaacccaggtaaaaacctttatttaactttttggatttgacaat

SEQ ID NO: 32876 - DNA, 561 bp, Homo Sapiens
gggaagccaaccgtcctcggtttcctggcctgtggcatcagtctggttggattacacacaaagccctgcagatctgctgcttttcctgattctcctgtcctgagtgagtgcaaggggctcccctgtcgccgatgtgttctttgaagcagatgctgtgcctgatacctgctggagagtcccaccgccttgagcttctgggtcgagaaaggccaagttgcacactactgagagactgccatgcaccccctggaggcctcagaacattcgacatgctccagtcatggccacggcagtgactgctgattgcctaaccccacatgtgttctcccccttccctgataatcaagcccctgattttcagctgggcacaaaataattcttcctagaacaactccacgtgtgttatcgcccttgcagctgggggtggccaccactggggagaggcagggtgaagaggtcgaaggagcctgagttagcagggatgagcagtggccaggtaaccccagacccattatcctctggatttcttttatgtgaaacaataaaatgtcttgtatacaa

SEQ ID NO: 32877 - DNA, 484 bp, Homo Sapiens
gggggaaaagtgggtatattatctgtcatgttataacttactagggttgttatatatactagagatatggttgtgtttttatgtgtttggggatgagtatccatggatggattatattgtacagttgaagccctaatagtaaggctaataggatgattttttaaatgtctggaattctgtgatttctgccttttgtgattgtttcatgtttacttgtgtatatacctgataacaaattcaatgtatcccatttttaaatgtttttcaaaatcaaatttatttttctacctcccttgtacttcaggatcaattcctaactgactatagttccctaagaggtcattgtgttcagctcacttgttaatgcataatgtcagttagaggatataaaatggtaaatgttctactgtttttaatgtgcagttatacttgtcattgtatttcagcctagtgcctaataaatgacagtttcttcttgcctctt

SEQ ID NO: 32878 - DNA, 429 bp, Homo Sapiens
gggtgaaatgatgattcagtttatccattcgctgagtgcgctgcactgaccttcttccaagcctcagttcctgttctaggaacttgaggctatgtagcctgaaaatgccctgcagtctgcagtgttctactgtgaactgcttgtgtgttggcaggctaccggtaagaatggttggtgtcagcagggacggggccctctgagacccatctcacaaagatgagtggtgaaaatctgatcacttgctgcagccctttagttttttattaagccgatgcctgagtagctttaatagctattagctatgttagtagactgagatcttctgttagaagtctttagttctgttttccttgggggactaagaaattatattgcaggcctgaattacaggaaggggagaaccaatggctagggaatgagagccaatac

SEQ ID NO: 32879 - DNA, 762 bp, Homo Sapiens
gggtccttagctaccaagtgtgcctgaaagggattttgtatccccatatcaagagatcgtcaggttaaggaaggaactgccaaggaggacttttggctacacatctggtcctcctatgctttggtttcttccaattctgcaatattgggctaagtgttgagagtgggtggtatagaagcagatttaattgaaccacaggctgtgggatgcgcctgcctcaaggcttgctgtttagatcactcaaagagctttcagacaaaatacctgagacactgaatatgaaaatgggctctgctagtttcttagaagccttgcctatcctggcagcctggcaggaaaagctagcctagaaggagtgcctgctaaggttagtataagtgaggtacatcagcagaccatgtggtaggtattactgaatcttttctgtatttcctttaatgtcattgtcttatgcagcttttatgaattaattaatcagttttcaaaaggccatgttagtgagactgtcagagcttttaacccctccttagtataattaaaaaaactacaatgtgtgaggggtggtgagggaacagagagaccctctcatattggtttatactcagaaaagaaaagagaagccaaactaaaggcaggtagcctggcacctaggaacagaccccaaaccaaggaacccgaccccaaaaccaggcctggggcctgccctgacctaagccctggtagttaaaaattctacccccttaccctagcaactgaatgttc

SEQ ID NO: 32880 - DNA, 550 bp, Homo Sapiens
ggacttggtaaaattaagtctaattgtagttcacatttattctcagactatagtctttctgaagtcttgactggaagtataagaaatttactagtagtcttccttctgggagggccctgaactctaatttttcagtagtaagattgttgaacactgtttaggattccagcttttagacattaacttcttcttggtttcttagtgtctcaatcctatgtagctgtagcttagaaatcatcaaatgcatcagacttccgcagattgttgaggtcatgtcaacaagcttcttttctctctgggatcacggctcctgaagtattgactgctttggtagcttcctgatttctctaaagagatttttaacttttgttcagctgccctagtcatattcaaattggaatgcagtaagctcttttactattactgaaaatgaccaattttcttttatcacaacaattaatttttctcctatgttccaagttaaaccaaaaagatagtttttggtttaatgattctagacgttcagtcatcagcctcccagactcactaa

SEQ ID NO: 32881 - DNA, 523 bp, Homo Sapiens
gttattcttagtaaggaacttcttgtttaatagcatttttgtttattttaaaaagtgatcagaagtagtaaactatctttgaggaaatactgtaaccccagaatatttcctcttgacttctttttgtaacaaggataatttagggatttataaagttgtaaggatttcactgttttcggactgcctataataatagcacattaaccttcacataataagaaatctggacaagttcagttacacagtatgatgaatacttgaattaggaacattgtggaaaatttgctttagagaatcaaggcagtagtttggtatttggtgcttattaaaaatgtggtttgttttgaactggaagcaagttgaccaaggacttatgactaatgtgatgctaagttccaacttggcccccttttaaacacgtgtatgtggcctttttgaagattacacaaaacactgtagggattttaagtctttggaaatccaaaagacttatttataggggagcctgggaacagagaagggt

SEQ ID NO: 32882 - DNA, 761 bp, Homo Sapiens
ttccacatctataaaacagaaaatgcaaatattaaatatctatttggccttcctcatcatggatacaatgacggtaaaaggcaacttcacaggattaaatagcttgaaaacaaagtgtcgagaaaatgaagacacttttaatatcatcattgtgatcttcaatcaagaaacatttcctcttttttcaatttggcaactggaatctctattctcacaatgaaaacttgcacctaattaacgccaaccttggggccttcacttgcccaaacatgaaacaaaaagcacatttacactcgttgcctgtcaaggaaaaatcatggctttgcgtccctttcgaactcacgacactacctctcttggctccgcttaattacccaccttccgccttgaaaaaagcgcaagtccaaacgggctcagggccacctcttcatagggtcccccttacttcccagcaaaatcttttccccccgcttactcttcttcggagggccaaaccttcttgtccccccagaaatccgccccaccccctttcgtaacacgagcaacggtatgggatcttgtgaacacacaaaaatcgccccggcatacggcccccctggatcacaattctcgcctcgcgcttacctccgccattaaccccatacgatatcctccttggctcaaccccccacccctgccccctcaattaacaacaacccctttctcctcctaaacgggcgggggcgaaaccacccctcacctcacgaaatcacaccccctct

SEQ ID NO: 32883 - DNA, 561 bp, Homo Sapiens
ggtagaggagagtcctttttctaactttcttgaactctttggactaccttgggatccttctattaactgccttgttggcattattctcagtttatgaaaaaacaggcccacagagtggaagtaatttgcctacaggtacatctaaaaattgatgaagccagataggaactgctccctcatcatctgaaacccttcccagagctgtctctcccaccccagaagtagaaagaagccagacaaagatgcatcttgatctcccttgtggtttcagcaaggaagcagatgagttggagatgaagcccccagcccctgggaaattggacccacttcttgcctccaaacgctattggggcgacacaacgcgtgtctcccctcccgtagatcacctcccccatattttgcctttaacatggaaatttgcgcacccccgcaacacctctgttaagaactccatttcccaacccagaaattccctttcctcttgtaaaccaccttcatccaactaaagcgcgggggcatcttaacatttaacgaaccatccccatccccaaaggaacaaga

SEQ ID NO: 32884 - DNA, 752 bp, Homo Sapiens
ggggatgtccactaatggagaaagagatgaatggcgatatatgtacatctacatgtgtatccgcatttctctgcaatacaaaaggagcaaaccactgctaacacagtgtggactcccagaccatgactgtgagggaagaaggcggaaacgagtgtgcagcgtgcaatttcatttttatcgtattctggaaatgacaacgttctgagccactactgctgggtgtctgctcctggggtacctgctggccctgaatcacccctctggattcctgggactccaggaactttgggatccagagaagcgagctcttccatcccaggacccatgactgcccacgctgttgagcttcctgagggcagggaccgtgttttctctctcagagccagggctgcatgttggaactggccctgacagtgtcagttaaactttcacgaaacaaatgttcctgaacttgaagccataggacaggactctgaagatcacagaatcacacagtgagaaaatgatgcccttttcagctctgcaccagtccttctcatgacagaaaggagagtgttctcggggttgggttcgaaggatgtctttaaccccctctcatcgttgccccgtctcgacacaggaacaaagaacaggcggggtccctagactcagaactctaggtgggacgaaattgtgtcccgcaaaaagttaacagccattaactttaatttttacaaattaatcttccaacggaataccccaggtggataact

SEQ ID NO: 32885 - DNA, 769 bp, Homo Sapiens
ggcatcacggaacactcccacatgtgcgaacattgtccgcataaataagctcttttctcttactaatgtctttttttcagtttaatttgcaggctcctattgaaataacaaaagttggtagaggaaaaagttttttctcccctacaaaggccaagaacattttggctttatatttatatttatattataatgtgaattgattataattataatgtgaattgatagaaatatatatattttttttctgcccctgcttggcacatgacagaacatgggcatagacagactggctattggtaatccagtcctgggagatgatcaggaggcagtactcaatcctactttcttctctacagcttcccatgggctaaagaatttacatgtctgcccacagcaaatgtactcaggcttctacactaacataagcccacggaaatgaaacagaaagggacagttcatatgtttctgaatagatccagttgaatagtctcattcaatttgagactgttgaacaactgttgttgttctacatacatttaaagtcagggcacatgcgtcactgcttatttttcttacttgacatattccctgcatttccatgtctgcctgtcctttagataaacagtaaaagtttccccatgtggccagtatttctcaaatgggttaacatccaaaatcaccctggaaggaccttttaagctaagattggtttgggtcccattccccaagggattcctgaaatccaacaaggttttgccaatggggtcct

SEQ ID NO: 32886 - DNA, 760 bp, Homo Sapiens
gggatctagaaattactgttgatgtttagttctaatctttcagtgtggggattcagccagcctcatgtattttcagaatgactcatgaatctttaccacagtctgcctagctagtcaaaagcatgaatgatactagaaaccattataggttttcctaatatggcaattgatgtgactgaaaggtactgtactctcagagctttgtcctgaccagtgtcatcactcactcaatgtttatctgggttttaaataaaggccagaggttggacagggagttgctggcatgtccgcggcttggcccagtagaatgcccactaaccatcttgctccagcagctgaaaaggtcagaagttaaacatggtgaagagtccggttcctggattcacagagcccagcatcaggccgtctcccccgcaggctgcaaggccagcccttgagtatgtttggaagagcaggttaatggagctgtttgtaaatcaaagggaagaaattagcagcctgttctttttctctttgcagcttgtatgttaggacagcattaggggctgggttaggaacatgttggaaggtactaagagaagttaggaagagcagcttgtcagatgggcagtaagaaaccgctgagtacttgtatcgtaagatgaggctttgcttttacgtggaggtcacctgtccgtgttcacgtcctcacctggaaggacccctgttccggtgaataatgtgcctgcgaaaaaccccagggcttccaattttcccttca

SEQ ID NO: 32887 - DNA, 734 bp, Homo Sapiens
gggggtgcggagcagcccagtgggggttgttatagtggcagtggggtgccctgtagagagcattacagagtgggtcaccaggcccaggattagaagtgtctgtagcccccgaggaaccgggacaggactgaatcactcaagaagagacgagatgatgatgacggagtggccacaaagtcctcccacccctaccctatcccagatgagcccatgctgtaaccacatgaagagcaaagaaacaactatttattctcagggactgtgttaatgattcccaaccatcagcatcgaagaagaggtccggaagaatgtgaagaatgctaagtcttgtgtggagaatagaggggagcatgaagacaatccacagcctgcaggcagggacttcatggacactctacattgtgcagcagccacagaattcagccacaggtgccagctggacaatgcataagagtgaatgagacagaaagcaagaccatgaggatgactaagaagagcaagtacaacatgggctgaactaagtgtccagggagttgaaaataagtggccctattgtcatgtccctatataaattagaagtattatggatggggagggcccaagaaatacccccaaccaaattaaaaatatttgaaataatattcggggccaaaggggccattaattccaaggaatgaattcaagggaatgtgcttggccctttaatttggggaaagtggtttttaattaccctt

SEQ ID NO: 32888 - DNA, 450 bp, Homo Sapiens
tacttacgtcggtgaacagggggcatgaaggtgcgtaaaaggtaagggggaaccgcccaaaaaaacaaccacctggcaagttttcctttttttcgcaggcggatcgaaaaattggcctccccacaagctaggacctggcccgagacatggatttgcaaaccaaattgggcaaaaattaatacctttacgtaagacagcatggaagttgccggttacctttcccaaatgggggttgtcaaaatgctaatggcgaaacattagacacgcagcatactctaaaaataaaacaaattggcgtacacaaaacacacatctattgggcaaaaacaacaaccaacatttttacctcagtaaaacgccggactgtaatataacccgccacgcgggtagagatccaacccaaggatctccaatgtgtaatagggcacgacaatatctcccaggatacta

SEQ ID NO: 32889 - DNA, 463 bp, Homo Sapiens
gggaaatgaataaagcacactgattgtcctaagagtcttctgtgactaaaagcacatgagcttctccccaggctgagctttgaccctcccaagcatttccccaaaggccatgacactgcatcagattgctcctggacactttcctcagagttttcaacaaatataaactgaggagtggagcacagcaccagatttgctaatcaagaggcaatggtcccagtccaaatgggtgctgtgtgtgaatacagagcccaggagaagggaaggaggtctgtgaacatcaggaattgcaaaatcttgctgaaccaatagaccaacagccattaacatttgtcaatgcaaagatcctaaaatatacaagtgtggagttgtcctgccctaagagctgaagctgtgacaatcacgctgccatggtagatatttaagctcccctgaggttactgaatctaacaatgattaaacc

SEQ ID NO: 32890 - DNA, 502 bp, Homo Sapiens
ggcactacagctggcttttactcaacccgtggaaactgaccagggtatagagcctgatatatcttcttaggtgaaggtgagacaccagacctaaatctgtcatctcaagagtagaaggatgaaccacacatacaaacccatcacagatgaatgcaaataaaaaagtcagctccgaagttgggttctgagcagtgtagattctactgctaaggcttggactacaagccatcgatgcttacttgttcctggcattcataccatagggattcaaacacccaagctgagaatttaatttaggcatatcccaggctggttttgtgcccctgagcacccggtagaaacaaatacaagtcatctctggaaaagaagcttcattttacacctcaacaaattgccacagctaaaatatccccccaaaaatgcacaaggagcttcacaatctaaattaaacatcatgaaactagaagtatgactaatgaaaacaaaagcaacagacaatggg

SEQ ID NO: 32891 - DNA, 534 bp, Homo Sapiens
ggggaggagtagcaatgactagatttaaacctagaaatacaagcaggaacctggctgtaaaaggctacactttatctaagagacagtgagatattaagatgtagagtgtatctgtttgtaaaaggtttaaacaggtaagagtttatctcatgtaataggaagtccaggacattggaaaaggaagtggcgtaagcagtccaaagctctaagcagctcaacaatgtcgtcatcgacccaagctctttctctctttctacttcaccatccttagcatgtagcttttattgtctttgtcataaaatggctgctacattgccatgactcaagttttcattccaggcaggaagaaggagagagaacaaagggtaaaacaccttgtcctcatgtgtcttgcctttttattctagaaaataaaaccttccttgagaacttctgcctacctctcactggccagaacttagtcacttagtgatctgtaaccacaaagaaagctttgggttcagttcctttacttcctagtgcttcaagtaaggt

SEQ ID NO: 32892 - DNA, 652 bp, Homo Sapiens
ggtgtatcagtgtaacttaattttttattttcatactggcattgtagacacttgagaaagctgtatcttgcaggcttgacttaacttttttccttaaaaatctggaatataatcttacagcatttactggaataaacagtacaaagcattggagtgtaaaactctagatgttttggatttacagcgtttctttgataaatgaattgtataccactagtacagctctagtacagcgttcacaataagctaataatggataagttttcttcactccattaacacaagcagtgttttatttaataatcatcaatgaaataaatgtgcctgaaattgattttaaaaattacagtattagatcataaagtaaaaaccagcagtacatttttagtcacactgaaaatgaaggacttaattttccccacaagtttcagtgtttttagtaattaattctatgcattttataccaatagaaatatatatatataaaaaattaaatgtttaaaaaggagtagcctacgattaatttaaaagattatttacagatgacacatttatggggtcactatttaagaaattgctgcctcccgctctattattttgcacattgtctcttaaaggcttacatcagaatggcatgattaggcactcgttt

SEQ ID NO: 32893 - DNA, 687 bp, Homo Sapiens
cagacctggtgagcaggaagtacaggatcgttttgaattcagcagattttgaataatgccagatcaggagtggatctctggggtaagatgcaatggtcccacacacttatatgtcaccagagtccactctttggggaacagcaatttgacggaacatgtcaagagcttgtgaaaataagtaattcacattcgacctgttacccagaaaaaaaccggggttcattcacctggtgaatctcaaacggctctccacgagaacgcaggtttggatcagtaggagttttatgactcgccacagatgcagaagacgtgtttggagccatctgtgcctctgaaacagacccccatacaaaagtgctgtcttggccctacgagacagctcatgtggggctgggaggcacctgggaagtgaggcccacaaacatgtcagagatctcggcctcagcaccagagtgacatcatttgagaaagactgttctagtccaaccctgcagttttatagatggagaaactgaagcccagagacggaaagtgatactgaaagtgatttcaacagctggactcagagttggtctgagactcctggtctgacacctttgaattcggtcagcttctcagttcggctttggctgaagggaacactggtgtgccagagaaagcataaagggccgctggcaaccactttac

SEQ ID NO: 32894 - DNA, 746 bp, Homo Sapiens
gggtagctgagactacagcccatcttatttctttaaatcattcatctcaggcagagaacttttccctcaaacattctttttagaattagttcagtcattcctaaaacatccaaatgctagtcttccaccatgaaaaatagattgtcactggaaagaacagtagcaatttccataaggatgtgccttcactcacacgggacaggcggtggttatagagtcgggcaaaaccagcagtagagtatgaccagccaagccaatctgcttaataaaaagatggaagacagtaaggaaggaaagtagccactaagagtctgagtctgactgggctacagaataaagggtatttatggacagaatgtcattacatgcctatgggaataccaatcatatttggaagatttgcagattttttttcagagaggaaagactcaccttcctgtttttggttctcagtaggttcgtgtgtgttcctagaatcccagctctgactccaaatgactcaatttctcaattagaaaaagtagaagctttctaagcaacttggaagaaaacagtcataagtaagcaatttgttgattttactacagaagcaacaactgaagagggagtgtttttactttcagactccgggattcccattctggagtctctctgcttttaaaaaccctccctttgcaatagatggccaaaacagaatgatggtttattaaacttgggaaatttacgggggccctccagaacaagtg

SEQ ID NO: 32895 - DNA, 712 bp, Homo Sapiens
gggacagcagacctgctcaacttcagcagctagaaggaggattgtctttcaccagctgcaggagcctgttcccactacaagcctggtggagtcttcggagcagatgtgactgtcctacttgtatagagaagagaaactgaggctcagaagagatgcctggctgagtttaataggactgcaacaacaattttgcctttctactttctgtagaccagcgtggtctggcagatgaccatatgacccagctgattcactccggagttagaggaacttttcccagaccctgaaagtcacctttttagacaacttcgcaaacagccatccttgttcacggtatcatgccccttgtcactgctaaacagaccgtttgcaaagaattttcctaaacatcaccactgaggctccttccagcaatgactctggtccatcattgggattgctgagcagctgtttcataacatgaacaaggatgttttaaccatgtttcttgacctggccatttggatcccaaggatgttttggtccaagaataaattccagagcttagctcaccgaagaagacaggaaaacttgtcagatgggggaaggatgtgtcaagagcatgcacacagatttactcttcagctagaagctccaattcctaaatgatctgaatccaactcagagtgcttgcacctgtttcctggcacacaagctagagctgtggtcccta

SEQ ID NO: 32896 - DNA, 605 bp, Homo Sapiens
agcatgagccacaatgcccggtccataatagcagtcttgagggaaatatttagaaggtctacgttgattggcatttttacagagacttaagtgaaagcattattagcatgaccagatttatatgctgagagttttggtaggaatagctatttccttggataaccaagccaggatcagaagaaatctggagagggcagaaatgagttgactttagcaagatgaaatgttaaaactttagatgcagtatcacacctgcattccagtagtcaagctcatattagcatagagaaagatggctttgcagtccacgtgagaaaggcctgagggggttcaggtgactgcagtatgatttagttgtcccgggaattaataatatcttgagcagcataagttatcaaggaagaggggcttatagtcatgttctgcttcctattcatataccacttgaaatgctccttttgccctagatcacatgtttgtgttgatttaacaacaaattggattgtctgaagcagggggttgtcaaactgaaagcccccagtctgcctgtttttagtgaatacagtttttattaagaacaccggccagcccccatttggcttacc

SEQ ID NO: 32897 - DNA, 582 bp, Homo Sapiens
ggcaggtccagagtcacagtccgcagtggtgacagggttcttagatgcctgcatgggtctctaaatgtctctttaagcacagtttactcctcagaatctagcctgaatcccaggtctttcctgcagctgcacaaccagcgtcttaggctttgtagatgtcttggctttgacttgacgtcatgtatacatttttagtgtgacctggccgttaattacttaagtgagagaacagaccgtattaatagctttcctaagtaggttgaaatcttccgttttctaaatgatatcagtaggagacgatgggtgtatttcttttctgggccaggtagctggcagctgctagagctcgctgagggtctgttgggaagggtttggtgagatgcgttcacaagtctccccagccaggtagtgggctcgatggtaggagcacaggacaggaccagggatcatcctgcatccctcactctgctcgcaacgcagagtcagagacacacgtccaagagcctcatcatgtaacaggaactcaggttttaaaagctaagtgcatctccctaatctagtaagaagtagcacatcagtcaa

SEQ ID NO: 32898 - DNA, 828 bp, Homo Sapiens
gggagatgcaggaaagtatgttagagaaaatgttggtgaccagtggctgagtgtggattagtagtgaagtctatgctctattggattacagagctgaaaaggatagatatcttccaggcatcaagcaggccggcaaacaccccttgatttgctgacttttagataataaatggctaatcctggatcaggctggaagttgctgagaaagacaggagcaaggaagatgaggcaaaggctggaaaaccctattagttccaaccccgatgtgcctggcagtccctgaatattcctttgcccagatctgatgttgggactaagagggacataggaacacagactgttggcctcttctacccatctggcaagctgctagcaaaaaaggaacaggaactagcctctcaaaagcagaggcaggagaaaatgagtgaccataaacccctcctcacagccatcagcccaggaagagggtactggcgaagacagctggatcacatctctgctcacctcaggtgttatgctcagaacaaccctgaattccgggccttgattgcagaacccaggatgggaaagcttatctctgctactgtccacgaagatggttgtgaagttagcatcagactgaattatagtcaagtctcaaacaagaacctttacctgaacaaggcagtgaatttcagcgatcaccttctgaccagtgctgcccaaggtgatggggggctgtgcggcaccaaggccccgctggggtgaatgactacagccagaatacctcagatactattgaaaaccctcaaagggataaaaaatttccagaaccaaaaacttttcaag

SEQ ID NO: 32899 - DNA, 364 bp, Homo Sapiens
gggttttctactatgtatacaccgattgtctcggtgcctttttccttttgtataattgtattacatacagaaattgctgacctctgtgaaaacagtgtaaaaaaagttaaaattattattccgatgagattttaatggcagtttaattttccagagaataaattttgtgtgggttaaaagttatttttcttcacctttatgtaaaaaatctgtttacgttttagtactcacatggaatgggtaaacatctgacttcattgatgatgatacataaacatcagtcctaattcttgtcattgacaaataaatgttaatatgactgttacacaaaataaaataatgtcaattacataaggaaatatcg

SEQ ID NO: 32900 - DNA, 807 bp, Homo Sapiens
ggacacgggacaaggagaaaccaagaggccaagcttgagcctggcggaaatcacaagatctgggctgcagctgtgggagggtggctggtgctcttgcccgtctgcgtttcttacatctggaatattccaagtgctcaagccagttagcagaggagtttcagacaggcttgaggggaaggggagaagaaaggtctgttctaaggaaaataattctcttgcttccactttacagatatggtctgttgaaaattctctccctctctcttctttttcactcaacatcagagcagaacatgctgccttgtctgaactgagaatgagacctggggtctatttctggttctgccaactgactcctgggtgacctcagtcacttcctctcttagagcctcaaagttcccctctctaaaaagaaccttagaatattcttacaaccagaaatagagcccaaaaacatagaatatgtaatagacacaactcttaatttctacagtctaatcccacatggactggattcagtgatgggcagatatggtacaagaatattccctggtcatcttcatcctggcaaagacgtagccaagtataacagttttctgctctgactttctctgatttccccaaagcctgaggataaactccttctagttacatccaaaacctggtggagggggagatcctggggaagaaaaaaggtgggggcttgtcgccatattagaaatggaatttccccctcccgggaaaactacccttcgtggaatgaaatcaaaaggcacgggcccatcccttggttgagattgcaccttg

SEQ ID NO: 32901 - DNA, 797 bp, Homo Sapiens
gggatcgatgatgacttccacatatacattccttggaaagctgaacaaaatgagtgaaaactctataccgtcatcctcgtcgaactgaggtccagcacattactccaacaggggctagacagagagggccaacatccgttttttgacatgggttataccaaggcatccgttcaggcttaggatggggtcttttatgggtgatgggggtcacaggagagtggtggctcccatgtataggaaatttcttgtttgaaggactgtcagtgagggtgggtaacacatgcattgtctgcaggactaggtgaatgtccatgtggcctagcaagagttagctggtagcccgcctctggttgccaatttgttcttgagtccttgttctgagttcctggaaggaaacagatttgtctggttgggaggagaatacaaggccacatctttgtcgtttgttggctaactttgtccttggttgaggacattagagttttggtcaccaggcatagcctatgtgcctgtgtgcccgtgttgtatcccatgtgtttgggggacatgtacattgcatgaactagtgagctcctgctcattgcttctgatacccaaggagtccctggcttatcctaaacccaatataggttaaagccttttctcattaggggccccagggtcccaagggcttttgtgagtatcattggtaagtattggaaaccacgaatgttgagaaggaatgctgaaacatggctcttttagtggggaagaacgtaacttctgaagggctccctgaccccccagaatgaagcctc

SEQ ID NO: 32902 - DNA, 812 bp, Homo Sapiens
ggggagcatttggggttggggttagggcagaggaactaggaagagaaaaggggactgtcctagtccattttgtgttgctataacagaatacctgagggtgaataatttataaagaaaaaagggctatttggctcacaattctgatggccagaaagctcaagattgggcatctgttgaggacgtcaggctgctttcacttatggtggaggcaagggggagctggcttgtgcatagatcacaaggactggctgaaatcagtgggaacccgtatggctgactgcaatccgcacagaacgagcttgctgatgtcacagccctgaattttccaccttgctgtttcatactaccgccacccaaatttgcacatgccaaccccacgaaagaacctttgggagaataaccgggacattcatttaagggacttttctagaactttcccccctttcctttcccacccaattcaccccggctaattccccaaaaatccttccccccctaaaacccttttttctaattaaaaggtaattggccctttaagaacccttccaaagaaccagaccttgcatttttgaaccttgggattttccccggtaaacccctcccagggggggcccagaccttccccaaaataaaaccctttttcccttttctttccccgcaagtcataacaaatcccgctccgcgattgacagaccctcacaaactctgttttcgggctcccagccttctcgaggccccccttccaaagaaaaatccttttatttcatgagcccgctttccgcttcctctcgggtcgcctccacggggccccc

SEQ ID NO: 32903 - DNA, 537 bp, Homo Sapiens
ggaagcagggagatgattcttacatgtcatctcttaaatgatgaaccatgacaaaaacaggtggcagtccagatttaagatgtttgactggagggttctatgtgggaaaaattatatacatttcctaccttctttcataacactcctccccagggctcgcttcagccatgctggtcttctttttcctcttacaactcacaaagctctttttgcctctaaggcgttcaaagtggctggtccttctatctcagtggctttcaaacattttttgacctcactgtagtaagaaatacacttcacattgtgactcatttaggcatgcatgcatacatatgtatgagaatatacacaggtcacatgtgtataaatatatgtataactgaaacaaaagttttccttcatgtgatgtatcctaatagtttcttcaattgtggtcccagctcactaaatggatttcgtgtgtcccactgcagtaaggcaagggcctttaccttgaaaaaaaccgggcttaacataaaatggccttttcccaaaatc

SEQ ID NO: 32904 - DNA, 740 bp, Homo Sapiens
ggttcctcaccataagctttggggaaaattcttggcttttttgctgggggagagagcagtgcccagggaagattggctgatctcagagctggagggtttatgcgggactggccagccccttcagctgagtgggacagcaacacagtgggtggtaaggggcttcataagatgtacaagatgagggagaggcccctccagccaaccctgtgtctaaagagtcaggtaacgaagaactttccagagacagctgtgagtccgtctggcttaaggggttgtacaggtgtctgagaatggggcctgaaggtgcagggcctgcaggctgccctgtttggaaggttcctgtccttctgtcttggtagaaaatggcagctagccttgtaaagggcctccttgtgtaacgagatagaccatgtagccccagatgcccccatggcttcacttccctcttgggggtctctcaatatatgtctagtgccaccactattggtgggaaagtttccttctggaataaccttggggtggggggatggggttttattttaataaaaaaagaatgtctcaaccgacaaaacaacaaaggccaaaacgccatagagacaacagaacaacgacacgaaccaagaaaactgggggggccgccccggccctaaaaaacctttctaaaaaccatcttttggcgccccgggcccccctaggaaacagaaaaatgggcacaaaccctgtccccaaaggaaaatcga

SEQ ID NO: 32905 - DNA, 772 bp, Homo Sapiens
gggacctaaaatctatatataaagactttctgaagaactctgtattatagcaataccaaacgagtgctgtgtgtgcaaacagtctggcgttgctttttatgttgatatttatcctagaacactgaaagagaatatgccagtgataactcactttacttcagtcatttcaacacagaaaatgcttctctagcatttttcttttgtagtgttaacattttgaaattcatgtttcagaggcttcatcatcacagaatttactcttgctccatgaaaaaaaattaaataccttcagaggaatatttaagttgtaaactatgaaacttgagaaatcctcttgagataaaaggctgccaaatccagtattataaagtccatggtcatatgtgcctgtgcattaaaggaataccagatctatgcagtatacatttttcaggctgaaattcaaggggaatcattctgattattcttactacaaatggagatggctattatgaaacagcatgagcatgagccttttatcttttatacttagtgatatactttgcttgaaaatcactcaccaaagtagttcacatgatgtgtatcatatttgaagtgtggtttttctcaaaatccttgactttaaagagctcatttccggaacaaaaggtttgctccggggaaaaatccaatccctgccaggaatccttccttttcggaactatttttggaaaaatggaatttggttcactttctcctcaaaccaagcaagggtttttaaaggcggccctgg

SEQ ID NO: 32906 - DNA, 620 bp, Homo Sapiens
ggcaggcactgtgcaggggagggaggggctggaccgccactgctgcgagggaagaatcagaagagctgcctgtggctggctgagaagggcaaggtggatggctcttcattcctggaaggctgaagcagccagaggcagtgattcacctctttaatgtctaatcagggagagatacaggagtgaggtgggttttattttcatttttgttttaacaagttcccactcttatcttaattctcaaaaatgatctggcctcatctatagaactggctgagttggggaatcatttaaaatttgggattttctgtacaagtcaagaacatatgtgaaagctaaaaaagtaatggaggcagggggactgctcccagctcccttctgccatttacacaaaatatttgaaaacatgtctgtaaataacgttgtggaactgagatattgagtatctaatcatgtaaaggaccctcagatgggacaggctattggacaactttcctggttcatgaagtggaatttcctttttgagtagtttcttgcatggtgtattccaataggtcaaacccagacctactgtttgcaaacaggccatctgtagagaatacaatctctggactgccccccga

SEQ ID NO: 32907 - DNA, 800 bp, Homo Sapiens
ggaaacatataaacctttgaccaaaatctctattactatgcaattaaacatgaaagaggaattaaataaaatgttagttacttctgacctagttcagcagaaaataatcttgttttcttcacaatgcacattagcacttaagccacgagagacaggaatctaaaaagtaaagcgatactaaaaataaccttattgaatacgtggggaagatttgataaaagtactaatttggttcttaaagataatggggttgttattgagattcattgattaaaaggaacaaatttaagcaattataaaactgtaaatttggagaatttccattatattttgctagtaaaattaacctaatctagatagattaagagagaaattccttgaaatacttgaagagagtcataggttaggttagattaacctaattttacccaagtgacagatcttttgccatatttgcctgtggccaaagaagacttggtttacttagtctgttttgtgatctttgaaactttaatgtaacttctgaaccagcttttgctatttaggggaggtcagatgggacactcttgtgtaggcatccccacatcatctttatataggctttcactagattttacagttggagtcttgactccttgctaggaacatcacagaaggttccaacaaagagagcattcctccttacctaacatctcttctttcaggataatgatcaggtcgagtgggatttgtcttttttttcctttccccctctccattgaagttacaagggtcaccagttgaaaatgacgggttacata

SEQ ID NO: 32908 - DNA, 407 bp, Homo Sapiens
ggactgagaacccgggccagagacctgcaaacaatgctcaattaatatttgccctggccggtgaacccagcagaggctgtgcacggaagcccagagcacgatgtcttgttagaatgctacctcctggaacccagctgccaggctctgagaagctcaagtcacatggggaggccacgtgtaggtgacctggtcaacagtctcagccaaagccaactctcaagtagtcccctgtgggtgccagacatgtagatcaagaaacttctggttgatttcaactgccagctgcttgcattacccccagctgaggtcccagatgtggtgaaaaagcagccaccctccctgtgctggttggaattccctactcagagaattcatgtgcctaataaaatggtttttgtttaaggcca

SEQ ID NO: 32909 - DNA, 799 bp, Homo Sapiens
ggattgtagtcccatttcttagtgtttgaaaggtgtgtcagtgagtcggccatgtctccatgtgtttcagacctgttcatcttattttatgatggtatatttcataagtaatattcccttacatgcaatggagctgattaaaattaatccatttcaatttctccatattggaacttcctcagctaccagatttctggtttggagaagtgctggaaagatttcaaagcctattcagttgtgtatgtggggatacgacagcaactgtgataccttgtagaatatgagtgatatgcaagctgtgttttttaattgttttaaaatgtaaattatggttatgctaaagtgaaaacctagaggaagctaatgattttatatactttgcacgaccaaatatggtcgtagtatgacgagttttatacattgccagagagttctgcctcctctgaaataacattcgcactgtagattgcatttcggcttttcctcctttcacattctttttgctttacacttcacgtcttcgcacctgccctacctcccatcctttcaaagaggtttctttcacgttccagaattcagattgttctgtgatttcttttacatcagtctacccatttctgcaagcagcccttgaagccctttgtgttgattccaaagtgtttggcaaagaaattgccagttggaacccctgggtagtggggggtggttccttcaaaaaaacccggggggaaccccctttccacaaaggttttcaggggaatggaaaaagggctttaggaaaaaaaccccccatttttcc

SEQ ID NO: 32910 - DNA, 520 bp, Homo Sapiens
ggaccatgagatgagcgacagattttttttcctggatgcagaatccagctgtaggggaatctcccatcccaatgccctcacacaagcgcacacacagagcttagatgaataacaacacagagactcagtgggacagacaagaagcaccagcacctaaaaatgaagagacaatgcaaatgaatgacctttgggtttctgaatggaacctgcctttttctgtttaaaaaatattgttcaccctgttttaatggcacggaataaaaatggcactgtatcttgtaattttgagatattaaatgtgaaacataaaacaaggcgttataaatcagctggagactaattaagatacttagactgtcatccaaaaacattccacagaatgtaataaaatgagtgggtggttggttcttttttaataactgaaccctgtaggaagattttatttctttaaactatcagccaaatatatccaggactgactggaacattgaaaatacgctttttacattatgttaaggtt

SEQ ID NO: 32911 - DNA, 495 bp, Homo Sapiens
gggtataaatcgtgtttgcaaaatgtgttatgatgtgtttatattctaaaactattacagagctatgtaaagggacttaggagaaaatgctgaatgtaagatggtcccatttcaatttccaccatgggagagcctaaaaataaattatgacatttagtatctaaggttagaaaaccacgcccacatgctaaaatgggtgttgaaaactaggttacttataatgcaaggaatcaggaaactttagttatttatagtataatcaccattatctgtttaaaggatccatttagttaaaatcgggcactctatattcattaaggtttatgaattaaaaagaaagctttatgtagttatgcatgtcagtttgctatttaaaatgtgtgacagtgtttgtcatattaagagtgaatttggcaggaaattccaaaaatggacattgtgctttttaaactaaaaacttgtaagaacattaatggaaataatccctttggccaa

SEQ ID NO: 32912 - DNA, 824 bp, Homo Sapiens
gggagaaaaaacaaaacatattaatggtattgaaatgtgttagtagtctggctgtgtgcccaaaattctgtttcgcagcaaaagtgaagacctgtatgtaaagaaagtataacaattatttctttgtattttaggggctttaaccggaacatcgtctagctggtgttaggaatgtttgcttaatttccagacttttttttaaaaacacatcgtgggttttttgaggctccaacctgattagtgcatggtcagccctcaatgaaggctgaggcatctctgactgacgtgtttttgtttggttttgctttttaaaatcatgtatttgctacaaagcattgtacttgtctcaatgggaatggtgtaacaaaaaaaaggccttatgtgatctgtatcctagtttaatacacgaatcctggaaaaacacccctcttttcccccactataatttaaccttgtccggcccccccttgggccccttcgaaaaaattcttctccctaaaaacccatctccttttttgcccccccacccgggtccccaaattacgggctaatgtcggaccccctggtttcccccaacctttcgctctcccctttaagggaaaaatttccttgggcctccattaaaacaaaggggcgccttggggaatttttccccccccaaattaaaaacaaaacaccgccccgggggcgggcaacacccccgcaaaccccttttcttgtaaaacccaaattcccccaaaacggggaaattttttggagaaggggccaatttacacggggggacctcttatccccacacggggaattttccaacccccctgcga

SEQ ID NO: 32913 - DNA, 817 bp, Homo Sapiens
ggggtgggcttaggaagcagagcctggggcatctccaccatggcctggacccctctcctcctccagcttctcaccctctgctcaggagactgcctgtggaatacctaagtgattattggagacacgtgggatgacttttctcttatattttaacattgtggggtgggtaatgaacccagactcacctctctgtgcctgcctcctgtgttccagggtccagggcacagtctacactgacccaggaagtctcggtgtcagggaccgtgaggcagaaggtcaccctctcctccactggaaacagcaacaatcttagacattatagtgtggactggtcccaacaggtttctcgcggcacttccaaaagggtgatgtttggaagttctctaccctcagggatccctcacctcttctctggttcagagtctgggaccacagcctccctgactgtttcggacccctaccctgaggaccacgctgattattattgcacaccctgggaccattcctcgatactcacagtttttccgcggagggaccaaacttgccgtcctgcctcagcccaaggctgccccctcgggtaatctgttcccccccctctccgcaggacttctagccaaccagggcccccccggcagcgccttcctaagtgaactttctacccgggccccccttgtataatcgcgccccggataagggcacaccaccaatacctccgttcacaaggccggggcgaccgggaagaaaccaccccccacgccttgcctaagcaaaaggccaaacaacccccgggtcccgccccgcgcatattaaacttccc

SEQ ID NO: 32914 - DNA, 586 bp, Homo Sapiens
aattttccctttttgtctccttaattacctaggcttgtttcccatatgagtagactctcccttagctgggaaagcctgacgaacgccatctggccccttgatttacaagacattaagggctacttacccaacccccttcctcaaagagttaacctgcgtaagcagatcctcagcatttcaaaggagcccaattagctgataaggtactggaacaaacaatgtacgaagttcccaggattttgctcaaaagcataacaacataaagccttgagtctgtgtctggcatagcatccatatctaactcttatgaaggatttagagcccggcacctggttccgttgctttttttgtaaccatttgtcttttaaattgtttatttctctgtaaccatttgttttttgattcttgcatgttttttacttctgtagaatttattggatgtggagctccgccccccctttccaaacccaaggtataaaaaggtaaatccagggcccccttccctccgggggcccgagaagaaatttttgggaaaggtcaaagccctttctttcttgggctggccggggccttaaaatttaaaggg

SEQ ID NO: 32915 - DNA, 496 bp, Homo Sapiens
ggggagagctaacatgcccaaagttacagagctaatgactgaaatctgcctacctggaaagcccaacaggctctcgacaccataggcctctctcattgcagcagccttttcctcacaggaacagtctgataccagcatcatgctgccaccatccatgtccacagcacagaaaatgttacagtgtaaatatctactctggatgacctgggctaggatattatttctcaccttcatattttttgactgtttagtttttcagattcaaaggtcaaagagagagttttttcccatcctgctggtccctgggctgcaaggatccagttcacccaaagtaatagatctaaagaggcgaagtcttgtctaaggtcacccaccaataaaacaaacaactatatgcctaattttgcacgtatcaccccatgaggatatgctttggcaagttcctgagtctataaacttagatacctcttccaaaacgactagaactctatggacc

SEQ ID NO: 32916 - DNA, 681 bp, Homo Sapiens
ggattcttacaattgttagtgttttgaagtagtagacaaataacaactggattattctaagaaactgagggaaagtgtgctgaaccttttgtacatagttaattttcacagcaatcttttgaggaaggaactctcatcattcccatgttatagatgaggaagtggaagcacagggggattaagtgttgtgcctagaggtagtgagtggtcaaggcaggattccagagcccatgcttccagggtgttgagatatttctgcagcctcctccatattttaccatcacatgtttataggtaatagcaggcaacagaattgattcaggccaaatttaaaaggtactttcaaaagaatgaaatgttcatcatcacagtgatgctggaggtctatctgctaagatgcgattgctctgtagcacccagagatggatttgagggctgggctggggaaacccagggactttgggagacatatgataagggctggacctttacgccggttcggagataagattggtgcggataaggatatatttgggaatggaagacatgggatggaaaatggcccaggggagtttagggacccgtagggaccggtgttggaagggggaaggggtgtttgggaccgtatttagggggggaaaaggatttaaaaatttgtaaaacccataggggcaaaacttt

SEQ ID NO: 32917 - DNA, 813 bp, Homo Sapiens
ggggggggtcggagtaggtccagcaggagtgaccccccggggctgtgggatctgaaactttttcttctctactgcttgttctcccttcctccatccctcaccccgaagcgggaagcagctttctcttcccagcttccatccagtctctgagtagaccagtcgcagcttagatgctgggatcgcctcagaacacatttctttgcccttcacggccactaccggtattggggtatgcgagtctcagggccgttcgttgctcacaggtcgagctggtctggactctgttcgaccacgaatcatgactccttcctgccagttatgtcccctccgcacccttgcccagccattttaccaggcctctccacattgcgctgccccacggtaagtcgcaggacaagcccggccaaaggaattgcctccagctctgagtcccctccctactgtggcaacccactccagtgccagccctccccacactgggtgtctaatttttctagcttgccaccctttactttcccctccgctgcccatccttttccctctggggcaaaggttatcattttacggggccttttctcaatccctttattggtggaaactttttcaacctttcattccaagaaaaaagggctgatggtccccgcaaaacaaaccaattttgaataggccaaaaatccgccttgaaaaatgccttaatcccttaaataaacatccctggttgcgcaaaaataattagaggcccccttatttgcctgaaaagccttccgcggggatttaacgcatttggtccaaggggggcctttccaaggggta

SEQ ID NO: 32918 - DNA, 823 bp, Homo Sapiens
gggggaaaaccagcatttttcctccatcctgatttgtagaggcacaccggatgaattggactgagctgctttggccaggtatggtggccatttaaagaccaatgcattttgtcagagttaaccacatgaaagataatttatgaaacaaaacaggcaatgctgtttcctctggcaagcctggtgtcctgtatccattggagaacccacggaagtacaacagcatgcatggcttttaagacacggaagacatttaaaagccagtttacgtacagaagcatggttttagattaactgcctgttggtacagctagaaacattgcagccctatcgcttatttatcttgcatgttgctctgctttgctatgaaaaatatcgttttatgataaaacttgttgaattttgatatgtattcggttatacctcttagggaaaataatagaaattaaagtgagagaaagtgctatgtatattaggctttcagattttatagatataggcttaagggagggtggaggttcttttttaaagttgaatgactacttaaatttgttgatgtgaaatttaagttttaaagattattaattaactccttcctctttgtcttttgccatttacctttccacaaatgtcccgccctaatcattttacttaattctcattcttggaataatttttcaatcacctttcttaccccaccaatattttacacctcgtcctcccttttttaccccggtttttttgaacggcaaaatcctttccccatttaccatttcctttggagaaatttttcaatttgggtttatttttggtcaccccttccaag

SEQ ID NO: 32919 - DNA, 798 bp, Homo Sapiens
ggtgaacagaagtgcacaggctacttgtacagagaaaaaattaatactcaaaggaaatcttcattttttagattgactttgggaatttgaattttcatcagtgcaaatataaatttctctatcctgctctgaggctaattggtaccatattttccctttgtgtcttgtgactctgccacatcccatctcatcctggcctctgagtcaagaacccagtgaactgactttctagttctagaagttccgctgcaaggccaggaaagcttgagaaaggtattgtggaagaagcaaaggtagacccccatcactcacctttgtctgcatccctgggcctgtgaatgatgacagcacctgacattctgcaccagctacctctgcctccatggcagagaaaaggccataagaacagtggaagaggagcatggactcagacttcaaggaagaagccatttccccaggtccttccttctgcatctcaccacccctagttacaaataactccattgaacagcatctattcagaaactatgccgaataaaaagattggtggaagggctcatgtggttagcaactatgaaacagaaataggacactcagttacaaacattatctcctttagtttttcagaaaatggatccctgatttcattcatttcccgcttgaaagccagccatattactctagtccctaccaaactgctctagaaaggcattttccattttgtttgggatattttagacgcgcagacctcaggaaagttcccctttaaacttccggctttccggatgtaagttttca

SEQ ID NO: 32920 - DNA, 404 bp, Homo Sapiens
ggtataccaagaaattaaccatttcattggcatttagtatattcataatgttgtgtgaccatcccctctatcttgttccaaaacatttccatcacttcaaagtaaaacaccttaaacactaagcagtttctcctaatttccctctccccccagtgcctgtcaacctccagtatgcattatatctatagattttatctatcctgaatatctcatgtaaatggaatcatatatgacctttttgtgacagggtattattactctgttgctcaggctagagtgcagtgactttttgtgtctggttctttcccttagcataatattttcaaggtttgtccatgttgtaacatgtatcagtactttattctttttgttaataggcgaataatattccactgtatgtatgt

SEQ ID NO: 32921 - DNA, 463 bp, Homo Sapiens
tcgtaccatccagtactggctatgtcttgggtctatagaagctcatgttggctgcagcaggatactgaggggaatgtgcacccacacactttcctcttactccgaggaagggcatggaatcctgtatggcattgacatgctgggcaagacatgggcacagtcaagctttgtttcttaccctcttggtgaagcagaataagacctttgactgggagaaaatgagtaagtggtgatgccacagaaacctgaggctcatttatttgggtgagatgaatagtttgcatgtatcaaatgaggctcaatcactagttcttatgaggtatgactgtccacacacgcagcaagagtttcgttcttaaccttgtaccttgctgctggatgagtctgtttattcattacgttctcccaaggcaaaggaaagaaccagcacccaggaatgacaaatgttttcttaaggtgttga

SEQ ID NO: 32922 - DNA, 371 bp, Homo Sapiens
tgagtctcacgctctattacaggagccgcgcagctcaggctagagtcgtgctacatgagggactcgagtgtaagggcctgatgaagctccagaaccgagggagggagccacagtgtgggaggaaggagcctgggaaaatcgcctctggatgcagatctggggcctctattcccctgcgcactgaggcctctcccggcccagccacaagcccttgctccaggccctgcctagaaaggcaaatgctttgaaagttttggtgttggaccagccagccatgcgctgagagcttctctgaggccttcatcagctgccagctcagcctggctgcttggctcctgctgccccagcttcccacgggccacctccaacca

SEQ ID NO: 32923 - DNA, 429 bp, Homo Sapiens
tagagacacaggctgcttaacagtatgacttagaatgcagaagcacggccttctggtgatatcctgacctactccagcaccttcagagctactcagagggttagatctcagcaaataactgggaaatgcaaccaccttgaagtcggaaagaaagtaataatgtatccggaaagaaagcaggtaggaaaacaccagtgtataccaagatcttagatagattggaatttggggattcatatcattggctgctttacagccacatgtgctcacctttgtacccccgcttaccctgccccaccccatgaggttaatgcttcactcagaacggactggtcaacgaagtgggacacttccaatgaaaggaagcattaagttgagctctccctctttcctttgtctgcatgtctggtaaacacaacttactgcctg

SEQ ID NO: 32924 - DNA, 375 bp, Homo Sapiens
gagaggaaggatctggtgggagagggacctaacctatgtctccccctttatgcaacctgaggagcgagagagggttatgggacacgtacagtggcctggagcaggagctgggcaccttaagagagacgctggagtacctgctgcaccttggttctccccaggtaaatcgctgcttggagaccccaagacccacccccaactccaagtactgcctggaaatccttttagcatttaatcttcgcccacagaatcgaggccccgcccagttgacccttagcctcctttctgtcctttcaatctaagccccttattttagttaagaccatgccctttggggtatttttttaacttctctcattaaaattttaattaagc

SEQ ID NO: 32925 - DNA, 405 bp, Homo Sapiens
ctcagttggggtgggctgcagggaggtttgaggaacggtgagaataacagcgtgactaaggcacagaaggctgagtgatgccctgcagtgcttgtgtaccggttggaggccagctgggcaaagaaggaacccttcgttagagaatgggaacatgccttaggatatagaactggcaaatctgagatagtttgaagtgagaatactagaagtgttcccaccaaacaaggtgtgtcttggtgcctgctgtatcccaggctccgtgaggtgccggagctcagcactgaacaaacagagcttcctatgcttgcggaaatgcattacgttgggggaagggatttttctgctgactctggctattaatagtaacaatcaaaaaaagaaatgaggtaaattgatagaacaggc

SEQ ID NO: 32926 - DNA, 449 bp, Homo Sapiens
tcccggactgctaggggaaaggtgtgaacgcacaggtttgcatgcctaaaattataacacttttttattgcaaaggttcttttcagcttttttcttttcaagtaaatggagatgtgtcttacttctgtttctgttgtgactgcctaggggaaatagttgccagcagtggaaggacatccaaaagatatgtatggctgagtattattgataatgtgtctgtatttacattctttctttcctcccttactagtctgattcaagtgccattttgtcattaacttttttctagttttccctaagaagaaataaatagtgtgaccactgctgttaatgtctccattagggcatttacttcaaaagtccttgtatccagtcagttttctatgaaagtgtatgggggccagaagttgttaacctggttcactagaagctaatgcattgattattta

SEQ ID NO: 32927 - DNA, 379 bp, Homo Sapiens
acgtctactttaattcacaatgagaactctgaaaattaaggaaggcctctacagacaatagattctggaaatactaaaggaaataccagtcaacttttattttaaacttttatttcaccaacctcgaagacaaggatttggggccaatttgagaggaccacccataataaaatgtacagttatattgcagggcactctttatcatttcaaggcacactctgttttatcccaaatgactataagttcaaggtcacagtgatgatatatattcaattttggtctggtttctcatgggtatgttgttatatttatagccagtcataagcttcagaaactataatacaatcacttcaaaataatatgtcatttttatattttt

SEQ ID NO: 32928 - DNA, 504 bp, Homo Sapiens
cggtacctcggctctacttgtctgacacaagaaatatacattctaaatattttttgagcagtttttgttagaagatttgcatattggtgtctgtattagagaggattagtattgaggtttatgactaggtgaatttatttagtgatcatgataaagactttcaatttaggattatgtatcatttaggacaggtgtcttctgcaggtggtactaagggagactctaactatggatctgcaaaatcatttaagagtttttcttaggtgctcatggctaacagtatttagttgtgttctttttaaccattaatgaaattatgcttctcatagcttcagatgctttgagattcttaacccttctttcatagcaaatcatataagttcattcatacagtccatttggcaaacacttatggaaccaggcagttactaatcattgaagatgcagagaggtacaagactgttcctaactcaacctgagtgggggagacaaggtagagccgag

SEQ ID NO: 32929 - DNA, 555 bp, Homo Sapiens
gctggaccccccgactagcccgacagaacagaaccacgagtgggcagaagaggaaaggaaagccgcaggcatcacctccaggatctttaccttggccgcttggtcaaacagagctcaagatttaactagcggcgcccagggcccatgctggctggtgggccaccggctggctcctggctgggcgcccggccgagatgcccacgcgggactccgcagtggggcctgtcgggctagtcggtggcccgacgagccggaatgtgcccttatagcagtagcctcccagatctcatctgaatgtgatccatatttcctggttctccccgactcaactgatgcgtgcctcccttaaactttgtgtctcacttgtttccacctgcacagctaagacccctcacttctctggggtaaggtggctcgggtctcacattgtcctgccactccccgccccaccttctcttctcagcacatcacgtgcctcagctcctggttcctaagacctttctttccacagatctcgaccgttatactcacacccacacataccagcaaagtctt

SEQ ID NO: 32930 - DNA, 462 bp, Homo Sapiens
cctgtcagtgcgtctggggaacagcttgggagctgggctatatgtgtgtatattccgtatgatgaaagaattttagatacaattaattagaaaaaaatttccctagctgtccctcccccaacctatgttaagagtacaaatagccagtggagcagcagcagagcactgcattaatggagacctgggcctggcatcgtgctggggtctcagaagcacatggccattcctgtcttcatttctaaaagactgtaaaaccatcccaaaatttggcaccatggggactataggcaattcgaactcgagctagctagggagtctaggaagccttgggtgacaattccaaagctttggcagtgctgcttagggaagcttcacatgcaaacatctcaaatcaatttccctaatggctagattcagcattcccaggtccctggggagcagccagtgtaccatagggcaccc

SEQ ID NO: 32931 - DNA, 430 bp, Homo Sapiens
atgcggtgggggccctgatccacacagcccaacaagtcactttctagtcgaaggcctgcttgcctgtgcatgtgtgggaccgtgggggaaggtggggagtgaagtggtcagaacgtgcccacaccccttcctacatacagcccttccagagcccagctgggctgctgccaaactaggacggggccattctctgtcgtgcggttgtcagatgcacacacttagaaatgttctgagcataggcacctgccacggaatcaccttcgcaaattcttcatttaaatttatgcctctggtagcataagggagaagagatctgccttgggttctaactgtcagtcatcctcacgcccaggccggggttagaggtggcgtcccttttctctggctcaggcacccctggcctagtggggttactggtggcgttccccta

SEQ ID NO: 32932 - DNA, 360 bp, Homo Sapiens
ttagtggggggacgttggcactttggtggtatcgttgcagatggccagggtcccctgcgacacggcgtctgcagcacatggctcaacagcctgaagccccaagacccagtgccctgctttgtgcggaagtaagcaccccttccactctgtcccctgtggggccgccgacccctgggagttccgggaggaaagggagggatctggggtttaggagacgctcggagccccttggcccataaagaaggcactggggtcacactggtgtggctgcctgtagcagggacagcgatgacaggtgggtctcaagagtccagtgagcttggcccttttacagaaggacctgggggatggagcacccat

SEQ ID NO: 32933 - DNA, 517 bp, Homo Sapiens
ttccgagatgaacacggttatgggatacagagtgagggtacagatttgaggctaccattcacagagcagggctagctattctagaaacaatagatgtcattagactaataatgacatgatggtttgatattggtgttctaaacctccagaggttactaactttgttggatttcagtggtggacaccagcaatcttaggaggtctagcagcaagactggttcttgccaagttagtttgatgtaagtaagttagtgctgatcggctggaataagcatacaaccgctctgtgtgcccccttctttcccctctgcagggtgtgagaatggaaaaagagaattacacttctgatacactaaatattcgctaacctgtggtggggatgcttatataggacttttagagcgcaaacttgtcactatcaactgtcagttttatggtgaccagggttaaactttaaagttggactgttaacatgcttgcaacatggtgaaccaaacgggggatggagcacccatgg

SEQ ID NO: 32934 - DNA, 401 bp, Homo Sapiens
ttggtatcgagatccaagtgagggacaacagtcgaaggactggtgagctgtgcgatggcagttttgttaacatactccagtcttaaaataaaggcactttaattgctaattcgggagagctgagagcagttgttgatggcgtgaaaaaacggagccccacactgcaagaggctgagcagcatcgttttctccagggtgagcagaccgctcctgggtgagatgggcctggcagcattttacggccttctcctgaattggtggcccagctctgcctggctggtctggtgatgggaactgtcattggttcagttgacaccaccatctccccagttccacgttgaacaggatgcacggccataggagtcaaaagggccttcattgctgatgtgaaattcaagtta

SEQ ID NO: 32935 - DNA, 427 bp, Homo Sapiens
aggatcaccggtgagaggtccagatagaagaaaggaaatgtgttagcagtcctcaaatatttgtggaagcagcattagacattttattctgtatggctccaatgagtgcaaatgtagagaaacagatgtcgattcaacataaagaattttccaacataggggctgtctagagggattgggtggctcagccatttgggtatgggacaaattctctgtccactgggggctgggtaaccctgtggcaggtatgcgagctctgcatgtaagacaatgaatgacctgcaaggtcttttcccatctgatgtaaaataaggctccaagatgaactggaacttggccagggtgatcctctactgaggggacaaattcacagctcagtcttccctagttatgtccctcagcccagaacccttggtacaacatgctg

SEQ ID NO: 32936 - DNA, 379 bp, Homo Sapiens
ggtatctagaggagctttcgagggtctgtaacagaggcgtatccctaaatgggaagaaaaaagtttttaaaattaaatccatcgtggacatttccagcagatgacaaacagaatctgcagccggaaaactgcagcgtagtgccgcgctgcccagtgtatcccttggctaagagcgcccctctccgtcattaacccaccatctatggaaatagtaacacaaccgggaatccagcggagtcctcacagccaattacatgacaagatattgtcacatcatcgtggcctgcttcgccacaggaggcgctagggcaacaggtatttgtgcatatcccattcatttattcattcagccactaaaggcacagaccatgcacaggca

SEQ ID NO: 32937 - DNA, 430 bp, Homo Sapiens
gacggctcgttgaggtacatgggatctaagacaggaggaggttcaaagaaactgcgcagatctgaagcagcagcaccccaggccgcacaagcagcacacaccggggccctctgtcagctgctgtgtttaatgaacgaggaggaggtggtgtggcttggtgggggacaccaggaggaaatgagatcgaagggttggagcatgggtctgtggaccatgggaaccctggaagcactcggaaggatggggcctggtggaggaggactgggaaagccgggaagctgggtcaaggtgtggggtgtagaggcgccctcagatgtccacacggtccattggcctccggggtcctctgctcctgttctccctcaagccatgggagcttggcaacggcaagcctgcacgagctgtgtgctgccagagtgtcagaggtcct

SEQ ID NO: 32938 - DNA, 384 bp, Homo Sapiens
acctggatgaatgtggtgtatcaggaggaagagaggttagggttgagaagactttaagaaagtcccgatgtaggagtcccacgttcctaggttccctcagcagagtggcaggtgcctaggaaggggaggaagagtgggaggaagtggggagtgaggctgagcaggaccccctaggccagcacagtgacaggcagggaggctgagggctggtggggtctcagactgtcctgggggcctggggctgacgtgtgccccagccagctgtcctcatccagtgctcccatgtcccccaggccacagctgagaccgtgtatgacatcctgtccccggcagcccccgtctcccgctccctgcaggataagcgctctgcgcggaggctgcgca

SEQ ID NO: 32939 - DNA, 369 bp, Homo Sapiens
agatgttcacctgattcggaagatatggtcagtggggacttgatcagtgggcaccaggtcaatggaggagtggtcattagcgggcctcatcactcatcactgggaacctggtcaggagcagtcggccagtaactgggcctgctggccactatgtgacctcaggcaggggggttgtctgtggaggctccttgcctccatctgcagggaaagtgagttggggcaccctggagggtggctggaaagagaaggtgagaagatgtgttgaatccaatactgcttggcagacctacaactttacaaatgacctgtgttccacctaaaagagggtgccaggcctctcagcattatgcagtgacccccctcgtgccg

SEQ ID NO: 32940 - DNA, 368 bp, Homo Sapiens
ggtcgatctacaggatcttatggtccccctctgccacctgagactctttccccaaagtgcaacaccccagcgccccctgcctggagctccaggcccctttgcgcagtgcggtgtccagccaggcacaggcgccggccctggaccagggccagctttagtccacctggagcttcgtaagcttctccgtgtgttgacatcatttgtttctgggactttctgttaaaaagaaagttttaggaattgagtgttagcctcgtaagctttcttttttgcttccttaagcttaaaaaaatcatcctgtcacgttcattccctttttctgcattgaaatcagatcatcaaaattactgttgacccccctcgtgccg

SEQ ID NO: 32941 - DNA, 439 bp, Homo Sapiens
cgagggtagtctgacagacaccggtagctgctgcctggcttgtgattcctacacgatgcgtagcctgagactccaagcccatgctggatcctacctgtcagagccccaaggcagctcacagtgtgccaccatggagttggggcccctagaaggtggctacctggagcttcttaacagcgatgctgaccccgtgtgcctctaccacttctatgaccagatggacctggctggcgaagaagagattagagctctactacaaggtgggccctcctccctctggtctcttccggtatcccccacccctcagacttgctgtagagacggcaatcaggggaaatactggtccctgtcctcccgtcagcaaccacggacagctcccacgtctgatgggacgctctctgcagatggggatgatctcccagccctgacccccctcgtg

SEQ ID NO: 32942 - DNA, 361 bp, Homo Sapiens
tgaactgctgtacccagccagttctttactttaaaataggaaactttagatgttcattcattgccgttgatagttaaggtctgattcattaaaattcacaaagatgcttattttatgaattattcatcaatactcggcataagtacccgcgggaaaatataattaggacaaatctcttgaaaacgagtactccattcttagaaaagcatcaacaaaacccaggctgtttcctccccacgtgaccccttctccagggacctggccccaaagctccaattgtcaggatggggccagtgtggaccagcagcccctgagccctgaccagaccaaacacacccaaacctgagacccccctgtgccg

SEQ ID NO: 32943 - DNA, 413 bp, Homo Sapiens
ttttttttagaaaaaggggtttctctcatacatatggttctgcaacatttttgtattttagcaatacattgtgaacaactttgaaagtgaattcagacatcagcctccttttaaaaagctatactattcactggccagatttaccattctgctattaatgggttgtttcccaatgttctgtatccaccaacactgatgccataaatattctggcatgcaactcttcacacattaacatttgtagagtaaatattttaaagtgggtggggtggctggcccagggaccagcctgtaaacaccaaatctaattaccttctctcaggtcctccttggcctcaccctctacatttcatgacatagaggaccagctcctgccttctgaaactccttcctctcctggatctcattccact

SEQ ID NO: 32944 - DNA, 358 bp, Homo Sapiens
gggtgggagaatgtcttgagacccccccgttttcaaggggagacctaaggaacgggtggccccacccaggtctgcggcaggggagagtctccccgagcccgaccttggccaaacctcctggggtttggctccgggagagcaggccagactccggggtggagggcccttcctccatccttggcaaaggtgggacaaataagctctcctaaatttcacccagggatttctcggtatagatctacaaaaatttggggcaaggtggagacaaggttaacaagaacatatcccctctggctttaatgtgggaatataaaggaaaggctggagatgactcctaagtcaaaaaacatggggtgaa

SEQ ID NO: 32945 - DNA, 377 bp, Homo Sapiens
taatttggttttcttacaaaggttgacattttccaccacaggtgtaacactgttggcgaaaaaattcaaatttttcggggagcgggggaaggggtgaatgaaactgttttgcacaaggcgcagatcaatccgtcttttatctcttttgcccacaatttaagcaagtagatctgcagaagggatggaaggcctcagctttcagttctaaaagaacaagagcaaacggcgcagagacagccttggcaaatgtcattcattattaaagcagacagagttcccttatttgaaacagacccggccaatgtccaccaagaattcctggtcagcaccacccatgtccagaggggctacatcaaggaagggcaggcgtgatggct

SEQ ID NO: 32946 - DNA, 373 bp, Homo Sapiens
gcaagatcacattttattgctcacttttacttaaaatctcgcatctattaataaaaatagtgcaatacaaatattcagtgtaccagagtggtccacgacgccaccactgaggattggatgaactaggctaaaaggtacggataactggccaagaaacggacatctatgtgaaaatgaaactgggacagtcccggtcccaggtcatgccggagactaataacttcccaggcccgttcacgtgagggtaccaagaggccccaggagtggcctagacccaccccagaaagaccaccctgggtggcatgcccgtccagacaatgtaacgggatattctgcccttaaaattcagaggccaagtcttaatccacattta

SEQ ID NO: 32947 - DNA, 469 bp, Homo Sapiens
aagaaaaaagaaatattgtggcattatctaacaagttaaagacaaaaagaaatggacccatgggaaggctatacttagagaacgttagaagaaatatgctgagaacaagcaaatgagtgagctcccctgagtctgcaaatgcaaatgcagtgcattcagagaatttgacagtaatagaaatcacagaaatatatgtgataaaagtgtcttaataaattataatatccttccttaagaatcttgaagttagttgcagtccttgtggtcataataagtcaaaatttgagtggtggcttagaagttcttttctccttgtttgtaattgacacggccttattaaaaatggggcagcagagattttggggtaagtgataccacggagaggaagaagtaagaaaatatcctcaagttttagaccctgccctcctaactggcagaccttcagaggaaacatctacagatatgtaac

SEQ ID NO: 32948 - DNA, 509 bp, Homo Sapiens
gcatggaaagtctttatttgagccccttagctgatgtggaatcagaagagcaaaaaggtcatcttcagagtggcctgggctgggtccttttctctccaggatagaaaagtggtggtcactttatccctagtagacatgctgctgggctttatcgccccagcattcccatcccctccagagccccttgtcactccagaccagcgagtgtgggcctttatctggactctgcttcctccctggggacaccaggtcttggagcaagagaacttggcaggctctccccatggcagtcttattcctcctcctgttcctatgtggaactccccaggctgcaggtaaggggcaagaggtacgggattccttagctatttgcaaggttggggagggactactgctctttctcctaggagcctggcgaaggcatctgactcaagaagatagaattaccccaaccaacctcatcctgcctctgacactagggaagacccagaggcaacgagggtccaggt

SEQ ID NO: 32949 - DNA, 481 bp, Homo Sapiens
tgaaaccaaacaaaaaactaatactcatcacttttctaacaatacaattacacaaaattaccccatactggtccgggacaggggggggcccaacctattgccctagtctcacacgattccactatagataagtgcataacacttgtcattaatgcaaaaacgaattttaataattactctttagttcgatataaacattgccttaaatatgattccgacaccaactatgcagacatggctctggagagaagttcaaagcaccacacacctacggctcttcttcagatctagaggctccaccgcagccaatatttcttcgacaaaaacattctttaggcctatctgtattagtgcagaacactccacatacatgacagccctcatgccacgggccagcttttcagcagtctcagaagtaataggcatctgattgttcatggcaagattatcaaaagcagaggcgtcacctctgagatcaatt

SEQ ID NO: 32950 - DNA, 362 bp, Homo Sapiens
agagagtaaattatttaaactttatcaaatccttggtacatgaccttaatacaattaagtatttgttaaatacatacattttaaagaaacgtcatcatatccacacacctatgaggcacctgcccaggaccacagagccaatcaatcaggtgatgagtgattccaggccagcaggaaaccaccgcccactgacacagggactgcaccatccatccttggtttgcatggtgcctgccatgcttcctgtattactgttaaatacatggggcaggcctttggaggatcccaatgttttaaaagggcaatacgaatatgattctaatacataaaaagtatgagggcagcaagaatttagttacaaa

SEQ ID NO: 32951 - DNA, 462 bp, Homo Sapiens
acagggtctcactttgtcacccagcctggagtctagtagtgtgatgatagctcactgcagcctagacctgtccaggctcaagcagtcctcccacctcagccccatggagtagatgggattacaggaacctgaactctcagcaagaatgaacgtatagaaccatctcaaatttagcggctaaggactaggtccttggccagaacctactgaaggctctcaaaataggaggtccatagacacagagtcccatataacattacatcagaccaaggtcatgggattagccaatcaatcacatactgtaacccagaaactgtctgcctgtaagaataatgaaatagtctcctgcaggtacagatgaagaccagtctggtgataataatgtaaagaatggggcaccatactatattcgaaactaattatcattgtatggtgtgaattctccaatatatttaatgcatg

SEQ ID NO: 32952 - DNA, 477 bp, Homo Sapiens
aggcgggctgttctgaggggtgtgccggcagcagagcctggccacagccagggccctgtctcgctccccagcagcctggccagggcttgcttccatcttgactgtctcctttcttggatcagtcaacagatcctcacattactggctttatttacatctcttactaaagtaatcagatgatattaaccactttgcttctgaaaaagaagttggtcatttcctaaataacagagcagctaagtatgggactggataactgtctgtggcaaagacagttgttattttatgtggaatataataattacaggaagcaatgctttgattaaaggcattggcacctcccttgcaagcattgatttgctaggttcttaaaacttcaactgccagtgctctatgctgatcttagtagttaaagaggacaaggctcattttgtatagagccctgcttctcttggctttggcattttctgttgtttg

SEQ ID NO: 32953 - DNA, 451 bp, Homo Sapiens
tatggagaggatggtgtcctcaatatcattttacagcaaattcaataacacatttcatctggctgcttttgacctttaataaaagccagggactcaacattaaaatgccactccaaaggcagttcccggagggcactgccatccagttatgaagctttctggtggccagctccatcccaggataggatttaggctgccaagtgggtggatgcactgtgtgtctgtaaagcatctcccaccagcgggaccacatctcttttaagagcagacagagctggcctgggcccaggagctgggcttgggcattaggcattcagttaacaggcgttcctggcacccaccatgtgcagcacacacaggggcctggggcccatcccagcctgccaggtgctcctcaggccgggggaggagctcactgagccaggctgggggctggggtgggctttagggg

SEQ ID NO: 32954 - DNA, 481 bp, Homo Sapiens
cttcttctagtcctagcctccaggggcccaggcccaaaaaagtaatcatccttctctagggtattctaacatctcttcctctggaaatatcaactacgacagccccttgctacttcatttaggtcaaataataaggggatgaatgattttcagtacctatagagagagcttggataattttccatgaacaccaccaagactcctattaaaaagttttaatgtggtgaacaaattcataaaggaggaagcaaaagtgactgacaataagataaaattatattcagtctcaataagacttttcacccccaaaaccaatttcctcctccttgggagtgacacttccccttgggggtgaggccacccccgcctcccctcccagctgccttctcccatctccatccccacctccacagcatcccagctgttgtccctctccttagcatgcaccttcctgatctcttgctccaccccagagagccac

SEQ ID NO: 32955 - DNA, 428 bp, Homo Sapiens
aaatagactttgtacaccaaatagacttcatacactaaaataatttcatctactcaagtcctctgggtggctctatggcctttttcagatgactcctgagtatgtctctttttagccaccctcagctgttttatgctgtgattgtatggggttttctattggaaattggtagcagaaagtgcttataaaatttcacaagggaaaaaaactcttttagcagttaaagagaatgaaatctgaaattcagtagataaaacaggtaatagattttgatgacagtttgcagcccttcgttcattcataaagtattactgtaatttggtgattaggagcctttatggatatacccgactgctgaaaaacattcatcttttatacagtaacaaacagaggtatgattgagcatagagtttaggcaagagaactga

SEQ ID NO: 32956 - DNA, 490 bp, Homo Sapiens
cacatctagatccatactttttgggctcaactcagggttaccaaaatagagtcaaactcaactcaggattacctaaatggagtcaaattttgtgtgtggttttgtaacatgattctttcagtcatcatttccaggccacatttttcatgtcactcatgactgcattataagtttgtaccataattcatttaaccaatactctgttgtgcatttagaatattttcagatgtttattgtccttataaaagtcagtatgaaggtatgcaattatcacttaggccacattcctggaagtaaaattgttggaatggaaactatgtacattttacagtgcagattgctggaagagttttatgcaaaaacttatacaaaaatttacactcttaccagcagaaagcctcagcgccactgagtgctgttgtattgttaatcttgattaatctggtatgtgaagaaggatgtttcaatgttttgtctgtgtctctctgat

SEQ ID NO: 32957 - DNA, 503 bp, Homo Sapiens
tttttttaagaaaatgtaaagtttattaaataaagattttaagtttactactgcctcatttatttcctgcccagagtactgacctactatatgtgaaaatctctagctaataattaacaacgtctgagttacaacacaatatgtaatttgggttaattatcatgacctatttacacacaccaaaaatcctgctcactcttgacctgcacctgtgctaaattcaaggcaaatcactagttcaaaaaatacatctttaaagagtgcctgtgtctggatggagccttcctggtcttgtacaaaatacccgggagtaagaactttcagctataccccaagttgctcccatctattagtgcaatgcttgtaattcacaattctatgcacagctactgtgtccctaccagtgggtgctcctttaggctggttcacccggtatccaagccattacaagatgggagagggtgaaatgtaaaccctagcagaccaagcagtaaaaagatgaa

SEQ ID NO: 32958 - DNA, 531 bp, Homo Sapiens
tggatgctttgaactttatttgcgaaaaacaaaaaataaatgcatcacaagaacccacaggtggagatggatgcaccccccatggccccaacaggggtgggcatacgaactaaagctttacttgacggaagactcatcgcattttgcagattctgggcccccaacctgcgcccggaacttgaaggggactgggatggccactctccctagactgacctgctttcttagacatgggagcctccacggtcaaagaggcctcttaggacagggaagaggaaacttgggctgagtccacaccagatggcagcttgtattttcccgtgatggacctggagaagtatgcatgctcgttctgccgctcctagagctttccccagatctgctgcacaccatacgttgtcttgaccgtgagcttgcttcgggagaagtgcttgacatcctacgacactcgccagccagtctctcatagtgacggatctccgagactcagattatgagatgcccgctgaacgcgcagctgtaagcaggcgc

SEQ ID NO: 32959 - DNA, 485 bp, Homo Sapiens
atcaaaaatgcagctacatcccttccatggctttttataccctaaagcccattatccgggcggtggggcggtccttccagggactactaaaagcctttaaatgttccttttcttccccgaccactgcagctttttccttattaaaaaccttcgggcccactcttaccaaaccgaggagccgggccaccaatcttaggtctttacaaaaactcacaccattctggctggcccttgtctaactgccgaaaaccacgacccttggatcaacactccctcagcctgtctaccttggcctggctgtactctttgaacttgccctgcctcccattttcaacagaaaccccggtgggcatcgccaccttctttccattgacgaccaccctgatctcattagcatttattccactgccgtcacccacctatgggcgtatccgaacaggggatcccttcacatccttccggataacacccctcacgtctcgcag

SEQ ID NO: 32960 - DNA, 458 bp, Homo Sapiens
ggaaaaagagaaggctttatttcttgtaaacggtcgtagcctgcaaggtggcggccatctgtctgaggctgggaatctgtctccagccaaggccagagacaggcacgtccaaggaggaggggttggggcaggagcgctatgctgaagggattggctaaacatacatattcaacaggtaacaggaggagctatgaatattcatgaaggtggtcctgacacatgccctcttattgagcaaagcatgtaatatatgacccatgttcactttggggtggagacttaacatttacacatcttacaattagggcctttatggcaaaacgtcttttcaggacacaaaggcatgcaggtgcatcatctctctctattaacgggtcagctggtcggcatggtcagctggtcggtggtctcttatcaggagaaagtcactgaaatcagtctcttgtccaatcacagct

SEQ ID NO: 32961 - DNA, 384 bp, Homo Sapiens
aaaattatgttattaactagaaggtgataaatattacatagaaaaagatgtcaggctgcaaaatgattgcggaggccacaagataaaagagaatccaagatcagggttctggttcgggtcagggaaaagggagacgagctgaggtgcaggaggctctgacgtcgggggacaacggagatattttctgcagaaagtgacgaaagagcattctggttcctgcagaggtaggtgaaggacagaaagggccctggccggcgattcccttggagtaaacgggaggcaggaggctgttttctagcagagcccagaagatgctctggccgacggctcccggcatcttggccggcggtcactcgcgaccatccgcgacgcccccaaaatggc

SEQ ID NO: 32962 - DNA, 359 bp, Homo Sapiens
aaataggatgttcactttgccagtttctctgtttttccctgagttgcaggaggaataataccacatattcagatacttctatcactcagccttctctcatcccagtcaggattaaaaactcagataactgaaattgcattgtctggggatggaatactcagtcttcacatcctgtaaaactggactgagttatttggtcaggtacaactcttagggctattttgggggcagcatggcttgcaataaagttggctacatttatggacatttattaactaggcctttctcatcaattagatacacaaaccagtctctctcaagtgctcttcagcatacaagaaacccagatctccatcctt

SEQ ID NO: 32963 - DNA, 378 bp, Homo Sapiens
aaaacacacaaagatatttatttgattaggttatgaaggctaaaaaaagccacattgtttttctccttttgttattgggtctatgtcatcatctcattgagttcatattattataggaataaatgcaattcacacaaattcctgttcttgaacacttgttctttccattttaaaatgcagggacatcatcaatggggccttctactttttggagttttagggtcataggcatagtttcctatcctatggttttcatatcaaacagttgcaccttatacattctggcatgttctgctctccaaaagacatatttttacggccagcaataaagaggaggatttaaatgttactcctgcccccaataatgaatatatttga

SEQ ID NO: 32964 - DNA, 440 bp, Homo Sapiens
ttcaggacagattggcctttatactaaattccacaatatacctggtattagtacagcctgaatccggggctggtcacagaaggaaaaaggttgtagtccctgaaaacagagtgttacaaggacatacacactacagatgtctccacggtgggatctgcccacactggctgggcaaaatgagggcctggctggcaggtgctaatatatttcagggaagagaagggaaccaaagaattagagatactaaaactagagctgagactgtaattggaaaatcacaaatctttgcctacagctactttctaaggggcaaaggcccacaaagcctgggcgcaggtgccaagccacagtctctgaaccttaaaagccaaccactctattaacaactagaaaaaatcagtgactagggtcaagactgaacactcccgggaaataacact

SEQ ID NO: 32965 - DNA, 473 bp, Homo Sapiens
gggggtctagaatccagcagaaaggctattcaatctttctgctgccataagaaaaaaacatgctgggtctatcaccagatggcctctgaatgggctaggacactgctgagactggcctagctatgaacactgttgtgttctacaccccacaaggtctttccagacaagtgtgcaagtaactagagaaagaggaaaacatgcacaggtgctttgaatcatgtaaactgccgaatactaaggtacctgatcctttacaagaatggacattcacaatgttttagctcctgagcagcctctcaggcctctcgtgcctggagacgagggcaggtgaagacaaccctaacccaagacactggctccctgtggtctgtgctctgcaaataaagctggtggaaacatcacagatgacgagtcgtgggagaaaaggcgaggggcacagctgagatccattgtcaatatctgagtaatactct

SEQ ID NO: 32966 - DNA, 367 bp, Homo Sapiens
gttgttagcagttggtttatttccttccaatcacatacagatcatatctgatgggtaaagaatattccatactgtcaacagaccacactgtcttctaaaatcgcttcagcagtgaggatcctctggaatagatcttgttaatcctgaggaattattctcccagcggtgagctatgagaagtggaatcaccagatgtagtaattcctgacagaactgccgcctgcttgtgtggctgagatgctgacctaggtatcaggctggtcgcgccggaacccagcacccacgctgagtctttctgagctccactctgctcctgttagatattaaccacctgaggtagctgtccagattcaaggcggtagtgatt

SEQ ID NO: 32967 - DNA, 401 bp, Homo Sapiens
aagattgctggtatttagaacctccatccttccctctacaaatgaaaatttgacaggtgaactttaatgtacattttgttctcctctgtctaccaagtgctcaaaattagttaaaacaacgtaacacctaaataatttaaaaagccaccttcttctaccttgccccaccactgaaacaaaaacaaagaaagccatctctctcctacattatttttggagttcaactggtaaaagcagcttaaagcttactttcctaaaaactccactttatcacgatgagcatagagccttcttctccttcttctatttaaaatgcctttgaaaaagaggtattttagcatttaaaaagatactgaaaaggatatcttccaaagtacttaccataatcatgaactatttct

SEQ ID NO: 32968 - DNA, 439 bp, Homo Sapiens
ttccacttttctgtgtttgtcttactgttttattaaggagttgcatctctggagaagaggaagaaagaatcattgaatataaaatctttaaaacatctgtccatgagcaatgactacttaaaacaccagtggcaggcctcatcacccacctggtggcaggttatctcaactgcaggcccagcgctttaggacaactacctttgtcaagttgaacttacaaatccaacacaagaagggtggtagggcctgcctcgaaaacttgtttgctttgtttatttttctaaacatcagttcagcctcttggcctgaaggatcatagattccaaattagtagactcaaaattaatgagattttccagtaacaagcttgagactaaaattaaggaaaatgcactaattatagactatctagccacctaaccaccacttggatccaagc

SEQ ID NO: 32969 - DNA, 401 bp, Homo Sapiens
tcggagagcatctttattgtggggagggggaagggcatgatctggcttaagttttagaagaactgttctgatttttaagaacagaccataagaggaaagggtagacacagggaaacctgttaggaggctatagtagtatcccaggccagagatgatggtggctaggaccaggaaggtaacagtggaggtagtgagaggtaatcaaattctggatacatgttgaagtagagatgacaggatttcctgacaagacttgatatagggtatgaaagagaagtaaaggatgactccaaggttaaccgaaaggaacatcctttcagttaattgagcaactgaaaggatgcagtgcaaacaattaagatgaaaaaactaagtgtggagcaagtttgaggggaggatca

SEQ ID NO: 32970 - DNA, 365 bp, Homo Sapiens
gaggaacaattttactgtgacacgtttatataagaacatatgtacactcatgtatgtatatttgtatgtgcagtcagccctccgtaccctccagttccatctcccacaaaaactgcattttccatccaaggtgggatgaatcctcagcaggggagcctgtggataaggaaggccgacttacgggggagcctgtggataaggaaggccaacttttcatatccacggattccacagggctgactacaggacgtgggccaaggatggcgagaccaccaaactctgcaaactcatagaaataaagcacgcggtacggggacgcaggcttaaataacaaaatatatttcgatatgcacagttttaactga

SEQ ID NO: 32971 - DNA, 374 bp, Homo Sapiens
gaaaagttctctaagtccccacccgacccagaagcccagctggcttcacctctcaatgccccctctaaacaggacaccccaactgctgttgggaattgggcaatgatcgctgtggctacttcctgctggatgggggcgaagaaggggccttgcagttgtagtgtcctcgggaggggaactctttaggccagtgaaagggccagtgggtaggtccaggggtcctcagtagaagttgttatttgagctcatttggggttccatttgtaagaccatctgtagcttgatggcttcgatcctagaggaaacaaatttgacaaggttaaaaatacagggcctgaaggcgagtaatagcaagatggctgccatgggaccta

SEQ ID NO: 32972 - DNA, 352 bp, Homo Sapiens
agtatctaactcacatttattaaaaattgaagattacagaaaagcataagattggcatcattaaacaagcttaattaacttacctttgactaataaatgaaaatatttaataacactaaaggaattttgagaataagttctattccaaccttagaaattaaaaataaaagcaaagcagctattctccaaaggagaaagcaaccacagatctccctctagtggcaaaagataaagttgctgctgaaaagctgaattgctcctccatacatagaactgctcagacatttcttctataaaattctaacttaagattctaaatcaatatataaggaaaatagatctattttttgtc

SEQ ID NO: 32973 - DNA, 515 bp, Homo Sapiens
catggggtagaagcatgtttatttactgccataagaaactgctagacacatcttcatccacaatgataaagagttccagtgtctccacacacttgtcaatgttcatcgtatttcaccttagcaattttagtggacgtgaaatgttatcttattgcaattttaatttgtgttgtcctgatgactggggacattgaacaccttttcagtgcttactgatcattcatttgtcctgtgagatacctactgaattcatttgcctgtttaaaaaattaggctgttcatgttttttgttgttgatttgtagacattctttatatattctagacccagaaaaggaaggtttttaaaagtaaaacagtagccactgatcatgatatcccggtcctttaagctgaatacctgccacccctcccattccacctcatatatcactttggtgggtgtgctgactttagaatgcacccactgtcacccaaatggctgaaatgctaaattctgtttaatcaaattcaact

SEQ ID NO: 32974 - DNA, 416 bp, Homo Sapiens
gagatttggtaatattattttcacaaaccaaacagtacaaatttcaagttatttcacaaatcagatgatcaaataaaaatggacatgaatatgcttagtaaattagcatatacattttttttaaaggtgctattgtaaaataacctacatgacaaaatttggcaaagagtaaacaaaatcattaacaataaaccaaaaaacatgtaaaacttaagaaaactcccaaagaattaaaaaagaacacatatttcataggattcagaaattatatatcatttttaagtgtgcattaagcaactttatactgcactttaacagtctgagaaatttgacatttcatttctataaatatacatgagtggagacattttataagtacatatgactgacagcaatatttggacaacataaaagta

SEQ ID NO: 32975 - DNA, 442 bp, Homo Sapiens
aaaaaagagggcgtcacaatatcaaattagcacttggcagccaaataaatactttgtaaatgtcatcaatcaaaatatttgatctctgctacctttaacaatcccatacttatgagcgctctctgacagcctggcaatggaatgggcaagccccctgcagcctctgccatcaccaccatcacagccacttccccccacactcacttttgaatctgtgctgttgacagaccagaaaggcttttggctgcctgttatgtggttcaaaccacactgtagctgcttaaccaggctgaagtcattattcggaatctcccaaccagaaaacacaaaaccccttatttcccatctaaaactgtacactgaaggtcaggggatggccactgcaaattgcttttgcagatatgtgcaagccaggacagaaacaataacccaagctctcact

SEQ ID NO: 32976 - DNA, 390 bp, Homo Sapiens
acaagaatatttagagtaactttattatgtgtaatacctctaacctggaaatgacccttgttaattaattaacaggagagcagatggataaattgggtgtattacaataaaatactcctcagcaagggaggaggtcatacacaacaacgtggatgaatcccaaaaacctgacactcaaaactttccacaatctggtcctaacattcattagttccatagtcacttctttcccgctaatcacaccatggtctattttaattctagaagattggcaattatctttgatcagaagcattaaagttctgacctattttccgttcttctatgtcaaaagtgatctggtatctttcctaaatattttgtattttcttatccccaaacctttcccca

SEQ ID NO: 32977 - DNA, 426 bp, Homo Sapiens
ttcttgggggtaaaaccatccgtttattattaagccattatcaccttcaggtcaaaaaccattaagtacgcgtctgcccgatgcttgtcatctgcacagagctcctttgtcagagatgtctggtgtctggagtttacaatctaacagccctgctctgcatgtgagtccacggtgcacagacaggcaaagaaacagtgctggtcactgatttcatagctggggagatcctggctatagatcgggaaactgaggacagggcgacctgcccaatatcacacagtgcccaatttacgatcagatcctggaggtcctggctctgcccatgaggggtgtatgacatacataaatatatacaatgaaatatcccatgctggccttctccccactcaaggactacgtgattctagggtactgggaagaaggagt

SEQ ID NO: 32978 - DNA, 442 bp, Homo Sapiens
ctggggaaagacaggcagggttctggattttcttggccgcacagttgtacaagcaccaagccaagcgcagatgaaacaggccgggcaggaggccccgtacgtgggaccccggggccagtgccgggggtgctcggcgtccggttctagcggcaccattgccatagcagtcctcgtcgtcttccgacatagccggcaggtaagcggtgagcttcggaggcgtctgctggtgcaggttctcccacgtgacggactcgaagaacgggtgtgctttaagaggtccgtatccttccatttcctcacagcctaaccgctttgtggcatctaaaaccaaaagtttctccacgaggtctcttgccttagggaagaatttttctggaaagtcatattccaacttaatgatcttttggaatataaaaaactcctttccacctctgaagggggg

SEQ ID NO: 32979 - DNA, 433 bp, Homo Sapiens
ataaataaccctttaaatgctgtatacaagtggtaaatataaagaaaggttgaaactaaaaaagaatggaaattcaagagaaaggatgtcaagcaaagggtaaccaaaagaattgacagttatattaatattaaaactagtagttttcaaggttaaacacattagcctatagatgaagcaggctaccacacaaagagttcagttcagaagaaaaatataaatgtaaatttacatataccttaataaagtaactgcaaagtatgtaagaaaatggaactataaagacaaatgcacaaatccactatcatagttggagatttgaacacacctctcaggtgacagacaacaaaaaattaagtatataagatataaattgaaacaaaaattgcaaacataatctaatagaaaatactacacacaatctaaaatgcat

SEQ ID NO: 32980 - DNA, 406 bp, Homo Sapiens
gagatggagtctcactctgtcaccttagaaactattctaagcatgcctggtttctgtaacttaaatatggcataaaaacctgtttcctttgaattcacttgatagcagtagtcaaacactaataatgcttgctaatttcctctcactttcttaagaaagcccctatatttagcctctgcctccatgtcgcatgtggtggttaggtgacagcataagtacactagtggctttagcactaaactcgaggcctgggtcacttctcccctgaagaagaaaggtttaaaaattcctaaatcacaatgtagaactaagttacaccctacctcagaactgcagatattaaaataccatctctttattaagtgtctctacaataaggatatttgctaagatcaagatgtacaat

SEQ ID NO: 32981 - DNA, 429 bp, Homo Sapiens
tatgcacatttaattttatttctgggggaagatttgctttacttctggggaaaaattcacaagaattttaaagatattcctacagagtaaaaagcatgattgtttacatgtttttgagcacctgtacttacaagctgatcatacatttgcagagctttaggtcctaaaatatactgtcccatctaccattctaccaagattgaagtgtgtttatcaagacagaaaaagaacaggttttaatagctatcttctaacaagataaagagaagaaaaatataagatataggctcttgttaaccttttattttgagaggttcttttgagaggttatctcagcaaataatctaaacaagtgaaggataggatatctattacttgttgacagtagttagatgactatataatcattagtgaaaaagatcaaggaag

SEQ ID NO: 32982 - DNA, 368 bp, Homo Sapiens
gcagtccctggggtctgtagtggcctctggagagcccttctccccaggccaggcgggaaggcccccgctccggcctggttgaagtaggggaacgggtcccaacgcggggccgactcccttgaccctctgacttgctggcttcccttgttttacagtcctcggcctggcggaagttttgcaggttgtgaagacccctagtctttcattctctccttgtcacagccttgtagggcgtgaaggggtcattgccccatttagggatgcgcacctcctgatttcccgtccactgctctgcgccctgaagtggctgaaaagtgctcttaaaaggatgggaatcccgtcgccctcagctggtgcgctctccactg

SEQ ID NO: 32983 - DNA, 420 bp, Homo Sapiens
aagtgttattgaataatttatttctttatacttcaaaagtgattctctgtcagtaaccttttgactgtgatggaattgaacacatatctaccaacttagcttattcagaatcaaataagacagaatataaaagggctttaaaaaccatatgtgccccgtacatcttattactgttaaaaacatcaaccaggattttccttagtttaacgtgatcttttaaaggggaagaaataaaaagctttctttttaatcagacagcaatcctcaaatacatacgtgggttataattttttcacaaagctttatttctgatccaaaataaattatcaccaaatttcaactttttaaaatctaaaactatttttctttcctatgccatgcaagcctttaaacaaaatacgcagacatctttattagtct

SEQ ID NO: 32984 - DNA, 421 bp, Homo Sapiens
tttttttacgttgtgaaacaccagatctgagcgtttccgtttaatgaaacctctcagtctcccagcctcccatccctgcaaaatcattcattcattcattccttcaacgagtcaggcccctgggggagacgcagttgtgctggctggccggcagatccccagactggcacgggctcaggccgatggaaagaccagggaagtaagattcaggaagcattgcctccctcccaccacagccccgcgcctcctctcctccggctgaatttccttccagctactggccctggctgcttcctttttctttattgtctccagtgtttgggggtagatccctgtgtatttattttctaggattcttttggtggtaaatgacagaaagctcgctcaaactggccctaacaaatgagggcatttacctgaa

SEQ ID NO: 32985 - DNA, 405 bp, Homo Sapiens
ggaaaatagtttgccaatttattaaaagctaaacatgtagtagcaaaccagtgcaagcaaactcccaaagtgttgaaacagagagctcaactttgggcacatttgtatgccagagcaccagtttctaatccagaatacagccaaagaaatggaaaacctgtgtgatacgggctttgataggaatgtagtaacaacagccttctcttcaaaatcataggacatagaaaccgaaacagaattgtttctgaataactgaggcatagagaaacagctgctgatataatcgaagttgcctctttttgaagtggcatcaacatctgctctttttagaattctgcacggatttattttaaagttatcattcggtagcagctacaattcaatccttgccttatatcattcttg

SEQ ID NO: 32986 - DNA, 425 bp, Homo Sapiens
tttatggtaacacaaatgttatttttaatgtttttaattacaggtgctccttgacttatgataaggttatattttgataaacccattgtaaaatgaaaatatcataaattgagaatgcatttaatacatttaacctatggaacattatcgcttagcttacttaaatgtgcacagaacacttacgttagcctatagttgggcaaactcatctaacacgaagcctgttttataacaaagtgttgaatatctcatgtagtttattggacactgtactgaaaacagaatggttgtatagttacttgaggtatgctttctcaccattcgaaaagttgaaaagttttaagttgaaactttgttgaggactatctgtatgtcccgataacattatgttaaacctgtattacgcagaatacaatttgaagacc

SEQ ID NO: 32987 - DNA, 413 bp, Homo Sapiens
aatggtgatcacttttatttatgtaatcaatagacagcacttaccacatagcacttaccatgtgccaaacgctgttcaaagcactttataaacatgaattaatttaattcctacaacaaccttgaggtggctcctaatcttagaccatttttacagatgaggaatcctgcacggagaagtcaagtgattttcccaaggtcacatggctagtaaaaggcagagccaggatccaagcacagtcccagaaagtttccacgtgcagacatgtgactgcctaaccccattgtctaagtcccgctgggaggtctggaggtgaaggctgcttctttgaggagggtcttctgcttcctctcctggtcttctccaggcactgctgaggaatctctggtcttactcagtctcataacattttt

SEQ ID NO: 32988 - DNA, 370 bp, Homo Sapiens
ccttaaaacatcgttttattgaccgggcccagttattaacaattcacatttcactttatctactgaggggaaaagcatttattttttcattaaaaagttaacccctccggggcagcagcaggaatgcaaaacctttttcctataaagggcattgcccagggactgggaagggcttctttattaatacaaaagggataaataaaacaaagggacttttccctccctccataatctccctccctgctaatatgctctttttattttataaaaggccattaagcaaacagttcccacactgatacttccatcaaccaaaaggggaatgtcaacatttatttggccccactgaattcaaaacatccttagggct

SEQ ID NO: 32989 - DNA, 446 bp, Homo Sapiens
gtattctctaaaatttatttacagttaataagttaaaaagcaaagtacaagcagattataaatctcaaccataagcacatcaaactgtccagggaaacactttgattccattacaaacaattgttttctaatgcgcttaagacataacactctatcaaaaaatattttaaacacaccaataaatattaggcatgtatgtccattaaaaaccattaaagagtcctgtggcaatccttaaaacaatgaaaaacttttgagttcaaaattgctcagatattttgtattcaaatatttttaaaatttacttaagagttttctaaaaaatagtactatcatttgcacacagcagatcaataggtgtcagtcaccagcttaagttacacttgtcaatattcaaacttgaataaaataaacacacatcacaacagcgacactttgcactatca

SEQ ID NO: 32990 - DNA, 411 bp, Homo Sapiens
ggaagtattttactatgtttaataattattattaaagatattgtaaaacatatgcatttgttaagtggaatgtaatgggagtaaaatcatgtcatcaattttcctttggatttattttcccattttgtgttttatttgacagccttccaaattgattctagccaaaaccatgcactctaatatatatcatacttgatattaaagtgagaatgcgagtaatttatagaatctgagtgagaacagttttcttctcttagccagcctatatggagctgccacctctgctcaggtagcaaccgacacatgccttgtacacagaaaggaaaataataggggtcgagaaatcctccacacatccttcctgatagacactccaaaacccacatatcccaggcattgttcagtgggaga

SEQ ID NO: 32991 - DNA, 369 bp, Homo Sapiens
atgttggggggggcgggaagagtgtctcgagcaacccaagcgcgggtctccaggcggcaaggccccctttgatcaggaaaatccaattatttgtgtatatacatttcccacatagtgattacttcattaattgtcccgcctttatctcctcccttcccatcccccctaataatcagttcttttatccagaccaacaaacacaccataggagctttgtggattcaaaggatttgctttcgcttctgaaagagccgctattctttgatgattgggtagcagcaaacttcaaagccataaatcttccctctgactggctggcggcccagcaaagtccttatcaaattcttggaggtgatcctgaagcgctca

SEQ ID NO: 32992 - DNA, 599 bp, Homo Sapiens
gattaaaaaaggactaatcttcagtgacaaactgctgcagacattttgacataggttaaagctacctatctaggccgacttacacaggtcacattaactcttccgagacacaaaatgggaggacggtacaaatgcccttaggactataacttattacaaagtggattatgctcactttttcattcaactgctgtgtgcctttttatatcatgctaggggtgatacatacttgactaactcgggaacagctcgatatattgacatcggtcaacttatgagaatcaacagcttttggccccagagtccagaggaacttttcatggagtgcataatctgcacgcacaaaatactttgtctttttaaatactgtaaagttacacttgagtactatgactgtaggattcttcatggctaataagctctgcgtcacatctgatctaggacgactgacctcgccataccatctatctcttcacagctactagctcactctagtatctgtagcacacatgactgtgctagatctaaagcacgtaatgataagtagttgcagcctacttgtggctatgataatcactacgtacaatgcgtgatattat

SEQ ID NO: 32993 - DNA, 448 bp, Homo Sapiens
gcaccaaacctgtttatttgtaagaatggtacaaatcaactaacttatgcggatgtttctggtacacctaatatgaaaaggtaaaggaaaccccaacatgcatgcactgtcttgatgaccagacgaagacaccccaccgctatggctaaattaacccgaggcttagatttcattatcactgtattccagggtgtgcttgtcaaagatatattccgccaatccagatcttatcgctcctatcttgcgcaagttggtcaagcggacacccaattcttagatggatctcacctgctcattcaggtcatgtgactcaatgaatgcacacaaatggctgatatctattgcagtagacactgtgagcagtgacaggagcgactgctgacatgtctgtcagcacatgtatgcacactacagtgcattcatgctgctctgccaacatcacagtctg

SEQ ID NO: 32994 - DNA, 484 bp, Homo Sapiens
gcggccgcgcgcgcgctctgccctcgggcggccctgctctcccccgcccggccccgcaaccccgcaataacttggctgggcggggtccggcactgggctagagaggtcgagcgcggcgtcttgagccgctggcgggaggctgctgcttccccgcctgcatcagtgcgggtcccgtggactcctcgcccccgtccccgcgagctcggggctccacatcaaggaaatcctcagcccgggagtggcttccccagaaacagcagccccaagcctccgagagtcagtcggagaaaaggacacactcaggcgccctgcgacagggatgcccgtccgacctacaaggaacgcctcgtaaaccggggtgcatgggagaccacggaaataacacgttctcgctgtttccaagctttgggataggcatctcgaccctcgctctctacccacgtttcccccccaaatcctggagagggaaccagaaccagcgccc

SEQ ID NO: 32995 - DNA, 424 bp, Homo Sapiens
tttttgaaatagccaatcatctattgcctgagagcacagggggagggacagtgattgagacagaaacccaggcattcgacccagcaatggcaaccccctttgggttccctccctttgtatgggacgtctgttttcactctgttaaatcttgcaactgcacactcttctggtccgtgtttgttatggctggagctgagctttcgcttgccatccaccactgccatttgctgtctgctgttgtttgccgccatcacagacccaccactgatgtccacccctctggatccggcagtgtgtccgctgtgctcctgatccagcgaggcacccattgccgctcccattcgggctaaaggctcgccattgttcccgcatgtctaagtgcctgggtttgtcctaatgagaacactcaccacatgccccaaga

SEQ ID NO: 32996 - DNA, 434 bp, Homo Sapiens
gcggccgcgggttcgcgagcaccgcgctccagatcgagagcggcgcgcgcccttccgtggaggacagaggggcgcggagggggcgcctgtgtcccacccgctcgcgggcgctttacggggcgtcctctgcgccattcacttgtcagcttgtcgggaagttgaaatcgcgtttgggaggtaataggagaaagagatcggggacggcaggcggagaaagtgcggtttccatagcgccggggagagggcggacccgcgagccagcggtccctgagccgggagaccgcgcgggcgtctctccagcccccgcaggagcgccgccttccttccgcaggggcgtcctctccccccaccgctgcaggagcacccccttccttcctcggaagcgtcctctcaccacaccgcttcaagagcccccccttccttccacaggggcg

SEQ ID NO: 32997 - DNA, 423 bp, Homo Sapiens
tcatgtaatattctagatttaattatatttaaacttctcatcaagtaaagatttgtttgcagacagttcaatctggaggtgggcaacagtggcttgagataagtaagctgcttggctccacgtggttattcaggaacccaggtttctttcttgtctgttgttcctccatctcctagggtatagtcttcatctgcatggttgcagctggaacaccaccccgtttgtgttccagccccgccacgggattgggcacgtgcagcagcaatctctaatcacgcggagacggcatatgtacactgggctccagcaggctcagaaggcacaagtgagctgtgcgagcaggtggcgcagactccttcgacagcgattcttgccttattgcctgttttccttcattcctaggacccgatttgttttccaaag

SEQ ID NO: 32998 - DNA, 543 bp, Homo Sapiens
ttaaaaaaaccttttaatcaatatataacagacatatagaaaaggacacaaataagcgtagagcttagtgaatgttcacaaagcaacaacacctgagatgaaccagcacccacatcaacaagcagaacgttgctagcatctctggagtgatgctcatttagccctatgaaacctcatgaagccgaccgttttatcacccccatattacgcatgaggaaacaagcgtggagaggtcggtctcaagcaaagccctgttgaaaccggcatttgaatcagatccgctgactgactccaaagccaatgctctcaaaaagcaggtttgggggttagacggtgagttcagctttgaacgatgttgagtgggcgtctcgttttacagaaacttacttcccgacgtcacagccacagaaaccacaggtaaccagacgcctgcacgtcaggccaccgacgccttggtctacacagcgcagcctccagtgagcccgcggcatgccgcgcggcctccccacacacgatggcgatgtcgcaaccacagtagaaaga

SEQ ID NO: 32999 - DNA, 434 bp, Homo Sapiens
gggcttcaggcattttttaatccaaaggtttactctatcagcagggctcagctccctttcccttctccagtctgcctttctatgtccattgattttatccttcctagaacagattcttacctggcagcaacatagccccagagttccatgactcatatccacactccaacaccaagtaccacgtctttgctgggtgctgcagtgtatatctttgggtgtccatggagatcatgggagagttgcgggtgtagggggggtcatacaccttctccctccttcttgtagttgatgggtcgtgcagcattgggctcaggctccagtgtgttgcaaaggtctgcgtggagcccattgtctgttcttctttgctgccctcactcccccggggccccagacatgagcctgtggactgggcctttcattgcttccttatgcaa

SEQ ID NO: 33000 - DNA, 385 bp, Homo Sapiens
gtgcaaaccttatagagagtcacatttgcaaacacacaatcacccctgaggatagggaaaagcaccagtacacagggaccaactgaagcgctgaggggatggcacatagacatgcggctcttgctaaacccacttctgacagggaaggccttatattgaggcccaacctcacatgttgatggggagctcataacggggtccaaggagaatttggtgagggggaggcgctaaggatgcctagaaacagggcacactacgagtggggatcctggggcagcagagtattgaatacctgtcatcacagcatcatgcttaatgcagggcccatcaaaggtgtgtcccacagaggtgactacctgctcaatcactttaacacctcgctgcg

SEQ ID NO: 33001 - DNA, 450 bp, Homo Sapiens
attccaaggacccaaaagggctatattatttatttaaagcatccggagccgcggcttgcttgaatctttttgcccgtatgcccaagagccggacgttaggacggtccatacagagactaacgaaaggtaagaaattattctcttgatcaaagaagactcaagctttacccttcatatacacatttcggacaggcatgaccgtgccggacagctgtgcggacactttcaggggttaagaaaaactgcctaccttcttggaggccgatggccctctggggaagaggatgaggttggagcagcactacttcaaccgctgcacgtgggcctagacggacttcgtggacttgttccgacttctcggatccacagaaatgcgcggggaacgggccacctacttgtgaatgccggccaccctgagtctgtgcaggctggagccgaggtcggagcgca

SEQ ID NO: 33002 - DNA, 370 bp, Homo Sapiens
gaggctcttttatgggaagtaaaatgactccctaactttgttcatgggtgtgatgggtggtggcttccgcaaggcgcgatgagctcttggctcggctcgaatacgtcatgtgagactaggagctgggatccatcactgatggtgaggctgaaagaagccttggttgagcgggagagggacatcttctggtccgaaattgggtggcctgctggccctgacacactattacttccgggatgatagcttgtgatgagatgagaacactatgagcagtgtgaaccttacgcactacacgtgttcactgtcttgaggaacaggttccaagaatggatccttaccaacgtgcttttgcggtgctacatctccgacc

SEQ ID NO: 33003 - DNA, 421 bp, Homo Sapiens
aatgatataaaattatctggattaaatgctcctgcccttgatattagtaaggcttatctctatttacaattactttcattcactgatggggaaactatgttgttttaataaatgcattccaacagagggcatcaatatattgagggctgcggtgacagccggcttttgttctgggttgatgggaatggtgcgctcagggccacataccaggatccttggtccgttccagcgaggaccccatcagatgagagggatgaagctatggagatagggtctacattacctgcgatccgaacttgcctgtggaactccctgcagaagataccatgcccatcatgacgctctacatgttatggatgctcctcattcacttcagccaacaccataactctgagttcatctggggagaagtgcttgacat

SEQ ID NO: 33004 - DNA, 379 bp, Homo Sapiens
gcctgggactgttgtcaccttttattctagtggggcctacctgcttccccaaatcaaagatgcatctataccaggaaattaaaataaagtaaaaagaaatagtttctttatagaggaaacaggagagaattagaccagaaaccagagtaagatttataacagctgagcacttaatttggctctctgagcagacagtaaaacataacaggatgcatgattatcacttgacattttttcctggcaccacattccaagcagaattgattccttgtactcttacgtggaggatatagagtaataaaacacgtaatttatttgaaagcatttatagagaagacaaacactggtcatgagcttcaggtacccttcattccctcat

SEQ ID NO: 33005 - DNA, 452 bp, Homo Sapiens
catattttgtatgttttatgtattatataccatatttgtacaaaagtaagctagagaaaaggaaatgttaagaaaattataaggaagataaagtatatttacagtactgtactgaatttatcaataccataagtttacttcatgtgtttctgagatgaatcatctttctaaaaatgcagacaaagctacagacctcaaaccgtggtacatatcaagcaaatcagctttttcttatattgttatgttatttctctgcttcttggaagcactttatgcatcactagtggtactttctttgggttctatgatttacactattaaattaaacatgatgaaaaaaacaagaagtcctagctagagcattgagacaagagaaaaaaacaaaggggatctatttggaaaggaaaaagtaaaattacccttgtttgaagatgatataatcttatatttgg

SEQ ID NO: 33006 - DNA, 398 bp, Homo Sapiens
ttatttgtatatttgtagaaagtgtctggaaggacacataccaaaccattaacagtggttacccctagaaaataagaggtggggtaagtagagaaagttgtattttataaattctgtatagttcaattttttaaagtagtatatattaaatttacaataaaagcatataaaatgacaagccttggatagaaagatatttattttatgtgcacgcttctttttaaagtagtttttagaatttctcccaaaagttactactactgttttaccttcaagttggcactgacatataaataatactttttattttcttctctctttttaagatcttgatgaaacttagtaaaaaattcacaaataatcattttaagttaccagcagggaaaggcctaatagat

SEQ ID NO: 33007 - DNA, 431 bp, Homo Sapiens
agcagatttctctatcaagatatttactcaacttcctacaagtaacaactatttataagtaaccctaaaatagagaatggtgaacagtcaaggaatcctatatgatttagtttacaaattaaccttcattgtcataaatgaccaggaggaatgctataaagtatgcatgcaaattagtcccacttgtcacaatgacaaaatacaaagttaccaaagtaacatagcaaacgggggctctggaaaatctttcattacactcccaaatgcactgaacacatttccgcaatagtcaattatttttttaaagtgtctttctcatagaggatggctttttaggaacgcccaacgatttccactcagatagaaagtgggattttgatgtcctgggttagagtgtttaagtatgtggagtttctgctatgagtcctcaa

SEQ ID NO: 33008 - DNA, 455 bp, Homo Sapiens
gatgtctgatgtctcacaacatctctttagtctatttttaaaatatataattttctttgcagtaagtattgcgacatatatttccattctatagaaggggaagcaaaacttcaggagtttttgaagtaggaaaggttaaagcaggaggattgagccaagagagtctgaggacaatcgtaggagtcctactcttcatttggcacaaaaatgacaatgcttagttaggcagaaggtgagtatggattgtataaactaagaactggaaaagactttgcagttcaaggaatccttagctctgtctccaggctagacaaaataagaaataaaagctatcacttctgtgtggtgcttatagaatagaattaacatatcagcattatgggatctttagggtgtcgctttcctggccagtctagtggcacctttgcctgagttttgctctgggcccactgggc

SEQ ID NO: 33009 - DNA, 360 bp, Homo Sapiens
aaggagagccgctagggctgcggccctctgctccccgcacctgtcccttcttcccgcacccggacttccagcacggtctaacctctgccccccccgccacgcgcgtcgccgcggtggcccgggcccgggctgacccccgcatccccaagccagcggaggaagtctcagactgcccaggccaagggcgccgtgcagccctggctgacacccagcggggtgacgggctgggagaccccgcggcctttcccctgagatgtaaaccggaacgggaaggggctgagggagaaaggacatggccttcccgcgagtccatggcagtgactgggccgactgaaacaaccctcttctaaagggacatac

SEQ ID NO: 33010 - DNA, 374 bp, Homo Sapiens
ttttttttgtgttgaatgaaatattgcattttatttatttcacattattcaaaagagcggttttcagcatagcttcccatattactgctggtgctttaaattaagaacagtgaggatataaaagtctttttcctaatggtaatatatactgaaaggaagtgaagttgaaaggcagaatgcatttaaatatggttagcgtttgtgtgtgtaatctactgaaaaatatactgaaatttcacttgtaattgcaatctctcctataaaggaaaatgtgcctgttgaaagaggtaatatattctatttaatgtggtactcatttgagaattcaaatatctgaattttagtcacttttcagttacttaactttcccagtg

SEQ ID NO: 33011 - DNA, 386 bp, Homo Sapiens
gtcctaaattgtcctaaagacagtgtctttttattttcttattcttaatgataacgtttacttcgaaggagttggcaaatgaatcatttaaaccagtgacaatgtaagtaacaacttgaaggagaagcagaagtttaaccactttcatggaccgatccctcactatttggaccagatactcattccttctctgtgacctctaaccccagcatgcctcctgtctggaagagccttccttgctgttggacctaggggaggaaagaaattatccctcatcctcatgcagtggctcagtggaagcagctgaaactagcaggccaatctttatttctcagctgaggccagagaccaaaatattgaattagccttgtttatattttgtgaca

SEQ ID NO: 33012 - DNA, 425 bp, Homo Sapiens
atggtcatctccagaatgtatttgtaaatgaaaaaaagcatgtttatgtacatatagacaattgatgtgtttttagatggagccatcagctgtatgttttacaaatggaaagataagctacaaaatttgctttaaattaaactgttacctgtaggaaacaggtggaaatgggatggggatagggacggacttctgtgaccatatcttggtttctagatttggatttagactcatgtcaaatgtttgtgtaattacttaatttaattaaattaacttgtaaaaggaattcttaaaattgaaagcaaaatgaaactaactgacttgcattatgggttgacaatatgaacctaccaaactcttccaagtgattttaaaatccagtcatttggatgtatatccatatagcctgacaacaagaaagaatg

SEQ ID NO: 33013 - DNA, 416 bp, Homo Sapiens
tgcttattgccactgagctggtcatttattataggtcactttaatggaaaaaactaaaaaatatgtactttcaggataaattttaagactaatactttcaatttagaatcctgaatacaggtgtaatgtgatctcagttttatgcctgtatctagtttctcccacgtggaaaatatttttttcatgataccaaaataaaccatgttaggggtttccaaatctgagtcagatacagaggagacagaaggggcttacattcactaaaagaatctcttgaaaacactaattgcagatgatgcagctcatacatattctataaagaccatccagctgtccaaagtcactaagtaaaaaatgaatgccttctaagaaagcttcgtagtatctggtcactctttaaattaataactttctct

SEQ ID NO: 33014 - DNA, 448 bp, Homo Sapiens
ttgtctttttagacagggtctcactctgccacccacccaggctggggtgcagtggcacaaatcacagctcactgcagccttgaaccctcagactccagggatcctatctcagccaagtagctgagactacaggtgtgcaccaccatgccttgctaattttttaaaaattttatgtaaagatgggatgtcactatgttgctcagactttctttttaaactgtggaaagcagctgtgtcggtacacatggcaagccagtaactaacatgtgctagaatagccttcactcagtaaccctggcaagttgttatataaatactccaggtctcttgccccttaggtgggataattctgaggtatatattttgccaaactccccagagtctccctggggcaccaaactctaattgcccacttaccgtagctggcttaatagtaaacttttcattg

SEQ ID NO: 33015 - DNA, 430 bp, Homo Sapiens
ggggtgaccaccgcagacccttccctcactggcaaaggggcctgagaccactgggcccagggaagcgggcgctagtgtgggggtgtgagaacccagaggattctgggcgccagctgctgcgggaacctgcgatgggtgcccagggaccctacatctggcatctggatgtcaccctgagcacagaagcctttcccctcactgggccagggacacagatgttcaccaagcgtcactcgcaggagtaaacactgatgccacagttgctccctgcagggaccctccagtgacggctgcagagggcagagttgccggtatcctcctggggcagaagagcaggcgcagcgccctgccccgcgtggtgagcagctcaacctcacactctcaggccacgcacaggcgggagaaagaaaatcagctcagacgatgtctg

SEQ ID NO: 33016 - DNA, 426 bp, Homo Sapiens
attattcaaggctttgttgaatttattttgttgaatttagggcaaaatgacatgtttatattttaaataaatgaaatctagtcattaaagagtcttaataaagcatctgatgatcattttagataggtaaggtgatctccatgtaagggagggccaacatctaccttagaagctaaatgtgtcacatcagttttactatagtcattaggctttggagtatcattttaacccagatagccagagttatatattaaaatataacagggttgtcaacgtacatttgttgagaaaagaatgtttctatacagaaatggtgactgattgtaaaatgccagtaatgtattttaaaaagaccataagttatttacgttagcctatgtagaatccatataccaaactttctgccaataatattttttcttggcc

SEQ ID NO: 33017 - DNA, 402 bp, Homo Sapiens
gacccttcttaatagagggatacatccagaaatagccaaaccccttcttcaaattgccaaactgaggcggggggttccataccaaatagatgttgggatgtcaagtgaaatattacttggcggatgaatcaaatagtgaggaaagtcgagccaataatgacgtgaactccgtaggaagcctgcggctacaaaaatggttaagccgcagatctccgcctaaatggtgaacggagactactggtactcttaggcttgtaggagggtaaactagagacccaattaacttgtaataagctttgcctgaattatttgctttgggacgttttctattaacactatggcgagctcaagtgattgatactcctgatgcaagataaacggatcttttcaggagtggcactt

SEQ ID NO: 33018 - DNA, 461 bp, Homo Sapiens
agtaataaaaagcaaatttattacccaaaactagtaaagggggaagtagccagattgctatttaaagtaactgcttcaatttttagaggggaaagcaatttttagggtttttaaaagggaagacttgataaggaaggcatgcaagaaatgggctgagtatgatgtctgtgtgttttgttctggtggctatcttgggcttcagtccacctggacctcggattgacattattttaacaatggtcaggttgttaattagccattttgaagtaatttttggaggtttgcagctgggtctccaggcttggtctgtctcaagattagcccctgaaacttctaagacatcacacaattaaatagtagcatacagttagataaatgaaaagggagcatatctggtgagaaaggggagggacgtggagtctattttaaggctaaggagaaaggattttgagtttcctcaa

SEQ ID NO: 33019 - DNA, 435 bp, Homo Sapiens
taagatgaaaaataggaggttcacttttattttgctaatccgtcaaaatacattcaagcatggcacaaaaattatattcaacactaggttctgtaccacctgctcccatgaactcttaaatctgaataatgttcagataattttcataggtggaagtggtcaaaacatacaaccaattgtccctcctccccaagtcccacatgccaaaatgtttgcatataaactgacaagaggaacccagaagtgactaaataccactatgcttttttcttcactacaaatagcaattttaagggtagacacatgacaatgaagtgttaatataccatgaacagaacaggttgccttcctaatacacagaaaatccttttacataattcatttgcaaactttagaagccactatattcccatgttgggaataatatgacaacct

SEQ ID NO: 33020 - DNA, 448 bp, Homo Sapiens
ggtttactgagaatatttccatggagtacagaaggggaaagactttaagcaaccatgatgaccttggaaactggttatgtgccttatttaacatataattataattaaagttaactaaagtctattccatcttcctttactatggttgcaagtacccccaaaaaagatggtaagctagatttgacaataccacatgcttcaaaatttaggcttgggaattgaatcttttgttatcatatgtggatatataaaaacacatttttaactcttaaatgtattactactgtaataattagataaatttggtctcatcctattacatccaaattgccacttaaatgctggttttaaagtaagaagagcaaggatcttcctggcaactataatagtcaaagaaaaccagcagtgactgaagaaaaaaatgaactgctgagatgaaactatcact

SEQ ID NO: 33021 - DNA, 475 bp, Homo Sapiens
tggtgacccagaggatgaaatcgtcgagctgcggcagcgtgatcggcacctcgccgccccacagccgttccttcttgatcagcgagcgggcgtagacccagcccagcacgatgccgacgatataggccagcgcataccagcggatcacgatcggcccgagcgcgagcgcgacggggtcgaacaccggaaagtcgaccagcaggaacggcatcgggatcagagcactttcgtgtagacggcgtagggcacgccatgaatgggcggggcgtcatggaccttgctgaagcccatcttgagatacatcggcaaggcgaccgtcatgatggggctcgtgtgaagcgcaatggtccggcagcggtcgcgccgcgctctggcgaagcattccgacgtcaacgcatgcccgagtcccttgctcctgtcgacggggtcgacgaccagcatgcgaatgatcggccatgactgatcgaagaatgcg

SEQ ID NO: 33022 - DNA, 426 bp, Homo Sapiens
aatgagccactgtgccctgctctccttgtgaattttaggagcataggttcaagagactctgggtgaaagtatgttttacaaagaggaaaggcagtgaagaaacaggggaagcaggcttacatcaactgttctggaatgaagagctgtgcataggcagaggggagagagctgctatacaggagagaggatcaatgaagcagcgatatgtctgaagacccaaaaaggtggattagctgggcatgaagagagattgaggcaacaggagtgggaggaggcatgttaggagaggcagagaagctttacagccgctacttgcaaggaggatgtaacagcgaggagggagagaccaaagcgcagcctcaactctccctgacgggggtctgtgtccctctgctccagtgttttcctcactctctggcccagcct

SEQ ID NO: 33023 - DNA, 473 bp, Homo Sapiens
ccactcagggagggaaccaaatatttcctttactccagattaaatacccactaatttcccggccttcggtatcataacctgtactgtctacatatttcctgcggtactagggacagtgaatggacagacaatgagctgttcatgaccctactgtaatgaaaattccagatgtaaccttatacttcatatttaatccagtgacccaccaggaaaaggccttgtgataatcaccagcataaaactaaaagcaaaaaatcttactgttctagaaggccaggggtcatagatgtgacagatgaaatttccttgaaatggttccaaatgaggctattacaagtgacggggcggaagtctgcagctttaccatgtcatattcggttgcttaataaccgctttgcccaaagtgaatgttataatcagcgatgggcatgactctcagacttcatcgctgtgccaagtaccagactagagat

SEQ ID NO: 33024 - DNA, 490 bp, Homo Sapiens
ttagaggtactgcacagaacacgactttatttataaagtagcaatcccgatgtccagtctaatgatggggaagatactaggaggtactttgaaataatacaggatggagcttctccatggcccaggcatgctacgagctcctgatgtgaggagctcaatggtactctaggtctaggaggctgggggtgagggtggctgaggtagccacagtaactgccccagggcaaattctagcctcaagatggaaatagagggggtgttcttaatgctcataaattcagcaaactgtactctgtaaaggctttagatgaaaaagttgtttctagtggtggtcttcaaacttcagtgtgcaagagaatcatctggtgaccttgattgaaaaaggaaagaaacaaagatgcaaacaacagactccaggtctcacttctagaccttctcattcaggagatggagagcagtggccttcaacccgggctgaacaatgaagtca

SEQ ID NO: 33025 - DNA, 480 bp, Homo Sapiens
tacaactactttatttttttctgtttatttgcaaactctgtgagtttattgtacatgatatatgatttccgggcaaatagcttgtggctaattcagttcctactcttggtactttattgaaaatttacttaagatcagcaaaggtctacttaccatcacattaaaatgatgcacctctccctatacaatctctcttacctctttagtaatacagctaccctggaagaccacctcttcttaaatagcccccaacgcaggggcacattcttccctctgatatgccacttaacctttaaaaatggacaaagaaccacttcttgctgcctttgactagtgtaagtcttttttaatgtctcactctgtcccagtattctgttcatcccacagattctgttatttgtacctagatccaccaataatctcagaaggctatatatgcacaattattataaattcttatatattcccttggatcatatt

SEQ ID NO: 33026 - DNA, 440 bp, Homo Sapiens
aaaaaatgtaatattacatttaaaattgatcaagattcacattcgcatgttcaagcctaactgcactgactttggcttggacaaactacaatgtgggttctgattaatttaaagattccagtgtacttttgctacaaaagccatatcctcttgtaacaaataggattaagttttgatgctgcatttgagccaaagtgttgaaataaagagattctgtttatgtccatctgcactgagctgttttgttagtttaaaaaactcttttttatatatagggccaattattcactccctgattcagtttatttgctgaagttgataattaccttgaaaaaaggcaagagaaatacctataaacactttaacagaaaggacctaaagttcttgtagtaaaccttcaaccttgccactataaataagcctggcactttgatgaaaat

SEQ ID NO: 33027 - DNA, 465 bp, Homo Sapiens
tttttaagctttaaaaatgcttttaatttgtataaagtgcaaagaaaaagaatattgagaagcacatgaaagaatataaaatggctagagcctaaaaaataagctaatatacacgcatagggacacatctgcatatttgagcatacagagacatgtaaatactcaggagagaaatttgcttttcctcataacttattttgtgtttctccaaaacctgaagagtagataacagctgacagttacccccctctgagtgtgacaagaggtcacgcacagggagggcctctagctgccatttcctgttgcttccctggtcaaacaacgcaggcggctaagtcactttaggaaacgctcaacagggctcccattgttccaacctcaaaattccgagatacaacgggccccattaatacagacagcttacaggctgggggatggtcccttagtgtgcagtccactttttat

SEQ ID NO: 33028 - DNA, 468 bp, Homo Sapiens
tcatgtgtggtttattgacacacaggtaggctctataccaccacgcctgccaggagctccagtcacgggggaaaatggaaggcggagggaggattgtccgctgcagaacagctgttgggcgggtggggccactcccaaaccgcagaggcctcaatagctaaagaacaagcccagggccgcgcccgaacacggctccaatgtacccactggcgatccccctacggcccataccttttgctggctgttccttcaccccaacccaaggttgcgagctctatcggcattcgttttttctaaaggtactggacacagtacacccaggaaaggaagctgtcaccctcttgctatctggctcccgcgccctgcagtccaccattcctccctcttgcattgcatgcatggagccacatgatggccagtctagctatgggctgccccactacagcatgctcgatacacagccatgtt

SEQ ID NO: 33029 - DNA, 457 bp, Homo Sapiens
tcatgcaattgcatagcatttggtttgatatactattagacattgtgtaagactctattatgaaataaatcatctcaaaataacttttaaaaaagcaaatctgttcatctcttctgactcaaaaggctgaaggtgaatccaaaggtactgctaaatccaagtactaaaatgctgtagtagaaatatttctatatcttggctctgctttttatacttttctttgtgtgttggtttcattctcttcaaacacagacaggctttctttatctggcagtggagttgggtcctggcacctctccttgagttaggaacctaagactttgaacccctctgtaggcagggaaatggtgtgctatgactggccacgactggccaggtccgggtcacgtggttatggctgcagcaagagggcaggcagaatactgtgactgacatcatcccagagcctcaagggatg

SEQ ID NO: 33030 - DNA, 426 bp, Homo Sapiens
ccaggaaaaaattgagacactttaatatttgttattggtctgaaaaaacacccaagtagtcatgggaaagattagaaacttgtttaacatctttgcacttactttataatttagtatttaaatattttcattatagatccagaggggcctataaccttttcagtacttaatgtctttaagagtcttaagctggtcttgggtgcagttcattccattttaaggttgagagagtagtgttgggatgtcctctggtaaaatgagtctcagcctcctcataatgccattctactttcattaaaattcttcttcatgatcctgggttaatggtcatggttttgcctttcagctctagagcaaggtttttttcttgtaagtaagcagttggttactggaaacagacctgtggtccacctggaagtgaaccaa

SEQ ID NO: 33031 - DNA, 443 bp, Homo Sapiens
cactccaaaagagtacacaacacattttttgcacatgaataaggccggactgacgtatacagcaccctgtgctctaactcataactgaccacctaagtgatggataagagagggagggcaagcatttccaaatgtggtcacatctcttacattatctacttggtaagcacatagagggccagaatgaacacctcaaactgggacgaggaacatatcggacaccgccacctgcaatggtttttttaaaagcacaaaatgcgtaccagacaaacactccacttgaaagccaaagggcgtggaggtatccgaggaagaactgtgcacaacacatttcctgagggccacacggcctctcggggaggaacagaaacaaaacccagccggagagttaccgacccacgtcaaacgaatgctaggagagcaaagccccaaacatggcctgg

SEQ ID NO: 33032 - DNA, 571 bp, Homo Sapiens
gctgtgtctggttttattttttgccttcaatgtttgagataatttatcagtgaagccttttgggcctgctatttgctttgcagttttaaattggtaactcagaactgttcagtctgtttcagtgtttgcgtcagtcttggcaatttgtgtcttttaagggagttatctgtttcatctgaactgctgacttcactggatacagcagccctccgtgccgccatcctgcccgtcagagcccgcatgcctgaggcgaggtttcgtttccttccgatatttagaatgctgttttctctcctcttggttgggtgttctttcaacctgaaaactcatgacctttggtttggggaaatttgactgtgaatttccttcctggatatctttttggttggaactcccattagacagttggaacatttggattaatcctctaacttacttcctcctgcctcccttcctgttcttctttctttcatggtgaatggacaagcactgcagtctcagcctgagccgggcacagcaagcaggactcagggctgcaggggaggtagctgtgggccaggtacagcaagtg

SEQ ID NO: 33033 - DNA, 507 bp, Homo Sapiens
tttttttggaagtggttcaatattttattaactataaaggaccctaaagagtgtgcagtaacagaatcctcaccatgcccgtgggatggggcagcgacatggccgcaacaccccaccatgagatgtgagctcagcactcagacactctgaggggatgagctgtgtacttgtctgcaggaggacacagtcatgagtcagaagctgctgttttccttccttggaaaggaaggtacgttccagcatagtgcagggggcccctcaggccaccccaggcttaggggaagctgagctgcctctatccttgcccagccattcccagcttccccctctgcagccctggccccacctgggcgtggctcccacaagcggggtgggatagagaggctctcaggctcccctgtgagtctgactccaattcctgttggtcttgtaaagtcagaagaaatcccagtgatgacaagagtataaaacaagacttgtcaaacttcattttgagccaggaaaatc

SEQ ID NO: 33034 - DNA, 528 bp, Homo Sapiens
gcaatgaggatcagaacttctgtggtgtggtccccgaagatggctctgcacagaaaaggtgcccgggccgagcactcttctgcattcctgacaacgaccgacagctctacgtcatacctgtctgctagcaggatgcatacaacagggcacccttttaggagcagtacaggtgcaaccgggagcccagcaagggccagggtccggccaccgtagacagacttgctgaccggcacaagcgtgagaggagccgtgccaggcagtccatgctatgggaggacgggatgtcacgcatggagtggcggtcgcacaacaagcacgactacaacgatgacagactccgtctgcgcagtactagatcggaccacacgcggtccgcgaggtgcgacagcatatacaggctccagagggagctgagctctgagcagatggcagagtcagcaagaatcacatacgccacccgctgcgaagcgagcggttgcgctcacgatcccgagcacgtcacgaagcacatgctacatgtgatgacgg

SEQ ID NO: 33035 - DNA, 448 bp, Homo Sapiens
ttcaaaattcatgcattttattgctctgtttgctgccatggattgaatggatgaatggaagaatgactccccaaatcccaagctgtttacctgaatctatttccagatgatgcgccaagttttctgagggaagcagaaatagaaagagagatctgtgacttattacttcttataggcacccccaggggcaaggtgacttgagtacaatgtgaagatgaggacagaagactcggcttctgctgtggtctagtggaggagaagggtcctcaccctcctggactctcagtcctgcacctgtccttagggagtggaggagatgctctgggaatagtgcccctgaataaattgagatcactaagggaaggctctggggagggaagattccttagcccagttttcatggtcatagaaggatgtagatgggtggaacacaggagggcagctaatg

SEQ ID NO: 33036 - DNA, 478 bp, Homo Sapiens
cagctttattcacttttatattgagtatttttaaatcagcaagcatttcttgataataaaactcttattaatctatagtaattttaaaatttgccacaagctcaggaatagaaagataaagtcaaaaattataccagaggatatatggaatttagtgtatggtactggcgacaacataaaacaataggaacataattggattagttagcaaatagtatatttgattatccattggaaaaacatcaaactgaaaaatcatttctttccttatgctgaagcaaacaaatgatttccagatccatcagaattttaaatgtaaacaaatgaaatcatagaagttctagattacaacataggtaaatattcatatgacattaaaagcatgtcacaaaatccagaaacatcaaaaattcactatttattttctcagaggggtgagatattagaagactttacattcgtttataaacaagtaaag

SEQ ID NO: 33037 - DNA, 493 bp, Homo Sapiens
tcaaataacatgagattttattgaatggagattaaaatataccagaaattgaatctttattggtatgcaaatattagcctctcaaagccacatatctacagaattaatgctaaattacatggcttaattcaatgataaatggtgatggtaattattttatttggtgaaacccacagactacacccttaaacggcatttaaacaaaatgatctccatggctgatgtcatcagttatagtacactgttcagggactacagggcacagatgccacaaaccaagccatgacccaactctgcaggggggatttgcagcctgtcgcctaggagtgtcccacaatgccaaggcgcagagccaaccaaatacacaggaacctctggggctgccaggtaagagggccctaagatgtggacccagaatcatgacctcctggagctgggacaattctttccctgtgcagacatgctgggtgggacagcgtgggccgcctgtcac

SEQ ID NO: 33038 - DNA, 416 bp, Homo Sapiens
atgggaagggtatggatatactggcctttatttcggtttgaattaccacaattatgacactgaataaactgaatattgaattttataggtatttcaggacagccaggagggggcgcacatccgccgcgaaactgtgagcaagagcgtctgtgctgaaccatggcgccaccagagggcgcgcgatcccgccccaaccaacttcccgctgaagtgccagaagcagcgaggagcttcaacttcctcagggcagcacgggggtcgcgttaacttggtgttcttcattggtgagtaaaaagctcctgtccacggccctgagtgccaaggagtgagtctttagagcactcagcagaggaagaaattcatctttatgagaggcaccctggtaggctagtggagttacacacaaagtctgatct

SEQ ID NO: 33039 - DNA, 399 bp, Homo Sapiens
tgtttcaaaggaacacacaggtggggggggaggcacactcagtggcggcagcagcgttgggcatccattctaatgttttacttgatgtcagattcatcggattgtgttgcttttggtcccacaggctgtgcccgcgtctctaatgtgactgggttggagatctccttggactgcgtgcttaccttggacctgggggcctacacggtcagcgtgccctcatgttgacaggctggaagatacttgggtggggaccacaccgtggggcgtcgtgtatttacgcgtgtatcaccccaagatgctgccatgctggttctgccgatactcgtgctatccggcgaagtcttccacgccctgcttgggattgagacgtcgctcgtacagggctatgtggttgacatc

SEQ ID NO: 33040 - DNA, 447 bp, Homo Sapiens
attttataggttttatttaatgaaagcaattattgctccaaggccttttatgataaagttgccagtttgtaataaattatcttacagttactttctaggcattataaggtattacagaaaggaggcagcaacgttcctgcttttatcagccaagaatatggttgaggagacagtgaggtagccagatcatcttcccatgtgggaaaagacctgttcccctgcccttgattcatcctgccagtcccctgcagccttatcctctctgcctcctcaatacccaaaaccaccaaatcatgtgacgggacgatgggtaaaaccggtagtgaaaggggaatgcagttacatgttcccaggccgtgtgcagaagaggtggggtttggagtctgatagtcttgggtttgaatctgggctcagccactttactctgggcaagtctctcaacctctc

SEQ ID NO: 33041 - DNA, 439 bp, Homo Sapiens
gggaaagaaatctgggttccttttatttttgagccatagaaatagtatcttaggacttatttctagatgcagtttctttaatgtaagccaattctggttatttctacttggagctgaaagcaacctgaaaatagccaccttggttttcatgttagagatctaaaaactttcatgttagagatctagaaactttcatgttagagatctagaaactttcaagattctaaatgtaccaaaggtctaaggggagaaaataaaatccttcaaacaagatttgcacatgctgatactgctcattatttcattataacagcccttccaaatcttgaatttgcatttttaaccagtgttagcaaatcctgtatttccctctttgggaaatatgggaagcatgagccatggcatattcttgaagctaaatctcagggcatcacccctc

SEQ ID NO: 33042 - DNA, 431 bp, Homo Sapiens
ttttttttcccagtctggcgctcctttattgccaaagtccaaggtgggaacagataggtctgggggcatgggggctgggcctaataggggccgggcatggatgggcctctcctgctcaccgatcctgggctgggcatcttgtccttggtgggtgggggccaaggaaggagtggtggggcttggcccaaagtctggtgtggctgtgactgaccacagcttgtgatgccccagccaagacctcaggcacaccccgtcccccactccgccccccctgggttagacaactgagagtcacagtgtggtgggagaagggacgtcattcctctaagggacaagcttttggcccctccccacaccagggcaggtacttatgtcggggcttatgcagggcagaagggctttggccaggtcagctgccaggggctggggcc

SEQ ID NO: 33043 - DNA, 486 bp, Homo Sapiens
ggtccctggaatttgtccctaggctttcccatatcagagacctctgacttggtgagactcccctaaagtcctgccggctgtccttaagtgtgtttgaagtacaggaaagatatttactgtagcagtcaagtcattgagactcagtacataaaaacagtaggactcaaggttctagatttgtatttttgaaatgagaagtaactacagagccgtcttgatgtatctgaatgctcatgaattggaggggggtaccagttagctgtcctccatttccaatgacaataaaacctgaagaagtagctttctgttgcattaaaaatgatttgaggttaatgatcatagcaattaatttcagaaaaaaatacacagatatgatcaagaaatagagcatagaatagaaccgtggacctgaacaagatcataaaagatcatctggttcaggcctctaccttcagacagggtattttctccattctaatagatgag

SEQ ID NO: 33044 - DNA, 550 bp, Homo Sapiens
gttttcacacatagcaagattttgttgttttcgaaggttgagtaatattcaattgtattatacaccacattttctttatccattcatctgtcaatggacaatcttttattgaacaatttattagtttttagtggtcaaagaacaagatcatgtcctttatatgatttatatgttttggttgttattttagaagcccttctccatttcagtagtataaatatatgtatttctgacctttttcttcttatactgttagtttttcagtataacattgaacttttaaaacaccttgactttttttctgagtatggtatgaattagggatatttgttacttttttcccatattaacagttattcacctaattatactttattcagttggtctagactttttcctacatatttgccatctttattataatttaaatcagcatatacacttggatttatttttggtctctctacatagggctatgtatctattgtttaattcttagagatttatgtggatatgtggtaggtatatgtcttcactcactgcgcttatt

SEQ ID NO: 33045 - DNA, 473 bp, Homo Sapiens
gataacagacgttctatctagggaaatataatattttgctgtggctctgatttacagttccctgatgattagtcctgttgagcattttttcatatacttcttggccctttgtatgtctttttttgagaaatgtcctttcagatcatttgcccattttcttaaatgggatttttttctttctgttgaatcatttgaattccttatatattttagatcccttgttggaggaatagtttacaaatatttttccccattcttcaggttatctcttcactctgttgattgcttccttaggtatgcagaaacttttgacttgatatgaacccattagttgaaatagacttttgttgcctgtgctttggaagtcttattcataaaatattttcccagaccaatgttctgaagcatttcccctatgttttcctctagtaattctatagtttcagggatcacatttaaatctttagtccatt

SEQ ID NO: 33046 - DNA, 509 bp, Homo Sapiens
gcaaaaacaagcagcttgcaaaaggcaactcctctcccagcacaatagcatttttgttcaatgctacttgtaaaatatcttttacttcactccaaatcaatgcagttttaaataactggatttgaacatttgtggaaagaacaagggatgctgagcagggataggaaggatttttacattgccaaaagcatgaggtcctgcctgtctccagggtcatgggctctgaaaagcattccaaggtacttcatggtgccttggccttaaggaaaaatttttttagaattttatgtacaaataggtgttgacctagtacctgtccctgtctccaagacagattaccgtcaaacaacctctctagattcactggactctttgacactgcatcatgttggacgttaggaaatacttgcacagacagctgttaaaccatttccaatgcacatgaaaatgttgccgctcctctgggttttactgattgcatcagccaaaaaggaaaggcaggagggaat

SEQ ID NO: 33047 - DNA, 577 bp, Homo Sapiens
gggatttctgtactaggtcaggtatccacatcccaaaatccatccctccctttcttcctcttcctgttgcctgaccacagcccacctgtgctcttgtagctgaaactaggccacagtagaggcatctcaggaggccagggtgtgtctgcagctggaggagaggaagtctatcctttgctgcgccaaagtgaagccggatcttgctcataggcaagtgtgtccctctgtggctagcactggtctcttgctgctttaggcactcagtcagggtcccagaaactcactcccattttctgccacttttcctggggtttggattccctccctcctttttaaggaacagccaagccaggcccagactgacccttcttcaagtctcatcagtcaatgctcctgttcttggcctcggaataccacctcaggaaaacaatcggttgagattggaatggccaggacttaactatttctgaaaactgtaaggccagtggattcagccttgccttacacttatccttgtcatgcagaacacaggccatctgtcctctgccatatgctcagcatgtcttacccaggtaca

SEQ ID NO: 33048 - DNA, 393 bp, Homo Sapiens
gatattttatttcctaagaagggtaggggaaaacatgtagggacccaatgtcttggtcccaaaagataaacccatcgtggggcctgtgaaagaagaatgacatccttatctcaggctgttcttggactcttcatcacagggtgtctgagcctgtgtggataaaatgttctggaataatggggccgctctttccttccccacccccatccaactgtgaaacaagttgtcatctcagaagtgccacagaagggggtggcctcctgatccacttcccgactgacctcacagcctccaagtcctggctgaagattccaggtggtaactgcaggggctggacaggaatggtgcaggtctgagcatgtgcacactgacagctgtgagcgatgggggacc

SEQ ID NO: 33049 - DNA, 397 bp, Homo Sapiens
tctgcctgtcatgtccgaccatccacagtgtgcataaaagcagttcatctctgtggagcggggaaagggacaggcgtctaaaaatccaaaaaacaactctgccaaagaccaacctgcggggtcagtcccggaattgcttctcaagcccctaccaaaacaaaggacccggggttgggggaaggcacactgtcaagccagggtgacctcctgaacaggggcgaattccatacccgtgcccgtttgtcccactggggctatggtggtcgacccaacagtgcccaagtccgcgaggctgccccgactcccgagagacaatcatggaggtgggggtggaggttggcggcattccaacttccttcggggcctctaggaaacagttggggtcttgcttttggga

SEQ ID NO: 33050 - DNA, 351 bp, Homo Sapiens
tttttttggaataaaagttttagtttatacatctagacacatataccacattacactgattattttacttacgtaaaagacaagtaggtagaaatgaccccacacgaatacacttgcacaagtccctgagacatcacttcacaccaatacaccagagacagacccagatggatatccccagtaggctaggggagaaggttgatgagaggccggataacttggcagataaaagccatatgaataggtgggggatagagggatagagcatgtgaaagaggagaaaagtgaccacagcaggcaagcggtttagtatttacctaatatttgatctctgggcctcagaagtgtgtt

SEQ ID NO: 33051 - DNA, 473 bp, Homo Sapiens
cataaataataaatgaaagattttattcatctttgtagataacaagcactcaaaggttaatgagtgaaggagataaccatctcctccaaacaaagaggctcttaataacgcagaagcaaaaatctttccacttttagatgaaaacaaactaaaaaataacttcaggcttcagatatggaaataaagcaccatttttcaaatggtagacttggcttacttaaaataagtaaatagccccagactatctgaaaaagaaaaacatttcaatgccccttgtgagttctaattacatggctacatgttaaggaacatctcagatctctctctgaacctactagtaaacaaaaattatacagatatatatacaaatgtagtcttccatttcatttttcatttgcacaagcttccagctatttaaccaggtgacaaatcaaagtgacaagatgcactaatattcgtgagaactttaaatt

SEQ ID NO: 33052 - DNA, 400 bp, Homo Sapiens
atggtacaaatcaaataagctgtaagttgatgttttggtagcaacttatagggaaaggtaaatgaaaccccaatcaggcatgcacttccttgtttggtcaggtgtgtcgccccatcggtatggggtaattgggcctagttctgatcttgcagtatcagcgtcttccagggtgggcttgtcagatgtgagattccgcgaagccatattctggcgctcccatctgtcgcatattgtttatcgtggtcgacgaagtctttgatggctttcacctggtcagccggggtagtgtgtctgaatgagagtcacacaagtggtgggcgtgtatgtcagtgtcgagtgtggtcaggtctatgagtgactggttcatatgtttgttgtgaagttaaggcactcgccattg

SEQ ID NO: 33053 - DNA, 369 bp, Homo Sapiens
acaacaatgagaatctttatgcatatagctttgtgatcaatacaatccttcagaacaacaagagacaaacaaaggaatacaatgtcccaaacagctgcagtccacaggctgacattgctaactagatttagatcatctggaggcttttgtaagaggaactgaggtgcagaggcatcagaatgagttgattcccggcaaaagggctaagaggctacagacatatctaaaaatcaagaaaccactacttgttaagtacttctggtgtttgcatacagtgtccaatacatagggaagatagcaagtccatactggtctttgtacatgctgtgtggtagaggctactgcaggtttctttattttctaaagtag

SEQ ID NO: 33054 - DNA, 429 bp, Homo Sapiens
ttaattccaaaatcactccatcctttacagtccgaccaccacctccctcgtgagctgtcctgaaatctgttgggttactgggaaggaatacgtgcatcataaagagaattctttaagcagagaaggagccaggacaccccatacaggaactgctgagagaataaagtactaacttgaccccaggctgtctaaggaagacactgggcctagtatgggatgtatagagctctggaaagggagcagtcctggaggtaagaaacggcctgcagaggcactttagcttaatagaggactccactatcagggaaggctgtgaatgggctgaatcaagccttgtagctagtttcagtggtcatcagtatggatgcttgttacggcaacggtgaaactatgtgccgtaagctagtggactgtcgatgggcaccatgt

SEQ ID NO: 33055 - DNA, 360 bp, Homo Sapiens
tataaaaaacagagggtcttttaaaaacattgcgattgcttgccccctttgaataaattagcccggtgaattaaacaagcaaacaaataaagagataaatagggaagcgggttcccatccgaaattggggggcgaatgaagagggtttctaaaaaccaaatgtggggtggttttcgtcaagccgggctttaaattattaggaaagagtagggagggcctgctcaacaaaaaggctggggggttttccctgaaagagagaaaacttacgtgtctggctgatggacaagggattctctgtgcacctacccaaggggggggcagttggcccatggttttaaacaacagggaggtcccgcgcta

SEQ ID NO: 33056 - DNA, 433 bp, Homo Sapiens
aaactggcctctgattacactgcattatagcctgcaggacacctagggccagctaggttttactctagatttcacggtcgtccccccccacggggtccaccacacttcttcatacaccgaaatgcaagttctgtcgttccctgccagccggatagatagacagatgggataggcaggcgcgagcttcgtggtcactggtcctatgatgtggaaggggcagcacagtcattaaaacttggtccagcctccttgcatcgtacacagttaaacagccaaatgtagtgagataagaaggcgaatgcttgtgaatgtacagtgcatattggcggcgacgctcaattacgattcgcccgctcggctctcctgttcaatcgtttctttggaaggaagagggtttatctcctgcgcgcacggtgtcttcagtatcgactta

SEQ ID NO: 33057 - DNA, 404 bp, Homo Sapiens
ctctttacaaaaggccttatttccgggccttgaatctagtcggaaggcgggggaaggccttacttcgccccgcaaggttttttgccgcttccccgagggggaagattattaaaaacggtgtctaggggcttggagccgtattcccccaacggaactttcccttccagggcttccctcggaagttcagcagaaaaggtggtcttaaaaccttcaaaccgcctaattgctgcttcaggtgggccagggtctgcgtaagggcacctcgtaggtgttgctggggcccttgttattcttcaccaggattgctagaggttcgtcgcatttgtccaccaaaaaaaggaacgtgcttccgggggccaggcctgcttggaaagggggaacctttccttcagccccaaaacgct

SEQ ID NO: 33058 - DNA, 474 bp, Homo Sapiens
gtctgaatcctttattagaaaccaagcaaactttagtacaaccaatacaactgaaatccggatctttgtggtcaaaacgctcccggggatttctcctccttgcggcaacccaaaggcctagttgggatgccctctgtggcccttgcatctcctcccccccctctcaagtcagggaataagggaaggaggaacccttagtctaaggcccttcattcttggatttccagacccgatttcctactatctgcaacgaggctccattggacaagaagggctacatgtcctagggtgtgggtggcggcctgaaaggaaatcatctcccgggccacttgatgcttccacggccctgctcttttatctaccgcgcgacaccagatcacaggggatcgggcagagatgccaaaaccatgctccttgtttattaaacgagaagcagccaacacacacaaaatgggcaaaccaggcagttccacg

SEQ ID NO: 33059 - DNA, 354 bp, Homo Sapiens
aactagtacataagcatttatttgaggcagatacagtgctgtgggacccctaggctaacagcatcaaaaccaatttttcagagactccattccataggaattactcaaagatccactaacacctgaagcaaagcagagaatctgttaccaccttgcagcaatccaagatctcactagaaaatatgttactaaagttgtatgtaatatgcttacagatcacagtgaaagtatatcgaatggcaaggtgaactatataggctcttaattcaatctcactactttctattactagagaactggtcagcatcttctggcaggatactgcataaaacagtcaactgtgctctcccggca

SEQ ID NO: 33060 - DNA, 388 bp, Homo Sapiens
agatgtggtggagttgatgcggctcacctcctgggtggacaagcagctgcgccgggagcaaacacaagcccggggtcgctccaagatgctgttgctcgccacgggagagggggtaaaaataacttttattctccagatgcgggtgatccacgaaggcggttactcggatgaggaccagcgcgggtttaccaagctcgtctttctgaacgtgttgaaatcaattcaccccatgattcgttggatggtgaggctcaagatcgtcttgaagtactatcagatgtaggaggatatgctcctgatacgagagtacgaactgaagtaattgacgaacttgtcgcattattacgtcatagccatcacgtgcctggttggggaccccttcattcag

SEQ ID NO: 33061 - DNA, 608 bp, Homo Sapiens
tataaagaaaagaggtttatttggctcagagttctacaggctgtacatgaagcgtggtgctggagcagtaggtgaagggtagccggtgtgtgcatatcacatggtaagagaggaggagagggagcggatgatgctgctagactctttttagcaaccagatcgctcaggaactagtagataaagaacttgctcattaccacaaggatggcaccaagatggccataagggatccaatcccacaatccaaacacctcccaccggtccccacctccaacactgggaatctagtttcaacatgagatttggaggggtcaaacatccaaactatatcagatattcagtgtcttcagccagtaatcagcactacagggtgtcttgggtgagcgtctgcatctgcatgccacggtacccaagagagctgaccgcatgtacatgggcaaacagcaaggcctgtgctgccttatctggaattctggtggaagtactatcaggactataagtttcttgagtcaagatcatgctaacttcagaccagtattctccaggtactccatatagtgcctgatatataatggctgctcgattggaagatgtgagaacggcatccc

SEQ ID NO: 33062 - DNA, 396 bp, Homo Sapiens
gggtgtttaatttttatacttttcaacaccccattttacttgttgctttgtcagagaaataagggaggtatctactcagagtattttggtcattatactttctgtgtttacttcaacatgtgtcacgtggccagcggctttttcttctcttccctctgcacctacctgcaccttctctgcctttcctggaggggatgtatttatgttatttattcccagtgtttctgctttcatgtcctcctcagtggagagatttggaaactcatcatgtggattcaccagccagctgctggaattgcctgaagagcgatttgtttgtaatgtctgcctcattcacgttcttatgaagtagaaaagactgtgtttctgcctcagttgcctctgtctttccaccta

SEQ ID NO: 33063 - DNA, 435 bp, Homo Sapiens
ggcaaactagagagtacacatgtcttcccctcctagaaagcagatcctgttccccccctacggcctattccctacctcttctctgttgtatcagcctttcctgcttcccactgctgatggaaaggggcagagctgtggactcaccagtgccccagcaacattctgtagctctgcagccccagagagatcccagcctcgaatgacattgctgcagagatcagcaaacagaaaccaaagtagaacctttggtctatactggatatgtccttgataagatgtggcggtaccaggttttttggaacctaggcttggtgctttgagggaaaaaacagaggtgggccattgagtggtgtttggtcatcagcaaaagtgtgggtgatccctgaccatgacttttcccctataaactcaataaagggtgggtcttttgggtcc

SEQ ID NO: 33064 - DNA, 523 bp, Homo Sapiens
gcatgtcgagccgccttcggcacctcaaagaagtctttctagcacccattccgttgtggcgccgcggggccccagtaggttaaggtgaaccatgggccagtagctggctttccctaaagagaaatccctggctcaatggaactaggggctgtggaatttcctcccccaaaaataaaaaacacgccccccgggcggccaaacccgcgaaccgttttcttggaaacaaaaatctccaaaaatgtgggagctttccctgcggaggggcccattctaaccgtgggggattccataacttcaacaacatggggaaaagtttcccaacaacgcccgaaaaggctctctccaaaaaaaattcccaaacaatattgaatcgcgccccccctcgcgccgcctcgtggcccaccacctttcacatttgcgcacaaggataacagcgtgggtgtggggtcaaaacttcggcgatcttaaacgcgcccttttttctgtggtgcggaaaacaatgggggaaaaagtgccttatatt

SEQ ID NO: 33065 - DNA, 603 bp, Homo Sapiens
gggttcctatcaatattttgctttttataacaagggtttgttcatattgatgccatttttgcaggatttcttcgtgatttctgtccatatgaaaatgctgacattaaacattaacacatggagaccgtgccctgtggccctgccgtggctgccagcatggtctgtgtttccttgtggattcacctgtggccctgctgtggccaccagcatggtctgtgtcctcgtggattcactgcagctgtcggatgcgagtttctgtcataatcatttgtctcctgatacaattgttcttattcttttccaaaactgtaaaataatctcctccctcaaatgcaaaggttgcttttgctctgcttctgctttctttgaaataaaattataacgctaacggggcccccctcctatatttacccgcctcccactgttcggctcgccctcgggccctcgaaaaagcttctcccagaccattccggtttgcggcgcgcgccgccccattcaggccaatttggaaccatggggcccatcagcctggtttcccctaggaacaaaccctcgggtccatggaacctagggcggctttgggactctcctcccacccaaatc

SEQ ID NO: 33066 - DNA, 400 bp, Homo Sapiens
tctggcctagtctattgatttattttcatttcttcaaaatgaggtaaaaaaatcgcatcatctaaaacggggacgatgatgaagtgatcaaagacaacagccactcagtgtttcaggtgtgttttaacccaaaatcacacaacatgtgagaacctgaactccggagccaggggcatctctgaggagaatgtggaaggtgggcgggaggaaacagtgattcatgtctagggaaatttcagggctgcctgctctaggggaaaggaaagcctgagcctctcccacagtgtgctctgttaaaattgttgggtgacttattgtattcttcgacacaaatattcttgtttcgtcctcttttaaatttttttatctctattaaaattctcactttgttcttgcaaaa

SEQ ID NO: 33067 - DNA, 399 bp, Homo Sapiens
ggatctgcaactgggccaattaaaatgtgcagcatgtacaggaggtgggagaataatcaaatgaataacaagtattaacttttctgtattgctaagttgtaaacttaaaggagacattttaaaaggatcttaaattctgttccttaatctcagtgacatgagataatatgcatattgctacatcttttctttttaataacctataaaagcaatcaggtgtgagaacttgaaattttgtgatctgttacagtatgcacattatgaagctcacactcattttcacttttaagtgtctctgttgtttctttagttttcatttttaacattgtacccataaaaaataacatatgttgttgtaaaatgcttttattttctcttcaggttcattaaattacttcc

SEQ ID NO: 33068 - DNA, 799 bp, Homo Sapiens
gagacggagtctcgctctgtcacccaggctggagtgcatctctccatcttaggagccctgtctcatgttccaaggattcttatgtccacctgggtgagaaacattgcgctctcccatgtaatgctgtgtgttttactttctgcttggcgtccaacaagggtctctttttcctgaatcattaccccccactgaccccatgctaccaaccgacaccttatcccacaatgttgcccacctaacttaagtctccattttcctgtgttttctttccaaaaatacatgcgcctagacgtctcccaaacattcctcgcgtctcttataatttcccatatttgtaatgacaatttgatgtattcccttacgccctccccacgcctataattcttcctctaactctgttctcacccgacacatacaactcctactttgctattgcccgagcagcatccatcacaaaccttcctttgactcgtatctcactagtgagtctttttgcttacactcggtcttttccgcactcttttattgataccttctcgcctctcgatgccccttctcgcctatctcctactttgctcgtagttaacgctcgtgtctctttgtcacattctccgctcgcctcatattattttttccggtcctccacctttttccctttccctctacgctctcctttataaacaatatatccgttctcccacgtgcatcattgcgctccctttttgtcccggtacgcagtcacctcgttttccactgttctcccaccgcatcgacgtactgaatcactcgtactctgtcc

SEQ ID NO: 33069 - DNA, 645 bp, Homo Sapiens
gtacttcagttggaaagtgtgtttctcacagtaatatattttccaactacttaatatgtatgctagtgttgaataaacctggacacaaacagacatccggaagaacacaacacatgtccggcccgcctcggcccctcgaaaaagctttctaaaccattcggtttggcgcgcggggcccccgtaggtaaggggaaacatgggtccatacctgttttcccaaggaaaatcctgggccatggaacaaagggcttgggattcctcaccaaataaaaaaacccccccggggtggcaaaccgaatcgtttttggaaaccaaatcccaaaaggggaagttcctgaaggtccctttaccgtgggattctaatccacacggggagtttcccaaaggggaggcttccaataattaaaattttagggcccccgggcccctggtccaacttcatttcgccagaaacattggttggacaaaattccatttaaaagcaatttccggccccgaacattgggaaaagcgccatctaacaaaacggggaatttgagttggaacccttgaaatatccgcccaggggggggaatatacagcacacccttggggtcccccctttggagcgataaataaaaaaatcgcgtcccccctatggggggg

SEQ ID NO: 33070 - DNA, 395 bp, Homo Sapiens
gggtggtatcaccaagcaagtgaaacagtttttccagaatatttaactaaaatttaaatagtatactaatttgtcattcatttatcatattaactttcatatttcatacttaggaaattatattccaaaaaatctttctaagctcttgaaaatctatagttattcattaccaaaatgaagttgtgattttgccagctggttcccaaaatcagtctgtgaccagtcagttttaaactaataagcagaatgagtataaaaagtgggacaaattgttaatgccactgtgttatagttagtagtagaacaataccagtgattgtttagaagattttatatttgtattactaattgtatcttataaaagcgtttctgttgtatgtttttttacctgttgt

SEQ ID NO: 33071 - DNA, 501 bp, Homo Sapiens
catgttgcggccggcctacggcccttcgagaagactttctaggaccatatcgatttgggcgcgcggggcccaggtagggtaaggtgaacaatggaacatagcctggtttccctaaggagaatccctgggaccatggacctagggggctgggtgcattcgtcacccaaattaaaaaaaccgcccccgggcggggcaaacccgaagcggtttcctggaaaccaaaaatccccagaatggggaagtttccttggaaagggccattttacctgggggattcctaattcaaaacaggggaggtccccaaagcgcggaagcctcccgaataattccaaaattttaacggcccccccggccccgcgtggcccaacttccaatccggaaaaaataaattgggttgggaaaaatttcccacttttaagggccatttttcgtggcccccggaaaaagtggggaaaacgcccccttccaaccaaaaaccgggcccatttggcatgggaaaac

SEQ ID NO: 33072 - DNA, 465 bp, Homo Sapiens
gggatctggtgaagctgcaggtgctgacaggagctcaaatcaagtgaggaaggtgaaggaagtcaacagctcttacttattgtagtttatcattatggtcagatagctatagaatcctgagtgactatgttctgaaatcacactaatgtttgaaaatggctgaatgggacagaggagctaaatgggtttgtttgtttgactgtaggacttctcagagtctttaaaatgctgatgggcactgtggctctctaatagtgggaccagacatacggaatttctcaagttcatttagaaacagaactcttctttcagggagtaagtatctttggaatctgtgttgggaaatgcttcattagtcagaattcattttttgaacaaacatttgcactgctactgtgcaccagacaccattaagtgtgggggagagtatggtgaacaacagaatagcaggcaagatggagggat

SEQ ID NO: 33073 - DNA, 415 bp, Homo Sapiens
ggggtcctcttcctccttcaactccaaggtctcggatttgacgaacatcctaccgaagagagaaaggggaaaaaggcagtgaggtgtaaggaaagaaacagaggcgcgatcttcgtgtcacaggggcgtgctccggcgcgcacccgagaagaccagctccgaatggcgcggagcaggaaggcgaaggaagaaacccaggcagtgctaaccaagtctctgtcaaacattggaaggaaatttcagttcagagatgtctgaagtgggactcagtggtcagcagaaacctgatgacagcagagtggtccagcttgtttctcctgggggcgttcttccgaggatatttgggctgcctccagaatcgcagtgtcttgggccgccgcaaggatgacaacgaagcaagaaggcccctgccaaa

SEQ ID NO: 33074 - DNA, 647 bp, Homo Sapiens
ccggcgccgcgatttaaaatattaaaacatgtccgggccgccctccgccctcggagaagttttgctagaaccattcggtttggcggcgcggggccccacgtaagggaagttgcaacattggcccttagcctcgctccctaaggaacaaccttggtccactgcaccaagtggctggggaatattttccgccacaacacaaaaaattgccccaggacgggcccaaccccgagcccttttctcgaaaaccaaaatccccgagaatggggaagttttccggagaaggccgcatttataattagggaaatgcgcaccccaaaccaccgggcgaagttacccaaaggctgcaaagcgctttccgcgcagtatcccaaccagcttgtaccgcgcgccccgggatcctcggcgccgcggaccttccctatcagacaaagagaacccgcgcttgggtgttaactttcgcatttaacaacgccaatgttccgggcacgggaaatatggtgataacccccatcccacatagagcggggcacatggattgaaaccccgggcaatcccccccagatggagaaattacttaaaaccttcggccgcccccttgcgcgaatttaattttttggcccatatgggtggaaaaagcgggccgccgc

SEQ ID NO: 33075 - DNA, 352 bp, Homo Sapiens
gggagagggaggatagaacattgcaggtggaaaaaggagtatgcgcaactccagagagtaataaaactctggtgctttggggcaactttgaagtggatcagtactgttagaagggaaagtggtaagggagagtgctggtccaaaagtttcggtgtactcataatattctatggctccagagtgtggaacagtcttctgtaatgagaaagccacaagaaaatcttcaagaggaaagtgagtataatctatattaagctttaaattacattaggggaaactacttacctagcccaaacaggaaaaaacaaacaaacaaataatgtaaggccgcctcggaccctaaaaaacttgt

SEQ ID NO: 33076 - DNA, 360 bp, Homo Sapiens
gggagctgcctcagtacagctctgaccagcatttcaaaagccccagacctcctggacccatagccagcagcccgctctagagacttttgtcccctcagtttattgaccccacgagagcaggactttctctgaaggccagctgtccacacacactaaggacaccctggccacagagcagcacagagggacacctgtggctgccccctgtgccctacagcctgaggtctgagcaccgacgggataatctggcttcctgccaggctcccaacttgagcccctgtgtctccttccagttggaaaaatcccgtaaaccccaaccaaaaccctgcgggtcgcatcgaccctcgacaaatttttcca

SEQ ID NO: 33077 - DNA, 838 bp, Homo Sapiens
gggaggtgagaaaggcccacctgtgtcctgattgagggtctccagggttctttggggaccgagctattctcagagggttgtggtatggcattgtcatttggatttgacctgacgaagttgagcacccgtttatatgcttattggacatttgggtaacctcttttgtgaaagggtctatccatgttttttaattttacaaatttggattgaatgcctctgtcccatggatttgtaggagatcttttatattttggataagagttcggttccaggtacattcattacaaatatctacgggggccaaaaccccccatggtaaagatgccttgctcccccgactcgaagccagaaaaaactttcatagacctatttccatctggttctcgcgacccagatacgaaaatgaaacgtgaatataaagacgtttccctactgagatcctgaagaatggacataacgggttggggtttcaaaagcaagcgccatgatcccccccgcccctgagaggcccctgggtggattattttatgctctgctttggccacccgccgccgcggggtttgacggggggttgttgccccttccgggccccccacatttatcgagtcgacatctcgacgcctcactcgaccctcacccctgataggatagtagccgcagtatcgctttgcctacctcatcctctcgaccccaaccatgcttccacatggcattccaactttattttcccgttatcacctgggccgtcattaattctgtttcgcgaatcccctgtaccagatagaggtggtattagagctcgtatcatcttaagcccctcccacgcgattacagcgca

SEQ ID NO: 33078 - DNA, 826 bp, Homo Sapiens
ggagaaaagcttatatttaaaaaaataggtaatgatacccaggtaattctttgctaaattataaaaattcataatatttgatctagaaaaggaactagagccctcgcactgcccctttgaattgcagatgtggtcagtgttctgaattcttgaaatttctgtagtaagcagtagagaaagtgactggtgtgtgagtgtcccctcctccttcaccatcggaagcagatctggatgacctcatgcagtgatactttgctccctgaacattgcatctgttctcagctgcaggagaaagcagtgctaccccgcagagcttctctcacagcccccctgagggagacggaaaggtagtgaactccaggatggctttaccagttctcattagttaaaaattgacatccttagcacttcaatttaaaaacatagaggtggacttttaaatgttattttgagttgactctgggagggtgatagtacgacccgccaacattttcacaccaccccccctttgccgcccgcctcggccctccagaagttgggtgaacccctcccctggggggccggccccacaccggaccgcgacgccggcccccgagcccttcccagcggaaccttgcggggccgccgaggggacgggggcgccccaggtaatagcatcgccccacaccacgcacgccgcgggcggaaggacgagaggggaagagggaggcgcccgctacgcggtgggggcccggtcgaacacccttctcccggcccagtctgtgcatgagagcgggctcgtaatcacacgcggcgagccctcgacgcgcaccagcgatcgcgtctc

SEQ ID NO: 33079 - DNA, 479 bp, Homo Sapiens
gggtgagtataggtgggtgcagggccaggaggcttctgcctcctgacagtggtaccagagatagcccgttcactgatctcaaatggaatcagtgttgtgtgctctgcaaggcccccagaggtgggggtgaggcagagagcagactgcaaggagggtgaccaaaagtccaggaagtccagggcagatgggtcacttctgaagacggtggagccgtcctcagcgccaggccacacaaagaggtctagaaaggggaggactaaaaggaggtcaggacatgacggtcagggtaccattggtggatctgatgaatgtggccacgggagactgaggtgtgggtgggatgcaagtggagactgcccctgcaacagccttgacaacagaagcaagaaggaagcagagcaggagttccaatgaaaagttaggagtttgggtttgtttttagaaatgagagaactgagcagattttttggtcagaacgc

SEQ ID NO: 33080 - DNA, 387 bp, Homo Sapiens
gggagacgcagcctagcgcctccgaaagccggagatcttggcggcaaggccgcccctgacagcggagccagagggacccagggggctgccagaggcggggaagcactgcagtcgcccctttgtctgaccgtgagtcccggctccaatgcttccttcgcctcttgaatcacgcgacacggggacctcgttcccccacccgcggcgctaaaaacctgccgggtttctgaggagctctcctgccgcctgtctccaaccgaaggaaaggcctctctccaagcccccttagccttccgggctccccgagggcctccctcccagtgcctgggccacttaccagttcctctcctccctctgcaatttggaatataaagggaatgcatatgaata

SEQ ID NO: 33081 - DNA, 526 bp, Homo Sapiens
gggaccaccctttctcctggtgccctgtccataactaagtgtccagaagtctcctccacaggcattttctctgctcattctcctagtaatcctgtgaaggagacgtgttctccattctataggagaggactctgaggttcagaaaactcaagtcagagaaagcatgaggttggacttcgcttcttggcccgggtcggactgtaggctgctgctggagctgtgcggctttgggtaccagagcaatgaggaagcaggacccagacccctgactcctaactccaggtgaagcccaccctgagctcaggagcagagctgcctccatcgggtgtggagagacagagcctcctccccagccatgcctcctcatcggcccacgggagctgctgtgactctgacccctgtacctggctctgtcgaccggaatagtcagtgggcagccagcacacctttgggtgctctgtatgagtgggattttctcctgattagacattttaaaagattgtcaacaaaaagaacaaactctgta

SEQ ID NO: 33082 - DNA, 386 bp, Homo Sapiens
ggtccttaaatgggcacttcatttctgatgagtgcacaccaattattgctattttaatatcattgagaatactacagaagctaaggctatgtttctttggtaactacttcaaatttctctagaattatgtagcatacttacattttgctgcatgaacaatgaaaattaacctctgcctttaaatggaaaaataactttctgtagattgttatacagctactatgaagagctcttaatgaagaggaagtggcagtggtctatatgtagactgaaaaaatatcattaataaagttcaaagactgatggaatttcattgcccttaaagatatgaaccagatctgttttatgcttttctccaattatactaactagcagttgaaaagtaa

SEQ ID NO: 33083 - DNA, 446 bp, Homo Sapiens
ggaaagcacttgccttctaccaaccccagcttgcaatcactgggccttcccctcctatccaaggggttggaggggccccttggctctccttttggcaggaggagcctgcttcattacaccaatgactctgccatccccctccctggccctagaccccaaacacatctccctctacccaatttactcttctcgccccacctagggacagattccccctgctctttttgtcctagaaaccccgctagtttgggatggtagcgtctggggtggggagggcttccccttccccactcgagggtgcgggtggggaagggggggtgggtggagacagccctggggcagggaggatggtctctccactgtagaaagtagagtaggattgtggtcagacttaatttgaggcatctagtgaagacacgtacaaatccaccaaggaaaaagattcc

SEQ ID NO: 33084 - DNA, 384 bp, Homo Sapiens
ggggccctggtcgcgtgtcttccgaactctgctgcttcgccccggcaagagcacttccttccgcggctgctaaaactggtgcgcgggttcccaacttcgcagaagagcttcatcggccccccgctagagacctcagaccgcagccatcgacgcctcgcctcggggatctgtccccaccctcggggccagctcaccatgagtcaggccctgtgctaggtgctgggatgaagcagtgactgacacaggcctggacctgtccttgggaagagtgcgtctgtgacacagatactgtgccatgtggcaaagtaagcgcgtgggacagcagagccttgtttgccattacagtaaaaaacccaaacacaaacaacgaaattaacatgtcgc

SEQ ID NO: 33085 - DNA, 480 bp, Homo Sapiens
ggctcctagcatctgctggaagcggggttttggtggccgcttactcccaagcagtatagtggtgaccgccctggagggagtgtggccccaggaaagaccccaggctttagtggcccccagggacgaggagcccagcccaggacacatcagcacgccaagaagctgcctcgcccgttggaggcctcggctcccagggctgttatcacagcaggaagagcagtgcaaagtgtcgggtccagtgggccttagtgacggggtcagattactgctgtgagtagtatggggtgtgcaagaaagggtaataattccactctggcgcttttatttttagataaatggatttcaaatctaaactgatcctaatatagcctttaatgttgtagaacagactttcttttttagttttagtctattgaccaaggaatcacttcttacagatttccagcagtgtcattcacatgcattaaaatgtttaaaagg

SEQ ID NO: 33086 - DNA, 367 bp, Homo Sapiens
ggggaaacctgattcagatcacaggagaaggtagaaaaacatttggttcaacacaatactgccccccttcttttttttaaagggaggaaacatatttcaaacctaggaatagggaaaggattcaagacccatcgtggaataaaacacagaatttaaaatagcatccgatgtgacccaaaccagcaacaataacgagaaaaccacccagtccttccagagatgcaccttgtttctgctgcagtgttgctaatcaaaatcgatctgcccatccaagcaatttaaagaggaagggcggcatttgtagaaaatggtacatgttgataaagcatgacctgtcccacatggagagcaataaaaggaaaacaag

SEQ ID NO: 33087 - DNA, 406 bp, Homo Sapiens
gagagaaattaagctttacaaataccccccctccaggctgaccccgggcccctcctagtcagccagacggccacatcagctcagctctgagaagaaagcccgtggttgggcctggcagagaggggcaggtggtggtcactgcaggtctgtccctgggcgctgccatggagaagaggacacactggttatattaactctcttcatattcaccaaaattaatgcctgcaagtggacaggcgcagacactgtggcagagaaactgtagttccggactagcgggtgaacccggggccatgttaaggaagtggccaagccgttctgctcacgtccccggtatgtcagccactttcatcagttttgttttaccttgtaataaaagttaccaaggagttagcaaaatctaaaa

SEQ ID NO: 33088 - DNA, 404 bp, Homo Sapiens
ggaaggcttaaagtcttggatttgatgcatatgacttaatttgtatttgtgctagtagctgtaatgtcagtgacaggataacaagcaaatgattagaaatctaatagtaatgcttgttcctttgctatctatgctaacaagtacatagatagcctaagataaattatacttaggatgaagctaaaatgcataactgagacaccttaaaattgtactaccttgtgctgttcactgccatcagggaggtagcataaaatgaaagataaagtctgaagactggatccaggcaaattcatgttctttctttgtaactcactttcttcgtcaacatttctgtgactcaatggatagcatatttccatcaagtagcacgtataacgtgatgctttcatgtttctgcctta

SEQ ID NO: 33089 - DNA, 427 bp, Homo Sapiens
ggtgttctcttctcacccaaggcaactcttaagaaagaacagtatgtggaatgttgcatgtaaaagatttttgcatactcaaaaaattgctctgacataacaggggcatgcatttaggggatatatggataaactagggaggaaactgacagttattgatggactcacatatcccatagtgaggtaggcattacatatattatttcagaatacctggtatgtttttgcctacaaatcttttatttgattttgaagaaagctattgtataatgtttgaagaccagtccctgtaagtaggactaatgtgtggtggtggcccatagtcttctggatattggtttgtttttgtcatagatttcattaataaatttatttctgccctcaactatatatacaactgagtaagccatttaagaattctgactcc

SEQ ID NO: 33090 - DNA, 355 bp, Homo Sapiens
gggctaaaagatggctgctggcgcctggcagccaccgcctgggaggttactgtaaggcccgcagctcccgccagctcccgcggactgctgccgcctccttaccatgaagccagtaagtcgtcgcacgctggagtggatttattcagtgttgctgcttgccatcgttttaatctcctggggctgcatcatctatgcttcgatggtgtctgcaagacgacagctaaggaagaaatacccagacaaaatctttgggacgaatgaaaatttgtaactcttctggatttaattatctgaaaatacagttctttccctcatgcttatgtagatataaaaataaaattcataatgcaaagcc

SEQ ID NO: 33091 - DNA, 399 bp, Homo Sapiens
gggaggctcttgcctgggtttgcttaaggtcttgggccctagtcttcctcaggagattagaatcccttcaggaaacacctctaacatactaggaggctcatctattatatacctgctacatgtcagccaccattctgggttcaatatgcattctctcatttaatctttgcagtatctctgcaaggtaagtattattatcccagttttgctgatgtggaaatggagttgcagagaaattaagagatatactcaagatcacagtgttcatgtgtcatggagccatttttgaatcctgtgagagacttcagtgctgatgatcggatgaccagaccatcaaaccatgctggaggtgattttttaattaccattctgcctctgccccgttttgttcaatactcc

SEQ ID NO: 33092 - DNA, 378 bp, Homo Sapiens
gggagggcctgcctttgagacttgtcactccctgagatccatcgtggcaccaaatgtttgccgagctccgccctgggagggaggcctgcagcctgggaactgggagacctgggtcccagtggagaggcctcaccatgtagtctcatgccacattttgctgcccttgtggactctgagcttggtgctgcctgttgtctgcctgcccctgacctgaaggacatgcccagctccttctctcatccttgcctctcttttgcatcttcgtaatacatattcactttttaaaaaaggaatggctctttgaagctaatggctatctaaatctttcttttctattgtccagcacagtgtgaataaatacatacaggctatgattcc

SEQ ID NO: 33093 - DNA, 562 bp, Homo Sapiens
ggggcaaactgtggtaggaaagacctatggcctgtggaaatgcgtgcttcctgaggaagacagcggggaactggcaaagccaaagatcggatttccagaaacagcagaggaagagctggaagaaattgcttcagagaattcagattccatctattcatcaactcctgaagttaaggcctgagcatcagacgtgtgctgccgaaaccatatgttcatggactaaacaagcagagacaagcatccgccttcagagttactgtctgcctgaggcaaagaggggcagaaaaatatttgggggcatatggaagttagcctccaggtgcaccgaaaccagctacctcaggtggttgcccccgtggagtggaaaaattgggctgaaatggtcctgaaaggtggccagggcaggaagggattgtggcctcacccataatggcccattaagcccctggctggttttgggaaatggaaaaaagcccaaacttttaccaaatcctcccatttttttaccaccctaaaaattttcccttttttaacctggggtttaaaggggttaatggaaggg

SEQ ID NO: 33094 - DNA, 766 bp, Homo Sapiens
ggataagaagtatgggaaaacatttagaattagttcatcctcccatgcacattggagaattcataccagtgtaaaaccttgtcactgtaaagaatgtggaaataacttcaattggagatcaagtcttcttcaacataaaagaatccatgctggtgtgaaaccttttgaatacaaggaatgtagaaacataacagaaatagcaaagctcttaaagctcttcagagaggacaggtagatctgaaaccctataaatgcaaaggctgtgaaagcccttattgtcaatgatgagcttacacaatatcagaaaatccatgatcatcaggagtcctgtgcatgtaaggaatgtggacaagcctttgtatgaaaatttcactgaagatcagagcactcatattcttaagtctatgactgaaaagattgtgggaagaactttaggatgccttttggttggtcaacgtcatagtattcatatattcctagtgggacaaaccctttgaaaatgtgaatgtgggaagtctattcagaggaagtactctgttgagaatgtctttaaatgtcataaatacaggggagccagcattattttgatttactctcttgttagttgaataatcttaatttatcaatcattagccagccaggaacagtcaaccttaggggaggcagttattggaactaagtttacctggcgatgacttcttggtcaccatttcacatcccactggctcttgggaaaattagaacgggatggtttaacttgggtttc

SEQ ID NO: 33095 - DNA, 567 bp, Homo Sapiens
gggagtgtgggttttgtgagtcggtcgggttaaccggccccgaggccgcccggctggagcggcggggtcacctatgggccagtcgaaaagcaaacccagagagaagaaagaggaggagaagagcactaccactttagttacaaagtctaaggagaaagtaatggagaaggaggccaagcagtctgacaaggagtcgcagcctgccgaaagcctgttgttcgcgacatccaagcactcaaggccgtcgtcttcgtctgaaggtagggagatccagaggagaccggccgcggcaaggcagcagggatgggacctctttctaaggatgatgacccgggagacaaacctgagacaaagcaaaggtcaagcaagaagagaagtgtcatcccgcagatcatcatcacccgggcctccaacgagacgctaatcagctacggcatccccgacaacgatgaacagagaaccattcgggagcatgccgactggggtccttaccaccgacacaggagccccagcacaatagcagcctatgatgtacacaacacagaataaatgagagctctcggcaaa

SEQ ID NO: 33096 - DNA, 783 bp, Homo Sapiens
ggagagcagctatggtgaagcaggggcatacgtcttccagagccagctgaaaacggagaccagtggagacagaattagccaagactgcgagctgaacagaagccccacacccttgtcgcctttgccatttcagaccaaagaaatggcaagcccattggttggtgacaatgaagtcctcgctctgtctccaccagatatatccttccgggcttccctagctgcacagcacttcctgatggaggaagagaggcgggccaaggagcttgagaagctgctcaacacacacatcgatgagctgcagagacacaccgagttcacgcttaacaaatacaccaaactcaagcagagtagacacatatgagctttgcaccttttctgtttgcttcctctccaggagaaaaagaaaagcttccgagaaacacttgcaaagcggactcataaaaccgagaaatctggcttagtttccacaagtaaatcacttctgtaaggcagctagaaaactaggattttgttctataaagctgattctgtttctgcagtccacatactaattgttctgttaggatagcataaacatgcatagccccaaagggcttctttcctgtctaaggaatggcttgggattataacagaattatttctgactttaatcatggaatgctaaaggtccccttgccctgcgtattaaggcagccaaaaaaagggaattgctcaccctcccaatggggagggaaactgagtggcaaccagccttgtggctggggacaaaaccccaaggccttc

SEQ ID NO: 33097 - DNA, 732 bp, Homo Sapiens
gggagaggctcaaggctagctttgcccctatggaggacaagctcaaccaggctcacttggaggttcagcagctgaaggcgtcagtgaagaactacgaggggatgatagacaactacaagagccaggtgatgaaaacaagattggaggctgatgaagtggctgcacagctagagcgctgcgacaaagagaacaagatgcttaaagacgagatgaacaaagagatcgaggcggcccgtcggcagttccagtcacagctggctgacctacaacagctgcctgacatcctcaagatcacggaggccaagctggctgagtgccaagaccagctgcagggctacgagaggaagaacatcgacctcacagccatcatttcagaccctgcgcagccgggtaagggactggcagaagggatcccacgaactggcccgagccaggggcccgcttaccgagatgagctgcacgcccccccagggaggaccccttccttttttcttggctgccgatttctgaaaagagtgagctatcatcagtgctgtgaaataaaaagtctggtgtgctaaaaattccttccgtttccccgacaatcttcttgtcggcccgccctcgggccctcaaaaagtttccaaaaaccttctttttggggcccgggcccccccagggtaaaggaaaatgggccaatacttggttccaaggaaatcctgggaaaggactaggggcctgggattccccccc

SEQ ID NO: 33098 - DNA, 383 bp, Homo Sapiens
ggatattttattttcattttaaaagctcatgaaaggaccaaggtcattcccagcgacccgttctgggtgccgaccacggaggaggagtacctgcactttggggagaaggcggattccgagaaccaggcccggaagtacatgaatgccgtgcggaagcggaagggcctctatgtggaagaaaagattgtggaacacgcagaaaagcagagaaccctcagcaaaaacaagtagctaaaaagaagtcactactgctggtggcggggccttttctttttaatgaattaacaagtattatcaagggtctaatccgggaaaatctcactttggtaaattatctgtgtggattcactttcaataataaacatggtctatatatttcaaaa

SEQ ID NO: 33099 - DNA, 739 bp, Homo Sapiens
ggggtgactgggaggtggagaaccaagggaacaagcccacccccatctctcttcagcagttcttggagtctgactctgcctctatttctgcctagtttgaaacccgggcgcggctggagaggctctccaccagctcctccataagctctgcagacctttttgatgagcagaggaagcagactgcaggaaactacaacctttccaatgtgctgcccaatgccccagacatggcgcagttcaagcaaggtgtgcgctccgttgctggaaaactttccgtcttcgccaatggggtcatgacgtccattcaggatcgctacggttcttaatcctggtgccaggctgtccaacctggtaaaactccacttcagatggacctgagaccacatctggctgcgccaatgccccagctgctttgtgggcaggctctactagttggcgaggcacctgcacatttctgagtgtccatgtttcctttgagacatccccatttctatgtaggtgggattttgctttcatttctgatttaaattagctccttgtgtccttgctttatctttggggcatctttagttccaagaactggaagccagagctgcagggtcctcccacctctctccaaggttggtgttgactgggccccggaaatcaatcccccagcactttacttctcactgcaaaggagccaaaccaaccaaaaccgccaggaccataaagtggcccagccccttggctgaacaga

SEQ ID NO: 33100 - DNA, 832 bp, Homo Sapiens
gggactgggaaccagccgccaactgcgctgggcgggcgggcactgcgggcgggacccgcagcccaggccagggcagacctctccagacagcagtacagattaaatatcaagaagtaccaagccagatgtagacatttcttggcatggagaaccaagcccataccacagcaggagcttctccttgtgaagctgagcttcaggaactgatggaacaaatcgacatcatggtaagcaacaagaagctagactgggaaaggaagatgcgggctttagagacacggttagaccttcgggatcaagagttggccaacgcacagacttgcttggaccagaaaggccaggaggtggggttgcttcggcagaagctggacagcctagagaaatgtaatctagtaatgactcagaactatgaggggcagctacagaccctaaaagctcaattttctaagctaaccagtaacttcgaaaagctgagattaccaccaatgaagcaaaaccaaattcacccgaaacgagtcctcccaccaaaagaaaaactgcccctttgaagctgagcaggccggaacccgaagactagaggaagttcccagccaaggtcaaggggagtgggaacaaaacaggaagcccctcttacaaaacccacctggaggcccccgaaatgcctccaaaaaaagatggctcttctgaaagagtcccacccaccccccataaaacagggcccaacaacttacaaaattccggccccaaacccgaaaaatagcccctgccgcctgaagggaacgccactctcgggaacataccctccgccccggtggttgtggaattctcacat

SEQ ID NO: 33101 - DNA, 793 bp, Homo Sapiens
ggggagtgctccccgcgctgttgcgcgtcacacccggctctcagacactggctccgggacaccggctacgcaaccacccccctcccggtgactgctggcccaggaacccacgttcgggcagcccacacaccacccggcgtccaggacatcctcaccggaagttgatttctacctaggcccgcccaggcctgcgcgcggcgctccaggcatccgcgggcgcatcacatgaccccccaagaggaggccagctgagcctcatctgaagagagacctgacctgtgaagtggattgacctgatatacactggcctgaccatcctcaaaaactacatcatgtctttatcttttgtcctgagccaaaacaaactattcaacagatattcctcctaacagagattcagctggctaggccacaagaagaacctcctagttgagtgattctcagaactcgaatctaccacgagaagagcctttgcctcttacaaacaaccaaaatgtgagaactgaataaagcacccggcactatgacatgctcaagaaatgtttgacgtgatgtctggacctatcggcttagcggaactctcaagttcctgaacgtgcccaagctgaaagcttctctaaaccactgggatttttaagatcttcagcgccaggactgtaccacttgtaatcactccccctcatagcaggtccgttcctattccacttaaacacccgtcgtttttttagctggttccacactccctaccacccaaaccctcggaagtccaacaccctttttcccgggaaggcaa

SEQ ID NO: 33102 - DNA, 856 bp, Homo Sapiens
ggagccgagggagggaagactgctttgtaggattcgttttaaaactgaacattaaatgagacaatgatgctcaccagcaaacaggcgggcaggcacatctcagagctaagtagtccaaagccagcacctggccctgggcaactagaaacattgatggaaccactcagggctatccaggaacctcgatcgagcagagctgaaaccaatggcatgttgagtcccaaatgccaaagccattcaacctagaacaccttaggcattataggaacaggacacttctgcctcctgatagaggatgacaaacagaggcagaatgtagtttgaagctagataatagggtgtgatggatgaccattttgtcttttttgtgttggtacagtagaagacaccaactccaaggtggtgtgtctggacggaaggggtgtggcggcactcaggacagagtttggtggcacctgcaccgaggttcatgctatgagtaccctaccacccaaagagacaaacttttgtgtaagtcccccccaccgaacgaatcctcactggaaaaggccccctcagccccctcgtcaccaacagggaaaacttgagggatgggacccctctcatttcccagcctccaataaaaacagccacctggattgcagtcccaatggacctttttcccccgttcgctttatagtccacccctttttttccctcttccctttgtcggtgccgccctccggcccctctcaaaaaacttttctataaaacccatttgttttggggggcgcgggggcccccattagggtcagttgaaaacttggtccccccccttggttttccctaagaacatacctggctccatgaacctaag

SEQ ID NO: 33103 - DNA, 399 bp, Homo Sapiens
gggaccatcatttattcccttgcatactgatgttatacagaaggctcagatggacttcagatgccaccaggacaaaagaatgcatgctccccgtatgagtcatggctggacgttctcttgaatggcaaggtttatttatggcataggtccttcaatgccattgtgcacagagaggaatacaactccaagggcatgccctactctggatgccagacacagctcccattagcagtaacgagtactacgtgtgtgaccgttccttgtgctggaccacttcttcacggctgcatggggagggcctgtgccatccatcatcatcttccactctttcttacttacttatctcttaaataactctccaaatataataaagtgggaactttcccttgtttatctctg

SEQ ID NO: 33104 - DNA, 696 bp, Homo Sapiens
ggggtgactgagagggagaagaaattgctgggcgtccatgggcaggggaggatgagcgggaagcagcagagaagatggtgtagtgcccattggatggaaaattgtggctgttttgatggttagaggttagcatgcccttctgaataactacccccagtcagcacatgactgagggccgccctgttgagactgtgggaatctctagtcaaacgtttgctgcgtagctcagaggcttgatttcacactgttgagagcactgccctgttctctaggtgtggggtagcccctgcagtgacaacccgaaggaacacaaatacacagaaccgggcacagtaatgaacttgaagcatagtcaaagacgccgtgaggatgcaggaagcctctctgcccccagtcccaagaatatggacatactgtgttcagaaaagtgttcaatttctacacttcctgccctgggtatttgagcatctatttcctagttgaaaacccagtagcctcctcaccagcttcagcatccagatatgatgtgcttgcattcttctggtcttcttgtagcctgaactcattccacctccccacaacgccaacatttcacttcttttatttggaggaggacgttttgggagttgtgtttctgggaatgttttgtatttattttcccagtaaacttaagaaaacttaaaagtaatttaaatg

SEQ ID NO: 33105 - DNA, 544 bp, Homo Sapiens
ggggagagcatgctgcaggagaatgttctaagagtaaatttgcactctgatgattgcagtggggtggcacggagacaggagactgcaggcatcaaaaattagtcatctacccgaacagctggaatgggtgaacgcttttgcacgcgtagtatatgtaaagctgactgaaataaaaagaagcaggcagcgtgggaaacgtgagcgacctggtgtgctgcacgacgaagccgaatggcctgcggcaaaatagatggacaggtggggagactgccgggcgcaggtggggcattcgccctcgctctcgaggcagactctggcgtaacctgctgctccacagagatgcctcggattcctgacaactgcactttctcacccccatccggtgggcgctggccgaccccgcccggtagaagggacgtgcgtattggcacggcgcccggcaccccccgcggtccccgactcgcttggatctgcctcccccagctcgctgattcattcgcgcctcctgcaatggttcccctcctacccctatcatccattaacc

SEQ ID NO: 33106 - DNA, 586 bp, Homo Sapiens
ggatagaagagttgtctacaagagtcctcacccattggaactaaatgggcttcctgactgtcaaattgccttcccttgtcctgcacttcatatctcttgagggaatggttatgctttgggggtgttgctctgatccttcattaggctattgggcccttcacatgtggtcagacttggaactcttatgtcctgctttgtgccttgtatacaggtgctaatagacatttattaaatatactggtgagatttcctacatagctctaaaaacccattatctggaaattctcaccaaaaccatttgtatatctttttaaaaaaaatgatgttttagattgaatcaatgtagaactgctttgtttttgttttttgccaagtaccccaacttggcagggcagaggtgaaggtgaggttactgtgctaaaatcctttaatcctttacctaatttaggaattctgtgagagtgccttaaacagctttcttagcattaaatcattgtgaatgtgccacccatggaattccactaatattttttttcttgctaattctgttactcctgagagaaccccttttccccccccacgaacg

SEQ ID NO: 33107 - DNA, 839 bp, Homo Sapiens
ggggccacaactggggcggagctatgaagcctgggtggaagaaaaggactaggagaggaagacccaggagaagaagcagtcacaaaagcgctctctgtcaaagtgtgaagactgagttctgatccccaaactccatgggtggtcctccttatactggaacttcatgatggacctcaggatgtaggggctccccggacggggcctgctgcgcgcgctgatgactgcgtctcgcgtctggccacccccagtcaatgtcagccttatcacaatcgctccacccgcgtcagctcccacgcgccagtcgccgcactacgtggctaaacgtccagagaaggacctggagatctcgcggcctgaagtttcttgtttgatgcccaaaaccaacacagaggaagaaaatccagctgtttccagagcaatggaatccggagtctggagttggaaaagtgccaggcgtccacgagatttgtaccccgggcctgaatgccctgtggctggccttttgacctctgcccggtcccccccgaattggcctgccattctctgccccaattcctcctatctgaattgggggcctcccgcgctcggaatctgtggctatcaatgggccccttgccgaaatattaacccatatcttgcccccctggcattccgaaaaaacccccccgcgcccaataattggttccggcgactgttcgcccttggccctccccggtgtcccaaattttttcccgcgcgtcgagggaaattccgccacccccctcagaattcacataccctttcccgctcccccataaaccccaccccgcaccactcttgcatggcgtgatgtctaccca

SEQ ID NO: 33108 - DNA, 901 bp, Homo Sapiens
gggagttcagtcagtaactgtcattagtaaagtaagggctctgggctctttagggtctgggaagatgagaaggaggcagccaagggctttgggaagtcttcgcaacccgtttcctccccaggcttccccactgtatgtttttcccaccagtgttcacctcatcccttctcagcagaccatctttcatcctgctgttcaagtcaaccctctttctgttttctaccctaccacattcccttctctgaggaacacttcctacttccccactttcatgatggccatgcccaactcctcctgtctatcccaaaatttcctccaactgccctgttctctctgcatccccttcacatttgtctaccctcctgactacctctcccaagcaagcccccgatgggatagataccttccctttctgttttcgcgtctgaaggcctttcccccaccagggtcaaccaaaaggaaacctggaattgcctacgattaacagcatcctccaggtaactcccaaggaccccaaggtttccacccctgttctaccacaaccctacaatacgccctccttaggaccaagaatgaactattagagacggccaccacccccttccatggtaaaccctccctgggggattgggaccctaaaccaaacgggcgggcaaacatttccccaataaactaacccggctttccacttgttccacccccactcttatcggattttttccctcccccgtttaattccccacccgctaaacaacttctttcttccaacccctctccttggcgtccgtataattcgcgacctctgtcaagataaagcgttctctcttaggcaaccaaccttgccatcccgtgttatcaaaaggccgcccccactccttcgcgtttgctgtccccaacccct

SEQ ID NO: 33109 - DNA, 799 bp, Homo Sapiens
gggggggtagtctgccaatagttaacagaaggagtcatgagatagcaattcaaaagaattcattgcttgacagagtagcggattggacaaacgtatgtaaggattcagagtttgaacctgaggagaggaaggaaaaggggaattagattttacaatgtaacatacaaagaaatataactatgacccgaaggggagagaaacagcctcctctcagaatcgactggagctgcaaagagcaccatagagtcatgactcactatactgtgacagctgtcctcatcaccaagatccttttccctcctcaccctgaaatacgctactgagaagtgagctgaacagggtttccaactggaactgtatttaagaataagcaaataaactgaggtgaaaaaagaatgctaaataataaaggtaccatatataacatgtcctagacatgggtcaagtacttcagctcatactcaggagaaggtgtgacctgcagcagcaccgcaatcccctgaggaccttcagaggactttggattctgctccatctaggcttttatttgctcactttgggactctggggaatgggtacattcggagtttatctagttaagtcctgaaaacccgaattctaatgtaacggggaagccccaagaataatacaaggcctggtccggggtgcccccccgaagggacccccacctttaccacttgatcccctgtgctggccgcctttggcccctccaaaaagctcttctagaaccctttcctttgcgccacgccggtcccccacccggcaaagcgcaccccgc

SEQ ID NO: 33110 - DNA, 760 bp, Homo Sapiens
ggggttgctaggggcggaggcgcgggaacctgtggaagctaaggatgcctgctacccgtgctttcgggcctcggtgctagcccaccgagattaggaagtggctgtctgacttgtttccgaaggctgaatgaactacagatcatcaaatacagcagctcaccaagaagatctggttgctttggggggaacaccccctcagcgcctgtgagggatgttgttacttgacggccaactgaaaccagctcttcctcagaaggtcttctgtagactctgggctgtgatgggaaaactgcagagcaaactcagacacagcacttacttatacagcaggcctgatggaattatagaagagagagtccagactaaagctccccaagaatacatccctgttcacgtggataccgtctctgtgattgccactctgaactcagacctttgtatctctggaggaaaagacaagaccgccgtggcctacaattggaaaactgggcgtatggtgaaaaggttcacagggcacgagcgggaaatcacgaagatagcctgtattccccaagcaaaccagttcttcagcgcctctcgagacaagacagtcctgatgtgggatctgcaaggctcctcgcaccctaggcagcagctgtctggccatgccatggtggtcactggctttggctgtgagcccagactcgtcccagctgtgcactggctctcgggacataacctgcttcttgtgggaattgggggacccgacaagtgtgggggg

SEQ ID NO: 33111 - DNA, 445 bp, Homo Sapiens
gggaagttgtaaaggccacctccaatggctgtgtcaccattataggaggcggagatactgctacttgctgcgccaaatggggcactgaagacaaggtcagccatgtgagcacaggaggtggggcaagtcttgagcttctggaaggtaaaatccttccaggggtagaggccctcagcaacatgtaattgtcataatgtacttgcttcctgtttcctgcgcacaggaccagaaccaactcaacctaacctatatctcaacatttgttaacctctactatgaatcaagacccaggtaatgagctagcagtgagccatcaatatcacatcagcaagtcttaattctgtcacacatttgttagtctcttcaagatctcatcaggatttcccacagtccttcctagggaggaaacattctcatgtcaactattaaagaagtgagctaagta

SEQ ID NO: 33112 - DNA, 601 bp, Homo Sapiens
ggatccttctctccctatgaggaataattataactagctcaatctgcttacgccaaacagatttaaaatcactaatcgcctactcctcagttagccacatagcacttgttattgcatcaatcataatccaaactccatgaagcttcataggagcaacaatactaataatcgcacatggcctcacatcatcactcctattctgcctagcaaactccaactacgaacggatccacagccgtactataatcatggcccgaggacttcaaatggtcttcccacttatagccacatgatgactgatagcaagtctagctaatctagctctacccccttcaatcaatctaataggagaattattcattaccatatcattattttcttgatcaaactttaccattattcttataggaattaacattattattacaggtatatactcaatatacataattattaccacccaacgcggcaaactaaccaaccatataattaacctccaaccctcacacacacgagaactaacactaatagcccttcacataattccacttattcttctaactaccagcccgtcactaactacttaccggcctgacaatat

SEQ ID NO: 33113 - DNA, 558 bp, Homo Sapiens
gggagcgactgggcctccggcaggtaaatcctagctgccctgtcaacatccttgagcatctgcagctccggaggccctggtaactgacggagctctgcccatgctgtagttcctgtcattctccagaagccacgcaacagcaaggagttgtaagaaagtccttatgagtttcaccgataacttcagtctgcagtgaatcagatgtgtctgcttcacagccagcaggcaggaagctatgtgaacgaatcttctgatgtcataattctgggtgtcactggaacatttgatcaacattcctttggcaagtctagccttctatggaaagtcagtagacgcaattgatttattcacctctacaggaatcagacttggcctattttggatctcagtgaattatgccttttccgtttgggaccccgccaaagaagtttccagtggaaggaggagactcctcaattgagctaaaatcacggccgagctctagtgcttcctgtaccggggaaagagacgccacccaataaggaaatccaaagaggcccctggaacgtcattgccctg

SEQ ID NO: 33114 - DNA, 776 bp, Homo Sapiens
ggggctcaccgaggggaggggcaacaagagccctttctggctccttcctgacagcatgaagacctgtgctgttgaaccagcgacaaagaagggaaacaccatagccctcacactttagaagaggcatgccctcctgatcctaaaacatcggaaggaaggacaagataaggcagatatttcaactgtcaaatcaacagtaagtgaccattctaatctttcggccatggcttggttccaggtaatgctgtttgtctttgcgttgctgctgcgatcaccactcacagaaggaaaggatccagactttacttctttgttaactaaccaactacaagttcaaagagagatcgtaaataaacacaatgagctgaggagatcagttaaccctactggcagcgacatactaaaaatggaatggagcatacaagcaacaacaaatgctcaaaagtgggctaataagtgtattttagaacacagttctaaagatgaccggaagatcaatataagatgtggtgagaatctctatatgtcaactgatcctaccctctggtcaactgtaattcaaagctggtacaatgaaaatgaagattttgtttaaggtgtaagagctaaacccaattcagctgtccggacattacacctcagcttggtttgggattccatcctttcaaaattgggatgtgggaattggcttacctgtccccaatcaaggacaacctgaaaacatttccaatgttttgcccattaatgttccctatggggttaacaatggtgcatgc

SEQ ID NO: 33115 - DNA, 541 bp, Homo Sapiens
gaggttagacatagatctttggtatgtacttccaatgtggtctaccttattttttctgggaaagggtctttaattaatctggaaactctcacagttggcctggctggctggccagtgagccccaggggtccaacctgtagttgccttactactgtggctatcagcactaacaaatctgcatgcatttttattatcattatccttattaatccttggactcttgggattagctcaggtcctcatgcttggactgaagctctccagccttcattttaatctttgctgtaatcttggtgcaccttcactgtctgttccctgaaacctgtcatctacagttccgttctgtagctgtgctgatacgtgtattctgtatcccaagcaaggctgaagaggcaaaccaactccacagttggttttagcagtctcggctaaattccaatcggaaacaaagactccaattttgctcctgaaagtcacttgaattcagtgacgttgtaaaaatactaaaatgccatgtaataaatttttcactcaaccaaaa

SEQ ID NO: 33116 - DNA, 812 bp, Homo Sapiens
gggagaggtcaaggatggaagtgatggctctccttcagtcctccatgcctttgaccctggatctgaacgatgcctgtttccactcacacacttctggtactgagctctcgggcagggctgattcaggctagaaactttcagagtcctgaaccaggccttacagagctcagagagatggccagccttctcccctgctccgtggagactgccacccaggcttgaggaatcactgtacgctaaccaaagggaaaacctggcccttgaagaaaagctagagaacttgcctaccgtggtgtatgaggacctgcagagcattatgatcatcccagaggaatccaggctcactcaggaaacagatgaagactcgcaagccaaaacagagggacattcaaaagaaagccatggtcacccagcaaccagaggtcacttctgagaaacccgcggcccaccccaggaggaaccaggtgctacccatgacggaaccccgggctacccatttaggatgtccaaccctcttgcccaacctaatagcccttctggtcctcacccacttttttcccccctttctccctgttccttgccgcccactacatccataaaaaaacctcccgcaagcaaatgatcaaccccggtcaagcccctctttttacttccccagcctaccttccctttccccttctgccctttctttccacgcaaccccgtcatacgtttccgcccacccgccaccggcccgcccctttttattttctataacccctttctcccccccctttacctctatccgcccaccacccgtccatgatatttaa

SEQ ID NO: 33117 - DNA, 873 bp, Homo Sapiens
ggggattgataataaacaattgcttattaaaatagctgcaattgataatgggctagcatttccctttaagcatcctgatgaatggcgagcatatccatttcactgggcttggcttcctcaagcaaaggttcctttttctgaagagactcgaaacttgattctaccctatatttctgacatgaactttgtacaagacttgtgtgaagatctttatgaactttttaagactgacaaaggatttgacagagctgcttttgaaaatcacatgtctgtgatgagaggccagatcttaaacctcactcaggcactgacagacgggaagagtcctatgcagctggcacagatgccatgtgtgatcgtggagcgcaccaaagtggcagccagggccgtgcggtacaccctgggcagctccttcaccccaacggtccactgccagaaaccgttcttccccctccccggtaccccccaatgtaaggggaaccaactgcgttgggggtcacccgtgcctcataccctatttaccccggatgtacccccctgctggccggaaaacccccatttcgcccaaaaactcccacttatcccccaccccccttaaataccctttaaacacccaccactaccaatttttgaaaggccacttaaaaccccatctattccttgtcctacttaaatcccgccggccgcagcccaaacttcggtcccccctaaaaaactccctttctcaaaccccacctttccttttagaatataatcccgcccctccgttcggagaaaagggaaccccccgcccaattaatagtgattcccattcccgctaacccttttgccccctgcaccccccgcccctgtcgaatccctcaaacacaaaaa

SEQ ID NO: 33118 - DNA, 462 bp, Homo Sapiens
gggaacacaaccagacacggcttagagacactgctacgtgtcctgtaccttgtacctgacgacttcgatctgagcgagcctatctagataatttgaaggtatttacaactcaacactaaccaaaccctctccctcctggagaaccagcgcagcacggtgagccacggagccacggagtcaacggagccacggagccacggtcatctctgccaaggccatctctgagtaggaccagagtgaacaactgtgcgtgttgtaagcctcccgggacgcatttgagatgactccggctgagtaagactagaacagaaactgttaactctttttacccaggagaaaaaggaacactacctgcagtcagaacacaggacctcctctggggtgtcaggaaactccacaacatcatccaaaaactgagttccatgagagcaaagtcagcttggaaactcaactttagaagtt

SEQ ID NO: 33119 - DNA, 763 bp, Homo Sapiens
gggattgaggagttgagcacggaagggtgcagttgtgaaggtgttcacctctgagataacctttaagtgataatcggctctgctcagggttgttggacagttaatcgagaagacaactgagcgcttaagagaaaaatgtctattaagaaactgtgggtgataccaaaggatggttacttattacttcttgactatgattcagatgaagaagaagagcaggctcattctgaagtaaagaggccagcatttggcaaacatgagaatatgccgcctcacgtagaagcagatgaagatataagagatgaacaagacagtatgttggataaatctggagaaaacgtaagtgtctcagaaaaatggcagcgttttgcacgttctgtagagacaccaatggaaaactggaatttgttaagtggtgaacagcaagttaggaatgcttcagaattggaccttatggaagtacagaatccagtaactcatgatgatgggaatgcaaatcctgaagaagtagttggagatacacgaaagaagatcaacaacaaattgtgtgagcagaagtgtgatatggatatacagaaattcaatgaagaaccagaaaaatcagtgaacaattatcaaaaagaacaacaagcattaaatctgtccgaatgtagtcagagtcagacccctggaagcaattgaagacatgcatgaagaagtcccacggaagggttttgaatgaacatgggagacccaccacctacgatatggcttttttgaggca

SEQ ID NO: 33120 - DNA, 672 bp, Homo Sapiens
ggaaggtaattagaccacagctaaccaccaagaacagccagtcatcgttttgatttctggatctacagtgactgactgaatacctcaagtccagtgactgtccctgttgcattatggaagttcaagagtcacgactgatcttgatgtgtgttggatttaggagtgtttcattatcttaagtatttgtgaattagattcaacagtgtttccatagttgctctgcgtataaaaccaaacctgcagccagtggccattcaaacatctttatgtccaggcaagctcggagacggacaccatgttgcggactgctggcaaggtgttagtcgctggatgatgtaagggcctcaccccaacgtggcattaacaaactgaacacattaacagggtttctctgtagacatcccaatggctatcttaggaagctgacagtgacctatgggggacctgtgctgccccatgcccatgtatacttcacccgtgcagtgccttcctggctgtgttaaatcaccaaggctggggactgggatccgtccacccctcaactcgccagggccccctcaattctcccggagaatcccaatcccccccaccccgggcctgaaaggaatccctacgggcgacaaaccgtatggttacaccgcacaaccggccgaattctgaacggcgattttc

SEQ ID NO: 33121 - DNA, 437 bp, Homo Sapiens
ggggggttgcggtagaacatggcgcagggacaacgcaagttccaggcgcagaaacctaaaagcaaggctgccgcggcggagcggagccgcgggcctcggaaaggcggtcgagtcatcgctcccaagaaggcgcgcgttgttcagcagcagaagttgaagaagagcctggaagtgggaatccggaagaagattgagcatgacgtggtaatgaaggccagctccagcctgcctaagaggcttgcactgctgaagggtgctcagcctcctctgctggtgtgatgataaatgtggctctgttgtctctccagccgtttagtgggcataatctcacccccaggtgctgggtccccaccccagtcatctaatgtcagcctgtcacaccagtaatccagagccacttggggatgctccagtgttacccaataaagctgtgtcac

SEQ ID NO: 33122 - DNA, 770 bp, Homo Sapiens
ggcctcgtggacacgctaaagtttgacttgggtgccttacctcttttctaaccagtgttgctcgtgagcctgtggcgctcgcttgctcgctcgctcgctcgctccgtggattccttaaaaccagagagcctgtaagtgtggcaagatcaaaactggcctggctggagggttagctggacatggatctgcaggattgcctctggggacctcgttttgggaacttttcttggggctgttttgctcaagtgcccgtagctgatggatgggtgaagtaattttgaacgtacgcgatttgtaggttttgttatttgttttaagatttaaaagctggttataggattttaagtgaaagcttttcttcctggtttgctagtgttcttgagtgtcttctttagttgaaataggttagtaggaaatttaagaaagtggtggccgtgttacactgggtggtgaaggccagggccgcctaccaactctcagttttttgtaacagtcccactctgacgataatgagttcactccttggataaagatgttaatgagggaagagccttccccgacctgacctaatcagctcttactggacccagctggccacactgttgcattggggatttaagtttccaacccatgacttatgggaccgattccaaccgcaagcactggggatttcccctaaaaataccgtgggccccaattattcgggaaacacctggaataaatattcctggacctaccttccacggggtagggggtgaacctttgaaaaa

SEQ ID NO: 33123 - DNA, 826 bp, Homo Sapiens
ggggccaagatggagagaaaggaacaaaccatgaccttttacagtcctgaggtcatcaaaataaagggggacctgagataccaacggcctacccttcctaccaaccaacaatccgtatcgacccagaagcgacagcagtatgtgaatgaggcttgcacctacatccggatgttctgtggtagcctctctggctttagtgtcttgctactggcctgcacatccccactgaacttggtgcagttcctggtgaacaacaatggccttgaactcaaagcaggactctggaccttatgctaccatgagctgtgctggagccacacacccaagccaccctattatctccagtactccagagccttgttcctcatctccatcctcttcatgcttatcagccttggcttgctcttgagctcttgccgccctgcagaaagaatgatgtccgctgagttggatctgaaggtgtccatgctcagcttctgctcagctgtcagcttgctcctctgcctcaacctgtttctggcgcaagttgaattatacccaaagaatgccatgggagtatgaatcccctgtgggacctaacatcctaagttggggccaacggaggtccttaaatatcctggggctggggaaccatccccttttttctccaccttcactaaatttttcaacctcccatccctcaccgatggaagcgcggccccccgccttattctattccgcccgaagatcccagaattgggggcatcgggggtcaaatggccaaaagaaacccgggtgcggatataaccctcggaccggggcaatgcatattgctaaatgctcacct

SEQ ID NO: 33124 - DNA, 477 bp, Homo Sapiens
ggggacatgctacggggcgtcgctcggtgacgtgttagccatggagacccaggagggctggcctcaaaatttagagatttagagcgcctctgcctcccaagagctcggattaaaggcttgcaccagctataaatatcaaggaagacaaatgtactttctatacgcctgccttgtgaggtgtctccaaacaaagcatacgtgaacggatttgggactacatggaatcccatgatatagctgactttccccgacccgttcatcacaggatccccaacttcaaggggtcctacctggctggccagagcatcagagacctggaagtctttgctgggacacaggaagtgaaagtggaccctgataagcccctggaaggtgtccgattcctggcactgcagagcaaaaaaacactgctggtccaacaccacgactgcaacaggctgtaacagaacgcacccgaccaatcaagccgtcggcttg

SEQ ID NO: 33125 - DNA, 828 bp, Homo Sapiens
ggggggggagggaccaggacgtggagtggccgaggctgtgagaggaggaagataggcgtataccggattcagtgacttatgatgatgtgcatgtgaacttcactagagaagagtgggatttgctggatccttcccagatgaatctctacaaagacgtgatgctggagacctactggaacctcattgctataggctacaattgggaagatcatcatattgaagaacaatgtcaaagttctaatagtcatgaaaggaatgtaagaagtcctagtggagagaaaccctatgaatgtaataagtgcggtaaagcctttgcaagacccatttatctccaaaatcataaaagaactcatactggagagacagcttatgaatgtaatcaatgtgatgaagccttctgcagacccagtcaactcctaagacataacagaatgcatactgcggagaaaccctatgactgcaatcagtgtggttaagcctttgcaagacccattcatctcccatatcctataagcacacatactggagataacccttattggaatgttaatccatgtgggtacagcctttcttatgggcacaggccttctcccaaataccttaaaggaacaccttagcggaagaaaaaaccctttatggaatgggatctcctatgtggggaaaaggcctttttgctattacccccagttccttctccaaaggaccttaaaaccccttcccttcctttgtggaaatgtatcccctaactcggtcccactaaaaccttgttccggcccccctctcgggcccttcctggaaaaccttttctaaaaacaatttccattcggc

SEQ ID NO: 33126 - DNA, 787 bp, Homo Sapiens
gggagcctcggcctggacctgggcctgggcccttgcgcgcccggctgcgggcgggctggggtgacatcggctcaggcgcctagctcgccacggcgtgcgtgaacaccccttccctctaacctcgggctccgcaagcttctttatggacgatgattattaaacttggacagggtcggttgggtgtttaaacatcaccgtgtactgtttatagacttctatgcaatcaagagatctgggctaagttgacattcttgttcatctgcctacgtattgtttttctcagcctcaatcataaatgtgtccggaagttcctcagcactccaatcacttgatctcatattctgtatctgagccggtagtaataaggagctaagtttggtatcttactcttgtaagccccagcattcgggaagctggactgattgttgtttattgcatacttgcttgggttacagcgtgagaacaaagaagaaaagaaaacaaaacgaaataatcgggtcataacggtgcaggcatgtaatcccggcaccaggaacgcagaggcagaattgcagaaagattggagccaaccttatctacacgctcagtaccaagcctgccaggctacgtaccaaggcccccatctcaaaccaaaacgtactacggactcagaaatgatcagaaaggacccttctctaaaatgggggacttagagggaaaattgtccccattccacccgtaatcagggaacggttttgggtattccgcccccggtaattaccttctccccccaatattcctataaccc

SEQ ID NO: 33127 - DNA, 759 bp, Homo Sapiens
gggaaggaaaccatcctgcagaagcatcgagtaaaagtcagcagaaacccaaagccctccttcagaacagctctgaggtaggagctacagcctcagaaggaggagaaggagaaaacccaaggtgcaaggtcatgtgggaaatgccttttgatgaagaagcatctgcccagtccttccgagaagccttgacacagtggcgagctgggcatcaggaggaaaacaaggaggaggaagtgcatgcaaaaaaaccagactctgtggaagagtgtgaagtacaaactaatttgaaaatgtggactgaaccaattaatatcgaattcacagaagacagcctgtcatatatggaaacattatggctcaaaaagtacagaagaactccacaggaacaacttcgtaccatgctaccaaatacattcacacatccacatcaagctactgcagaggcacagtgcactcagaatgaaaatgagtctgacagtgatgttgaagagatcaaaataaaatctccaccactttttatgccagtggaaaaattgaatatagagagacctccaccatctctaacaatagtagaactggatgatactcatggagcagaatttgaagacccaggaattgctgtgccttacagagtcgaattggctgactcagagagtcaactaagttctacatttacggattatcagacttgcttcccgtgtgaaatgaaatccatcaccatcttattttcaacaaggaaaagcagatctcttaagtctc

SEQ ID NO: 33128 - DNA, 808 bp, Homo Sapiens
gggagtgtctgtagagtcataaaggaatgaattggcatgatgcaaggagaagcagtaatatgagaagaattgtcaggtcttctgtcttagggcaactgagagaagtgggaagagcatctggtgggtaccaattggcagagaaggggagaagactggtcattctgtgacatgcggaggacagccaggtggccggctacagcagcaatggcaacagatgaagaagagggtgagaaccaccaccaggggcaaccccaggagcacagccaggcagactgtgttgaagacgcctctttcgtgtctgatccggatggtttcccagacagagttgaagaaagaactgtttctctccatggtgctggtctagtgtggggccagaggatcgtcaattatctaacaagccctcggtgtcacagaacacagtgttagacacttggaatttatttttctctcagcttcacgtttgggcatgccaccaggaacacctgaagaaagcaaaaatggacaattcaagaaaaatgcaatagcaatggtctgtctatttttcatagtgtcccgtgtctttatgcttaaaaaaagagaaggaatccacgagttgcagaatttttctgaatcctattaacactcaatataccaagtgtacccaatttaatcaataaccctttaacccatttctcctttatgtaccccccccgaatattggggcttaaaaataaagggagttactacctatgtccagaaccttgctacaccactaaggctaacccaccacgtcgttctgaataaatttaacccagggggggttaaaaaa

SEQ ID NO: 33129 - DNA, 763 bp, Homo Sapiens
gggaagaacaccagcgctccaatgagagggtaagagagaaggcgaagtagcaacagctgctgcccacttcccacctcaactcttccaccctcttccaggttgttttggacataggctggtcttcaactctggatcctccagcctccaacttcaaactactcgttttacatagcaggagccgccacgcccagtgtgctctatggaccatgtgctgctatggatgcctgaagttgttgacctgcaggttgggaagactcagccatctccatgctgggctggattaagtgcctgatgaggatgtggtttcagcgagttggggtcagcatgcagtcggtactatggtctggaaaaccatatggttcatctcgaagtatcgtaaggaaaattggtaccaacttatctctgattcagtgtccaagagttcaatttcagcttaccagccatgcaacagaatggagtcccgcacactcaggagaggatgcggtggcatcttttgctgatgttggattggtagccactgaagaaggagagtgctcaataagactcagggcagaagtcagttccaagcctcctcatgaggatgaccctccttgctttgagaagcccccaagcaggcacacttccttcccaagcctgtctcaagacaagccttctccaaagaggacgctgggccagccgagaagcccctgcagaagatctctggccctgtgaaaatgaagcttgctggcccttagaagctcaaaatggccaagattggtgaacc

SEQ ID NO: 33130 - DNA, 750 bp, Homo Sapiens
gggagacgcgcgaagcaagcgggaagcaggctggtggcggcgcagagagctgcgcccatttccatccgcgcccgccgcccgccgcaggatcacgatgttccggatgctgagcagcagctttgaggatgaccccttcttcgctgattcttttcttgcacaccgagaaagtatgcgcaacatgatgagaagtttctctgaacctcttggaagagacttgctcagtatctctgatggtagaggaagaacccataatcgtcgagaacgtgatgatggcgaagattccttaactcatgcagatgtcaacccttttcagacaatggatcggatgatggcaaatatgcgaagtggtatacaggagttacaaagaaactttggccaactttcaatggatccaaatgggcattcattttgttcttcctctgttatgacctattccaaagtaggagatgaaccaccaaaggtgttccaggccctcaactcaaaccccgaagggctcccaggagggagtaaaagaaacccagaaaagcaatgaagagattctgacagtgggacttaaaaagaatgggctggttggccatcacatcccatgaaccgaggtccatggtccattaggaaagcccaaagaaccaccaagaatgggagaatggaagaagttccaacccaagaaggtccttccaattatggaaattgaaaaggggaccgcctccctggcctttttgaatggatggaagggggcaaaaaatgaaaggt

SEQ ID NO: 33131 - DNA, 735 bp, Homo Sapiens
gggggccctggtccgcagcacggtggttatctggatggcgatggaggacagggaggtgatggaagcccgaggggcaggagaaagctgccccacactctccaaggtggcccctgttgacagcatgcctgaaggcaagccaaaggcctctttggatgcagaagtccccaaactagaactgcctaccctggaagagaacgggatctgtgaggacagagattgtccggggccccctaggtcattgcctccaaagtccggcccaaacgccaagggtcaggctggcgatggacctggactggagtccgtagagctgcccctgcccctggagacagaacaccgcaacgcgatggagctggagaaggtgcgcatggagtttgaactgacgctcctcaagtacctgcaccaggagaacgagcggcagaggcagcatgaggaagtgatggagccgctgcaacagcagcagcaacagcagccagctttgcctcaccagttctcaagaagcctcccggacctcttgctcccccagaaccaattctccctgttcttcctactgctttattttcctccacatcatctaactttcccaaagcagacggccctcctttcctttccccaacacctacctggttctgtctgggccgcccattttgcctgtgccttgacttaaaaccttgttggtcccttctccgttcgaaaaagcaaccccccctcgcgttaagttccattccctagccatat

SEQ ID NO: 33132 - DNA, 519 bp, Homo Sapiens
gggttccaaaccctcttgccaaagaagagctgaatttcttggccaggctaatgggagggatggagatcaagaagccgagtggccctgaaccaggattccgactgaatctgtttacgaccgatgaggaagaggaacacgcagcactgtccaggccggaggagttgtcctatgaagtcatcagcatacaggctacacaggaccagcaacggaatgaggagttggcccggatcatgggtgagtttgagatcacagagcagctggagcagaacaccagtaagggagacgacttgctggccatgatggacaggttatagatgcagatgggcacgccctagccctccctcaagagactgccttagaccaccctggacccggatggctggggatcccatgcgcccctgctggattccaaacaaggccctgccacttctaccccatttttaagccataaacaacctgtgcccacctcctccccaaaacctccattttatgaagccaccacttcgatcccatttgctc

SEQ ID NO: 33133 - DNA, 607 bp, Homo Sapiens
ggggcgctgtaccacgccctcaaaggctccgcctctgctgcttgaatcccacccctctatctgcaggaccctgagccgtaatgatcctgcaacagcccctggagcgaggtcccccaagtcgggacccacgggccaccactggggtaactcgcggcctaaacgccagtctttcccccagggaacctttgcacaagcagttcctgtctgaggagaacatggccacccatttctcccgactcagcctacataatgaccacccctactgcagcccccctgtgacttttcccgaagccctgccaccactcaggagcccttgcccagagctgcttctctggcgctatcccgggagcctgattcctgaagccctcaggctgctgaggctgggggatacccccagtccctactaccctgcgtccccagctggggatatcgtggagctctgagtattgatggcctgtgtccctccctatcttctttctgacaacaaagaccagcaactcccagaaagggatgaagtccttctgcaaacctggccaccaggaccttccctctgacaagaggacactagctcggtggaaccctgagactggagaagcctagaaacgcc

SEQ ID NO: 33134 - DNA, 857 bp, Homo Sapiens
gggcccctgacaggctcgggtcggggtcacagggacacggagcccgctgtcccgctcttcgcagacaatgctgtcccgggtggtgctttctgctgccgccacagcggccccgtgtctgaagaacgcggccgccctaggtccaggggtattacaggcaacaagggcctttcacacaggacagcctcgccttgcccctctaccacctcttcctgaatatggaggaaaagtgcgtcttgggctgattcctgaggaatttttccagttcctttaccctaagactggtgtaacaggaaccttatgtgcttgggaactggacctaaccttggatttcctactcccaataaatatatggggattacccccaaagacccttctctaccctatctagaatacggggtgcaaagcccctgggggattaagaaaatttgggggcctccttttttgggggaatttacttggacccaacttctattgccgggaaaaaaactggctcccgctttgtcaaaaaaggtaaccgcacgtgcttgcccccgaaaccaaaactccccgggagtcccctttgtaaactgcgcaaaacacggccccttaatgaaaccggggattaaaaaacccgccgctaaaaaccctcccgccttttcgcgccaaggaaccaccccctgccaacctcccttttccccccaacgccttcctttattaggccccccctgtttttattccaccgaccgatactccggtggcagtccaccccacaccgccccgggaataagccgcatcctccgctcacaaaccactgcatacctctgcccgcgaagccaaaattctaattcccaccaccgggtgttattatccctccccct

SEQ ID NO: 33135 - DNA, 697 bp, Homo Sapiens
ggggaattctcatagcatggagtagtggacagtgggggtagcggtgtctggggttgagaagaccgtggagagatacacagaagtgtctccagcttccagaacattctatatcactagaggtgctcaggcaatgtgtccatcgaatctggacttcagccaccctatggtaccctttacaccattcatctacctaaaagatctgtgtgtgttcttgggaatttgacatcaaaaaccacttctaatccagagtttatggtggagagagggaccctacaggcagctcatggttcctactctgctggttctctagcagcacccgcgtgtcctccaggtcccaagtgaggtggtgacacttcctcttcagctggtcagcagccatggatgctgggagagagaggacctcagaggagttcctgtcagtgtcaggaagccgcttccccaagcccctctttgttgggaggtaattcccagctcactttgtggtcagtccatcagcctcgcctctgccaacctcctgccccacactcttaattcctttttccttgccctgcttcgacttgacacttggactggcagttgacagatggctctatcatctgggggagacttgtgaagattagcttcccactcaccaagagggaacccccggccactaggggtgggccccccaagagccactgcctgtgctggctctttt

SEQ ID NO: 33136 - DNA, 774 bp, Homo Sapiens
ggcaagccatcaacaagttttattttaaaatgaaaggagaactcatcagaatgcttaaagaagcccagatgttaaaagccctgaaaatgaagaacaccaagataattgccaacatggaaaagaaaaggcagcgtttaattgaagtccaggatgaactgattcgattagaaccacaactgaaacaactacaaacaaaatatgatgaccttaaggagagaaagtcatcacttaagaagtccaagcatttcttatctaatttaaaacagctgtgtcaagattattcaaacgttcaagagaaaggaccaaagggaacgggaaagtatgattcatctagccttccagctctgttatttaaagcaagaagcattctgggcgccgaaaaccacctgagaaccatcaactatcagctggggaagcttctcgagctggactgagaactgagcctcctgctgccttttctgctcctgaagccatgctcctgacagcagcggcctgtggtgacagtagtgagacctgcttatcagggtgtactaccgttttgtcattcaaactaaattacaccaattcagttgtctaataactcagaaggcatagccatattttttgagtattgtgttaataaatttcagtctcttgacaggttagtcatccccacgcataagcttttttaactacaataaactttaatgatggtcgcggcaaatgctctacaaaccgaacgtccctttccacctttggccttgtcgggccgccctcgggcccccggaagaaact

SEQ ID NO: 33137 - DNA, 793 bp, Homo Sapiens
ggggctgccagacctccgccatcatgggtcgcatgcacgctcccgggaagggcctgtcccagtcggcgctagccctaccgccgtatcgtccccagcgtggctgaagtctgacgtctgacgacgtgaacgaacatgatttacaaattggccaagaaaggcctgactccctcccaaataggtgtaatcctgagggactcacacggggtggcccacgtccgttttgtgactggaatataaaatcttgagaatcctcaaatccaaaggtcttgcccctgacctccccgaggatctctaccatttgattaataaagctgttgctgtccgaaagcaccttgacaggaaccgaaaggataacgatgctatattccgcctgattctgatagagagcagaattcaccgattggctcgatactataagactaagcgggtgctcccacctaattggaaatatgagtcatccacaggctctgctctagtggcataagtgctgttgctgtgcacaagcgataacatcactttgagtgagactaatcctacgccaatacagcaagcacctgtcagccgcctctgacctcaagaacctttctaaaccattcgttttggctctcctgccccactgagtaaaatgatcttgggacctccctgtttcctgagagaccctggctcatgactacctgctcgggattctccccgatagactatgtccggggggaaaaacgttaactgttctgatacaatccaggcatggaccctctagaggtgaacttactgtcttctaatgggacggggaagg

SEQ ID NO: 33138 - DNA, 364 bp, Homo Sapiens
ggcacaccaagattcaaaaggaccccaacaggattcaaaaggaccccaacaggattcaaaagggccaccgcctgcacagccagagcaacaagcacagccacaggagaaggcacaaggacagccacagccgcctgggccaaagtcacaaaaggagcaagacccacctacacagagcatcttcaaggatggtctccaaaaagacacccaaaggcaaggaccccagactaagccaaccggagctcaacaagatggccagcaatcctgtagagtgtgcagtaaaccccccatccttccaggccgcgtcaactaattacatccagcagtggtgatccagagacggactccaagacttgatgaaagtgaa

SEQ ID NO: 33139 - DNA, 653 bp, Homo Sapiens
gggacgtggacatagaccctgaacaactctttactgaaaaaatgccaaaaaattatgcccagcctgacgtcttgaatcacacatttgaccttctctcgaaccttcacaagttgctccccaatcacttggtggaagtgcttcattcctacagaagcgaagaggacaaaaacaaatgtgagaagcctgagttctctggtctagaaaagatcttagcaagacatcagttaccaaaagagatcagtctctccccaaagccaagccttatgccctcatggagaagaaggataatcaacaatatcagtggaaactggaagaaatgtcacctgtggcagaaaagcacctatgagccgcccatgggcaccatcgttgccaggtggaccaaaaagaacttgcaacccacagaggacctcaaatcagttatccaaagactgtccagcacttggcccacattatctcagtcacctcctagtgggacgacaaagtgctggtcgtgggtgctccaaaaatatcaccctccggctttgttaaaggctgccgagttgccttttcccttcccatgttccgggagggcctccaatggctcccagtggcttcctgggccagccattccaaattttctcgggccaaagaaaaacccaaaaccctgggggtcc

SEQ ID NO: 33140 - DNA, 989 bp, Homo Sapiens
gggttccttttccggtctgaccgctgaggaaactgtaaaagctatgctggggaggcagctcggagcttgattcaccttcacctgctctggccacccgctgacccggggtttccggccggagagcagtcagatatgaacggacgggtggattatttagtcacggaggaagagatcaacctgacgagaggaccttccttgctgggctggctttcacctgtgggacggagacaaaacatgtctaatgctacaacggcctgtgcgtctctcgtatccccgatatataaagaggatgggcctgatggcccagatatgggcacggctcacaagagggtgtaagatatccgtcccggaaaatgtggcaaactatctggaaaacacatggctggcaacaactatggctgatagcacctactccccatagtgcgcgaaatgccaccttgtcccccctagaaaagcaccaacagcaggtctacccggtgtcaagaagtggatgatattattaccgtaagcggcctgaaagtaccagccccggaggaccatttgctggccccctatgggtgggtacccaattaggaggctttcctccccccccaatgggaaccccactttttcaggccccttccatgtattataccccccgtacccccctctcatcaaattggtctcgcttttcacatccccccgtggggcgcccacaaattaaacccctctttatttcccccaactatcaccccttttccaaagaaatatcccccgcacccgcgttgtctttttttctttcccttgcccctcatttacaccacgaagacatcgacgcacctttcacgagagagatatttaattcgcctcccaccgccgacgtaacacattgcgcctataccccgcaaggttcccatctctcattttcgcgcttgcgcggcgaagaccagataacacgcggcgtggcctgtcgctccctagctatccaaatcccttctattcctccgccg

SEQ ID NO: 33141 - DNA, 773 bp, Homo Sapiens
gggggggatggaggctacacatccgcgactgctgtttcattgcctctctggccctctcggattagggccagtgcactcgcgctacacgctgctaactccatagtccttcattcccatttacgtcctattttccaccgcacccgcaataattctcataaccccctgcccttgtctcctcaatcttccctccgaactgtgatcaaccaacccgaacgtctaagcttctctgctcgccttcgtccatctacctgcctcaagcagccgctgtttattttagatcatgccaggagacgagcaggaagctaagaaagctgcccagagaaccgaggaaggtgtccacattactgaagcccttatcaccaagcggaacctgaccttccctggagatgaagacctgtcagaaaagatgtttcacactctcggtgaactggagactgtccgcctggacggggaagggattacttgtatcgggaatttagagaaactccggaatattcacagcctctacctgcaatcgaataagatccagcgcattgagaacttggcatgcatccactccctgcgcttcctgtctttgggcagaaaccaatcatgcatgtggaaaacctccttgaacctcagtacctccagtttctggacctgtcccgaaaacctgataagaaacgctgaagctagatgaacttccctgagaaccttctcatccctcaacctgtgtggaaaatcccctgcccccacccaagcaaggctacccggaaaaatggcgaataggaccc

SEQ ID NO: 33142 - DNA, 758 bp, Homo Sapiens
gggaggagacaccaggctctctctcgagctgggcctgttcagcgactgcagacaaggctgggcggtaggaagctgagaactacctgctaacaaccatggcagcaccgataaagtttccatttcggcccagaggaggtcagcccagagaggacacgaccccaaaaagggggcttcgacgctatctattggaattgaaagagagcaataaagagttctggctgtcaggacacgccgtgttcaagcttctgtctttgggctgcatgatctctgcactagactactttgaaacaatgctcccacatccggtcctgatcctgctcatctgtatggaagcggcaatctgcatattcttcatcttccttaacaccttagccatcaacagatacattcccttcgtcttctggcctatggcggatatcttcaacagcctgttctcctgtgtgttccttggaggtggcatatactttgctttcaaggctagaagattattgccaaagccctacttaactgctatgatcctcatgggcgctgctgcgatctgttctttcatcgacatgttacttcaattccaacacttcagaggccttaggttaaaggaagtggtaactgtgacatctatgatctttttcatcgtgggaccagcccctgaaccatatatcgtcattactgggtttggaagtcaccattattttctggttccgtagccttgtatatgggcagacgtggaccagataatgaaatctttcttttgggccttg

SEQ ID NO: 33143 - DNA, 811 bp, Homo Sapiens
gggtgaagaggagtgccctggttcctccatggggtatatgtcccaaagtgcacaatacgaaaaatgtggaggtggccaaagttctaaatcactttcaatgaagcattttgaaactcgtggagctcctggaccatctacatgtatgaaggaaaatcaactggagtcccagaagatggatatgtcaaacatggttctgtccctgattcagaaactcctgagtgagagccctttcagttgcgatgaactaactgaaagtgacaataagcgttgttgtgatcctagatcaagcaaagcagctcccatggccaagagacctgaagagcaatgccaagacaatgcagaactagacttcatcagtgggatgaagcaaatgaaccgccagtttatagatcagctggtagaatccgtgatgaaactctgcctgatcatggctaagtacagcaacaatggagcagccctggctgagctggaagaacaagcagcccctggtaggcagtggctccagatgtggccgtgatgctatgatgccacaaaattattctgacactcctggccctgaagttattgtcaacaatcagtgctctacaactaacttgcagaagcagctgcaggctgtccttgcaatggattgcagcctctcatttcaatgtgcccatgctctacttcatgggaagacgatgatggaccactagagaagctccctgaagttttcagctaaaggctgcacaaaaaagggtaacgggtgtaggacatcttccttcaggaaggcccatcgaaatttgcccaaacaacgaacaccctgtatgaaact

SEQ ID NO: 33144 - DNA, 371 bp, Homo Sapiens
gggaggaaggctctgcttctgccatggctgcctccagggtgtgagcctgggtgcctgtcggcctccaggacctcctgttcccaccctctgctcgctgatctgcaccagcaccccagggatctgcttcctgccatctgcagtatccccgccctagaagagacaccagctatttaccacggactcatttacgttggttaatttttaataatattgaagtttctgtgtgagtaattcaggtaaattatttattaaagtgcaagagagagggaccgagacaattatcagttgccagtgttacctatagtgtgggcaggcatggcccaggagtgtggattggcaaccggtgtccacatacccgaggcactccccgg

SEQ ID NO: 33145 - DNA, 373 bp, Homo Sapiens
gggaacacaaccttgtgggaggaccagcagtctcaattaatctgtacccctgagatctctcagacactggatcaccagtcagaaaagggtcaaaagcgggccaccgacacatggattccgagaactacgggatgttccagccctaggtcatcacggatgtcctgaccacaccctgataccaccaagttcctgcttccccgtgtaactgcctaagaatgtgcaattctattgccccccctcccactgataattacttccccttttgcttgtattgccctacccctcccactgataagtatctgtacttccccctttgcttgtgcatttaaaccttggacctttctcaatacatgggggtcttgatacaactcca

SEQ ID NO: 33146 - DNA, 846 bp, Homo Sapiens
gggactgcagagataacttcaccagtctctgagcccacagcacaagtctgctgaggccaatcgtgggtgatgatcctcagtcctctctctggccgaggtgtggcccagacccccctagagaggcgcctctgagggaagcagaagccagaacacagcccactcactaccgagaggaaccaggtggactttgccagctgccatcctggagtatctagcacctggagtttctacagcagtcttgggaagagaatcagagagctgtgccgctggtgtcaccatacgcagcctcaaatggctcaaatggtggctggagaccaagatgcccggcacactgtgggtccccaagccagagtgagagtcaaactgagtccgacatcagtacccaaagcctgcggaaagcccaccatgtcgtatgtgatttctgaagacttttggctgacaacgcgggtacataattgggtgtcccttgctaccttgaaaaaagctgtgtcctatccccggggacaaataatgaacccctaccacctggtgctttcaagcgtgcggctcccgaaatccaatccgataaacggcctggatcatgccttgtgaacctggttggcagggtttgccttccggcctcccctcatgccttgtggttaagaaacggggccccctcaagttccaaaccccccggggtccaagaaatatgcccagggacacgaaataaaaatatccccccaaagccctccttaaacccctgccccttacggtgaatctcgcaaacacttggccaatttggccacataagccccccccacacttatacatggacctgccctttttccaaaggaagctcccccaacg

SEQ ID NO: 33147 - DNA, 813 bp, Homo Sapiens
ggcatgtgggaaaggattagaagtgtaagttcttatttattgttctagaatgtgacatagtgagcagccacacttgggggaggggaaggtaggtgaagctgtaagattgctccagatgccttaaactatgcacaaagctaagtgaccaaacttctcattttgatttgaaaagtgcattgttttcttgtcccccctcccccactttgatgaaacattaccctttggcggaccttttgatgtgagcagatgttttctaggataaaatttaaggactaattttagacttaaaacattccacttttgcaagttgttttcagtggtcttatgtagagcaagcacaactgtaacctagcttaagagaaacggtgctttcttttagctaccttctatttcccttgttactgcttaagactgttcattatgtttacagttcgttccaacagccatcttgggagagaacttgagtgtaaacccacgtgtgaaggcttgggcacactcctttaaacacgtgcctgctagcttccaccttctgattgacaaataacaccgggctttgccccttggtccaaaaccaccacccccctttcccctataattatttttcatccttttcccgggcgtctttattcactgcagaaaaccttctaaaacccccccttttggcgctgtctgctcccccgtaatctcttttgccccccggatttttatgccgccccgcccccaaatcattccattcgcctaccatttatttcgccgcccattcttcccctttccccaatctccatccaagaatttctcccccctttttttcgg

SEQ ID NO: 33148 - DNA, 750 bp, Homo Sapiens
ggggtcatagtgacgccaagacagctgaagttggtgtctgttagacactagctgttaacatgcagtacaccgggagccagtatttcggggaatacataaacgggaggatggagggcagtgccgagtacatcctccctactgacacgagatacatcggggagatgaaggacggcatgttccacggagaaggaaccctgttcttccccagtgggagccgattcgacgccatctggaagaagggattggtggtgaagggcaagtataccttcaatgatgggctgcagtatgaggacaaacactggcactactgtgacagctatgaccggaggttctacaccgagatctgctatggcctgaagccctcaggtatctctcagctcaccaacatggacccacccagaagaatttcccctgggctactatgactggggagatgggctcctataaccccacgaccaagggtcattaagggattacccggaaaccccttttctgaaaaaatgcctgatgatggaccaaactttgagtgggaattggccagggaactggcccccaaggggctgggtttgcccattggccccaaaccgaaagccccaaacccatgggaagaaccctccgggcccctaggcattttctaacaaaggggaaacttttcctttctttggccccacatggcgggggccctggggaaaaaacttggggcttggaaatccccaaagcctttccgaatttctaagcgttttccaaaaa

SEQ ID NO: 33149 - DNA, 495 bp, Homo Sapiens
ggggaagattaaaacaaagactgagctaagggaaaaagttttcttatttcggaagagcatcctctctaactggaaggacctgaccagcttttcccttttctttaagctttggtcacagacatgacacctgagtgcatttatggtttttcccagggcaagtctcctgggagtcttatctccaagtccccacacatcttgccagatatgccaagaatataggccctagccactcatatgtgtgaaccccattcacatcgaagtcagagggcagccataggagtcacctctcctctgggtgatgggagtggaacgcaggccataaggcttggtggcaagtaaacccatgagtcatctcactgcttccgggaaccactctgtagctagggccatgccagtctcatgcctccttaaaggcctaacgtaatacttggagggaaaactcgctaagtgctttctgtcaaagatgtagagttcctgattcagtgcccctttatt

SEQ ID NO: 33150 - DNA, 792 bp, Homo Sapiens
ggggagctctaaacttccggaagtggcggttaacacggctcgggcggttgatctgaaggtcttcggggctgttcagcggctcctggggaagccccagaaactcgagcttccgccgctcggatcatccaagtgtcagtggaggggatttcgggccgcatggggataggatggatggcggcttcagggctgcaagggcagcgggatgagcaggcgaaggctccccgaccaggggcttgcgtttacatccacttactccttgcagttccgggaccctgaggttccggagaggcccccatggtattggagggcgggtgcagccctttcttaggacgatgtctcaccttgctgtctctgacaggtttgagcatggcagaaggggacaccttggtctcagtggattacgaaatttttggaaaggttcaaggggtgtttttccgcaagtacactcaggctgagggtaaaaagctaggtttggtgggctgggttcagaacaccgaccggggcaccgtgcaagggcaactgcagggccccgtcctccaagtgcgcttcatgcagcagtggctggagaccagagggaatcccaagtcgcaacttgacagagcaaacttcaacaatgagaaagtcatcccaaacttgggattattccgacttcccaattggaaaataatggaaacccaatcttaatatttttttcccaaataatcctccctcctttttttctaaatcgcctaaaatttaaacaaacacaatcggaccctttccctggtgtcccccattttaaaatttggcttt

SEQ ID NO: 33151 - DNA, 706 bp, Homo Sapiens
ccgcggtgggcctaggccgtgccggacgaggcgaacggctcgataaccaagcaaaagaaagatgagcctcctttatggactgcagtctaccaggataaatcggtttctctctggagtgaataacctggccaacaggagacagtggacccccccagcaagctgtccactggcaccaaagctccgagcagtaaatgcatactggggactgaacacagtcagtcattgtcattcagtgaccttactgcctagaaactttcttttctgtaggactctcaatcacaaaaaatcaagatgcctctcaagtgcccaaagcaaggaattgggggtgcttacctacagatgtactgtgcggggtgattctgttctaagacaaggagcaaggaaagtggctggcgttcctgctctcgcggcctcctgttctccaagctgtcctgccgtaatagaggcccggagtttccgtacatctgcaagggttcaggctgccccagtccctctcttgctgctcattctgaagccagtgcaaaagctccttgctatcatcgtgggcaggggcataaaggaatggtggcaagcactttcccctaacaagaaagagctatttaaagacagcgtgaggaagaacaagtggcggctgcttccttggtctgagtgcatttggactgcctccttggaagtgtttttatttcccctccccttggaatggagc

SEQ ID NO: 33152 - DNA, 366 bp, Homo Sapiens
ggagagagggggaggcggaccgtcccaccgggcgggtctggaaggggcgcttaagcggcggaggccccaaagtgcggagggggtgaaccgcgaattccacccacgcacgagtctcatcactgtgatggctgctcgccaactcctctcctaacagactgtataccctgagctcttccaaagctgctggtgagaatggaccatcatcaccaccagcagcatcttaagagctgtgtccgactcttaccttgtactaggcaccgcgttgaccgctgatgtttgcaaattctggagcccagtctcctaggtcggaagtaactccgttctcccaaagacgctgtcagagaataaagaattaaatccatgagt

SEQ ID NO: 33153 - DNA, 854 bp, Homo Sapiens
gggagtcagtaactgccatcagtaaagtaagagctctgcagggtctgggatgatgagaaggaagcggccaaggattttgggaagtctacgcaatcctgttccccctaaggatctttctctgccctctgatcaaccaaaaaacattcatttcttcccacctcagactcccatgcctcagcctacctttcgtaccaaccctcttttcgttttctaccctacctccttccctgccctgaggaacacttcctacttccccaccttaatgattgctatgcccagctcctcctgtgtaaacaaactttcctctaagcacccctcttatttccagaccccttccttcctgtctaccctcatgtctacctcttctccaagagcactgctggatagttgcctagttcctctttcccatctggaaactacctactttcacccatatgagcaaatccttccagaactgaacaagatttctccagaccccaagcttataattggaggaagcaaacattgaacctccccttccttggccacaagggaattctgcactccagggacaaaaataatgggaaattcccgcaacggggaataattccccccttccccccggcatggatccttgattgcccttccccttctggccaaacacctggcgaccgaattgaattcgcccattggtccaaagaactaccagttttttatcccacataacccctccccggggacgggtaaataaatatcccgggggggagaccccttaaaagcgaacacgccccccctcaacagatattttccaatattcccgtctccgaggaacccgcaaacccagcccgcccttgtcattccggacaaactccaaa

SEQ ID NO: 33154 - DNA, 777 bp, Homo Sapiens
ggggggcattcattccctggggtagaccgggaggggggtgggtagtctggggatctggagtctgcactgcggctgtagggagagagtggcatcgacccaccaccagcagtccatttccaatggaagtcctggatgagttcgacaacgaattccccctgagtgtgaccttctgccagctcatttccgaggatgacttcgagaggcaagcagcgacctacacagagcgtgcactgcgacgactcttccgcaccttggatcgcaacccagcactggcggagagagtcgtgcggaagggcaagcagactgagttcgagcagcgcgggctcctctgcagcctctgggcgaagtttgtctgcgctgtgcagggggatctaaaccagtgcaatgacatgggtgccatagagatgcatcggcgcctggagcagctgaagaggcgcatacatcgtgtgcatctgtattcccaggatgccaagaagaagaggaggaggccaaaaccaaagaaaccagatcctatctttcgagatcagtcaacctccgcatgcctgccaccagctctcttaccaccaccgctgctgccgccaccaccacaacctgtcaccaccgtgggcctctgtagtggctgcatcaccctctgtctacactatgccccgggtcttttggccctttccctccactgtctggcaagcccgatggaaaaaactggaatttttccagttcctgaagtgaaaattaacctggaagtggtcctttcttccaacgtccaagagcccccctggg

SEQ ID NO: 33155 - DNA, 775 bp, Homo Sapiens
ggcttccagtcctgctggagaaaggtaggttgtggtttcgctgcagctcgtgctcagccacagcacagaatgtgaccgacattaacactcacgtctgccaagtgcacagaaaagagaaaagtgaggaggagcagcagtatgtgatcaagtgtggcatctgcaccaaggcattccagaacacggagagcgctcagcagcacttccacaggaagcacgcggccctccagaaacccaccgcgaccccagggggagccaacagaagcagcacatgccagctggctgctagtgcctcacatgctgagaaaaacctgaaacagcctagctctcagaaacattcagacgtggaaaaaggagctgagcatgatgtacgctgccagaacatagaggaggaagttgagcttccggatgtggactacctgcggaccatgactcacatagtctttgtagattttgataactggtccaacttttttggtcatctacctgggcatcttaatcaaggaacgtttatttggggctttcaagggggaaacaccaactggaagcccccgctcagctgtaaggtctataattacttgagcaggattggctgcttcttccttcatcctcgctggcagtaaagaaaagatgccgcgggattttgccatatgtatgcatgctggcccgtctagatgagcaaacttcccaaaacaaattcctttcaccatccctctcgggagaacaaggctttccgggagctaaaagattcaattttagaaagacccagaggccaacc

SEQ ID NO: 33156 - DNA, 741 bp, Homo Sapiens
ggggatgctgcggcgcccgctggtcgggctggcggtggccgccctgggtcgggtccccgcggacggcatggcaggacctaggccagtagtgctgagcgggccgtcaggggcagggaagagcactctgctcaagaagctgttccaggagcacagcagcatcttcggcttcagcgtgtctcatactacaaggaacccacgacctggtgaagaagatggcaaagattactactttgtgaccagggagatgatgcagcgtgatattgcagcaggggacttcattgagcatgctgagttctcagggaacctgtacgggacaagcaaggaagctgttcgggctgtgcaggccatgaaccgcatctgcgtgctagatgtcgacctacaaggtgtgcgcagcatcaagaagactgatctgtgtcccatctacatctttgtgcagcctccctcgctggacgtgctggagcaacgactgcgactgcgcaacactgagactgaggagagtctggcaaagcggctggcagctgcacggacagacatggagagcagcaaggagcctggcttgtttgacctggtgatcatcaatgacgacctggataaagcctatgcaaccctgaaagcaagcgctctccgaggaaattcacaaaagcacagggaaactggcccccccttgaaagcccgccttcctttccccccagcgaagccccgcggcctaaaattttccccgccagggtggggcccaccccc

SEQ ID NO: 33157 - DNA, 683 bp, Homo Sapiens
gggagtgcggcccgtcagggatggcggcgtccagtgtggctgaggcgggtggaggtggcggaggggagagtggcagttgggagcccagagcagcaaagatcctagctgctggagacccgcatcgcgttggggcgtgacagtcgtcgcccagaagccaagctcagagctgtcatcctcttcttctgtaagctgccaccatgaccctgaccaaaggttcctttacctactccagcggggaggagtaccgcggcgagtggaaagagggccggagacatggctttggtcaattggtgtttgcagacggtggcacctacctgggtcacttcgagaatgggctttttaatggctttggagtcctgaccttctcagatggctcaaggtatgagggggagttttcccagggcaagttcaatggcgtcggagtcttcattcgatatgacaacatgacctttgagggggaatttaaaaatggcagagtaaacggttttggcctgctgactttcccagatggttctcatggaatacccccgcaaccaatgtctgctcgagaaccacaagctactgcggccgtgaaaagtgtttccccccttgggttctttcgagtctcagaacgccctcccagtccttccccgcaaccttcacttgcctggaaccgcactttctgggccccccttttcaaaagc

SEQ ID NO: 33158 - DNA, 816 bp, Homo Sapiens
gggacggtcagatgccaagcgacaaaaccattggcggcggggacgactcattcaacacattcttcagtgagactggagccggcaagcacgtgcccagggcagtgtttgtggacctggagcccactgtggtcgatgaagtacgcaccggaacctaccggcagcttttccacccagagcagctcatcactgggaaggaagatgcagccaacaattatgccagaggtcattataccattggcaaggagattgttgacctggtcctggaccggatccgaaaactggccgatctgtgcacgggactgcagggcttcctcatcttccacagctttggaggtggcacagggtctgggtttgcatcgctgctgatggagcggctttcagtggactatggcaagaagtccaagctggagtttgccatctacccagcccccccaggtttctacagcggtcgtggagccttacaactccatcctgaccacgcacaccaccctggagcattccgacctgtgctttcatggtggatcaccaagccatctacgacatctgccggcgcaacctggatattgaacgcccacatacaccaaccctcaccgtctgattgggccagattgtggtcttccatcaccagcctcccctaaggtttcgatgggcccccctgaaatgtgggactttaaacagaattcccaaacccaaactgggtgcccataaccctccgattcccactttccccactgggcgaacctattgcccccccgtcatcttcttgcctggaaaagggcttttccctggaatcccgctggtccctctaacacaaaa

SEQ ID NO: 33159 - DNA, 742 bp, Homo Sapiens
gggctccccgagcggttggctgcatataagggccgctcgcttctgggcgttaacatctcctggccgcagccgccctagatttggaattctacactaaagtcatcatgggcgttttccagatattgatgaagaataaggaactcattcctttggcgttttttataagcgtggccgccaccggagccacatctttcgctttgtatgcgttgaaaaaaaccgacgtggttattgatcggaaaagaaacccagagccttgggaaatggtggatcctactcaaccccaaaagcttataaccatcaaccagcaatggaagcccgttgaggagctgcaaaaagtccggagggcaaccagatgattgctcaccactcctctcttccctagaacactctatgaatctagtggaaacatttctgcacaaactaaatggtgatgccagtgtgcggaaatgcttccgctaccttttgccgcgtttgcccgcattctttggattctgccccaacaagcgaacgcaccaaatacccctaaataaccccctgcgctcatggcggtaaattctaattttacacgcccaatccccgcctcgatatgtccgccacactcccccggaacctataattatgccgaattttaccctctggcccgttccaaaaatatccccccgcccacctttttctaccttcctcttttccaccttcccaccccccacccttcaaatacaatccccgcagacagttgtacatg

SEQ ID NO: 33160 - DNA, 491 bp, Homo Sapiens
gggggtgcagaaggctacgcaccacggccaggtgacccgcggccgacgctgcccagagcggcggcgcgccctcgatggtctcgccatcgaagtgcacagagccactcgcctccacgctggcgccgcagtggtccaccagatactccaccacgtctaggtgtccacggcgcgctgcgattagcagtggcgttccaccgccggccacctcacccagcagctcctccagctcctcacgcccacggctggccaacagtttctgcagcagaggcagcttgccgtcgtgcgccgcattgtacaccgctgtgtgcagatccatgctggaagcctcgctgctggatctagccgggccgccggtcgccagagacatccttcaccttctccagggctgtcatcttagcggttctcctgcttctgttaaatcttgattgtctgtctgccccagtgtgtggttttaggatataaatgagaatataaactggacccagcatcaa

SEQ ID NO: 33161 - DNA, 772 bp, Homo Sapiens
ggggagcgcgcccgtcccggacgcccctcggccactcaccgtccgtcgtccagccccgggccgcaccctagcgaggccgatggagctccggctccagggccgacgaacccatggcggcgtgtagccgacgcggagtgggtgaggaagtcacgcgcggagaccactgcagatcccgggctctcagcggaggttttcccccaaaacccctgcggagctgacacatcaacaaagatggcggcgacgcctaagccggcgcggctacagctgagggggcggggctccctgaacgagccaatcagcgcggcgcggaccgcgtgacgttaagcacctggaggcgggcgtggttttcgaggcgccgcctccagtcctcgcggtttctagaggccccgcccagcatctccgtgccacctccacttaagcccaaggaggctgtagcaggctgttgttgtccggttgggccactctttccctttcccgtcccaagccggtgctttctatcggaaggaagttgccatctttttttcttcaccctttggccggtcatctaatgagtcagtggcataaagtaataaaagagaactagacgcgggactagtatcccattcactgccttcatcttgtcgggccgccttcgggccctcgaaaaaccttttttaaaccctttctttttgcgcgcgggggcccccgtaaggttagatggaactgggccctaacctgttttccatttggaaattccggtttcatgccctccggggttgggttatcctcagcc

SEQ ID NO: 33162 - DNA, 535 bp, Homo Sapiens
ggtgcacagactggaacttacgtggggaccaaatggctgttggggttgagattaggaggcccagtggagagggtgacctaaagtggactggtgctacagaggtaggcttgtcaggcctgtggggtccgtcccccatgccttaggggtgcatggaaggcctctgttgggggctgtttagactattgctattccagttccaagcactggagtctgccagatctcactggtgaataatcccaaatccaagatttgatgaggtttgtgtgttctttacccatcccgcaaggccccagagggacaggctcctaggaggcccctttcccaggactgccttgccactcttctgaggccaggtgccctctgacctgccttgaagtggaatttgatactgtacattgtctcaatgcctgtttttacatattcctttcattaaaggttttagtttgggtgtatttttttggtcaggttggcattgatcctttcttaagatgctgtgagaaccatttcatccaatgccaaataaacttgtgttatc

SEQ ID NO: 33163 - DNA, 836 bp, Homo Sapiens
ggggagcctatcgcgttcagcccggcctcccgcgcccctgccggtacctagtcggcggagggcagcgtgtgacctgttggggtccggcgtcgctacagagagttcctggctcatccttgagactcatctgctctgagccatcctcatggatgaacttcaggatgttcaactcacagagatcaaaccgcttctaaatgataagaatggcacacgaaacttccaggactttgactgtcaggaacatgacattgaaacaccgcatggtatggtccacgtcaccataagaggcttaccaaaaggaaacagacctgttatcctgacataccacgacattgggctcaaccataagtcctgcttcaacacattcttcacctttgaggatatgcaagagatcacccagcactttgctgcctgtcacgtggacgctcctggccaacaagaagcagcacccttccttccccatagggtaccagtacccccccatgggatgagctatctgaaatgctgcctcccctgttcctcacacactctagtatgaacaaccccatttgctatccgggtgttcgcagaaggagccctccctctttccgacatatttgccctggattcatcaataaacttgctggaaaggccttgggctcccttcacctttggccccgtggggctaacgggctgggattggactgcgtcatccttccccaccccctctgggttgtcacccccaacattggggtcaaaataccccccggggttcccctaccttttcggcccctgttggatttttacccgcccccagtctgggaaccctcttcccaaaccccttccgaatctggctc

SEQ ID NO: 33164 - DNA, 595 bp, Homo Sapiens
ggggaagagttgggaggctgctcttgggtgcaattccctaaatggccacaggatgggggtggtgctccaagaaaactccaggagctgtctctttgccctctgctcctggaaagctgcagacttcacggaaggcaaagacctcagccagggtacaaagtagtgcagaagatgcccaggagagtcagtgggaaggtgaagcgtcagaaggcggccatgagaagaaggagatggaggggttggtgaacacggccactgtgttaggacctcagagacagaaccgagccacaacccatcttccatctggaggcccaagtcccagtggagaggaatatcccttcatcatagcacccaagaagctccgagtcagtaggtcatccacatgggccaaggaagccctcggcaagaacttccagaggacacgcatccagtccggcctctgcagcatcatgtgatctatacctgctggctacagcacttacctctacaggaacttcccgatagacacttgtatgggctttggggaggagcctctttagccggtatggacaaggtgctcctgaacagacaggccaaggactctgctggcttggcaaaa

SEQ ID NO: 33165 - DNA, 792 bp, Homo Sapiens
gggagcgaagtgataggaaatggagctggggagatgaagaccatcataacaacaaacgaattccatcagttgaagaaatgagtcaaacatccttgaaacacaaaaagaaaaatgaacctggaatgaggtactcaaaagagagtctagatgcagagaaaagaaaggattctgacaaaactggagctcgtctgagcactcagggatcccaagaattacctctgcataatacagactcccgaggttacgttgtacgaaatcagtggtcccgaacatcacggagcccatctactggagctccatcagtggatgagcccagaagcaggaatactgccatcaaggtagaggcccctaacagctccactacctctcgaacttcctctgcctcccccagtcaacacgagacctcacctccacctcagacatcagagaagtcctccattcaacagaccccccagaacagacctatcacccagcttgaatcacaacctcccacacctccggaaacagagccaaactcgagacgaacatcggcgaagatgtatacgggcagtgatccgtgggcgcacagggaaaacagagagcctagagacttgcagctgagggactatgcatacagctgtgactcacgagaagggatgcccaagacccgagagtatccgcgcactcctcctactgagtggaagccctatggccagcgtcgcctccagtatggcacctctgtggacctggaaccggaatatatatccgatggcccctcaccaaaggcagaagcacccaacagagggaatatga

SEQ ID NO: 33166 - DNA, 795 bp, Homo Sapiens
ggagacggagaatgttctagccctggaggcagctgtgaatgaagtccttggggggaaaagaagcaggccgagggcgatggtggagtagagctgcctcgcagaggcagcatgagctgagagggtgacaagaaggaggcgctacacagcatggaggactttctactctccaatgggtatcagctgggcaagaccattggggaagggacctactcaaaagtcaaagaagcattttccaaaaaacatcaaagaaaagtggcaattaaaattatagacaagatgggagggccagaagagtttatccagagattcctgcctcgtgagctccagattgtccgtaccctggaccacaaaaacatcatccaggtgtatgagatgctggagtcagcagatggaaaaatctacctggtgatggaactggctgagggaggggatgtctttgactgtgtgctgaacggagggccacttccccgagagccgggccaaggccctcttccgccagatgggtgaggctattcgctattgccatggctggggcgtggcccaccgggaacctttagtgtgagaaccccttggtggacggcttcaacctgaagctgaccgactttggctttgcccaggggctaccccagtcccgccgggcaacttgaacccccccttctgtggtaagatcccctatggccccccctgagggggccccaggggcctcccccctggatagttaagaacaggggatttcggggaaccttgggctggggccccccttttcatatcgcccactcggcaatctcccccctc

SEQ ID NO: 33167 - DNA, 525 bp, Homo Sapiens
gggcaggcatgcagagttcatttctgtgactctacacagtgacaaaggatttgtaaactttgcctggattttcctcattttataccagttttgttcatcacgatggtttctgttgaccgcttcatgtttttataccttaagcatttgatgaaacactctctagtgctctctaggcgtttcttacttttattacaaatgtgacaattgtcaaaagatgcactaaaatataaatggagattgagcctgttcattttccagcttataggcaactttatacagacttgaaatctttatccagttgtttagtaaagtgagagagaggtttcctgccacaggagaacttttacacaacaccccactgctttagtgggacagttgagagcagtgtgtcccttttatgaagaacccgtcatttacagcgctccgggagagagaatgttactgcagatcccttttccacggtgtagatactctgatttatagaattcattcttgatccagatgatggttctttccccgaccaat

SEQ ID NO: 33168 - DNA, 786 bp, Homo Sapiens
gggcaacagacccaggagaggaaagctcaactggaagatgaaatcgcggcttatgaggaaaggatgaaaaagctcaatatggagttaaaaaaactgcagggcttccaacagcagagcgagcaagaggtgcacaactttgacaagaagctggaggagatgagcaaccaggtgttgcagtggcagaggcagcaccagagtgaccttaagatgttggcagctaaggagtcgcagctccgagaattccaggaggaaatggcgaccctaagagagagcctccttgcagatgagaaggagccgtactccccgcctgcaaagctaacccccaaagaaacctgcaggcaccaccgggagaatgaccagattatgaacaacgtggaacaatgggcaaaggagcagaagattgccaatgagaagttgggaaacaagctgagagagcaggttaaatacattgccaagttgactggcgaaaaggaccacctccacaatgtaatggtccacctgcagcaggagaacaaaaagctgaagaacgagatagaagagaagaagctaaaggccggggaacccgaggatctgtgtcaaggcctttcccccaaacaaactggaagcctttcccaaaagggaaagctatgctgtgcccctgggctgggagagggataccccagggacctggaacccgaaaaacgggaccacaagtccttgggggttaccctcactccctcagggctcctccctaatgggtaggaatccggttctttcaccccaaaaccgtcactggctaacacgttt

SEQ ID NO: 33169 - DNA, 374 bp, Homo Sapiens
ggggcggcgcggaagggtttcgttgctagggagatgggctgagccgggcgggcatcgcgccagacctgctactctggataatccactctcctggataatccactaccctggataatcggctgcccgcttttgcgcatgttagggagttgacggcctgtagcattctgatgcagcaaaatatttcgcagggtctgtcatagggatctccggtgagaggaggttcccttcgaaggcagaactggaaaccttgctgctaacttggtagggttgttgagataattacatgagatggcatatgaagggcggcttagttcaatacctggcatgtagtaggtgttcagtgggcgtagttaccggattgattcagatagtct

SEQ ID NO: 33170 - DNA, 368 bp, Homo Sapiens
aatgagaaagatggagaaagtcaaatggagaactgaagagagatggagaaaggaagagttggattacagagaaaaatcagactacagaatgactcataagtgaagagagatgcgagctgactaggacagggaagagagatgagggtgatgatgaacaagacggactgaaaaagagacagaggcctgaagatggagtggagagagatggaggggacagagggggaaacaaacccactgaaggccatgagcccagggcaaataggccaagagaccaaaagatggtcagagacacagttatacagaaactagaagatgcagacaatctagaagccaaaggcgtaacggaaaaccaacaaaaaaaccttgtc

SEQ ID NO: 33171 - DNA, 371 bp, Homo Sapiens
ggggcacgtccccttccggctcgcgcgggcagcctcgcagagtcgagcgtgttgggggttcggcgcttaggcgacaggcgcggcgggcgggagcggcggccgcgaaccccagccttgggcagaggtgttctagtttgcttagtgggcacaaagttgggccctggcctggggcagtagcgggggtaaggttggccctgggggcggggccaggctgtgagccgcacgaggcctgggggcggggctggttgtgggcggagatcagttccggggcggggctgaaggcggggaaccggctgaggccgtaccaggcctggagggcgaggctaattgggcagagaccagttccagggtcggggctgtgggtggggccc

SEQ ID NO: 33172 - DNA, 412 bp, Homo Sapiens
ggaggcagggctttggcggtgtgaggggaggaaaggtggtgagctccggaaaggctgctagagggaaagcaggatgggtcctccgagtccagccccaggagccgggtgtctccgtttccgtcacttcccagcactaggtagggaggtgggtaaaagtaggctgcgttcctcagcccaccccttggctccccgggagcctgaggcggggagcttcgggttaggtgaggtttgggggaggcggagtttgctggtaattgcccatccctcccctccaaaaaaccccacacaacttaaagattttaatattaactgtaaggatgttggttattcaataaataggcacaagttgaaaagtatgatcagaggcctctgtgagaatttacattattcaataaaagattttcagtgccaa

SEQ ID NO: 33173 - DNA, 404 bp, Homo Sapiens
gggagtaaggaacagggggagaatggacagtaatgatcagtggctgctacaatgtgtgttaacccattcattcgttacgtcaacccagtgtgattggtgctatctgtagcctcgttttatagttgaagcaataggcacagagaggttatgtaatttgcccaagctcacacagagctgttaagtggttgagcaagaacttgaacccaagcaagctgactctagaatctaattctattatgtccctagacacatcctgacccactggccagaccacatttcttctctaggatgtatatccacttgggaaatgcaggcctctcctggaaatggtagctaatacttgtttagcactttatagtttacaaagagattgccacttaaattattctctttaaatattcttc

SEQ ID NO: 33174 - DNA, 404 bp, Homo Sapiens
ggagaggaagtgtgaaaggtatctgagataccagcttagaaaacaactctttagctcctcctggtgattaggacaccactaaacaacaggatgaaggatctgtccccagggccgaagtgatgatgtatctaatattatatcctagaacattcacagagtagctgcagaatgtcttgagctggaacatccccaagaggccatatatatatcccagggattttacagtggacctcactaggccggagtaactgtaaagtcagatggataatgagaattcaggacgttagccacacgtggactgtggcaaaaagaaagtgacccactgaagaagactgtttttcagctctctcatcaattgctgtttccaggagcccacagctccaattactcaaaagaacgttgac

SEQ ID NO: 33175 - DNA, 411 bp, Homo Sapiens
ggaagattgaaaatgacagttgttgattttctgaggtaatatacccaaataaaatatatgtatgtgtacatgaatctaaactgtcttcttctgttcctcattttgctttacttaaataatctttcatattttttaagtgttttgcccatgtgcttgggtagccttgaagtcaccagaataactaggactcaaattcagaccaaaccaggactagctttttgtgccatgagttagccatggtcctggacccagcaaaaagaatgattatgatggtcagagtaagatgagcaattgcaacataatattctctaatattgtatactgtaaatttattcagctgccctcgtttactcacagtttgcttatttgccaccataagaaatggtacaataaaaattcatgtaatcagaa

SEQ ID NO: 33176 - DNA, 833 bp, Homo Sapiens
gggggctccggtgtttccgttttggggttggcggctccgaagcttttgttggcgtgtcggctgtagggtgccccgagagcctgcaggaccttcggaaccatctggcgtctgactctcctcagcgctggcgcggccccgaatgaaaacctggaaggcgtagccgcttggtcccgcggtgggcggggcccctgcctgacgtggacctctcgggatgggcctggccaatcctgttttcttcccaagattgttagggataattcagtcattcgtttcgcaacccatcttttggcccccgttaggtgtaagtcatacctgtgatacctttgtgactactttaaataaaaaaatttacaattaattcgttaaaacacagaaactccccccgaaacaaaccctgttcggccgcctcggccctacaacaagctttctaaaaccaattcccttggcgcgcgggccccaataggtaaagtgaacctggccataccctggttcgtaagaaaccctggtccataactagtgcttgcgattttccccgataaaaaccgccccgatggccacccaaatcgatctgacccaaacccaaacgggaaggcgggaagcgcaaccgtgtgcaccatttcacgacgagtcccagcgccggcttgctaacaccacaaaaccccgcccccgcctggacgcgccaccacaaacaccgggcgggaagtccaaccaacccgttttgtgcaccacgagacgcttataataacgcgcccccgacgcatcgtgtatatctcgcgagcccctgtctgcctcctagctgtaacgcaacccatgccgctccccacccttataag

SEQ ID NO: 33177 - DNA, 483 bp, Homo Sapiens
ggcttcacaactctgggccgagaacctgtttctcttcattgtccccttggtggcacgttcatgggggttatttttacaatgtgcacaaaaggattacagggaaaaccagttacagggaggactaccacctattaaaagtatttttctggaaacagctggcgattaccctccaaaagtttaattaccattattgaaaacgcgtattggaactgccttggataatcttgggaagagggaaagaaaataaagccccaaggtaaaaaatacttttaagacgtggacagaaaaatataggatcacgtaatattttgatggtaactgacttatttagatttatgtattcacaagtttacctctgagtttatttgcataccatagtttactgggtgttcctatttaaatctatttgttctcatgttttcaaattgagtcatacttgctgattaaaataaacttaaggacatcattattccttattaaatc

SEQ ID NO: 33178 - DNA, 410 bp, Homo Sapiens
ggtaatccagaggttgcatagaagcagagttgtcacagtctctgtagcacgtttgtgagaattctctaggcaggcccagcccttctctagaagtttgaatttcactcccaccttgttgctggggtaccttcttcagggtacatctaaacacagtggccttatacagaaatgttgttcaacccacacagtgctttaaaaaattaattgccaacatttaaaaatcagggagtttcacataaaattcagacttcttgtttccctttaaaaatgagaagctaataacatgagttgaattcccacaagtcaacaatgagctggaatctaatatggatggtcctcttatctttaccagtgcacatggtgaaaaaattcaaacagtataataaagtcttctttcaagtcaaaatatg

SEQ ID NO: 33179 - DNA, 415 bp, Homo Sapiens
cccgggtctgcattggggaaggatcccacaaaccaaataaccatgggagtgaaactgccaagccaaggacatgcaataatgttcttatctcagtctgtgggaggggcaggttgaactctgcaggtggtgaactccagggctctaggctcctctgccagcggttagaggactgccctctccagccctgcaccagcctccaacagtttcaagtttatcttttcctcatattccaggatacatgtttttgttttttactttcttctacccaaagttgagattaggttcatcgtagacaactgaatctatcaattctaccacattagtaaaaatctaataagctaaaatttaaaattttaattaaaatgattgtttcatgatatatatctcccaaaaccactgaagaactttaaatttc

SEQ ID NO: 33180 - DNA, 884 bp, Homo Sapiens
gggaaggagggacctgtagtcaaaatgcacaaatctgaaggaggcctttgtgcacagaagctgtcctgcctgtaaatgtccccagtcaccagattagtgccaatttattttccagtgaagacaccaggggtctgggggtggggtggagtttgcaggagggagcaaaaaggaaaaggcatacttagcaccaaccacatgagagccctgctctgaagtaacggccaaatgagcgtccactgagtgtctgctgatgggcgtgtgctgatgcctccgttagatgggcagggtaaaaaggaggacaagaatgaatacttgggtataatctgctcttgctgttggatgaggaagctgagacacaatccccggaagagcaagatttaaaagcccggcagtctgactcctgatctctcactcatccactactgtagacagccttctctgtgtttcattagcacataacatgaattcatgctctcggagtacaaagcagggtttgctaatatcaataaaagagacactttcatagtgcttctacctgagtcttgagggagaaaagtacagttttcacggaaggaacaaagaaaaggcactaccctgctgaattgcactggtttgaaggcgcctgcttgcttaaaaaggtgcaaaaatgctgcttgctggaaagaatgaaacctgccgatgggacttacggaatgggcaacccctatacattttaaacgaaatgggaggggaacaaacaaccaggtttgtgggcaaaccggcccacaatgagtttcaagcctcatgggcccccttgccccccacacccccatttcccaatacctaaacctccttgtgtcgggcccggccctcccgggccctacttcaaaaatgctctctttctc

SEQ ID NO: 33181 - DNA, 751 bp, Homo Sapiens
atttcttcttataccacagtgggacatatattcatatttgtttgtttatacataaaatgccaatggaaggaaggactaaaacttgtagtaattatcttaggaaggaaacgagtggttataaagaacggagctaggagggcagtttatcacagcatactgtaccttaatatattttgattttttaaaaccatataaaagtattattttttcaaaaaattaaaaatgttatctatcttttgaaagctaagttcatgcatctcctttttcatgaatcttcactgataacctctgataactagagtgctttgaattgtttctgtatattgctatagcagtttctttaggccatttatgagtcttttacctattatgaattctttttaggcagagccatcttctacatagctctccaacaccaacagcaaatgaggatagtaccatataaaaagtagcttgttcaagaaaaaactggatgcataatgatagaaatccttagtggtttggccttgagtcagggataacagaatgactttggatttgggcataaagaaaactttttgaggggaaagggaaagggtccaattgccttggatttggatggggggttacctttaggaagatatggattaggcaaaactttaaaaaggggtcaattccctttttaatggggagggaaaagtaataccctccggaaaaaaccttaggtttttttaaaaagggagcccccgaaagttcccttaagagggggagg

SEQ ID NO: 33182 - DNA, 367 bp, Homo Sapiens
ggacagccgcgggaagacatgagaggctgctagaaggacttcccgcggccagcgccatcacctgcccacgccgcagggagccctgaccagagctccagacctctgggtccaactgccttatggatccctctccctgaatgtcacataggagaggggacaggggttggccacacacctggaaatggagttctctgatgcaatgtcctttggggtccggactgtggtgaaggttcgtccagctccacgcccacccactggccgctggcaaactccgtggtcccacagaaccgcagtgtgcccgtctggggagagaagggaggcgatggctaaggaaggaatgctgggaggccaacgtggagtgcccaca

SEQ ID NO: 33183 - DNA, 559 bp, Homo Sapiens
gggactgtaaccctctaggacttgcaaaccaagatgtgtttcccctgcttaggggtgacagtaaatttgaaaatgagaaaataagactgcatctaagaattaaactttgaaataaatatatagcaggccagcacatagatagataaaggcaacttcaattgtcagaaggatgcaaactcaaatgcctgaaggcacacacattaccagtaggtaatgctgatcagcgtcttggacctggcagagaccacagtgaactgaatgaaggcagcactcaagcttcctttaaaggagacagtctctgctcagctccagatggttgaccagatgtgggaaggggctagatctctggattttttcaagaaagactacagctctgggttgttacatgaatattcctgatgtttaaatcttagcctctacacaatatgagacaaacaaaagcttttaaaggccagaagtgtcccatggacagtccgtctcagaccaggaagtaggcaaaaagcagccttggaagtaagcacaggcagtagccactgaaacactggggtagggtgaaaaa

SEQ ID NO: 33184 - DNA, 980 bp, Homo Sapiens
gccagggtgacagattatcctgtgcttcgtgcaacaaggatagtctgtaggaacaacaagagaagttgtctctctcagacaatggtgtcctagcctagacatgtgggctaggaaattagtgatcagaggaaatcagaccaaagccaaagtcagagacattttctgttctcctcttcactaaaccccaaggctctttagcatgaagtatgcagaccctgtgtgattttctgtgttatctaaagtaaaacttattagagttccacgtatttttaaccaaatatgggtaatgaacgttgttctgagagaaaggggattccagtcccttctgtcagagggattcaaggatatggagagaaatagctttttagaatttgaaaataaaatttctatggaattggtctaaaattgggttgagagggaaaaaacctctccagcgaagacaaaatctcgctttttgtccccctggtcaccgggcttagaagggccaccgagccggcgatcattaacctttactggcaacccctccggaagctcccgggagcgtcaaaggcaaacccttccccattcctccgtggcctttgtccccaagggtcctcgccctcgaatctctccacgagcaaccatggtttctttgggccacaaaaccaccgacggggtctaaaagagcgcaggatagaaactttgttatttaaaaagaggtgggaagacacggctccaagtgaactccgcggggaaggcggcaggccctgatcttccgtgggacacccctcccccaatacaatggtggcgagggggaggccctctccccccaaaaccccacgcgcataaaatagggggcccggcagcagaaacaaatggtccccatactgccgcctgatggtaccccatcgttgggggctgcaaaaaagagaggaggaaaaaccacctcgcctattgggcaagaataaaaacaggctccggacggggggggctgtagaaag

SEQ ID NO: 33185 - DNA, 856 bp, Homo Sapiens
gggtcttttccagaggctagatatataggaggttgtggctgctccagcagcttggattcagagtgagaaggcataaaggagaatccccagctgacttgtgcagtggttaattgaaattattcaggcaagagatgatggtgtcttggaccaggggatgaggaaggctacaaaatgtgtctacctgtattctgtgaggagaacgtgttccctggttttagatactgtgaagatggatcaggagagagtttatctagactgttggggaaaggtgttgcgattccttcagctacacaggattgaaaggagacatttctgaaggggaaaaaggaaatgaaagaaaagatgtttcagattgaggatatgctgtgtggtgaacttgttcttcactctgtagggttcacaaatgactcttcactgccctcttggatgaaataaactggttcccatagaaatggaccgtctctgatttcacagtctagagcacacaaataactcaactttctggaagcaagggtgatggctcgtgagagctcaaggacaaggaggagtctgtagaagcacacctggactcgggaaatcattgacctctcctccctgattaagtagcgcctggaaagactctctttgaatcaaaaaataatgcgagcttcctatcaaactaccttacaccgcccaactgaggtgatcctaaggtttgggtgggaaaaaaatggaaattcgtaaaaacctttttaaggacctaagaattcctttattccaacatggggattaccggcctttttttgaaatgaccacccaaacctgtggcttggccccagggaattccggtttggcaatgggtgggccttggggaccc

SEQ ID NO: 33186 - DNA, 790 bp, Homo Sapiens
ggagcgtttctctgtgcagttgcggtcaccatgggtgagcactgtctgtgcacgtgccagggaggagatggctgggaccactgcacaggagggcgcagcctggcgtcgccatgaaagttgtctctgtgccatctctccggtccttgaggagagcccagaaagatttatgacccaggaggtgcttttcctccagctgttgccagtgtccttctgagcctggattctccggggatttccgtcgtggtggatggacttcacatcagcagcagttctggtacagaattgtaatgtgttttcatttctctgtaggattcacctctcaccagcgtctgtcttaaaggtagggccaatttcatggagcatttttctgtgtgtgtccttgttgcttttgccagaaaaagtggatttgacatgcgtgccccgatgccaccatagcccctaggccaacaatgtcatggtctaaacaccaaaaagtgatgccccgcattccttccctggatggtaccgtttcttctccgtctctctttgatgattctttgggaccaaagtcctctccttagtgcgcctacttcctgtgggcatcatgccactttggaacttattgggactggcccggggagactctgcagtctgcgccgttttgaaacccctgagaaagagatgccaccctcaactttgaatcatgaacagcccattggttcaattctcaccccttaaactccattggagccttgttttccagcctccctcaactttccttggacgtggaatttggtcaaccaatggtttg

SEQ ID NO: 33187 - DNA, 627 bp, Homo Sapiens
gggattcatcctggcatcatggtacctgagtacttagaatgttggaaggtgtgctcagtgaagatgaataatttgcctaagaacacttgactggtgaatcccattctcatttttgcagtatccaagagctggatgcctacatgatgcagtccacagtggctgagcaccttctgtccctgggatctcagactctgcctgccacagagcagatgactggaaaaccctccccacttgctgtcatcattcctgaaaggtcttcaggtgtgccagcaattttcagactgaatatctacaccagaaaagcacataactaccatgagcataagacgtgggagtgccatggagtgaccatagaagtatagacagtaagatcacagccagatacaacttcttgttttatagatgagagaccctgaggcccagaaagaggaaggcacttgcccatggtcacacagtgagttagtgagactggagcccagctctcccaggttctgtgctgtgctaatcacagggtgttaggcaattggctctccctgggttctgggcaaattcatttttttgcctactctgctgcatctacacagtcaaatggtgatttgggttaaagttcattgaatcatgaaaaaa

SEQ ID NO: 33188 - DNA, 651 bp, Homo Sapiens
aaggaaatataatatcgtgacttgctatttatgtgtaaaaataccttgtcacataactaaaataactgaatacaggttctagacctttcagctcttacaacgctgtgattttgttgtatgtgtatgctgacccacctctgcagaaaacctagggtagttcaacctctgtttaaattctgttagagatgctaatatgtctgtatcggctcaacatgaagctaagtgctgctgagtcctctgtgagctgaggctacacggggatcccacttgcatagcatgtgagtgtcagcgagggggcagcatttgcagtcgtgtacctgtgaggcagccaggcccccgaggtggagaagtcttccaggtacttgtcccattgctccatcattccatacatgttgggctgcagtaatgggatgcttatgctctcttcccacccttctccgtctcgctggacacatgtgcactgtaattatacacaacccctgccaaatcaaaccaaagtcatgtgggagccccaagggaacacacaacctcctgtgaaaagaaacatcacaaaaatgaccgtagcccatgtgggtaacttttacgttaacataaaatcccggggtgggagggttcttagaaatctttccaatccacccttaatgaagatta

SEQ ID NO: 33189 - DNA, 715 bp, Homo Sapiens
gggaggtcgggagcgcgcccgtgagcccggagcagcggcagcgtcggtggcgtcgagagcgagcgggcccgggaacggcgcgggtggtagaggaggagccgcgggctcgattctctaaccatggcacaggtagagaaacgtggaggtttgctccggaaatcttcagcctccaaaaaaccactgaaggaaaaagtggtgctgatgtatgatgagatcttcatgacagaggaccccagtaagtgcagtcctcggttttgggaggagctctttctcatgaaggtgaatttagagtacctagaaggcaagctggaatctcttgatggtgaggagttaatgaagatcaaggacaatattaattgcttattccaacactgcatccaggctctgggagaggagcatccaattcgggttgtcaatgcattgcagaccctgtgcgcactcattcgaggagtccatcaaaagaataagtctacctctgggtttgacattatcaacatgctgatgggctttgacaaggcggagctgtgcatgaaggtgaggcataagctgcagatgtgcctgtggatggcagcttctgacagctgttcctggacactatcagcagacaaatgtactcaaagatttggactcagaaagatacagatgattgaattttgggcttgcattttagatggtttttatttcacagattttgcttttatctggattaaaggga

SEQ ID NO: 33190 - DNA, 748 bp, Homo Sapiens
ggctgtatcttaaagttgtgaggtttaggattaacttccataatttcagaggaatagatgttttgaatattattgccatatatatttcctgaaaacaacatttccatgagttgaaaatgggcagggtactgtcctctaaatgctcccattctgtagctgtgtttacagctgccactagcacatgatttatagaagaggcatatcagctggacccaaggagatgtactcatggacttaagatgattagattataaatgccatcccacacaatctttaataaacaaaacccaggtgagctatatcattcttttgctgcatcaaaagatgggaaaccaaacagttgtcctcttgtggtttttcccagcaatacaatttataaagttcctataatcaggtgccctgtgacccagcaggatccttggtaccatgacctaaattggttgtatttattatcatggtatggaatttgactgtgaaagttgattagagaccttgagggaaagcctccctggagatccagaacatcagatttgctatgctggcttagaactgtgtcctatcctactacagatgtgtctgtcagccatgaagagatgttttaggtgtctcttccagaagttgatttccgctaataacccacagtggatctatgaataccagagttgtacgtgatttttcaagtgaataggcgccatttggtttggttttaaataccctttccagtaatgactggtatttttttaaaaac

SEQ ID NO: 33191 - DNA, 867 bp, Homo Sapiens
gggaagcaggacagagaaggagcaggaagctatgctaattttcctgtcagcttaagggatccgtctcagcaagaatcttgtattctgataacggaatgctgtacgtgctgaccacatctaagaaccattaaaaagcaaggaaacaaacaaacaacccttttctcattccgacacacgaatagtcatcgagtattacaccagcccctctggtggcttccttcaaaactgttgatcttagctaaagtgtataaccagttaccagctgcacttcgcacggccatcccgtccacaatgcagcagactcttcccaaggccacctagcaagcaaggttgatcggatcatctaaactggccgcctcctgaatatttcactgaatcctggcgttcatgttgaagcagacaaaatgagaaaggaggagggcattgctcacctctcaatagcttttttcgttcaagttctatgtctttatcagctcttgcctgtgattttaccccaattcaaccttgggagtgggaagatatgaacagataacccttggcctaacagctccatcaaacctccttgagagcaactacctaggccaggctagtgagtgctttgtgaaggaactggtcagaagggtccctcaactccttccgggcctcctggaccctgcagaaaagacttagggggacccccagcagagggccaattggtcctcccttccttccctggccccaccagggaaagggaaaaccggcccccagaatttgaaccaaaataggtggaagtaaatctcgggggagaaggggtcttagggacacttaagggggggaaaacccttgtaccagaaaaatttttctcccaagtttgggagaagcccccct

SEQ ID NO: 33192 - DNA, 822 bp, Homo Sapiens
gggagagtttcaaggctccttcccctggctgcaattttgggggagccgaggaactgcgggggctggggaggaagctggagagccacggagggggtgggaaagaagagggacgtggggagaaagaagccagaagccagggggtggggaagagagacgtcagcgggacctgagggcggccaggaggggtggcaccgcgtcaccccgccccccaactctgcataacctgtttccacagccccttccatccacagatccgtgctgcgtgccctctgggaagggtgaagtaaaaccctcagtctgagcctgagaaatcctggcatttgtagcccagggctgcgaggaagccacagggcggtccgcagggcggtatcgaggctctgggacccaaggaggggcaggacgtggtgcacccctcgcgcacgcacctgtcgggaccggccgcctcctcctgcctacctgtcctgcctccttccccccgaatttcaccttaaaccatgatgaaccaagcccagtggattctgaagccccggaagatggcagtcccaggatctcaggatattgttggaaatcatcttcacctcccaccgccagaacagcctcaggggtctcccagggaaagactgcccctcaggccccggggacgggtcccaaacccggccataaatgggggtggggggccaccctgacctttggaaggccttaacttttggatgaacgcaagcccccaaatccgggttccaggttcccttccccgggaaaaaccaaaaacttcagcttgggctggtccggataaacccccttgttgcttgaaccccccacaag

SEQ ID NO: 33193 - DNA, 599 bp, Homo Sapiens
ccttaaggaaaacaactctgaggacttttgtcacggacttgaaattctcatctgtgcttggacaagactctgaaacataccaactgtgtattttcctgcctttggtaaatctggagctattaactgattctaaagaacatttgacttaaaaagactatggaaagcccaaagaataaagggacacttgtcactggattgaaggcatattctaatttaggacaatgtcttgagatctttaacttaactacatttgcaaagacccaatttccaagtaactggaacattctagataatgaagaccccagtggattattattagcaaatgaaaactggatatcaagaagggcaaaatcttcaaccttatcagcagaaagagtttatgtaaaaatataccacatagaataactaaaaaaataagcaagtgataccttatctgagctcaaaatatctgtttctttgcaaatgggataaaggatttattatattatagcaacttgaggacagagactttatgtttctaactacccatcccagcatcatctagttcattcctatgctgaacagccccctacacattgcctaaataaatacctaacatt

SEQ ID NO: 33194 - DNA, 780 bp, Homo Sapiens
gggtataattttcaaactctgtcaataacttgctgggtccaacctgcagaccctggctgcgtgatggatgaagaaatgcactcagacacaggtatcctgtgaaagaatggggtaggggactgggcagctcccagacactgaggagggtgctatgaagagtcagcaggtgctataaagagtcagcaggcacagccctgtcaggctggggctccaggcatttattcagtacagatttaatgacaaagttctcaagtaaacaccacaccactagagggtaattaacattgctgacctcctgagtagagagcagtcatgcgcccgcaaatgatcaaaggtctgttttaggaccacatgagtaaacaagctatttagataaacttctctacattcctatgtatctacgccctaagcttttaagagaattcagctgccttcagccaaatcttttactgaaggtatgcaaacctcccagccttccaagaagttttgtgtctatctcctacaacttaatttttataatttctcccaccaccctgacagatcccctacaaaagaccatgtttcttctcagcttgctcagtccagctgagccagctttccactggactcccgaatgtgagaaggacacaggctccccagaccatccagaagcatctctcatccacttaaaagctctgaaacactggctgggtgccagaggctcccacaagtaatcccaacacattaaaaaggctaagggtgggaaggattgcctggaggccaggaaatccagggacccgc

SEQ ID NO: 33195 - DNA, 453 bp, Homo Sapiens
gggcttgttcagagtctaccactttctctgcagtgtgcctgggccctcagctattggggatgagaagggatgcggagtgggaggcagtccacatgtctgttccaacaaagctcagaggcacagaataggaaatggatggcgcgtcgggaatggatgcaggtcagggacagaccatcactcatgccaccttgctgtgtttatgaaacagagtgctagaagttaaatttgggggatgcacaaagagatgcctaatcagatgaactcagagttggaattgctgtttgtgagacagttacatcaaaggaagaaaagaaggagagaagaaaggtgactatcaggagaattttccagccagaagaaagacacagaggcacaggcatttcatggcctgaaaaaggaagagcacagagacaagtgtggctccagttaaaggaccagcggagatgaaagatg

SEQ ID NO: 33196 - DNA, 506 bp, Homo Sapiens
gggctggctccaggcttcggccacagtcttccaccaggatgtgactgaaggcctggccgaggtctgcaggccacctggagggcacctggagagccaggagcgttgctgggccctgggcctaccccacgacccctctgcctctccccaggctgtgagctccccgaggacgacgccccctctgcttacaccacctgcaggcgctccagccccggcactggaaggccttggccaccgacacagcagcctcatcttctggctggataaactcacctcagagccaagcggccccggagaagctgcctctgtggcccggtctgcagggtggagttaccgtgggtccctcgcatcagacatctgcctgcggaccagacacctgctctcctccaaggagcctcaatgttcagagaagggatcctgcggtgaccgagggacaggcctgtcttctgggtcaccacatcttggcatttattatttgcccccaggaaggtctgaaggattttactttt

SEQ ID NO: 33197 - DNA, 670 bp, Homo Sapiens
ttcactaaatgggagcagattagtatgatgatgaaaaaagatcagtgcattacttatctattgccacaaaacaaattgccccaaaacatagtggcttaaaacagcagtaacatttactgtcttacagtttggtgggtcaggtatcccacagcttaactgagtcctctggcttggggtctctcaaaaggctgcaatcaagacatcagctgggactgcagtcatctcagggtttcattcagacaaggtcttccaagctcactgagtcgttgctggcagagtttacttccttgggaacaccctcagttctccaaagagaagcttacatgatggagctggcttcatcaaagtaagcaagagtgagagagtgctagcaaggaataagttacagtcttctataacttattcacagaagtgacatcccaacgcttctgctatattattcattagaagcaagtcgctaggtccaggccacaaacaagacaagggcattacacaagggcatgaaaagcagaaggtaggatcattgggagccatttcagaatctgccacaatcagtgaactctatgacaggaacacgaaactattcaaggcacagagaaaaaatggatgaagagattagagccctttggagtcatagccagtgttctaacatatatgtaatttgtagtca

SEQ ID NO: 33198 - DNA, 530 bp, Homo Sapiens
gggatcacgtgtgcctgggtctgggcggtgctgatgcccacaggccctgagtctgtgttgcgcacaggccttggaaagcagtgcacatcctgtctgcaccggtgtctatagtgaagccatctttgtccgtgtggccatgggagggtctgtctgtgctgtgtgtgtgtcctgcgcgcgtcgggagctgctgcgccacacacaggcacgcagggtgtgggcacacctgtgcttctgagcccacgtgcccttgccggtggccaggcacacacacagctgtgcatccttggcccaagatcagctgtgccacacctgcaggctgcaggatcttttctgtatatctccctccatcaccagaagtaagctcaggactgaggctgacaggctggtctgagcgctgctcacctgcacctcctggctgcacctgtggccccggactcagcttccccatctctctcctccccaccccacctctgggtcatctccggctggggctgtaccacatctgggctcaataaatggttgattgattg

SEQ ID NO: 33199 - DNA, 403 bp, Homo Sapiens
tcacgcccggctaatttttttggattttaatagagacagggtttcccccgtgttagccaggatggtccttgaatctcctgaccttgtggatccacccagcctcagccctcccaaagtggtggggattacagggcgtgagcccactggggccccggccaaggaattttttctatccgataaccattagggaggctcctctgccctctttcggaaacgatggtccacctttggcttatggatcaaccccaaggcacggactcctttcttctcccgttggaccgccctctcccccctgtggtcggggaattctttccacagttcttggccaaaaaaattggggcccttttccccagaaaggcttgcgaaaactttccagattgggaaccgccccttgttttctggt

SEQ ID NO: 33200 - DNA, 837 bp, Homo Sapiens
ggggccttttacagaatgtagtttgttttccttactaatgactttaaaccatagtgattttcttctataaatatacattattccatagtgcagggattcctgtcctttttgtcagatcccgggttctgggtccagcccatgctgaagtccgaggggcgtgggtggatgagcagaaagaacacctggggggctgtaggcaggtgaaagatagttttattcagcagcagctcaaattaacagctttcttacactagctctcttatgaacagcttttcttacactgtccacctttatctcggcggtttgctccggctgtgtggctcccgcgacccccatgcctgcggcttcccagaaggctctcccctgccttcagggtcagcagccttaaccctttatcctgggcatgtgcaagccgagctgtgtcctggctccctcctgtccagaacggaccagctttggctgtctctctttctctgggcacccagtggcctgcacaaagagccatgttgagccaggctgcgccccaagaagcgcctgtacaacgggagcagggcaaattataccttttacagacaacagtgggctccgaagccaaaggatgtactttacccaaacagggtatataacaaagtggggggggtggccccttgcacccctaacttcgcctgaaatcatgcagggccctggaatattccccccttgtgccctaccctccacggtaacctttttacagggcgattaccacccccttgaggaaaaatgttttttcctgggcccacggtggccgcgtgcgttttaaccacccctggttaatcccccccgcctccctttcggaag

SEQ ID NO: 33201 - DNA, 518 bp, Homo Sapiens
gtgtttggcattcattggctcttaaatggtacctatttaagaggctgtacatgttccagtgggatgggaagcagcagagaccaacagagtctgaagaagcaagcttctgagttatgaaagcctgggttcaggagactaacctatatgtaggttcctaggaaagtccagttaaagggcctactttgccactgctgcctccttcttaatgctgaacctcatctcccacaagggggcagtctcagcaggtgtcagctgagccatgtgtcatctgtccaggctaactgcccacacatccttctgcaaagggtacctcttggttatcagtgctcactgatccctatataatcagactctaatccctgtaaaaagattacttggtgctagccaagctagcacctttgggtcttcccaacatacaccactaatccagactctaataacttcatttcctttaaatcacaagatcagagctgaaataggccttagaaagctagtctgggctgggcgcaatggctcag

SEQ ID NO: 33202 - DNA, 627 bp, Homo Sapiens
ggtgggtcaggcctcttcacagggccaagaaactcatagcatctcccacattactctcatcacttctccaaggtgcttttgcaagactggaattccttggacaccattggagaagccccgctttttctggaacagcggcaaccaagaggccttgcagccctggaagtgggtcagggcccttggtggccacctttttctccccagcagctctgcagaggtggcctgcttggcagtgggacatcaggggaccggtcctgctttgagatggcagggtccctgttctgagagctctccagcctgagggcattgagctgaggctccaccctgagctctcctgcagggtggagggcattgtttcccagcacccaggcagtgtcttgctggtgtgtcgtgagtgctggatgtccaagtccctgctggccacgggaggctcctgcctctcttcttcagcgccccaaaattacctgggaggcccacctggggctttggtgagggagatttggttattttttttaaatttcttcttggtttaaccggaaacgttttaactggaaccaatcctaacccctggcggcccagcccccctaacttcggtaacggcctcctggtccttcctaaaaggaactg

SEQ ID NO: 33203 - DNA, 818 bp, Homo Sapiens
gggacacacgtagcggccaagatggcgctagcggttggagcaggggctctgctgcgacctttacggtagtgaggttagggacgatgggagagcagctttgttcctgaagtgccgtcgaggattaggatcgagtttcttcgatcgtgagggcaattattagtggcctctagccccccagatggcatcttgaggagagagaatccacgctacgagaactaacatagtggacatcgcagttgtccgtagccgatttgcgggttacggagttgttgcaagtaaagaaggggaaatccgagcgttctcgcgttggatttcctccacgtgtgaagtgggaatggtagtgatatctcgtgctatctctgtcaagggcaagaaggagaaggaatttatttgaggccctacgacgtggtaggttcaccctcagcctttgttcttatttcatcttatttgtggagaaggtcttttcgttcctattttacaggtgagaaaaggggcccaatatatagttatttgcggccataaaatagaagccagttgcctgatactgaagattcaatgaaatcttgtgattgacttcccctctttaattttgtactttgggtaacatcggatccggtagaaacgctcgtcagaaagagtttttaatgtgcattctacaatttccagacatagtttccttcttgaaaaatgggttaatactaccctatagggatcttgtgatgccccacgaaaacgttggtaggttgtggaccacttataacaaccgtatggagactcctccatggtcctttgagggggaacctggtagggtttaggaa

SEQ ID NO: 33204 - DNA, 398 bp, Homo Sapiens
ggggcagcgccgggggctgaggaaaggtgggtggcgaagcgccgccgggcgcttggtggccgctgccgccgccactgcagctgtgcacgcccgcctctcggaggaaacttgaagccagcagtacaggcagggctggagaccgagcggagccatccgaccttgggactagggaaacgtggacttggtgggctattctgcgctgaagaggcagcaacgagggctcggtggtattggtgttggtcctagtggaattgtcaagaggatgcttttgaagtggcccagcatcttggaagttcaccatgcttgctttgcaagagattcctgacgctgcagtgaaagaggtccagtcattccagagagaacttcagtttcagacaagtcatcaaatccaaaagagg

SEQ ID NO: 33205 - DNA, 398 bp, Homo Sapiens
gggacactaactttacagcctaaatgttcagttcctcttccttattaaaatgtctcctatcttactgcttttgtagcacctagctctttgttttaataattaattttaaggtcatcagtataagaacaaaaatggtgatgtaattatactaaaaggagagcagaggggaacttgggaaaggtgtggagaagcaaaccgtgttatcatccattgcagtaggaagtcaatataccatgtttcacattgataaatcataaatagttgaatatgcatattattttaaaggttcctttggactttggtggagtggagcaggaaaccattgcttctccatataaatcattttgtattattcaatttttttcaaaccttgtgattgaattatttcactgaaaatt

SEQ ID NO: 33206 - DNA, 393 bp, Homo Sapiens
gggcccagagcccgctcagtagccgtctacatttccgtctcctggaagggcccccgctgccgtctcccacccctaggccatcctacatccccccaccgcctccctgtgggtggggctcacaggaagcataaaagtcaccctggctccttctccttccaggttcaagtatgtcctggtcaatatgtccacgggcttggtagaggaccagaccctgtggtcggaccccatccgcaccaaccagcgtaagtggtgggcagtggtggtggtgatgctcaaggggacccgagaaggcggggccagccacggcggtgagaaccaaggctcctctgtccctgtgaaagcctcccaggccaggcagtgatgagtgaaatgctccttaaagctgttgagcca

SEQ ID NO: 33207 - DNA, 550 bp, Homo Sapiens
ggactcccatcctgccacgcaacagcacagggtctatttcgagacagccagtgaccagggctgagaacttgccccagaccaccagcctcctcactgagaaagcaagcagaatcacagttttttggaatctcagggagccttcagcggcaatccagttccttcaaagggtctgtggattctctcagttttcatgatttctaaactgctttgctgatttgatctggggccctggagtgccaacatcctgtgatagcggctgattgttgatgcctgggaggatacagcagtgacgatccaaatttacaagactcaacatggttttcaaaacctccttttaaaaaagatgttcctgagttctggaatctgaacaaaatatgtctggctattatataattctaactggtccttgtggatgctaccattagagttcagttagtgtctcatctatcactgtaatatttgtattgtaacactaatcccgggcaaagtatgatttgataaatgcttattctccaatctttagagaccacacaccgacccccccgaaaca

SEQ ID NO: 33208 - DNA, 665 bp, Homo Sapiens
gggtcagcatagactttaaagaacagggtcaagaaaagctgaaactcaagaactgagtcttgcaaaaaaagtgcaatgaccagcaaaaaggacattatttttgtacttctctttggagcaagaagaagaaaacctagacccaattgtttggacagagtaacatttatcagtggcagagagaaagcaaaatttgcttaagttctgttatggttccatattaaagcaaatggttatcagaccaggaagggtcccacaggcattgacaagagggttgaatctattatttcagctctcctggctcacatgtattgtgcctccagaacaccagaattggcaggcgagagtcatgaagctggtgtcagcaatctttgagggaatgggagagaggtgttggcagactggaagtactcggaagtttcaggatgcaaaaagcatcttgcactctctagactagtgagcttggtgtcactctcagtgaaaattctggactagattattcagcaagtaggctgtgaacactccaagggaaagagcgagtcctgagagtcagaaacagccaggcttgccagaccatcctcattgcctttttatttatttatttttaattctttccaaagaccgctaagtggactcaacatcgtcgttgcctttttagaatgcctacc

SEQ ID NO: 33209 - DNA, 440 bp, Homo Sapiens
ggtgtcactatttgaaaagaagttgttaatggaaatctctgcaagtatcgtactgtgtttagtctctcatggtagagatttcaaaagaagaaatgtatgtatcctaaatatgctgaaagcagtctgatgaaaggtttttaaatttcaggtgttaacttggtcaactctttgttaggaggttgtctgtactttaagtaaaattattctttggtttactggttattttggtttgctaaaattatgtcacttataattttgatttatatacaagagtgaagaattgaaggaaatactgaggagagacgtatgaactattttcttcatctcaattcctattttatcaaatgcaaaatgtaatcctaaccagttgattttctataattggtatcttagtactggggaggagtatcacatgaggaaagatttttcaaagcatgtca

SEQ ID NO: 33210 - DNA, 894 bp, Homo Sapiens
ggtatacaaccagttgtctaattgtgatttttttattgatgtttagaagaatgtaaccgtagagttctgtgttaagttgatttatgctcaggacataagatcacaggctaatgcaatgtgtatgtttcaggctttaatcttctcaatttccctttttaagccgttgatggtgtttaagattaacatgacagtcttgtatttttaccagatactgtattatttttcctattgctgctgtaacacattaccatgaaggtggtggcttaaaataacacaaatttttcttaagttctgcagatcagaagtctaacacaggtctccctgggacaaaatcaaggcgcttgcagggctgtttctttttgaggctttagggaaaaatctatttccttttctagttttttaaggctgggaacccctccttccatcttcaaagccagccatgtagcatctctctgaagctccttccgttatcatttctctttgtccaaccccagctgataccaggttatctaggtttaaaggattccagtgatcaccttgagccccaccctaataatccaggataatctccccaacctgaattcctcaacttaatcacatctacagagttcccttttgctatgttttggtaacatattccctggtttcaggggattttgggcatgggacttctgtaaggtgggccagatatttttgcccccaacaaggtacctttcttttctgtgggaattctggatcccctgtaaaaaggtccggtaaccctttaaagaagattggaaaatcttgagggccttgggccccccttgggggaatcttttaaaggatttaaaaggcttggaaaaccttttgaattttggtagccctaccccaaaattttataccccttataactta

SEQ ID NO: 33211 - DNA, 796 bp, Homo Sapiens
gggggacagacaggagcccaagactgaagccagcccttgcctcttgtgtcccttcccaactctggtgctggagtaatggggtgctctgcattttgatggggagcaaggggggaccccccctgtaggagtatcggcctctcccctgccccctaccctctctcgtggaccaaagtctccagcagaagggactcatcataagactgacgactcccccacctccacccacacaccgagtgtcatcagtcctaaaggcagggaaacgctcacagaattctgcccacgggttagatgtggggagaaggatattctcagctccagagtgattaggtgatcagccagaaactaaggcaaggtgacaagcagcagcctggagtcacagttggtcccaggcgtgtgggcactaagcagcctctggagacatgcgggcagttgaggatgcaaggacacagtgagtgagtggcgctcctttttggggtcctccagcctctagtcaagccccaggttcgtaaatatgtttgtattacattttaaaacctgtatccacagtcacatttaagctccctattgggttaaagaaaaatcatactccaggttactttttcccattcgacctcctatagagacaatatgcaaggtgtcatttcccagtctcagtccctgtgaacagtggctgacaccggtgcccaaggctgacctgctacactccaaattcctaaactgggctgccttctacctgcccccctgggaaaccacccaaaccactccggtctctttggggcctaaacaatgaaagggt

SEQ ID NO: 33212 - DNA, 834 bp, Homo Sapiens
ggatttgtatgatctttatatttaaaattctaattatgaaatagtcgaaaccctaatattctttagagaagttttttaagagttcatactcaagaataaaatttgaggttttactggtggttatgatgccagagatacagcaatgaacaacatacatattgtccctgccttcaagactattataattttggggaggtagaaaaggagggacaagctggtttttgttttgtttgagaaatgtttcataacgacaactttataaactttcagatttgacaagaataaacaattgctatttaccaatattcccagaactaaataacagtcctttttaacacagaaataactatattgtggcatatttaccattactaagttaataaaaactccaacattcaacatactacttataccttcagtagtaccctactccttgaattaagtgtaaattgacatatgtctgtatctttttatatggaagtggtagagatataattaaaggtcattttgctacttggttgatgctggcaaaagtttcccttaacatggttggaaataattaatatctagtaaaatttgaatgttcgctttttgttattttccaagataatttacattggcaatatttaatacgtactttgtcccatttttagttttctttgacatttattttttgggggggaatcccatttcttaatgattggaatttgaaatattttgggtatatcctcacttttctttgcattatatacatttttcctttaaaggatcttggtggcttaccaaacacaataaccctgcgtaaatgccttttttggaaggggggctggaaaa

SEQ ID NO: 33213 - DNA, 851 bp, Homo Sapiens
ggggtggttgtggaggagcgggcgatgggaaggaatgggggggtttagggggcgggtgcctgtctggtgggtggcagagttcagctccctggaggggaaggagggacgtcccaaggaagggtctttgagaaaggggtaggggacgacatcaggagaaggctcccaggaactgtctcaggggagcgaaggttttgaggggacagctggggtctccagtagatagaccacggtgcaggctgagggaggtacttcttggcacaaggcctcgggtaggcagggggcgaagtcctcgaagaagtggggggaaggctagaggaagtggctgggcctgaactggcactgtgcctgccacaaggtcttgtgcatcccccagccctcagctttgccttctgaagccactcctcaggggcacagaccctcctcctcctccatctctaatgttctctgacccctggttacctgtggcctgggaacgaacaaggaccagttctctgagcctaggagtgaaacccaaaccgctggtgatagaattcctccttaattttctggggaattgggattttatttcctcttgtatcccccgtagcaggggtaagcacttagacctgccttgttatttataatccccccccgtccttttggattgcctgggctgggggagctcctgcccttgcctttccagactgaattggctgaaaaaataatttccctgaaggtttccccccagtttctcttggggggcttgcaacccctgcccttgaccccctggaaaccctaaaacaaattttggtttaacagcaaaaattccagggaaccccctgggaaaagggagaaaggagatcaataaccgc

SEQ ID NO: 33214 - DNA, 615 bp, Homo Sapiens
agttgttgcagataatgtgcctgacgtggcagtggcccagtcagctgcattcccgacaggcccacggctggcgcagggggactcatctggctgatgggctgctctgggaccggtctccccctctctgctgcacctgggcatgggcacctgtgaccccctccattccctactcaacacgacaatctgagacaccttgcgggagctaaagcaggtcgtctgggccagggcttccaggagtgtgggactctgctgacaaataagtggatttgagtcacatcccaaacacagcactgagcaccatcaagtcatcaagtcaccccggaagaggactggtttgcagtggcctttcaattctatgaactgcacccaggagcaagtcttggtttggtactactgtgtcttttccgtctctctaacatttgctaagcttctttatccacggaaaggaaggcaggaagcccagagctgaagagacaatagtctccagctaggctttaaaaccattggacaggctggtgggtttatttttgttactctccatttatggcaagtgatactgccttttttcatttacaatgggatatagagtttctttataaattaattttcaaacac

SEQ ID NO: 33215 - DNA, 423 bp, Homo Sapiens
ggagcagtcgtaatcaacgagagtggccattacggcgggaccctcaataaatgttgcttggagtggaccgaggctctgcaggaatgcagggagggccgggctccgccccagggttatttctaagttgaggacaggaggttgtgagttctgctggggggaagttgcaagagccgaggtctggttgcatgttgccctggtcttggccaagaacaggtttgcacaaggccaagttcaagaggaacttccggattcctgctgaccgtttggtcagaaaccacctgcttggactctggcggaagagtgctgaagatgggtgcacacagtgcagcagggcagccctgtctcatgacaggagacaggctgccgtccagggtgtaggagtgacctcatagctgggataaaaaatatattataacttaggtt

SEQ ID NO: 33216 - DNA, 799 bp, Homo Sapiens
aaagtggctctcagcggccggtcggattaaaagtaaccagactcgtccagaaaactgcgtccaggaaggaagtgacagaagacgaatgggaaaaggagaacagctcacagcgtttgaaacatcgcggcaccactttcagataaaaacatagacctgaatggcatcatccagtatccaaggaaaccatgcttgcttgaagagtgagcaggtgagcaaagagacaagattacatgtttaaaccaagaaaagaatcttgaaaaagcattgaaaagaacaactttcaagtcaaaagaatcaaggtgaagagaatggatactcatgcccatgtgaatttgctgccccaagtctactggaggatcaagctgcaggtttcaatagctatagcctgaagaatctctgtaatgaactaaaacaatcagtaaaagatcagttgcagtggaagacattatactctagatttttctagtattattaaatttgagaatgatttattccaaattttaacttagcttttaattttactagcggcaaaatggtggactactttggaccactgatttttccaatagaaaggccatagcatctttgcagggtgggtttaaagccagtaatttaacccatgatctactaaaactttaactataagcattttacccagaagggttttttccctgggtttacaaaatccggttttaattgcaaaagctcgcttttaaagattaattcgatggaaggaatgggtaggggtttcccgctttttcctttcctagaactagggggaaaacctgggggtaaaaaa

SEQ ID NO: 33217 - DNA, 838 bp, Homo Sapiens
gggaaatgaagcagttggaagcaaagaagctgctgctttgggatccgcaaatcagaggatcaggaaatgtgaaacaactttcctgacagcttcagggagtgacatccaggcaggaactcggcggcttggcagagctggaggaggatagcagcctgcattcactggatgcctggtgtgaggaaagaactggcacatgtcctgattcagccatctgtgcttcctctccccaccaaagtgaaaatgcattcaaactaaattattttgaaaacacattctctccattcaagttctacttcaagacctcacaatagagggcacctccacgatctcattcctggcagcacttgaatgggggctgctgaacaatacactctcagtacttgctcagaaagaaagacaagacttgggacgaaaacaggtgaaagctcttccgagatttagagagacaggacccggtgccgaattgctttccaggcggtcaagccgcattgctcattacgtggagtgaatgggatgattccaaaccagccctggacgaggtggcaagtgaacatgggctttaattgctgcttattcaatgtttaaattatacgtttttatatttaagccagcggtaatttattttcgccctttatacctttaccataaataagcttttccaaaaggcttttagggggaatccacaatatcggtgccctcgcgccctacgttttagtcgcccgacgcccgggctgaacgccgcgttcggggaagcgagggcacgggtgctgcggcgaaggacggaaatgtgtggggcgcctctcgggcctaaagagaaagtttctaaacccattatgtg

SEQ ID NO: 33218 - DNA, 806 bp, Homo Sapiens
ggggccatttccaggagcagggccctctcttgtctctgggcacctccttggtggccctttcctcagtcagagctccttctctacagaatctaactcgtgtgcaacattttgcctgacttgttgaaaaacatctcttcctgtctgtacctcctacagagagaatgctgggaaaactgttctgcacactcttagagctggagggcctgaatggtgacctcacctgacagaggggagactgaggtgcacagaggcaggggccaaggccgcatagctagttagtgacagagccaggacagcagggtctctgccctttccagcgcagctttttccaggccccatatttttcttgcctgcttgctctctgaaggtctggagttgaagattcaagttcatttggcacctcccagagaatcctggctgggaacgcctgcagccctctcctggccttggttcaagacgcctcttctccttgggatttaagctgtcatgggggaggatcagtggaattggttctcttgctgcttcccagcctgccctgaagcaacctaagaaataagtggaagggacagcttggaggtgccaggcccaatgtcctcacccattttacagatgaggaaactgaggctcagaggaggagaatggcctgcagtggggaatgcctcctgaggcccggggatgctgaagttcctcctctggaattggggtcacccctccttcagtttccctccggagcatcagggaactgggattctcatttcagctcagccactccttctttggagtgacctcagtccaagttgctggga

SEQ ID NO: 33219 - DNA, 802 bp, Homo Sapiens
ggggacatactctgtcctgggtcaaaccccactggcagcaggaattctgaatgtattggggacccctccttaggcctcgttaagtctcaaacacagtacagctcacccagcattgctgacgactgaagattcagaaacaaaacctacacacagcactgaggtcttaatcatagcaaaatgtgataaaccatgttgtgaaaaacttttatacattgaagccatgaccattttgtgtctatcttactctagcacaaaaattgggggatgttaaaagatagttgtgtggaagctataaggttctgtctgtcgtgttactctctgtggaaatgagaggggtctcccatttacactaagcaaatttccattggtcaattttaatgatgtcttgaagcacaatttagctgagcactgagtagccatatgctttctgagtacaagtgtgtctgccttcttcaacatgtagggttgatcaagctaatacttaattgcaaatatcccttgtatgaggttaactaaaaaaattttgctatgtctgatctacatgtttgcattttgttcaactaaattaatatttgtagattgcaagttttgtttaaaataactttattgagtttttaagtcctgatctgttctaaggtgccctttctcacctcccattgattcagtgattctgaagttctttaatttgcaaggtaaaataagtctactagagaggaggaaatcaggcacaaatttgaccaatttctcatgccattttgcaaagcaaactgtaaaggatgatgaaaacctggcctaactaaat

SEQ ID NO: 33220 - DNA, 727 bp, Homo Sapiens
gggaagaggttagaaaagttcttggaacatagagattaaaatgttagcaattgttatttaagtattagtcacttttctctccttactttccaatactctattacaaccttacatcatcttcaccatcacagttaatagtcagagtccagacaggaacagatggcacacttgacaggataatctgagtttattttataaagatactattataaagatttaggtatagtggtgtgacaagaaatagtttggtaacctatagctgaacggttaacatcccataaaagagggaatagttacttgaaaagtatggagttggctgccttgagaggaatggtgactttcagccgaagggacatagctagtttcaggtgaccttgagagaatgaagctggaggaatgaatatcctgaccctgttctcttaatttcttgctgggattccccattggccaaacccaaccggaagccaggggcacagtgacctgttggtaaagtctatacaggtcagcctattggagcagaaaacatgatagaggagggtggaaaagtggatctggaaaatatccagcagtaacacatcacgtttaggcaacttcagcatctggattgacagttcagctaacactttggcccttctgattcctttacctcttcattctctttagccacctggtcacacaatcacaccctgggatcttgtctttactaaaaagccaccacccaggctgg

SEQ ID NO: 33221 - DNA, 396 bp, Homo Sapiens
ggacctgacatgagcctgttcagaatagagtatcctctactcatttcaagcctcttaaatcaaattgaagtcctggcacaaaagctagtaagtaaactaagttctcattctgcagtttaggaattgttaaaattctaaacaagtagttaaattttaatttaaatttgaagtaaagggatatctagaacaaagtaatgttcaatgttacacttgccaatatggaatttccttgagcaagagtagcttctaagtgttcttcaaagcttgaactttttctaaattacaagtatgtcagtttatgtaattgaaagacagcagatcttaaaggcaatgttgcatgttaaaacagtattatagaggagattctagagatcgtttggcctaactcattgtctc

SEQ ID NO: 33222 - DNA, 755 bp, Homo Sapiens
ggtcttcttaatttttttaaagattaaaaacaaagaaatcttgttccgggaccctaatgaaaaaaaatttcaaatcttttcagtttgtccatgaccaaagagttgctttaataggaaaaaatctgttcttatccctgtcagatttatggttaatgggtttgcaacggcaaggaggcaaggaatggttctatttctgacagagcagcctgcatctgctttatgctgtctggagggaagtggtctgaggcaggctcacccgtggaagtgctcacgtattctgtattatttttctacactggagctgagattcttctcttcacagccttgcagagtaagtcagtgcctacaagtgtaagaaggagctgtaatcttcatgaggatggttatacttcagtattcttaaagagaacatgaacatttttgagctgtatgttcttagggacaactgtgcttcgatgtggtcagtctcgtcacttgtgagtagctgtgaaatctttagtgtgcatgtgtttgcacctctgtggtctgtcaacgtggctgtcactgaaggagcaagagaccatcttttaggaaccctgccaccaaataataatatatccagggcttagactttggattaatgttaaatgtacatttttttggttcagtacctgaagaagatacttgaaacttgaatctataaattcctatggaccctttttatattaaacacaccaaattaaaggtgttataggtaaaataagttcagataaaaa

SEQ ID NO: 33223 - DNA, 778 bp, Homo Sapiens
ggattgaatattaagatctgctggtttcaggagtcaaaatgtagaaaaagaggagaattgtaatatggtcagaaacagagaagccttttctatgtaaattcagacttatctgaggctaacagttttccgaagtggtggtgggtagcagcatgacagctgcttgccatgactgatgcagactactaggtttccattttagctctctgtaggtactgttttcttccccactgtgtcgaaagtgatttgttttgaagcaagagtagaatataacatctatcaaatatagcttttaaaataagaatacctggtctggatccagttgagcagcacagcagataaaccttagagtttttctgttcttacatgacggtttccatgtggaaagatctaaactttcttggaatcactattagtgaagaaaaatgtagaatctgtataaccagtaattccccaattcttactttcaaagtcatatccaagaaagacaatatgtcagaatagaatgactttggtctaggtgttttcacgttggcaaaaataaggaggaaattatattattttaatatccaaatttaaaggtttggaaaattttgaatagttaatattagaacttatgttggctgttttttatatttccaagcattgagtattctgcattaatccaatactattcccaccaaagagatttctggaagatttttaaaaaaatgatacccctgttttatatttttgaatgtagaagagactcctgaaagagaggaaaggtcctgagttatac

SEQ ID NO: 33224 - DNA, 488 bp, Homo Sapiens
gtgcgagccaccatgctcagccctgaatccctgactttgttaatgacctgtccttaccaaccatgacctagagaagatttggctttttaagagttttggagaaagatggcataaaaatagattatttccttaaatcaattttttagcattacgctacctaagctcgtttggtctctcatagacaagaaaatacattatattgtaggttacattcttttaattttgaagagtcacaaaactcacattatttagagcaacaatatttgtatttggaaattaaaaattcatgatttcaagaaaatacataaaatttacatttttgagtagtttgaataagtttctatcttaattataatatttgtaggaaataacaaaacaaactcaaagcctttattatttccagtctctttgtaactgatgtggtatggtatcatcatgaaatctaaacagtggtactcacctgtcccagctatctggaaggccaaggt

SEQ ID NO: 33225 - DNA, 530 bp, Homo Sapiens
ggggtggccgctgggggagctgctcagcgccgcccggcactgggctccctttccctttactttctgcagtttcttgcctccgtgggtggttggcgcgtctgcggagccagggtcgttgtgtggatcgtgggactgcagccccagccaaagggctatcacgtctggtcggttctgtagatctgggccccaggggctggactctgggcagtcacgttgcagtcgctgcctgctgggcccaaggccactgtaggtcccctcgcgtccgtgtcagcccaggagagcagcttggatgttcctgtctttataacttggcactcagcacgtcggcgaagcgtggaaaacgcttagtctgtgattcagtcccactcacccacggttccggttcccagtccttaagagtacagcagtccgttgagtagctctctgtcctttctgaagggttggctagggacggtcattccacttttgagcaccaggtaggtagggcccaggtttagacattatgttccaccctgttgaacaacaaaaca

SEQ ID NO: 33226 - DNA, 512 bp, Homo Sapiens
gaatattctctagttttcatccttattcagattagacctgtttatgccatataaatgtaaaggctttatatactcaaagagcatataacttcctctttcaaaaactccaaggctctctgatatgacacagacagttttattataatagagttgtattataatatttgaagttttattataatagagttctataataataaacttttccttttaactacatatgcctattccataatgccttgagaaaaaattccagtcaatggcattgaacacatctattgatagaaattatatttttttaagcatgggtggcaaaagttatttaatgaatcatcttccaatgtgcagaaatagttgacaaataatgtacccttgttttccccatatttttcgtatttttttaatttgcctatatcatacatcactttttccaatatatgattttatctttgcttctcctaaaatgccatttctctatttttctcaaatttaactctgtattttttcttggg

SEQ ID NO: 33227 - DNA, 598 bp, Homo Sapiens
ggaggccaaaggcaagatggggtttggctagatcagatctctcccactgccatcattttctcagtgtgtaatttttggaaaggtggtttcaacaccagtagcctgcccaggggcttctgtcttgagggtccttccttctttgtgtttaagtgggaaagctttatggctactggccagcctttctcccagtgttctctatcaggtggactatagatggtgggtttttgtcatttgctttatagacccatccatctgggactgatctggaggagaaaggggcatttcctgggatcaggacctcacctctgtgtagaaaggaggaagcgtccatattcccggaggcagttacatctgtactgtgcgaccccactgccatgggaagaggcatggactccaggctcaggcagggttagtggattttgttttcctgagagctttaaactgaatctaagagagggctaatgggtttctctgtgtggcccaactacaacgaacactagcaccaccaaaaagcactggcatccttcatggctgtgaggcagccacatgcatgagcagcacagaaggtggtctgcaaagatgaatgacgcagctttgc

SEQ ID NO: 33228 - DNA, 573 bp, Homo Sapiens
ggggagacggggtggaagggaagggatcggaacccagcgagcaggagtggaaggatcgctgcaggggccgagtatggatgctggggctcaacctttggattgtaaaagtttcctccttgcgctccccggactttcttttcaaaacgtggatggtgcaatcgtcgcttgcctaagctgctcccctaacacgccctcccgcggtcggggaggggacctggggatagattcccaggggctgggagggccaccgcagcctctgcagcggggcctggctgcgggtggatggttcggacaagtctcgaactcgccagctctgaccgcacacactgcatccgtgccagggaaagaaaagcctgggaaaggccagggtatggctgtaacactccaaggccttcaaaagggcagaccagcagaccaggagccggaaagacttccctgactttggtgccatccacgctacatctcctcttggtacacagtatgaacatgtttaattagacctagacaatttgtcaatgacccagcaattccactaacaaaaatgtattccaaataaataaacgttgttatgtt

SEQ ID NO: 33229 - DNA, 622 bp, Homo Sapiens
tttcttggttccctgaccaggaaacgaggtaactgatggacagccgaggcagccccttaggcggcttaggcctcccctgtggagcatccctgaggcggactccggccagcccgagtgacgcgatccaaagagcactcccgggtaggaaattgccccggtggaatgcctcaccagagcagcgtgtagcagttccctgtggaggattaacacagtggctgaacaccgggaaggaactggcacttggagtccggacatctgaaacttgagaacatcaccaccctgaagccagagactaacactgcaggactcagcaggactatttaagaaacaactgaggcatcagaccaactttccccacaagtcctcggatctttcctgccatgctgatgccatatattccaacgtgatcaacctggctccccagaaggaggacgactttgctgtctacaccaacatgccccccttttcatcaccccaggaggacattgccagaccaagtggaatatgtctccattgtattccactgatgggaagctaatgagatgctcagaagtgggggtccagaccctggccccagcctgaatcttgggcataccccttttgcttttgaattttaatgtgg

SEQ ID NO: 33230 - DNA, 414 bp, Homo Sapiens
ggaggtacacagatatcaaagcccttgttcagtgttttgaactaaatgtcataagagctgtaaatagtgtattggcacattggaggagggacagataacattgttttatggggactcagaaagattcattattttatatgtcatatgtccctttggggactttgggaaaccctagggaaccagcggctagagcatctcaagggggccttattcaattctaggtaactagccaggtgtgaaagaaagggcccagggtgtctcactttgcagaggaagattggagaccaggaacatgattttaaattatgtgcctttactgcagctttcttgctctctttgtgtgtgtgcattctttccatttttttcttctttctggatgttaaatctgagtaatatatatcatttttaaagtgg

SEQ ID NO: 33231 - DNA, 420 bp, Homo Sapiens
gggaaaccagggtggagatttggaaacaggagcttccttggggaaatgtactttcattcccagatgtggagtagttacttcagtagcaatacggatgacttaaagagggcccaatctctgatatgactcaaggctcaggtgtgtggagctttatactgcaagatttattttcacagtgctggctgagtttttgccccaagcccagtggctttgcctgggtatgtcttgaggagcccattaagatggagcaaggactttgtcttcattaaagagaacgcaggatccctctttctctctctctgcaaggtcctgtaagcagatgagcagatgaacagaagagcagaagagcagcacagccgagaaggaatgaatggcacagcagagaaggagagaagagaaggagcatctgaacgttgagag

SEQ ID NO: 33232 - DNA, 540 bp, Homo Sapiens
gaaaaaaaatttttatagtctacttcctttaggggcatataccttaaaccaaatttaagttcaaagtgaaattcataatgcatattgaaaatttcccttatcacaaatttagttattgtgctgtaactaaatggcaagcaattcatttgaaatatataaaagagttaggaaataatataactaaaaatgtctaacaagatacttaattcttatctatctcagaattaaatttgagctttttcggccaaaatttattacattaagttttcccccaactaggagctatgcttttaactgataggtggtttaaaaaacaatcgtttttattgccatagagtgtcaaataattcaacgttttatatttctactccacttaagcacgtatcattttactgacttctattaaatatttttaacaaaggccacgcctcatgggatcccacctgtaatccctagttttttcgcaagttgaatgcggtataattcccttgatccccaagtaattttaaaattattcccgggctcattttaccgccgacc

SEQ ID NO: 33233 - DNA, 650 bp, Homo Sapiens
gggagcgcggcggggcgatgtgtgattaccatggcgaggagtctctgtccgggggcctggctaaggaaaccctattacctccaggctcgcttctcatatgtgcggatgaaatatcttttcttttcctggttagtggtttttgttggaagctggattatatatgtgcagtattctacctatacagaattatgcagaggaaaggactgtaagaaaataatatgtgacaagtacaagactggagttattgatgggcctgcatgtaacagcctttgtgttacagaaactctttactttggaaaatgtttatccaccaagcccaacaatcagatgtatttagggatttgggataatctaccaggtgttgtgaaatgtcaaatggaacaagcgcttcatcttgattttggaactgaattggaaccaagaaaagaaatagtgctatttgataagccaactagaggaactactgtacaaaaatttaaagaaatggtctatagtctctttaaggaccagcaccggtaattgtgccaaacttttgcgaagcactgctccagacagcaatcagtgatgccaaacgtcggtttgttcggaacacgctatgtcccacttcgaaaacctagctccaataacaactacgtacctctcgaaaaaaa

SEQ ID NO: 33234 - DNA, 842 bp, Homo Sapiens
gggtggggggatttaacttctgtcctagggaaaacagtgtctgatgaggagtgtttccaacacaggctacatgaattcccctataccagtgcgaaagcagccaggagtccccgttggaaaagaacaatgccactctcttttatgtatcttggttctgcaactcatttgttgtaagtagggttaatcgagtatcaggttcacagtatcctgcccttattattttatgattcactgactcaagttccacgaagtccttagaaatggacctcttcatgtaaaatatcttgagaataataaatgtgagggaataagaaaggcaagctttggacacagatatgataggtgcatcagcttcggaagagaagaatgatgtgcagagtgttaggaagacatccgggctgctgagactcgggattacaagaaagagaggcaaataaagtgggtcctggaatcttttaggacttctgctgtaggaccaacagctgcctttggcgctttaatgtctcccaaagtacgcttcagccaataaataccatctgttggtgccccccaaaccgatcctcccaaaacaataacttgtccgggccgccttcggtccctcgacaagcttttcctaaacccctcccccttggcgccgccggtccccaccccggcgcaaatggaaccattgccccctctaccgctgttctcccccaagggccacccccgggtccctgcacattagggcgcatccgtccctcgccccataccaccccgccaccaccgccgccgcatttcacgcacattacgtcgccgctcgtgtctctcgccccgccaacacctatttttgttttggcgctaac

SEQ ID NO: 33235 - DNA, 710 bp, Homo Sapiens
aaaataataatggtcaatatttttacattttaattttgataatagataatacattcatatggttcagaaatctaaacttatataaaaagtaatatattaaaaagccttattcccatctccctgccccagcctactctcttggctgaagagccaggttcccctgcctcaatagttgctgactggcttgggtcatgagctctacgccccacctccctgctcagggtgacactgtggtcagatgagaggacacacagagcctaccctgacttggcatttggccctgagacactagtctcagcctctatctagttcttcccatgtggccctgggcccgggacctccctcccagctcctctccctaagtcatggggaaaccgaagcctccctcagctagcctgactgaaagcttcccgggatgtgccacagacagagcagctcccagtgcctcagactgtgtgccctgttcctggtctcaccccatttcctaacaggtgaccatttttggttagtttataaaatggaaccccccccggcactggtggggaaaaaatggtcggccggcctccggccctccgaaagactttccaaaaccatttcgtttgggggcggggggccccgcaaggtaaacgggaacatggttcttaccccgggttccctcaaggagaaaccggggccatggccctacagggctttgggaatctctcacccac

SEQ ID NO: 33236 - DNA, 712 bp, Homo Sapiens
gggggttgggtacgcggaccgtcgaggcgcgcgtcctggaggaggcggcttgtctgctagacgaatttcaagccaccattgcttcggcctggccgggagagcggaagggcctggtgtgggagagtcccttgcactgccaagacggggccactggaaggagccccgtttgaccccgtgcggctactggataatgctgtatccaatgttatctgttcttgtcttcgggaaccgctatcgctatggggacccggagttcctgaggctcctgaacctcttcagtgacaacttctgcatcattagttccagatggggcgaggtgcctggcacgcggcagcacatctcctctgcccaccgtaacagcaggacccggagagccatttccaggagtagacggcacttttgtgattcccctgcttgtgactgcacaccgggaccccactcaattcaaagacccagactgcttcacccctaccaacttcctggacaagggcaagttccagggcaatgatgctttcatgccctttgcctcaggtgcacgcagaggaggaaggggactagccctggactggctcctggcgtacctggtgctcactgtgcacctgtggacccggcaaagcaaatgtgcccgggcaccggcccggcccactccggcatccttctattccttacggccccctttccagaggttcttgcctctccccttgcggtaccg

SEQ ID NO: 33237 - DNA, 375 bp, Homo Sapiens
tactgagtaacatgattaaattcttaaatcaatgaaaataatccatgtgctttcctgaaatctgagttcctataatgactgcatatttatttgcttctttatagataagtactccttgttttaaaattttgaattatgacttcgaatataaatatatgctgcaggaaataatttaactttctatattaaaaggtagtattcctctttggggaatttaccaaattaaagaaatgctggtttagcaactatgagcaaggttctgtgctatggtacaattaagaagacattcatgtaatatggttcattttaatgacatttaaaatgaagttgataagggaggatgataattcctacaaagatttaaaaaaataataa

SEQ ID NO: 33238 - DNA, 401 bp, Homo Sapiens
caggccgtgccgggtgagtggggcgctctcgtgggcatcccagcgccggggcaggccgggtagtgcccgatcccgcggggcgcgcgctgctgctttaggcacccgggctcgggtgcgggtctgggagacctgtcggtcggcgagaagcctcggtggccggcgctgtggttgcgggacctgggacgcgctcccaggcgtcccacctccccggagactggggcagggtgggtggggcccggatctaggggtagggtcgcggaagccttggttacagagagtcgcacacgtggcctgctaatggtcgcgacaccggtgacgagcgcacggaaagtttggaggcttagcaaggagggtggtgccggcctccgccctgtggtggcagaactgcctgtgcgagcacg

SEQ ID NO: 33239 - DNA, 444 bp, Homo Sapiens
caaatttatggaaaataatccagcactccaaaaaaaattcaaccaggtccccggggcgtttggaaattcatcccacctgaaggttgatgaacctgaaggtggaccaaattgccaaattccaaagcttcaagattttcctaatggtaaggacctactcaattattttctggtcccagggttgaaacttaagaacacttaatggtcttctttctttctccttctcctggagcttgatggaaatacctcttaacgtggctctcttaattctctttattagatacgtgacacaacctgctatattgttggggagctctttgctgtggataatagggagctcctctcacacaccgctcgttcgcgttggagacgctgcccaggcgcgtgtagtactcttttatgatgacaccgcgccgcctctttacagggtttgggcgacagcggccc

SEQ ID NO: 33240 - DNA, 433 bp, Homo Sapiens
gtctggactaaggctgccccttactggaccaatgcaatctagagactggggactggaatctaactgcgcagagaaatcaaagaccgatggtgtgaaatctggggcagcttcaaaatttctgcctcctaaaaacatttcacccaatttttcattattgcccatgtcacatttaactgaaacaggttcaccaaaaaatctctctctcagccagtctggaaggatttccatttagagactgctccgtagggaggaataagtgtgtgctgacgtgtcatgtccatttgtcttcacagtgaaatgagtcttctggctccatccaccataactgacccatgactcagccttatcattaggtgtctttcctgaagcagggcccccagtgaaaacaaatcataggctgcgagaacactgctgaggtgggtgggcaaggaga

SEQ ID NO: 33241 - DNA, 454 bp, Homo Sapiens
tttttttccatttttattacataatattttattaagtagttacatgtttcaccaaccagactgtgagttattcacaagtgaagacttctgtcttcatatttgtgtccctaggacttgactatgtggcatacaataaataattatgcaatcaatgctttgcaaatgaatgaccagaaatacaggcaagtatattaaaatgaaaattcacaaacacatgaacacacacatgtaactatgtgtgtaactgtgtagtacttgattaggtaaacaaagtattatctaaaatgggattagccccaaatcacaatgcttatacaccaatttgatgtgttttatggggcagcttaaaatacattcacctacattatgactttcctaattaggatacgttctcataaatgaaaatatcatagttatcctatacaatatgtaagaatctttacgttcaacatgt

SEQ ID NO: 33242 - DNA, 359 bp, Homo Sapiens
cttgtaaaatttttattgagaataggagtgttttatttcataactgaaaacattatttttaaagtaacacttctattaaaaatgcttctaaaaatgactacaatgaaacaataacagttgcacttaaccatgtgctagatactgttctaaatttatatagttagtcctcaatccccccaaaaaactaaagaagtaagtattattatttgagacagggtcttgctctgtcacccaggatggagtacagtggtgtgatcacggctcactgcagccttgacctcctgggcttaagcgatcctcccacctcagccttctgagtagctagaattacaggtgcacaccaccattccactaatttt

SEQ ID NO: 33243 - DNA, 372 bp, Homo Sapiens
atagcataaatgggtttattttaaaaatgacaaaatcaaaatcgggttcattaaagagacaaatagacaacctaaggcaatatgaaatagcaaaactgaaatggaggccttaatacagatactgacaagatttttcaaattataaaaaaatactatgaatatatcagggtaaaagtttgagaaatatgtattttccattataaggttagtatagctctgataccaaaaattcaaaacaaattgcaaaagaaaacaaatctcattgttggacacagattaaaagaatctgaaataagatgttggcaaatgaaaaattcagcagggtttatagaatgatgcataatgaccaaatagagtttatccaaaaaaatc

SEQ ID NO: 33244 - DNA, 411 bp, Homo Sapiens
agcggccgctcgcgttttaaatgaatattctgaatctagttctttagaatcctctttgaattgtgaaatgcaaaataattgttagcagtttaacctgaaagatctttttacatgataaatgggggaggagaaagactgaaatgaaaatgttgaagaccctgatttgaaattgagtgtaaaggtctagatactgtaagttttagagtagctttagagacaaagctagtatcccacttggtgagatcaagtaacttgtggtttaaaatttaaagtaaccagtggccattttaacttcactaatttctcttggaggagctaatttttaattgctcatgattgtaaaacatacttccggatggtaagggagatgttaagatgatttgtcttgaagaatggtaaactttttctttg

SEQ ID NO: 33245 - DNA, 368 bp, Homo Sapiens
aagagtattaccatatttaaaacattttattaatgtgtaaaagggggaaaaaagcactaaggccaaagatttactgacatactgttttcaattagtaaaacaaatcttaaaatattgagagataattattgtccatctttaatttcctttcatgtgaaattcagaagtaacatgtgtccactttaggtaacatttatatataaaaagtttattagaaatataaaaaattttaaattttacactatttccaccttaagattcttttagataaagcagatgtgccttacggttcaaacacaatctgatgtacaaaatcttatttagttcttagcaaaataaatacagaaacacaaatgatgaaatgatgg

SEQ ID NO: 33246 - DNA, 495 bp, Homo Sapiens
gattctaagtcattactgtttattaagaaggagtggcgaaactctgcacatcatggtgagagtttgaatgactaataagaagcacctttttcatgaaacgctcgcacgcgaacgagatctcagccgtgtgacacccgaccatcccattaacttcggagggtctctcgatgcatagaaaacattaggcgagggtgaacaactggacgaacatgctcaattccttctgacagtcctgcaaccgtgctgacagcacagccgaatcgccagctgcactttttctatgatacaacttcctacatctcactcaggattctgggccttcttgctgacacagcctgccacgccctacagcccgtgagaagagccctggactcccaccggacagaggaggagaagacctgcaggatgcgctcgccacttacgagagaactgacagaccgtgctcccacaagtgtgaaccgacagactaatgtgaacagaagctgcactgacagg

SEQ ID NO: 33247 - DNA, 462 bp, Homo Sapiens
gcctattgagctagccggacacacttgtgaccttgcctgctacagtaggcttcttgaccactgatgtgatgagacccaccggacctgtccagcatatatcacgagcagtaaagcagaccccaggtgagtagcttgagatgctgtagcacacatggtctagccaggaaccatatcaacagcggcagcagtaccagactatgagaattacagccatgttccagctctctaccatagcggcgatcagatctttccgtcagcctcagcacacttgcattgcaatgtgagcacgtgtggcagtccaatgacaggggcataagccggggcttatttgtccctgatggctcaagatattccacctgaacagtgaacccagctgctcccattgggtggtaattttttggctgcaccagcaccgttgcccgacgaacatctcttgacagaccaatctttacattgaaaccc

SEQ ID NO: 33248 - DNA, 369 bp, Homo Sapiens
ttgtaagagataaggtttatatgaacaagaagagtttatttttaaatgtaaagctgaacaagatagaatggagatgctttgtgaagttataaatcccttcaaaatatgaaaatcatcctttcaagtttaaatttgttttcaaaaacatattttctcttcttaaatatgtactactcttaacaatatatcataccttaaaatctcctgttgtcattttctctttatacgcaacttggcctactcaagaagacatcaaacatggtgattttttttcctcaaactttatctccttgctcttttcccaatcccatgttacttcctttcgccttcttttgtgccaagatgagcaaggtataatcctccaaagaa

SEQ ID NO: 33249 - DNA, 408 bp, Homo Sapiens
aattcataatgatttcagtgtggaaaaagatcctcaatgggcactcttaaccccggaatattttaaaccgttcaatagcactagctcattcctgtaggctggttattgaatacacaggaggatcaaattagccgtccataccaccacctttcactttgattgtgatttacatgaacagatgtcagaatgactattaggccctgagcactgatgataatgggctgcatgaggctccactggtcgcttggactacaggttgttcatctcttggacggcccctttctcatactactcatgctattcacggatctatccttactgtacaccaggtaaatacgtgcaaagcataactatatcacttttaagcggaggcagaggatctttgatctgaccctttcctactggaga

SEQ ID NO: 33250 - DNA, 360 bp, Homo Sapiens
tttaacatgtgggtaaatatataaagcacatgacaagtagtccttatccccaagctactgccgggaaaaccatcgatgagctcattccatttccctcttgccatctgactcttacaggtgcattatttctgctttgtcacaacatattacggtggtactggtcttccacccttgctgccgggtatggggtgttgtctggggagaaggcacggggcggagccggggctagtgctgccaaggtcttcacctgcctgcagtttccgctgttcttctgggagctactgctgattcccttcacagtgtcgcggcccccgtggagatgttttctgccctgctgcgtgaacagagggagtcaaggag

SEQ ID NO: 33251 - DNA, 392 bp, Homo Sapiens
caacttctcaatatttatttattcattcagtttgatgtgcatatctttgaaaagggttgacttataaagaaatacatgaagtttacaatctgtagctcaatctatcaaagaaaatggtggcttttagtaattaaataagacaagcattagttcctaccattttaatgtgttcagggtaggaaacagaatagacaattgtgactgtaatgaggcccatgaacgtttagaatatgattaatgcattttccacactgacccatggaaacaataacagctaatgtggccccactctcacctgtgaatcgtcttattcccacaggaaacatcaaacctccccaaatatcatcctctaggcagaggtcacttaactattaaatttacaaggcaggtgc

SEQ ID NO: 33252 - DNA, 609 bp, Homo Sapiens
atatctccatacaatgagaaacagcaaaacaaagttggagagcacataaaaacatcttctagctaaaaatataaagccctggcttgaaaaacgcagcccttgaaataatatgataagaatctatatgtgcagaataaacaagttgcaaccaccgagaaagtactaatatcgactggggagccacgggtgttataatagctctaacttattattacgggattcaacacagcactaccaacacagctggccttgacgagactgggagcatcaaactacgattgctagctcaattaaaactgcagatagacaaatgtgccctcatactagaaaactatgtagcgctaatctgcaatgaaaatctaactgaggacccaatgggttgttcgttaacctaacaaccctgattgctacatatctaatataacagcatttaatatctactatagaacatatgcactatgacaatcttatactatgcaatcaatgatgatcttctatctttgcaaagcgttgcacagatgtttgaggcttagataaatacatcacataataaaaaggtttatagccttcccttggataatagttatgttatgatgaaaaaacctaaag

SEQ ID NO: 33253 - DNA, 391 bp, Homo Sapiens
tacttttaaaacaatgttcgcttttactaaagattcagaaatacaaaggtaccaaaccaaaagaaaggcttttgttcacccaggcatcaaggccacaggtgagacctggaagctgctggggagcatctcacactgtgccacagtcttctggagggccaagtagctattggagaagaagatgctttggcttttggtccaatggttaattttgcaggaaaaacaaaagggtgggaaagctgtgttaaatcacccatagatgtgatgttaggagaaagtcaggcagcataggggttaacagtacaaaatccaagtcaatcaacccagacttgaatcctggctccaccagtagccattctgggcccctgttctttcatctgcagatgggacaaag

SEQ ID NO: 33254 - DNA, 395 bp, Homo Sapiens
tatgaattcactctttcatccattttatttcagttattgtatttttcactaaaattcccacttctttatatcttctgttttcttgccaagactttctatatttccatctgtttcaagagtagctttacttcttggactattttaataataggggctttataaagttttatttattttttaactgtagccttaacaaatttccacaaacttagcagcttaaaataacagccttttattatctcacagtgtctacgggttagaagtttgagtgtaatgtaactcaccagaattctctgcttagggtctcaaaaggtctaagtcaaggtgtcagctgacctggggtcttatgtggatttcctttggggagaatacacttacaggctcattcaagtctg

SEQ ID NO: 33255 - DNA, 433 bp, Homo Sapiens
gtaaattttatcctttttggtatatattgcaagtttatccaattaaaaataggagatttatcagactacatctcacaagtttaaatattctggagtccaataatataatttaaaaattaaatgttttacatagtttgtgcctttattatttaattggctccatttctacaaggatcagtttcaatgtcctcctctttacaacctttgcttttaagaattggaaattgataaagcttcacaagctaaagctttttggcatcacaattgctaaatacttttatttaagttcagtttcatagtacttcttcaagtgctcaaacacatctaaatctaattgttgatgaccagcacagagaaaaactgcatagccaccagcataatttagaatatgtttgtactgaaagccagcttcatctcaaaaatgcactacttt

SEQ ID NO: 33256 - DNA, 400 bp, Homo Sapiens
agcggccgcgagtgccggcagctggcactgcccgcaccgggcaggcaccgggcgggaagagagagcgccctgcggctgccagctggctccaaggccgggtccagagccgggcgggacggccgcgacgggcgcattcgggtgggggctcatcaccgcccagccggcgtggggagccgggccctcttgagatgaggcgtgcgggagggtcctgagcactttagctcgcctaggatttgagctggggtgtgtgtctgctcccagctcaagtccctccgagtgccagagaggaaggcagggagaagcggagcacccctctttgggccaaggccaaggaggactgtggtgagcagtatggcttgtgaccgggtggggtctcccaggtgtagggggcgcccagaag

SEQ ID NO: 33257 - DNA, 358 bp, Homo Sapiens
ctatttctgtgaagaatgttattggtattttgatagggactatattgaatctgtagatcactttgggtagtgtggacatcttaacaatattgactcttctaatcaatgaacacaacattttttcctctttttggtgtcctcttcaatttttttcattgatgtattatagtttttgttattgagatttttcacttctttggttaattcttaggtatttaattttttttggggctattggaaataggattgctttttaatttctttttagattgttcactgttgtcatataaaaatgttactgattttcaaatgttgattttatatccttcatctttactgaatttatcatttctaatag

SEQ ID NO: 33258 - DNA, 443 bp, Homo Sapiens
actgcttgagaaatttttttattgtatttgttttcaagtgattctggtaaccaaagtattacagttacagggcaagcaaacatttaagccaaaaaacaatcatatggcaaaggcctctgctttaatctactacatgagaggtcattgttactcatttccaaagctgttatagacttggaatgtggaattggagaggcttttcgaatgtagttagtggtgttcacaaaagaaccactgcctttcaacttggaccctaagaatgaacttatcacttccatttagaacttatataagcaaaaatatctgaaggcaaatatcaagccatgtttccacactcccaaagtatctcatttgtcatgagccatgagtgtcactttttaaactccttccctgaatgcccaatcaacaggaaagaagctgcagagcaagggcagaagagtcta

SEQ ID NO: 33259 - DNA, 438 bp, Homo Sapiens
gggcataaaatttatttaatttcaactgaacaaaacccagactgtaggcaactgcagtaagtggaacagtatttgactatcgcaatgaagtctgtcatgaaaactatgagtacgtggagccattttgaaatccgcaaaatcgagaagttctgccgccagtatagggtcacttggtgaaaggcaagggatgtcctccaggatacactgttctaataagatgcagggaagagggggatttcatcttccaaagagttgtcactgggaatttacaaaggcccctggaaataagctcagggtatccactaaaggaggtggagccccctttcacacacttttccttcctcttccttccttcctgcacgccctatttccctcacttccagtctcaggttctttaaaaaacataaaattatataaataagtagaatagtattcttg

SEQ ID NO: 33260 - DNA, 388 bp, Homo Sapiens
ccttttaaattaaacaaccagttttattagtgcatgcactgaactaaactgaaagaaaataaacttatgccaaaaatttctgtgcaaaatttacataaaaggtacaaaaatatgtacagacttaatttgttatatacagaaaagaagccctgaagttttcatccattaatgaaaatgtcattaacacttgtaacaatgtaacaaaaaatcatatagcacgtaatttgttaacacaagaactccattatccaaagaaccagcaaaatttgatccaaacttacaaggtgaaaaatctaaatctatgattctgttgtcatcatgaaaacatccattttaaaactctgttgggcatgtcccttaggaatctatcctaaggttttatgcactg

SEQ ID NO: 33261 - DNA, 354 bp, Homo Sapiens
ggcataaaataaaatcatgttcatttatttttttctgcatcttaaaattagaaggcataaaattaaatatgttgaatgtaataaattcatccatacaagtgcaagtctccagatataatgcattttatggcagatttattattttaaaaatgtaccagtaaatcaaaaaagagggagtatgtccatttaacttttattgaagtgtatgtaggagggcttcagaaatccaatgtgagcatgaagatatggccaaacataaaatctatcaaattcagtgaaaagttgctgactttaaatagtagttgtaagaatgaccaatatatattctttgttaacaacccctcactctatagt

SEQ ID NO: 33262 - DNA, 524 bp, Homo Sapiens
gaaaggcctaagccactgtgcctggctcacggttaacttatttttaatgtcctcattcgacaaaataaaaattagcaacctatgtctttcttggggaaggagtgggagacaaagattcctccagtctacaaaatctcaaagtttgggtattgacccttgggacacagagagcaatgaaggtattaataacatttaccttgctgagcagtaagtcctctagaagccaagtcaagcagctgccagctactcagccccatgggacagcttgaaataccctagttacctaaaatatctaccatataattaaatctgattattttaacaatgaagacagcattactcaaagttaaactggggaccacctgcaacacagtaaactggctacgaataaagatttctaccgaatctttttgctggggacaggtccaaaaatctgcatttaagccaattctgctaggcacatggctcatgcctgtatcccagcacttatggagccaaggtggagactgctgagccccagagtt

SEQ ID NO: 33263 - DNA, 418 bp, Homo Sapiens
atctaaagttcagtgtctcccaaagcaccttcaggagtcaggctctctgagtgaggctgcagaactaggaatgactgaggtaagctgtgttgtggctttgcctgctgtgagtactgactgtccactcacgttacatgcagtaattggacatatgccttgaagtgaactccgctgctggagaagaaaatgaacactgtctttatggtgtgtttcgagtcttccagactgcgttagatgaggttagaatcgccttccccagcggttctcatggtgtggacctcagaatcctgcgtgtccctcagaccatgtcaccaagtccacaggttgaaactgttttcacgatgctaagacaccaccggtctgtggcactgtgttagcgtttgctcagatagagcaaaaaccatggtgggtaaaactg

SEQ ID NO: 33264 - DNA, 437 bp, Homo Sapiens
ttattgggtggcctttttaaacccaacattttttaaaaaggcacctggggggggagtttaatcagggcttgaaaaagggggaggcccatggtcaatccggaggagggtaccggggtggcatgaagggtgctttacatgtagtaccaagcccagaatccaacagcttgggccacaccaacggccaggaagaactggagggtgggctttcttaacacaaccctaactggtcggaagggacaggtgctgtccttcaagggacctttggcttggtcaacaacggaaaaagggcatttacccatgtgttctttcccattgtggacacgggaacccattcttcaagggctctctgtgcacagtggagccgcgccgtgccactttattggatatatggtgttatactcaaaagccttgtgggctctcccacaagactctctttg

SEQ ID NO: 33265 - DNA, 373 bp, Homo Sapiens
cttgcatcagctatgtgattttatttgaagttctgtcttgggcaagagataccacacagggagagtgcaaagttgaaggtcttcagcaaaaatttggactgtaaacacagcttggcattatcagcattctgttaagttcaaagaagagatagttacaacaaatacagcttgctttatttctgaaacaaaactgtgcacatatttgtggccatactactaattaacctgtagattgttcctttcatctattcagcgtgtttttctgccccctgttacaacagtgttgggttacttttcccatatggactatatttaaacagttcccttataggcattagagagagaatggacaaatgattaagggactagagaa

SEQ ID NO: 33266 - DNA, 410 bp, Homo Sapiens
ttcctttggtgtcagaaacttgggcttccacattttcagtttatcttcatctctgaggagaaatatattttgagcaagtaaattaagactgaattatatattcatggaaccatcaacacttcatgggcaattatgttttacaaaaaattaaaaagtcatctagaaatatattttgataatccatggaaaggccatataataaatattttaggctttgcaggccatattatctctatggcagctcttcaactctactgttgcaactttatacacagaaacaagtggcaggccatatttggtcctcaggccatagtttgctgacccctgatgtgtggtaatccaaatttgaatccagatgcaagagatcagcctgcttataatcacatttcatctcctttatgagcctcagt

SEQ ID NO: 33267 - DNA, 395 bp, Homo Sapiens
cggctttgacattttattgagaaacatttttattttaaatgatagtacaaaaactgtatatataatatagatctgtataagtatatatacatacaaatgctcatacacacatatacacacaaacttgctcatcagaataaaaccctaaataaagaagtatatttaagtttttctaaaaatacgctgtacataaagctgtcagacaacctgaaaaactgaggacattgtgagaacagtctgggcgcatccccccacacacacacctgccgcagtacacacacaaatggccttgacagaaggagagcacatggggcaaggtcagggagagagctgctaccatcattgttgctagaacaagatgtctaaagccaactagaaagcacaggatatagaag

SEQ ID NO: 33268 - DNA, 480 bp, Homo Sapiens
ttctattcacaagtacagtttattactagactttaggcttgaatgattcatatatatagatatcagtttactacagaggacatgtacttttaacattttttgtttagaaaatattttacataaaaacacaaagcatttaccaacactccacaaccagtcttcagcaaagatttggctgaagataactttctacaaaacactccaagactgaatagaatgtagtattttacatactttagcttattgttgcagttaaaagctcccccttgtttgatggcttctgcatgtatctacaaagcagaagtcttaactggtgacctgttaaataacattgcctttttaagtgaacttgtccccagcccggaacctaagtagtcataatgaaataaagtaattgatatatgaggggcttttagtaagggctttttcaacctaataaaataataatttagtatctatcagtgcaatattcttttactg

SEQ ID NO: 33269 - DNA, 350 bp, Homo Sapiens
tagtttttacatccacagaaaacattttttacattacatacacaatattaggtattcacaattcttgttttatgacacatttacattattggtctacatatggtctctatatatccatcataaaataagcacccaaaatttcatcacccaacacaaaaagtagaatattgataataactaataaccacctagaaagtcttcctctagcctgtccatatgatctcaaacctgtttgcctcataaacttacctgctaccacttttacccacctgctctttcctaccctgattttcattctcaccacaaccctcctgttcagctattacctttaatccacaatctatatcttg

SEQ ID NO: 33270 - DNA, 409 bp, Homo Sapiens
ctttgccaacaataggattgtgaaggtcagattcttaatatacgtcaagccagcaaaaggttaatgtttacttagcttgccaccctcatttagattttgtccttagtccttagtatttcttgtttctttgccagtttgttgatgacttttaagaagatattatatttaatttagcagttttagttgttttgaatggtacagtgtgtctgggtaactaattcttcctcgttactggaaatggaggccctgaaacatcccctttctacatatggagtctgtgtgttctcttactctcctgcactgcttcatcctttctttttcatgtgtaaatgatttgcatgtacctgtgcttcccaaaacttcgatcattcaattatgtcatggccatcagcaaaatgtgcctgaagag

SEQ ID NO: 33271 - DNA, 421 bp, Homo Sapiens
tgccttccccatcaaattattttattaggttaattaaacagcttaaagatgattccttttgtgtggtacccttctagaaaatatttcaagtttttaagtgaacttccaatacataaaacaaaattactttagcatacacaaatttcagatcaaaatacaacactctgtttctgttttcttacagttataaaatccagtcaatacaaactacataaaaaagataaaacactttcactgatccttggtacaagagaacagcatgatggcaaaatgttccccaagcacaggtcctgggttcgtgagaagggaccaaccccacaatatactgaagcatgtaaacaaagtgcgtgctacttaatttaggttaacaaatcctttttgcatcagtattacttgtaaaccataaagcaacttttaaaaa

SEQ ID NO: 33272 - DNA, 420 bp, Homo Sapiens
ccttttcttaaccctatattatagtgtctggtaataacaacatatatagacaccacactatgtgtctggtaataatatagagaccacactatgtgcactatgtacaattataatccttatttttatacaggatagaactgaggcaagaaagagtaaataacttgctcaaggtcacatagaaggtaattgaacagagaatctaccccaaagctgtgagcttaattactctcaagctccggggtcaaagagatctggtgtccattcttatcacgtctccctttttgcggggatggtgcctgttaatttattcagcttcttcgacgcggtttccctttcaataagattgagataaagcatttttcgaaagatctagattgagataaagcattctttgaaagatctagcagtaaatgagagctg

SEQ ID NO: 33273 - DNA, 398 bp, Homo Sapiens
tcataaaacctacactctacaccctctgtaatccagtctctgtccccatcctgtctcgggaaccttcctcacgcaggaagccgatgacacccctcaggtcccagggacccgcgacccctccccttcggggcccccagcgctcctgcctgccctcctccctagacactgcgagcagtcctcccgagggcagtcctcccttgatgtcctcctccctctaagctggccactctttgacctgttagtgccacctggtgctcttggaggagctccaggccagcgactccagagcctcctggccatctcctgtggaagtcgagcccacatagtgtgttcccacacacattgtccacctcactaactggcaccaccatgcacccactgaattccccagaccaggc

SEQ ID NO: 33274 - DNA, 478 bp, Homo Sapiens
agtatatactacattatcataaaaataagaacgttttacaaactaaagcaaaagcaaccctaggaataaaatgcacaaataaaatatataaacatacatttagatatacgacgtacccttgtaatttatttagacaattaattctagtacaattttaattagtctgtgtattatctgtcatcatcttagtattttttatataacaaattttgtaaatcaaaaagtctcaatgtcattataaagtatcttggcagaggttgatctccaaggaataatttctctcccaaattatgccaatcagaatttcactctaccataattcttttaatcagtttcagaggaataataaatttcaaaattgttcaaggtacttcttttagttcaagtaccttttgacaggtgtaaaactgtagacagactgatacaaacatattctaattgactcaaaattatatgggacctattttaaaatctagat

SEQ ID NO: 33275 - DNA, 376 bp, Homo Sapiens
cccccatactagcaagatgtttatttaaaaacatttaaaaactgttttttaaaaaacattctagttaaaacgagataattcaatgttcaagctaataattctataccattttaagagtctgaatttacttttaagtaaaaaaaggcagagaaaaagagtgaaggatacagaattattttgattatgcactgctgttactattcccatgctaaagaccccttttgtttcaataaaaactatcaatatttactgagaatgacagctctgaatcaaaggcaagagaaagagacctgtaaatagtgctgttcatactagttgcccccagtagttcccaggcctcacttccaagctgccttaagtaatttttactttttga

SEQ ID NO: 33276 - DNA, 456 bp, Homo Sapiens
tttgtatgtatacattttttatctgaaaattgtttatcacattcacaaatgaaactatttgaagtaatattgctgcagtttccatggaaacagatatgtggttgacattggccaattagttgagcaattcattcctataacaatcaaaaaaagtttatttacattgcatatcaatattataaccatcaattttccctcaattctttaacaatgaaaagatcaaattctgacaaatgtaatttcagttatgaaactatgttatatgatggtgcatttaaattgaaataaaaattaattttgatactttacataaggttttcctcttctgaccccagactataatataaaatatttttttctggctagtggtatttgaactttatttaatttacatgatattttaaatttttaattgtttttttcatggtagatagtattagtacatataagtaccag

SEQ ID NO: 33277 - DNA, 437 bp, Homo Sapiens
gttttataattgtatttttgtgatttttctactcttattatatattttgtcatattgaacaccagtctcttagaaagttactcttttgtgttgctaatttttttgtttgttttctctataagcacaagtcctcatacaacagttttctgaagaatcaggagaattagtagatgcagagttatattataaccatagcaagctttgtcttttcataatttctattgatgtcttggctaaattttgatttgggtaattataggcttgttttcttaatatgcttcttgaaggttaaattgggtaacatgtttttcattttctgcattgactgcattttttttgagtgatctgcacacacaaatatagatgtaacttaggtgttggtataactaaatctttaaagtgttttgaagattagttggataaaaatggagttaaag

SEQ ID NO: 33278 - DNA, 460 bp, Homo Sapiens
gtctgccttttaaaaattactttgctggactataaaactaaaagaatgcaacacatatttggtataaatcaaatatgcaaatacaggataataaggaaaggattcactgtccaggtagatgaaggcaagccatcagcctcaacattctgtgtatttagttacaagtccagtacccaccctggagagaaaatccacaacacatgccctaacagcagctgacaatactgtcttcattcctcaaaggctgggaggaatctggtccaatatacagggccctggtataaacattctaaagaaagtctttctgattgagaagatgagtcttggattctcctggggggtgaagggagcaacttaaagtggtatccatcacaggagtccaaagacacagtggagaggcccagaggagttactgtctcagtctagagccttcactttgcatacaaaataagctgtgact

SEQ ID NO: 33279 - DNA, 451 bp, Homo Sapiens
agaacaacataataaaattaatttctaaatcaatattgaaattcatccagtttccatgtttcgcaattggttttaatttgcctctcataggcgttagaaaggctccacagcacctcccccagcctttttatactactcaagctttttattagccctaatgttgattgccttcccagggcatctactagtttgcgtataatttgtctaattaaatttaaagaagagatgtttcagggagcaccatttcatcatttcttcttacactccatgctgtggactttaatgaggacctaaaccccatcttaactcagccttagtttcagcacagatgaactatgcttgttaagacagtcttcagttgtcaggaaaaatagctttattaaggtcacggaatgcagagagtttgattaaagctaatcaaggaagaaagccaggctgtgacacggtgaat

SEQ ID NO: 33280 - DNA, 415 bp, Homo Sapiens
ttcttaaaaataattttttattgagagatttacataaaataagcatatgataccaaaaagaaccctagcttaacaaccctaacacaaaaaattttcatttattttgaccatgagtcagcaaacttttctgtaaagggccagactgtaaattattttgctttgcaggtctctgtcctaactactaaactctaccactgtaacacaaaagcagccatatacaaaacataaacaaatgagcatagctgggttgcaatcttataaaaacaggacacaggtcctcaatttggatctatcataaaaaactttaataacactaacttttgctcattaaaatgtttgcttagttggaggtcaaattcttagcatcagatgtaactccacaaaagtaagaaaggtattccatcacttcactact

SEQ ID NO: 33281 - DNA, 379 bp, Homo Sapiens
aacatccttgaagaagtcataatacatttaaaacatttgtctttgtaagtaaactgaaacctcctgccacctgtggctatagggaaaactcgagctgggtaggaccagaaccatatgagtggtagaaggagaaagatgcctgggcctgggctgaacttaggttgtggtctcagacctaggatccaggggccaagtttccaagcttgcccatcaggaaggtggagcggttaaaaactcatatgctaaatgccacccagtgaaggccaacagagacctcactgcccctgcttctgggcagcagctatagtgaccattggggccatcacaacgtttagacaggtttgtgcagcagcacattcctcccctgggcctttgactg

SEQ ID NO: 33282 - DNA, 400 bp, Homo Sapiens
acagaaagtggactggctaggccaggagtccttagcttcttagggggcaggagctgctttgtgctttctcagaatcagatatatatgtggactgaaacatttaaaaacagaatagccaagggtgctatacgtttaaaacttatatagatggggctacattgctctctattactaatttcccatgacaatacacgagagtgccatgtctttttaacttgttttgagcacagactaatcttgtttatgcatgttttttgatgagaataggctactcatgagaaatctgtaaacctaacactagtcccttgcatactctaaattgttgctagaatcttaaaattttagcaccagacggaccttagaaatcattaactttggtgctttgttctacaatacaagg

SEQ ID NO: 33283 - DNA, 353 bp, Homo Sapiens
cttcttttgacctgttaatgtaggagtgctctgggcctcggttcttaatcctctttcataccgccactcactcccgtcaccatcttgcccagtctcctagcttttaatagcatctctatgccaatgacccccagatttgtatctccagctccaacctctcggccaaaccccagatatgagcttttggctacttactcaacatctgcagttggatatctatggggcatcccaaatttaacatattcaaactgaactgatattctgccagagtcctcccatctcagcaaacgatgactccaccaggtcaaaaatcctggtgtcatcctggattcttctacttttctcatgttcta

SEQ ID NO: 33284 - DNA, 454 bp, Homo Sapiens
agcggccgcccgcgatctagaactagtccggacgcgtgggcggacgcgtgggcggacgcgtgggcggacgcgtgggtccccagcgaggccctggccattgcagtggctactgagtgggattcccagcaggataccatcaagtactacaccatgcacctggtaacaagttcacagtgtgaacctggaccctgagacccacccagggcttcgtagggtagaccctttaccaaattccgacaaggccctgggggctggtcctttgcctgtctggcccccagggattcacctcctctcaagtcactaacgtgctaaactctttccttgtctggcccggctacttgcagctctctctcctaggaacactgtgctggatggctggtttctcctttggtttcaggacagatgtcaccttcattgactgcccagctctcttattttctatgacagcagctgg

SEQ ID NO: 33285 - DNA, 409 bp, Homo Sapiens
taggatcaaaaatttattaaaaaccaattatatcaacaggcatcaagtctacagattcaggttacaccagaccatgaagtaaattctgtccccatccacaccatacttgccaggtcttctagactcctgagccatctccctatatcctcatccaaattcccagattacaggcttaggtttttggtttggttttcagtccaatggaggtgggggcagctatgtgttgatttttggcaccaccctgtggtcatacctaaatattgcaccttctactcaatcccacaaagggaaggaaacatgtatgtagagggcccagccgacttcaaatctcagctctacttcacagtcgaactgtgggcaagccaactaactggaggggccgtgattataaccatgtaaagatgtgtat

SEQ ID NO: 33286 - DNA, 421 bp, Homo Sapiens
aaagcaattgtaggctagttgcgacatatctgcctttattttaagcaccagtacttataaaggacttgattttgatttgcaacatgtatatatgtataataaatcaagaaccagattccatattattgctgctaaaaccaaaaattattgatgaatggcaaaaaagcaaaatagccagaatgaccttaacatctcagtttaataaagaacccaagactgcgaaatgtctttgatattatgtctattcatggtcaacagctactcatcacattcctctctgctattcactataggtggaaggcaccagtcctgatatgaggaggttaattgtgattttaacaatgttctcccaccaggtatgtacagtttgttccctcatcactcctataggcctcaatataagtttcacgtcattagtgag

SEQ ID NO: 33287 - DNA, 406 bp, Homo Sapiens
gaaagggggcgatgctgatatacattcatcaccaaactttcctgaatcccatgctaacgagcactagggagggaatgaggcatttgccaaggctgtctgcttgggcgactgctgcacgaaagcaggctgaggccccagtgcccaatctgagccttagaaccggccctcaggagggctcagccccataccactaggggggctcctgcaaacctggtcccttggcctgaggcagggatttcacctccttttgcaagagccgctgcaaggctgtggatgaagctttctggtcacaaagccccttctcctggggctgctgtgggagtagctcttggcacacacttccacccatagacttcacatcccagctgacgagggcacggtcctgagagctggcagcaaagatggg

SEQ ID NO: 33288 - DNA, 400 bp, Homo Sapiens
tttactccttcggctgtgaatcaagagaaagaagtttagtcaacaactgcctttaaaattctttaaagtcttcaattccaaaagtagtaacactcatgcacaacaattattagtaacctagaatatcaagttattttgatgttatcataacacaatgaaagcatcaagaaataaaatttacaaacattcaagttaagaataaaacaaaaataatgggctaaatattgctaaaccttaaaaacaaaaccatgtcactgttagtattttaaaaggttacaactcttcagaatatttgtaaatctacttctagatgtactacacatgatctgcttttaaattgctacgtcagtacaccaaggagtctagtgatctacatgactacatgaaaagcttgaattat

SEQ ID NO: 33289 - DNA, 413 bp, Homo Sapiens
ctcttttaaaaacttttattacgcattgctaaataacattgcatgatgtattgcacacatcatgtggtaaacagcactccacagtaatccatacaatagctcgtacaatgaccatcaaaatagtttgaaaaccgttatagttttcatccgagtgagtgtctttatattcttccatgcaatctgatttcataattaaaattactcttccattctacaacaaccaaccgaaaataattttttataaaagcccaaccacaacaaaaggtcattgggacattacgaaaagtcggaaattagactccaaaatatcacaaggtgtccgtcttttgaaagacttgtccctaaaatttgtggatctgacacttgggttgcttttaccgccagcagcatgtgacactgtacttactgagaag

SEQ ID NO: 33290 - DNA, 356 bp, Homo Sapiens
gattgcaaagcacatctgtagaaactttcaaacaatactaaaaagtatgtcatagaataactattcattatagcactaaggcattgttattgctgtctgttaaaactgctctctctaatgagactttcatccttgagggcatcttttgatcactctggtattcatcactgcacctaaaaaagtgcagctacaagctaggcatgaaggaatgcttttttggcttaaaaaatataataagtatggagtcaaagaatgctgcagaaataatacagaaaggtcccctgtatcctttacccagttttccctaatggttacattttatatagctatagtacaatatcaaagtcaggacactg

SEQ ID NO: 33291 - DNA, 447 bp, Homo Sapiens
ttcagatggagtctcgctctgtcgtccaaagtgctgggattacaggcttgagccaccgcgactggcctgataggaggtgtttaaaaggagcttcagaagaggtcagtgctctacactgaacgaaggatggagggtaatggtaatgcctccacattaaaatgacacaaatgctgctgtcttactgaagtttggtactttctgtgggatagatacttttcactttgttctgtggctttggtaaatttcagaagtctgaaatgattgattttagtggctttgcaagtgttttcatcattttgcagaggagacttggtttcttgtggtttgcattcatcagtgtcagaagctgatctctctattcaatcttgcagttttaagtaatgcattgaacagtcacataacagaacgctgagcaggagaactaaatttctagtgtaatcagaatgg

SEQ ID NO: 33292 - DNA, 434 bp, Homo Sapiens
acattccttttttctgtgtccaaattgcccacaattgaaacaatggcccaagaaatggggcatattctttcctactttcaatccagccatagcctgagctaaaagattagccttatgtaagttacctccaatgccatcgcaagccttaatacattcagctaactgaaccttccctgtcaggggtctaatagcagtttgacactgcattaccattattgtatgtaagaagctgtattaaaacatcctgagcagaatgtttgctttcactttgtgccattgttaccctggtccttccgagtgctcagctttcctgctgagcttctttcagtcgtcctcgggtgtcctctgatgatgcatcctctttcacacactctagtgttccttcactggggtgttcgttgcctcatattgggcgccaggaatgttggggtgat

SEQ ID NO: 33293 - DNA, 385 bp, Homo Sapiens
ttttaataatctcatttttgccctcatgtttctggactttaagtagaggggggcaaaaatccaccacaaaaaaaccccggtggtgcccaaaaagtacaatgatcataccgccgccccagggtggcccataaccaaagcactgttcgagtgtggaactgtgtggccccacgggaatgcagtaaacaaactggtgtgggctccacatgttggaaaactcccacaacttgccacatgcatgacccctttgtgtgggaaaggcgccgcccaaatgggtgtatcacaaaaagctccgagcctgtggggatgactctaaattggagagggcgcgagagagcgctcttgtggcgagagagccctcttttgcgagggagatgtgtgagggcgc

SEQ ID NO: 33294 - DNA, 401 bp, Homo Sapiens
cattcattatgagcatatttcccattatgttgttaccacagttacaagcagtcgtaaaattcttatctgctaattccaacatctcagtcatctacagattggtttctattgactatctttttcacattttcgaataggtcgcattttcctggttcttcatatgttaaataattttggcctgcatcctggacattgttgagtgttatgcttaggaggttctagattccctcatattcctcaggagactgtaaattactttgtcttcacgggcaataataagctgactggattcactttaagtcctgtttcttgagcagcaatcaaatctcagttcagctctttagttcttagccaggctgcttggtatctgtccttttcatgcatggttcaaggctgagcca

SEQ ID NO: 33295 - DNA, 420 bp, Homo Sapiens
taacactaatttccaacatttattatcatactgtagagcttataaattaacatataatgatcattgttaaaattactgtcagacaatgtgtaagcactttacataagctaatttaatcctcactaaagctctgcaagggtatttacaaatgaagtctactttacgaatgaagaaactgaggctcaaaagcttcagtgtgccgctcatctcagctttctctcccatcctccatactcacatatccaactatctgctagacatcacctgaacacaatttgtctagaagtgatgcatcttctaccccaaagttgtctctcctcatgtaactcttacctcttgaacagcactgcaatccagacccctggggccagaaacttgagtcattgttcactgcttttgcttcaacatttcccatatgca

SEQ ID NO: 33296 - DNA, 497 bp, Homo Sapiens
cttaatcacttcattttttttctgctaccacaaaatggtacaggctcatcttgcatattccctggcccagtcatgcattcaactagagaatccctagttcctcttactggagaataatagtatttggaaacaaatatttgaatgctaggcttacttttctgtggtgccattgcccctatgctttctgaacatgtacagataagaaacatatgcatgtgtactgactcatacatatatctctatttctatatctgtatgcatttatgttaaataatttgagttcataatgatactgtcaatcagcacaatattcattgcagccttccccttttccttatttttatatttctatttctgaccatgggaaacctgactctcattatctatcacacattcatttattccttcaatcctattatacacataaaatagttactgaattactaatccatactcttatagatttaccaactagagtatggtgtttgtatacagga

SEQ ID NO: 33297 - DNA, 549 bp, Homo Sapiens
ttttttgactataggagtccactttataccacactcaagctgttgcataacagcataacacatgtatatgcatcttgttacctttctaacacctgaacaagtcaaaattccgtgacacatctggtcctaagagattgtaggcatgtagatgaaactaggtgaagccacttcttacacctcatgatgaggaaccattcagattcaggggctaagacctgggctcacaacatttcccaaagaattccagctctaggtagcttccctggtctgggtggccattccctgggaccagctgtctgagaggaaattggaactaggcaagaagtgcctctcagtccctaagatgccttctgtccattaggaatcaatgtcatcaacatgtttgtgcaagaattgcagcaaaatcctgcatcagtggacgtattttaggtggaggcctgccacgtcactggattcagattattactgcaaatcccagcctgcattcttccttctgttgtggtgcaaatgccagcagctacagagccatttatagctggagagcagctc

SEQ ID NO: 33298 - DNA, 419 bp, Homo Sapiens
agtttataaagaagcaatgtttaattgactcagttctgcaggctgtacaggaagcatggcgggggaggcctcaggaatcttacagtcatggtagaaggcaaaggggaagcaagcacatcttcacatagtgacaggagaaacagcatgtgaaggggaatgtgccacacacttttaaaccatcagatcttgtgagaactcactatcacgagagcagcaaggggaaatttgctcccatgatccaatcacctcctaccaggtcccctcccaacactgggaattacaattcaacatgagatttggatgggggtacagagccaaaccatatcattctccccagcctctcccaaatctcatattattctcacatgtcaagacacaatcatgccttcccaacagtcccccaaagtcttaactccttc
